United States Patent Application Publication US 2008/0050393 A1 - sequence listing, part 8

SEQ ID NO: 28192 - DNA, 672 bp, Homo sapiens
  misc_feature (1)...(672): n = a,t,c or g
gaaaatctccttcagttctcccagtctctgaaatgtntttgtttntaaatttcctgtgtcagagctgtcagtggggacctcctaatttttgnagatggttaaccttggcccatacttccatttatagggcaactganatttgaacatcctgctcaggcttcctcttaaccaagtcctgtgtcctcacatgatgcattggttatacctgactgcattcattttctgatgctgctataacaaatcaccataaatttcatggcctaaaacatcacaaatgcattttcttaaaggnnnnnnnnnnnnnnnnnnnnnnnnnnnnnnnnnnnnnnnnnnnnnnnnnnnnnnnnnnnnnnnnnnnnnnnnnnnnnnnnnnnnnnnnnnnnnnnnnnnnnnnnnnnnnnnnnnnnnnnnnnnnnnnnnnnnnnnnnnnnnnnnntgcacctggctaacttttaaattttttgtanagaccagggcttntatnttgcccagcttgtctnaaactnatggnttnaaaaaatcctccanttggcntccanagtgtngggttanggntgtgnccntacattgttctnttgaagtctttatntttnagcttttggggtttaattggtaaaataangngcctagggctgggtccttttgaggttcaaganantttttttttttttt

SEQ ID NO: 28193 - DNA, 676 bp, Homo sapiens
  misc_feature (1)...(676): n = a,t,c or g
gagacagcaccagagactcttttcctttgtgtttcagtctcagtaactgaggagtttggcagccttgaattttcttgacttctgctttcaatatctgtaccgagctcatgtctttcctctagtcatctaggtgaacagactgtcacttgggaaaggtttggggcctagaacttgagatctcttacttgactctatcagtgattctttcagcccagcactccatgatatctttgatatctttggtgatatatgagagagcttggttgcccttgtagacattaaccccaaaaggttaaagtgtaaatacttggcagacttgttacctagtaacagatttaattattaaatcagcattggttttggagccagaggatgtggattaagaccctacttccnnnnnnnnnnnnnnnnnnnnnnnnnnnnnnnnnnnnnnnnnnnnnnnnnnnnnnnnnnnnnnnnnnnnnnnnnnnnnnnnnnnnnnnnnnnnnnnnnnnnnnncattatttccggtttactaaaatgcaaaaaaaaaaagtttcttggcctggtggaaggcccctggggccaaattattcngnggttngcccgnaaatgcntaacccggngggaaaattgnnngngctgaanacccnntgnntcacctgnganaaanggntccctttaaaaaaaaaaaaaa

SEQ ID NO: 28194 - DNA, 684 bp, Homo sapiens
  misc_feature (1)...(684): n = a,t,c or g
nnnnnnnnnnnnnnnnnnnnnnnnnnnnnnnnnnnnnnnnnnnnnnnnnnnnnnnnnnnnnnnnnnnnnnnnnnnnnnnnnnnnnnnnnnnnnnnnnnnnnnnnnnnnnnnnnnnnnnnnnnnnnnnnnnnnnnnnnnnnnnnnnnnnnnnnnnnnnnnnnnnnnnnnnnnnnnnnnnnnnnnnnnnnnnngatgcagggcaccaagtcctgagaatgtgcaaagcagcaaggccctgggcccagcccatgaaacaatttttttcctcttagatctctaggccagtgatgggagggnnnnnnnnnnnnnnnnnnnnnnnnnnnnnnnnnnnnnnnnnnnnnnnnnnnnnnnnnnnnnnnnnnnnnnnnnnnnnnnnnnnnnnnnnnnnnnnnnnnnnnnnnnnnnnnnnnnnnnnnnnnnnnnnnnnnnnnnnnnnnnnntagctgcgaagttttggaacttatgctctgcttcccttttaaatataagtncanttggaaacnnnatcttnggaaatgnntaaaantnaaggctaaaaaaaccntaantacctttgaaaantcgttgntaaaaaatnttttacanggangcnnaataagcttttcangtnaaagttcccagattttaaggaagggncaaatgcncnagcatttgnacanatncangantacttattcantccaa

SEQ ID NO: 28195 - DNA, 561 bp, Homo sapiens
  misc_feature (1)...(561): n = a,t,c or g
ggaaaatgtcctcattactgggcaccaaggtgttttaaattcagagtctaatcaaaacagctcatggggttctgtccatccagctaggacgcttcagacataccagtgggcctaacctttttcacaaggagctctggcctggccaacaagaatcacctttggtgcttcagtgcagtgtcaccatcacctgtttgaaatgcagccaggtaacatgtaccattttatttgctttcagtatcacagtctatcttctaataagaaacctaggcctctnnnnnnnnnnnnnnnnnnnnnnnnnnnnnnnnnnnnnnnnnnnnnnnnnnnnnnnnnnnnnnnnnnnnnnnnnnnnnnnnnnnnnnnnnnnnnnnnnnnnnnnnnnnnnnnnnnnnnnnnnnnnnnnnnnnnnnnnnnnnnnnnnnnnnnnnnnnnnnctctaatcccaggtctagggaggctgangcaggagaatcacttaaaacccggaggccgaagtncaatagcttgantantccantgattnaacctggcacaaggtgaactccntttnaaaaaaaaaaaaaa

SEQ ID NO: 28196 - DNA, 617 bp, Homo sapiens
  misc_feature (1)...(617): n = a,t,c or g
gttttcttgtatatggatatccaattgtttcacacaatttttttgaaaagaatatccnnnnnnnnnnnnnnnnnnnnnnnnnnnnnnnnnnnnnnnnnnnnnnnnnnnnnnnnnnnnnnnnnnnnnnnnnnnnnnnnnnnnnnnnnnnnnnnnnnnnnnnnnnnnnnnnnnnnnnnnnnnnnnnnnnnnnnnnnnnnnnnnnnnnnnnnnnnnnnnnnnnnnnnnnnnnnnnnnnnnnnnnnnnnnnnnnnnnnnnnnnnnnnnnnnnnnnnnnnnnnnnnnnnnnnnnnnngnnccactgcactcacctgggtgaaagactngattctgctaaaaaaaaannttttttattntnttantattaaannagnttttttttgcgngntatttttcntttnggggnnatttttgncnnnngntttaaaanttgngtgnaaannnttttnttttttnttntttnttnnttnnnnnnnnnnnnnnnnnnnnnnnnnnnnnnnnnnnnnnnnnnnnnnnnnnnnnnnnnnnnnnnnnnnnnnnnnnnnnnnnnnnnnnnnnnnnnnnnnnnnnnnnnnnnnnnnnnnnnnnnnnnnnnnnnnnnnnnnnnnnnnnnnnnnnnn

SEQ ID NO: 28197 - DNA, 545 bp, Homo sapiens
  misc_feature (1)...(545): n = a,t,c or g
gctgaactgtcttcagacacttggtagtatttcttgatcccgcttagtgnggctatctgtgggttttgcttactcccagcgggtttgatcacaggtgctgttccaagccctgggggagaggaggtgggtactgtaggctatgtgatacatgacttattacctgtctgcaagcagaaacacctacatccaaaccgattggccccagggcttgggataagagatataggtctgtatttcttggttcaagttggcctcttcctactaaactgtagggccttggactatgtcctagtcaatatctttgtgtttccttagaggcctcatgattaactggcactgtgagagtaaatncccagtgagactgcttggtgaatggataatagtagctaacatttatnaagctctcactgtgtgtnangctgtgttctaaaagctttacttattttcgctcatttngntttnactatccccttngaaagntnatnttnanccttttntanaananggaaaaccnngcttttttgtnaaaaatttcctgggntatg

SEQ ID NO: 28198 - DNA, 551 bp, Homo sapiens
  misc_feature (1)...(551): n = a,t,c or g
gtctagttgttggttgttcatagttcatcaaataacnggaatataatgcntctactggtgttaccgaatgtgccaaagggccccatccccttgtactcttgagcgtgcctttcagaggcgcaggatgcccctcgtgagctctgggagtaggcacaaatgcccattccgttgccggtgtcttcagtagggaagcagggaaaagggaaattgagaacatatttacacagccagaggactccgagtatatgactagaccactaagaacaatgcagactgaaaacatggttatagtttttcacactaaacgtagtaaccgtagtaaccatagtaacactaccagtaactgagtgaaggctgttggtcacttggcttgtgaaaccgagcattaacagttncagaaatgagcttactaataanttttatatattgggtccccttaatgntttatgnnggnttatctcanattttgnactttgtcannnttggntttatangggcncnntggaaatttntnnaccngngaaantttaaagggcnaaaattnccctttt

SEQ ID NO: 28199 - DNA, 511 bp, Homo sapiens
  misc_feature (1)...(511): n = a,t,c or g
gcttttttaaaactggtttgctgnttttaggacactgacttttaatatacactctacaatcagcctgtaatttcttcaaaaaaaggggaaaagagttaagattttgcttgtaattgcgttgaaactttagatcaacttgggaaggattgccatggtgatggtttttaaatgttccacagattcttttacacatcaagaggtggagcttatttttcctctgctagcatttgagctgtacttggtgatacttataatgaatagaatgtggcaaaaatgatggaatgtgactcccaagagcagatcataaaagacacagctagtcctgtgtctttactctctcctggatctcttgcccttgnggagcccatctaccattccatgangactctttaagcancttgtggagagtccnntgcaannntntnggctttggcacantcancantaacttcttggnnagttttgatccnctngaaggtntctccantccagtnagcttntanataatgcc

SEQ ID NO: 28200 - DNA, 514 bp, Homo sapiens
  misc_feature (1)...(514): n = a,t,c or g
gnnnnnnnnnnnnnnnnnnnnnnnnnnnnnnnnnnnnnnnnnnnnnnnnnnnnnnnnnnnnnnnnnnnnnnnnnnnnnnnnnnnnnnnnnnnnnnnnnnnnnnnnnnnnnnnnnnnnnnnnnnnnnnnnnnnnnnnnnnnnnnnnnnnnccaggacgacgaggagaagttggtatctttttgttagctccanagtttgtgctggtgaaagaaggttaggatgtagaaaagggatttagagacatacagtggctgctcttcagtattcttcaagggtccaagtgaagaactggaattttttcaatgacatgcaacagttgacctgtgtttcaggaagtatagccttgagctgagtctcagccatgtgggaccctcggaagcagctacagcttcttantataagtcgagcgtcccaactccgaaaacccaaattttggngcattcaganttccganttgggatgccanccantcgtatattgaaancatttgncccttggncaaggggggnatcgg

SEQ ID NO: 28201 - DNA, 519 bp, Homo sapiens
  misc_feature (1)...(519): n = a,t,c or g
nnnnnnnnnnnnnnnnnnnnnnnnnnnnnnnnnnnnnnnnnnnnnnnnnnnnnnnnnnnnnnnnnnnnnnnnnnnnnnnnnnnnnnnnnnnnnnnnnnnnnnnnnnnnnnnnnnnnctcacacacacacaaaaaagtatgtgacagcaaacccaatgtgtattgcccttgagtggggataaaccaatggagcaaaatacatgcgtgtgcaggttcaaagttggtgctcaataattgctcantcaacaaatgaacacccctcacaaggaaaaaaatgagggaactgggaagccaaatgcctttcatatgacccccattctaggtaccaggcacccacctagggcttccacaatacacgcctcccgtgtataagcctccacagcgaccacgtgctggaancaatgtngtggacacaacgccgcaacactggccagatttccaagatctgacncancttggggcangcctgtgggggtatggnaaaatcaggntcagaccccaatacctcccctgccatggg

SEQ ID NO: 28202 - DNA, 525 bp, Homo sapiens
  misc_feature (1)...(525): n = a,t,c or g
gaaaaactacaagcaaaatttctctgagaatccagattgaaaaggcccactgaaggcccatctaaataattttaaaacactccaagttatatcactgtgaaattaagagcaacaaaaggagaaatctcaacatttccagagaaaaacagctcacatgaaacaacaggaaataagacatgttccanacttcttgatgctagaaacttagactgaggaaaatgatttgcatcctaaaatctacacccatcagaccatcagtcaagtgcacttaaagtaatgacacattcagatattcaaaagcttaaaaaagccctcaataccttccttaggaagctacttggcaatgtgttccaccaaaatgagggagtaaatcaaaaggggaagacatagntccagatgaagggaatcccaagatgctantgaagggaaantccnccngntacagggatgcaccannccaangnnnaagcantcacccaatttgaacgggactgaaagnccaggatgtannccatgaaagnattt

SEQ ID NO: 28203 - DNA, 540 bp, Homo sapiens
  misc_feature (1)...(540): n = a,t,c or g
ggggggctgtgccgagaatgaggtagctggggtctgtttgcagggatggcgccggagcatggtggacttgcctggcttaggggctgcaggtccctgtgcagggcactggacaagccaagccaaggaatttctccactctccgtttattctgcttggactgcaaaattcagcctcagagggtcccatgacccctgtgatctggcctcctgcttctgacacttggatggggcacttgggcgtctgtgagaggagagaacagccccagatgagaactggtcactgtggattctgacccacagattgaggtcagggagaccaggttcctgattgggtggggacgtgtgtctgggagacccttgggaggacaggggccagcagggtgagaaggagaggctggaatggcagagagagcctggcctgagagcagcgaggatggggtcacatctgggcacangtgacatcatganggtgccctgactttgggaaagggccttancctgatgtnatcccttggggatctntntatgactanaangctga

SEQ ID NO: 28204 - DNA, 529 bp, Homo sapiens
  misc_feature (1)...(529): n = a,t,c or g
gatggaacatttttttttaatattgaagagtgaggaatctgttataccttgacttttaaatacttgttacattgcctctctgttctctgataatccatgaagttgtaaatggttttgactgagtgagatacatgcaggagagtttcaggatagaccgggggttgtgtttctgtttcagattgtcatcttgaaacaaaaatggtggcaaataaaatgttttcaagtggatgtgtttagtcgtgatttttaatgggtttttgancantgntcctaactgcataccggttttgtcctanaaaggatanaactgaanacaaatactgantttttccttcatctaatacatttggnaattacgtcttgccttgtgaaagcattaccattgttatttaaattttgcattgctcttttaaganaacgttcaacttgttgccngtttaactcntccctcctgnngctcctgtgtgcgtcctcacggacaaggggnatgncctaaactcantancaccantancaatttgggattttt

SEQ ID NO: 28205 - DNA, 533 bp, Homo sapiens
  misc_feature (1)...(533): n = a,t,c or g
gatgaaagatgatttcttcattaaaatcgaaacatggcacaaaccagacttgggaacattataaaatgtacatggtttagatccaaacacatggaaaactgttgaaattgtccatatagatattgcacatagaagtcaagttgaaccagcagactacaaagctgatgaagacccagcattattccagtcagtcaagaccaattagaggccctttgggacccanctggaagaaggagctggcaaacagccctgactgtccccagatgtgtgcctataagctggtgaccatcanattcaantggtggggactgcaanncaaagtanaaaacttcattcaaaagcantaaaaacggctatttacaancttccatcgccagcttttttgttggattgacaantggtcnatctcacgatggaagacattangagaattggaagacgagactcacaaagaactacatacaatgcggtatgaggggttccgttcgaaggcacntcgggtgctgatgtcgagatgagtcccctgtagggcc

SEQ ID NO: 28206 - DNA, 531 bp, Homo sapiens
  misc_feature (1)...(531): n = a,t,c or g
gagttaatgaggctttcctgtcgatcagctggccttgtgaaaagctttaaagtgcctcagctataatagccaagtcaagtcaactttttgtataatagctattccatttgtttgtattttaaatctagaaatttgatacgcagagattctccccccaaaaagctgaaagggccagactttctgctgctgctggagactgtgtgggagtgaggaggctgtcctagcagcccagctgtatagctgcaagctgctagtgttgggcacatcaggagttagtcctgctcatggtttattgagagccgggggcccagctggggacaggccttctcatcttgacagggtctcaaccccattgtagagcatttgaggtgaagagcgcctcccnnnnnnnnnnnnnnnnnnnnnnnnnnnnnnnnnnnnnnnnnnnnnnnnnnnnnnnnnnnnnnnnnnnnnnnnnnnnnnnnnnnnnnnnnnnnnnnnnnnnnnnnnnnnnnnnnnnnnnnnnnnnnnnnnnnnnnnnnnnnnnnnnnn

SEQ ID NO: 28207 - DNA, 543 bp, Homo sapiens
  misc_feature (1)...(543): n = a,t,c or g
ggcaacaccacctttcagtctccagcctcttaaccagcccagggctgagtgttgtttatagtattaatatgtttcnnnnnnnnnnnnnnnnnnnnnnnnnnnnnnnnnnnnnnnnnnnnnnnnnnnnnnnnnnnnnnnnnnnnnnnnnnnnnnnnnnnnnnnnnnnnnnnnnnnnnnnnnnnnnnnnnnnnnnnnnnnnnnnnnnnnnnnnnnnnnnnnnnnnnnnnnnnnnnnnnnnnnnnnnnnnnnnnnnnnnnnnnnnnnnnnnnnnnnnnnnnnnnnnnnnnnnnnnnnnnnnnnnnnnnnnnnnnnnnnnnnnnnnnnnnnnnnnnnnnnnnnnnnnnnnnnnnnnnnnnnnnnnnnnnnnanncanacaaagtattaatatgttccccttgatcannnnnnnnnnnnnnnnnnnnnnnnnnnnnnnnnnnnnnnnnnnnnnnnnnnnnnnnnnnnnnnnnnnnnnnnnnnnnnnnnnnnnnnnntggnactatcaaaaccctgcctgtactaaaaatacagaaattggngnggctt

SEQ ID NO: 28208 - DNA, 531 bp, Homo sapiens
  misc_feature (1)...(531): n = a,t,c or g
gnnnnnnnnnnnnnnnnnnnnnnnnnnnnnnnnnnnnnnnnnnnnnnnnnnnnnncaaaattcactaagttttgtcctcatatgctctttcatatttaaaacaaactggtcttttaggatggtagttctccctgggaacatgttctgtgttagttatgttagcatgcaatgtgtttccatcattgctattgtcaaatgaatcaataagtataacaagctgctcagtttttctaatacagtaagtattaatagttataccccacataaataaaagctctttggggttttcagtaagttttaagagtataacaggatctaaagatcacaaagtttgagaattgctgctttagaccaatactacnctttttccttaaaaacacacagttgtatttatttgtcactgttgatccnaagtgtggnccaacactcattgcttatcttttaccaaagtagcttctatttcccagagaaatttaaaaanaaggggtggagatgtcactcctaaaaangnantcaaananngggggaaac

SEQ ID NO: 28209 - DNA, 533 bp, Homo sapiens
  misc_feature (1)...(533): n = a,t,c or g
gagaaaaagcaacgtttaattctagaaggcctcctgtccctgcctgctctgggtgctcatggaatcagctgctgccctgcacttctcccggccagcctccctcctcctcctcctcctcagcctgtgtgcactggtctcagcccagtttattgtcgtggggcccactgatcccatcttggccacggttggagaaaacactacgttacgctgccatctgtcacccgagaaaaatgctgaggacatggaggtgcggtggttccggtctcagttctcccccgcagtgtttgtgtataaaggtggcacagagagaacagaggaccacatggaggagtaccgaggaagaaccacctttgtgagcaaagacatcagcaggggcancgtggccctggtcatacacaacatcacagcccaggaaaacggcacctaccgctgttacttccaaaaaggnaggtcctacnatgaggcatcctgcactcgtagtggcaagactaagctctaagcccctcanttnaatgaggggcatgaaaacgggg

SEQ ID NO: 28210 - DNA, 529 bp, Homo sapiens
  misc_feature (1)...(529): n = a,t,c or g
gagcggaggaacaactgggcgacacgctaagtttatgtnnnnnnnnnnnnnnnnnnnnnnnnnnnnnnnnnnnnnnnnnnnnnnnnnnnnnnnnnnnnntccatgctattgtttttcagttaaatagctccactcctccccctccccaccctccacagaactgccagtaaaactggactatggagtattgggtggggtcacctacaaggtcatctgcagcaagtgagaccatcgcccctcctgcctggagaggtgggactggggaccctgtgacaggaggagctgcccttcctggagcctggtttttctttttcctctgtgctccatgagaagtcagtttagtgggctacagccagcaaaggaaccaaaaccaacaggagctctgggggtgccttgcatggcgaggctccgtggctgcacgcgtgtatgcaggtggctgtgggtgtctgtgtgtcctgggccactgtgtgcgatggtccactgggaagtgtggccccaaagagtggaaccacaggtggnacaccaagcc

SEQ ID NO: 28211 - DNA, 535 bp, Homo sapiens
  misc_feature (1)...(535): n = a,t,c or g
gatagggctcggcgtggggataagagtctgcatttctaacaggcttctagatgatgttgacgctgctggttccatggaccacacattgtatagtaagcactgtattantctatctttgtgtgtttctgaaaatttccataacaaaaagtttttaaaaattgactacccacnnnnnnnnnnnnnnnnnnnnnnnnnnnnnnnnnnnnnnnnnnnnnnnnnnnnnnnnnnnnnnnnnnnnnnnnnnnnnnnnnnnnnnnnnnnnnnnnnnnnnnnnnnnnnnnnnnnnnnnnnnnnnnnnnnnnnnnnnnnnnnnnnnnnnnnnnnnnnnnnnnnnnnnnnnnnnnnnnnnnnnnnnnnnnnnnnnnnnnnnnnnnnnnnnnnnnnnnnnnnnnnnnnnnnnnnnnnnnnnnnnnnnnnnnnnnnnnnnnnnnnnnnnnnnnnnnnnnnnnnnnnnnnnnnnnnnnnnnnnnnaangttttanttaaccggccnaagntttncccnttagtgggggtaattttaccttggacgggcc

SEQ ID NO: 28212 - DNA, 537 bp, Homo sapiens
  misc_feature (1)...(537): n = a,t,c or g
gactgcatattttcatatgaaatacaaggtcacaggaccttcctcccaaatgctaaattatcctaatcaccagtataaaataccaatgtttagggggaagactgcctcacaaaacgtggctcaggcaactgctccggttgtccatgcnacttccatggcagctgttcagggcagagctgctctctccacttgtattgccagcattcctagagccacaatgctgggtccaacctgtggctttttacttgtgttacagaaggaggaagcttattaggaagcacacctgctgaattctgtaagcggcctttaggctgaagcgctgaaagaaaaaaagtctgaaactgttatcacacctactcatacccctaggaaaggattgaaactgagtttaaattgagagattcaagcaactaagggnttcaccaaaangcagngnantttntaaggngncaaattcccannttccaagtggggagccaaatccaaangtatagatatcatancatccatangttatgataancatccaggggatat

SEQ ID NO: 28213 - DNA, 537 bp, Homo sapiens
  misc_feature (1)...(537): n = a,t,c or g
gccaagcgggattggattttcatttggaattggtaccagggaatggaaagttcggactgaaagagaaatcttggattttatcgagaaaatcttcttttgagattaagtcagcagctggcttgaggacacccctggcagtgcccggcccatatcctgctccttttgggatggtcccccacgctggcatgaacggcgagctgaccagcccaggcgctgcctacgccagtttacacaacatgtcgccccagatgagcgccgcagccgccgcggccgccgtggtggcctacgggcgctcccccatggtggggtttgatcctccccctcacatgagagtacctaccattcctccaaacctggcaggaatccctggggggaaacctgcatactccttccacgttactgcagacggtcanatgcaacctgtccctttcccccgnagcccnnaatcgggnccggaatccccggaatgctcccagttnaaacctcaaccacggggangtggtntncctgtgacatcnnaacccacgagacactttt

SEQ ID NO: 28214 - DNA, 501 bp, Homo sapiens
  misc_feature (1)...(501): n = a,t,c or g
aatgaggaagagtcagaaagtggttctccagggtggagtctcgtgtcttctctcccctctcccactgtaggaattccagcttatggttcctgcttgcattgtctatccccaaggtgcactagggagaagccccacagaagaactcccagggcctgttgtgggagtgcaggggcatgtgaatgaggacctctcttcccctctcccatgtgtctggtggagggctgttcctggggtcattaattagtgaccagcacttccagccagcctagctgtggggaagaactccctcaaacagaggcctggggagctagcaggaggcagtcttgggtccanaggcactgagagantgngcaccannggaaactgggctgagacagacnatgttcacacagtggcaaacccacaaanngtggccctggngaattnaaanggggggcggcaataantnagtaattnaatagtaattgcanacacagtggtcacactgtaanccacacttgg

SEQ ID NO: 28215 - DNA, 532 bp, Homo sapiens
  misc_feature (1)...(532): n = a,t,c or g
gcgggcaggctctgtcaaaattctgcagaagtttgatcttccttcttaaggactttgtgtgaagtaattctttactgcttttaaattgctgttgatcagcttctgggtttttgggttctaacttttttgggtatattgaagacacagtgtattacattatattacatttttaaacgttaagttatttttctgccattgtaaatacaagtatcaaaatattcttgcaaagaagtaaacatttttctcagcaagcatatccttttagtaagagagtggaatgctaaacagttcttatccagcattttggacatcttttattttttgtcagagatcctgtctacactgaaaatattaattatataaacctgttgtctctcacctctacattggatcacatggncacctgcctcaanggaatgccttttaaaacctcgngtttnaaacnccnccaatttnnanccaactacanttttgggaangangatcagaacctgaccacttaggttgcngggaaaantcccccccgnaggtt

SEQ ID NO: 28216 - DNA, 519 bp, Homo sapiens
  misc_feature (1)...(519): n = a,t,c or g
ggggggctgggatggtaagttgtagtcttatgttggtctcaatgtccattttctttcagtgtttgattttggtagcacaggacaaagtgaccgctgattctcacagataattgtttacaaatgctagcactgtgtctgaagcccaccttgcagtctctttgattgacagggacagcaaggagaagccttatctcaagctcagcacaaaccctgttctctgagcacataggaaggattctaatgtgtcataatttggtgctgtgcccatttgagtctgtgtgtggtttttaaaattgggtttttttttttttncaananttanaaatatgacctggcnanggnggnanatcccngtggccncacnnacccggnaggctaagggaagggggnttncttgnccncacgnntttanggacancagtggggnaaaanaggnccctggncncnanccnngnnanaaanncagcccgngtnccaaaaaaaaantttnngnncgggccggngcncnaccctgaaccc

SEQ ID NO: 28217 - DNA, 520 bp, Homo sapiens
  misc_feature (1)...(520): n = a,t,c or g
gcccaatcaaaagaaagaacaaggactctggttacccttgcctccacccatgtgtcataagagtaggctacagaggtgaccaggcctggcagttgaaatctctggaagagggaacatgtggggactactcagaggcaaagaggagctgctcctgcctccatggttgctggccactcccaccaactactcttagggaggctaagcagtctctgttttgcttccatggctcaaataataccctgggtatgcaggacccactataccttgcatttgctgagtacacctagagagcttggctgtttccaaaaacaatcagggtcataaccatccatgcagacatggaggctcggctgaaccaggactcctcactgtctacctgagagaatgagcacccctcatccatctcagcatcaacacaatttccaagggactcaagtctaactcaagactgaacgccaaacttaagnttccccccctngaaccgnaaangggtgcccattctgaaatgggataaaggaaa

SEQ ID NO: 28218 - DNA, 511 bp, Homo sapiens
  misc_feature (1)...(511): n = a,t,c or g
gcaataaatgtttattgagcatctactatttcccaactattgttctgagcactaggaatggcatcttttatctgcattttgaagggaagataatgtctgccttgaaggttgctaaagtctaagaaaaaggcacttaaaaaaaaaaggtttgcttccttgccctcctaactgatcttccttctcnagtttttcattcctctgttgcaatctacagagtactcatagagctttcttttttctcttcaaactcttgctcaaaagccttagatggcttttctcatctgataggaaagtttcaagttcataggatgtcatagaggaacttttatagcctgctatttaaaaccatannnnnnnnnnnnnnnnnnnnnnnnnnnnnnnnnnnnnnnnnnnnnnnnnnnnnnnnnnnnnnnncacctgaggtcagggttcaagacnanctgggcaacacggtaaaacccggcnaanaaaattnaaaaaattttccgggnatggggnnaangcctgtatc

SEQ ID NO: 28219 - DNA, 530 bp, Homo sapiens
  misc_feature (1)...(530): n = a,t,c or g
ggacgatcagaatgacttaatgtattcacttaactgttttctcacaggaattcataagcttataatgcaattgcatcagccacagctgtctgaaccaccttagcctaggcttattttatccctgggatgtagctgctgttttggcctttggtgatcttcacccgtttaccgtagggtggatttaccttgattcacaagtcgtttgtctaacctctccttttgtcaagataattctgacaggtgaaatttctggtgattggcccaaagtatttcatctacccacaaatttgatcattaatatcctctcaaataaagggaacaaagatggaaaaataggtgaagcttggctcatttatttacatattgaccccaatgtcagaagttactcagaagtgtgtgcaactccggaaaaacccttcctgggantgggcaaaaanggnggnaaaaaaaaccanttttnagcaggcttagcaaaaggttattattttcacngccataaccaagggtcatganatttgttattcanagca

SEQ ID NO: 28220 - DNA, 513 bp, Homo sapiens
  misc_feature (1)...(513): n = a,t,c or g
gctggaaggcaagttagagaagcactttctaaccaggggtcttgtggcacaggcttcagaacatccacaagccctctgaaatgagatgcaaaattatgtctgaatgtgcatttcttttgctgtgctatcttttgattctcaaaaaggcctggaatccccccacccacaacaaaaacaattaagagtaattccatgcaggtaatcatagtgcattaaaaggtaaacataccaaaatttaatttcattaaaagatactgtgtattctcaatgattttattctattgtaaataggttcagttactttgacaggtatgtgtacttccaacttcctaatctcaagttgcttaaatatcaagcatgttaccatcagaaacataaatcctgggttacaaggaactcattctacctcttccagtttttcatacanggcaaaaaaggngcttgaatgcctaaaaacccccaantaatttttccanggggnctgaaaaaaaatngcttcaggagagtcaccca

SEQ ID NO: 28221 - DNA, 526 bp, Homo sapiens
  misc_feature (1)...(526): n = a,t,c or g
agagcatctttctgttatgctgttgccccactcctattgcaatactccccttcttaagaaagtttttctagactaatgtctatattaaacttcttttctttgacaataatgatgccatgacttgggcaaaatgcccattgcctctgggtcctgctttcttcacccagtgctgccttattggactccttgtgcctctccttggctggggaaatcagaatacacagtnnnnnnnnnnnnnnnnnnnnnnnnnnnnnnnnnnnnnnnnnnnnnnnnnnnnnnnnnnnnnnnnnnnnnnnnnnnnnnnnnnnnnnnnnnnnnnnnnnnnnnnnnnnnnnnnnnnnnnnnnnnnnatcccacttctaagatgcctgatctgaagggcagtaaaacaactgacctttgccaacatgttaaacacatggttaactagtcccccangganaaactngngaaanccggacttgggaaaattaaccgggcaatcccnacttganangcccttgtcccctgttaaggaacttttctg

SEQ ID NO: 28222 - DNA, 528 bp, Homo sapiens
  misc_feature (1)...(528): n = a,t,c or g
gcggcacgagcggcacgaggagagagcaccattcaataccctgcatggccactgctcaggcctattgagatgcctgagtagtctctgggcagggtctgcattgccatctttatactctcagaatccagtcccatccccagacttcatcatatgtaacgtatgaatccttttctgggtatatcacaaggcaaacacccaatgccaacagccaaacagccacagcttctggaaaaatgcctaagagcaaaggctgctgttaatatattacttaaaaagaagaggatcccaacctgcagcagtgtaagaacctctgcccacacctcctgagtgctgtcctgctcccctgaatcagcagtttccttggtacagcaccagagagccgcacagaagctcatgncaagacccaaaccatccanccacaaggangaaaaacccaattggcnncaaggattggaaccgtcaaatnggtccaanggttttganggtccgtttagganaatactttgatcttcttggaaaggnactaca

SEQ ID NO: 28223 - DNA, 506 bp, Homo sapiens
  misc_feature (1)...(506): n = a,t,c or g
gcctatggttcgacaatgcgggagcgagcaggcccgaacctctccgtttgcttgctctcgtctctgacacttatgagcatgaagcagtagaaccagctgctgctgtatcagtttgcgtttttcaggatctgcagtggggcctgttgcaattgcttgtgtgggtacaattcccactgatgtttgcatctgagacatatttggcacgttggtgactgaagtattcttgatatctgtagggaaggtgggcaaactgttgaccatgctctgtttgctggctaactgggggttcactccagtggctcccattggctgccctccagcttgactaaagggctgtccaaatggacttgtgttcccagttattcccatcttggccatgcctcctgcctgtgcggtgttcaatcccgcgtgaccagtcanttgcggggaaanctgcgttaaggtccaaacaaanaanttggtcaagggccctgaatggctggattagggaaggnatccaacnccct

SEQ ID NO: 28224 - DNA, 506 bp, Homo sapiens
  misc_feature (1)...(506): n = a,t,c or g
gaaagagtttctgaaaggaaagaaattttttatttttattatctttagcagtactgagtgtcatagcagaatattttacagactttctatgagattatttttanggtacaaagtatttacatttccctcatgtttatcattatgccaattttacatggcagtcatgccactgactctgctatttagctaagtaatttcttttttcggagactnnnnnnnnnnnnnnnnnnnnnnnnnnnnnnnnnnnnnnnnnnnnnnnnnnnnnnnnnnnnnnnnnnnnnnnnnnnnnnnnnnnnnnnnnnnnnnnnnnnnnnnnnnnnnnnnnnnnnnnnnnnnnnnnnnnnnnnnnnnnnnnnnnnnnnnnnnnnnnnnnnnnnnnnnnnnnnnnnnnnnnnnnnnnnnnnnnnnnnnnnnnnnnnnnnnnnnnnnnnnnnnagcaccccggnaagtnatttcnaatnntnggccnanacnantncanatncaggnccctttgagnggaaatt

SEQ ID NO: 28225 - DNA, 508 bp, Homo sapiens
  misc_feature (1)...(508): n = a,t,c or g
gataaatttcccangtagnaacaaaggaaatccaaaatcttccataattgttacagtaaccacaagttgctaataacaaatatattttgctgtttactaaagtgatggttcagtgcaactcaatgtgtataactcttaatgaattaacagttttaattgagtaatctagtatctttcatctttcctttttggtgtctcttaccaattcaaactctgtttagcattaaaacaaatatgattagaaaacactgcattgctgaggaataaaagttctcacttggaaaataattattagctctgtaaagagttctttaaaaagattctaacagaattgttaaaaatagggaaaaagatagtgtcctaaatatggttggcaatttctgatttgttcgattcagacatttatngaaaacccaaatagaattaanacaagtggggnaattnanggntnaannttaaaaaccntcggaaannaggncattaangaataaaggnggactgacttatg

SEQ ID NO: 28226 - DNA, 579 bp, Homo sapiens
  misc_feature (1)...(579): n = a,t,c or g
gaataatttgacttaaaatgcttcttgtgacaatcgagatgatatgtagatggagataataatttaatagctcttaattataatgtctgctcatatataaaatagatcctaataagtccattgttaattgatagaatgagtagtctagtaaaacaggagtagttaatggtgtaattgaaagagtttaaataaaaaattcaaatgtttaaatatacatattaaattgagtaattcagaatgtgattataaaatgcattcatacctatgaatgtggttaggacagatagcattaacccttcacaaaaagaaaattgaaaataaaaagttactaagattagtttgaaaatatacattgaacagtctctgcaatacagcagaggttggtaaactctttcttgnctcaaataataacttatttgaaaagtatgcancantggagataggtctaactggtaaanatttgngccttgcaggccaaangcaactcaaagatatctgnagatcctatatancncttaaaagnaacatctaaaatntaaaccatcctagctaccaccgctacaacagngggggctgctt

SEQ ID NO: 28227 - DNA, 563 bp, Homo sapiens
  misc_feature (1)...(563): n = a,t,c or g
gggnnnnnnnnnnnnnnnnnnnnnnnnnnnnnnnnnnnnnnnnnnnnnnnnnnnnnnnnnnnnnnnnnnnnnnnnnnnnnnnnnnnnnnnnnnnnnnnnnnnnnnnnnnnnnnnnnnnnnnnnnnnnnnnnnnnnnnnnnnnnnnnnnnnnnnnnnnnnnnnnnnnnnnnnnnnnnnnnnnnnnnnnnnnnnnnnnnnnnnnnnnnnnnnnnnnnnnnnnnnnnnnnnnnnnnnnnnnnnnnnnnnnnnnnnnnnnnnnnnnnnnnnnnnnnnnnnnnnnnnnnnnnnnnnnnnnnnnnnnnnnnnnnnnnnnnnnnnnnnnnnnnnnnnnnnnnnnnnnnnnnnnnnnnngtggttcagacccantcgtntgcatactgagtgcantgnatggacttgtccctgtgtcnaccacttnagccatgactaaaagggccaaanacannttgtgccttgctttngttgcncaagcccnagcnctgcaattcctttgttttanctgtggntccngaattaanattgatgtttgnaaatctctnctnaatttnaaggatgttggattc

SEQ ID NO: 28228 - DNA, 579 bp, Homo sapiens
  misc_feature (1)...(579): n = a,t,c or g
ggttttttctattccatattacatagcatcaacctgtttnnnagtttgagcgattccagtaaatgtgtgttaattcatttttaactttttaaccaagcanggaatccttccttattttcgtaatagctaagtcatactatttttgcttcatacacattcagctatactctttatggaattggaagccaatttagatcgcattttacttattttcagtaagatgtttatgtacatgaaatgcagatatactgatatctatttaatcatcattaggcctccagtgactggctatcgtgtgtttccttactgatttaaatatattctgtttactacaaanacaaatttcaagaccaactcaaagctacaggctttctattcagtcagatacttacaatataaattaacattaggaagctgacatacatattgaatgccccaggtgtacaatnctgagagtacttatnnaagctngtcantctaaggantcaattgtgctctnttgaatngncctactagcttccttgcctgaagtacngaatgaggtcanaatctcagtttgcattctaactntgggacgaa

SEQ ID NO: 28229 - DNA, 577 bp, Homo sapiens
  misc_feature (1)...(577): n = a,t,c or g
gtttttttttgcaaggccaggtagtttatttgggggatgatcccagggaacaccgttaacagattagggagtgacacagggaggaaaaggctgccaagaaatcaggtgtgatgaagaaattcccctctgtggacaactggagctcaatcccactggggacctcccggacacaagaacactcaggtttatccagtacaaggggagaggatactaacatcatcatcaattccctgtcattggctgaacaacatttctgtgagtacaacatctccagtacttctgtcttgtccagtgagtgggccaagtgtgccctggcatcaggagaaagctctcagcagggtcatagctgcagtcatcaccttagggactctgagtgttgaggaggcacaggcaggaccccagcagatgaccccggatggattttnagtcccgaaccatgatatgctggggtttctncatcccgctgttnatcaatgggaaggcctttaagncatatcccatangatggctcaggatcctgtntggcttgctgaacccagcctttttaggaggaaaagtggaggaaccaaattaactt

SEQ ID NO: 28230 - DNA, 569 bp, Homo sapiens
  misc_feature (1)...(569): n = a,t,c or g
gtgaaagtccagagagactggagctncatgtgaagggttgngtgaaacctgatgattaaccaancagggagaagagcttgcagggtctggnnncccacatcaagcaattttatcctaaaatgcatggggaaatattaaagggttttaagcagganaagagcatggtcatatgctgaaaagatttttgtatcagaatagaggagttgtcagctgtcagtgtgtcagggcggaaaatagtnataagttggtgcgaaagtgattgccgtttttgccatacatactattaatggcaaaaactgcagttcttttactcactatattactttgactagggtgatggcnttggaaatggagagagatnaatggatttggaatacgttnangaggtatagttaatagagttanggaaaggattgggtccacagcttgaaagaaagtcaangngtgggtganaagtgactcttaagttcttgcttgngaaattgaaggatggtggtgccaattctaactagtgaatnctnaaagaggacaaatgnaagttaactttggntttgccgtaattattaaag

SEQ ID NO: 28231 - DNA, 564 bp, Homo sapiens
  misc_feature (1)...(564): n = a,t,c or g
gatttcttattagaaggtcttaaagtgtaaaaaggaaggantttaattttcaatatgtggtaggaaggcttattgatagcattccttttgcttgaggacaaccgagcgtgctagataaaataagtatcctgaaagcatcaaaagagctaatagaagaaatcaaaactaagggaaagtggggtgctagttctgtccttaaggcatttgttcatttgagcaaacctggacttcaattttgagtctgtcaggaggcaaaggggacaaaaatcaaagactatttaaggagtcactttctatataggagacccttcctgcgtaaaataccaaacactttaagtcgctgtatacccagaatacagggatatctggtcactaggataagactgagcagaagtaaatttgcagccnaaattcacatcactctgtgaagttagtgaaaattcatttaaagtaatgggtncctaagggcctagaaagcnggggcaattcttcctgaagaaggaccttcattttggtctnagtccccataatttttagacagcgagcattaacnnagtactcgtc

SEQ ID NO: 28232 - DNA, 569 bp, Homo sapiens
  misc_feature (1)...(569): n = a,t,c or g
gtctggccagctttnttttggtaaaggtactaagggaggctcccattcctgcagaatggatggaacaaacactgcaagtggttgggcttgttttcagagagctttgatatccagagatgagcacacgcaggggctggggcctgatacagatccacaacaaggccaagccacttttagtgcctggggtcaaggttggccggaggagacacgatgtctgcattcgaactgacaaccagtaaaaaggctgtcaggaaatgcaacatcagaagatggcaccagtaataagaaaccgaatcctgagaatcttaaagtgcgaagaatattatgttccaagaaaatttggtagagaacagacctttctaaaaagtnaaagggaggagataggtggcctatagtgagctgnaatcagtgctttcagtagcanggcccatggtgtttgatgctaacccctaggcaaaacttgatctttagntnatcnacaaacattttttggcatttccctntncnangcttttncnggttntggaattnacagaaagantttncctctgctncctttatgaaggagg

SEQ ID NO: 28233 - DNA, 572 bp, Homo sapiens
  misc_feature (1)...(572): n = a,t,c or g
nnnnnnnnnnnnnnnnnnnnnnnnnnnnnnnnnnnnnnctggnnnnnnnnnnnnnnnnnnnnnnnnnnnnnnnnnnnnnnnnnnnnnnnnnnnnnnnnnnnnttnnnnnnnnnnnnnnnnnnnnnnnnnnnnnnnnnnnnnnnnnnnnnnnnnnnnnnnnnnnnnnnnnnnnnnnnnnnnnnnnnnnnnnnnnnnnnnnnnnnnnnnnnnnnnnnnnnnnnnnnnnnnnnnnnnnnnnnnnnnnnnnnnnnnnnnnnnnnnnnnnnnnnnnnnnnnnnnnnnnnnnnnnnnnnnnnnnnnnnnnnnnnnnnnnnnnnnnnnnnnnnnnnnnnnnnnnnnnnnnnnnnnnnnnnnnnnnnnnnnnnnnnnnnnnnnnnnnnnnnnnnnnnnnnnnnnngttttcctgtggtttaaaaaaaatctntcattgaaaagatttgtcaatcancgtnacaanttctttatgcttattttagnatctnntacaccaccccaacttnaancaacaacttgntcataagcnttcaacnttgagcaaatcttcactagctaaagattatactattnaaggt

SEQ ID NO: 28234 - DNA, 565 bp, Homo sapiens
  misc_feature (1)...(565): n = a,t,c or g
gtttcgtggaagccattctgcctgtccaggaatnggaggngagtgatagacacagttgtcagccatagcttgggtagaataaggatgtgaatgtccttggcttatctttattaatcttgtgatggaaaaatatctgacattgttcttagtccattttaagcttaatttatgttcttagtggcatagaaattcagagctgaaagaagtatcatgtctcactctcccnttgaggaacaagagttaacgtcatctgacagtactaccataacaaatcaatagcttaataggcatataagtggctttatataaaatgttggtttttttcccccagcatctcaattggttcttaaatatctaattccacgatcctnaaacttttcccactgtaacaaattanagagaggaggaacatgttcatcagtgactgtagtcaaatacagnagaatgtgcatcagtgattcaaactganagaatcctggatgcccttctncattgtgtgcncccctccaacnggtccacnattagggaacatttaaatctggcccattatnanaangagagggca

SEQ ID NO: 28235 - DNA, 569 bp, Homo sapiens
  misc_feature (1)...(569): n = a,t,c or g
gtttctttttacatatgcagaccagctgacaattttatatataataaacatccttgaaatttggtatactaaaaataagtagatttaagcaaattttcatctacctattactaaatcagttagtttttaaatgtttaccagctggagttgcctatttgtttatagcatttcttctacaaattaccataacaaggatttactagttaatgctaaaataatgaggattttcaagatacagataaacgagagtaaagcagttaaaatttctttatgacttaagatcagcagcactacttaaattgaagaactttaatgtttcaagagtgttatgtttagggtccttccattgatggcagttagcagtagtctttacactacagttaccttnctgaggtcatatagaaatccgttnctgctattattgtagactgccttatattcatgggaaggaggatgacaggtccaaaaaaccagagagggnntatattcactctagtccttaattatgggctaaatttttatgtgggtttaagggtaatccatatttgagngcatctgtttaagaatca

SEQ ID NO: 28236 - DNA, 478 bp, Homo sapiens
  misc_feature (1)...(478): n = a,t,c or g
gggaagagtacaatctgtatatacccttcattcagatgtaccngtttttaaccttttgctacatttactttctctcacacccgtcctacactctgtcacacacagatcacatagaaagtaagtcacaaacatagcagttcatccctaaatactttagtatgtatttcccaagaagacattttnnnnnnnnnnnnnnnnnnnnnnnnnnnnnnnnnnnnnnnnnnnnnnnnnnnnnnnnnnnnnnnnnnnnnnnnnnnnnnnnnnnnnnnnnnnnnnnnnnnnnnnnnnnnnnnnnnnnnnnnnnnnnnnnnnnnnnnnnnnnnnnnnnnnnnnnnnnnnnnnnnnnnnnnnccttgcatnnnnnnnnnnnnnnnnnnnnnnnnnnnnnnnnnnnnnnnnnnnnnnnnnnnnnnnnnnnnnnnnnnnnnnnnnnnnnnnnnnnnnnnnnnnnnnnnnnnnnnnnnnnnnnnnnnnnnnn

SEQ ID NO: 28237 - DNA, 648 bp, Homo sapiens
  misc_feature (1)...(648): n = a,t,c or g
gctcgagaaacctatgggctgcccaacacactgcctaccgcctggcacaacctggtatatcgcatgcggggccgacatgcaacttttccagaccttctggtttctctaccataagggccacccaccctcggagccctgtggcatgccctgccgtctggctactctttgtgcccagctctctgcccgtgctgacagccctgctctgtgccgccacctgatgccagatgggagcctccanaggcccagagcctgtggccaaggccactgttttgctagggccccagggcccacatttgggaaagttcttgatgtangaaaggatgaaaaagcccaaatgctgctgtggttcaaccaggcaagatcatccggtgaaagaaccagtcctggggccccaggatcccggggaanaaggaccttttctttttcgggaaccngttaaccggatttggaaggggnttggntcctttgcccaggactaaactgccttgaggttgtgcctttanagccctggataaaggctaanttgaactgcctggcaaacaaaaaggacttttncccaagctttgttgccaaccggaacccttattgttgttgaacngaacttcaacntntaaaanaaaataaaaactggctccaaaaaaaaaaaaa

SEQ ID NO: 28238 - DNA, 622 bp, Homo sapiens
  misc_feature (1)...(622): n = a,t,c or g
agacttcaagnnnnnnnnnnnnnnnnnnnnnnnnnnnnnnnnnnnnnnnnnnnnnnnnnnnnnnnnnnnnnnnnnnnnnnnnnnnnnnnnnnnnnnnnnnnnnnnnnnnnnnnnnnnnnnnnnnnnnnnnnnnnnnnnnnnnnnnnnnnnnnnnnnnnnnnnnnnnnnnnnnnnnnnnnnnnnnnnnnnnnnnnnnnnnnnnnnnnnnnnnnnnnnnnnnnnnnnnnnnnnnnnnnnnnnnnnnnnnnnnnnnnnnnnnnnnnnnnnnnnnnnnnnnnnncaacagagtgagacctgtttttnaaaaaaaaaaaanaaangacttttaangntggggtngggttnntncctttggggggggtancttgaaattgcttaaccccnnntttnagaattttacttttgnanggttacctggatgcanccnacncctactgnacccttcacgtggctgggttgntctnntgtnnanggattaggactgctgattttangcctggccttaaagacnnaannttggattgtngnttnntagcnnnngnccanttaaagggggtttttactgagnttcaaaattgggcnntttaaantccnaggctttntggttnnaatgntcnccttg

SEQ ID NO: 28239 - DNA, 603 bp, Homo sapiens
  misc_feature (1)...(603): n = a,t,c or g
ggaaagtatattagtggctgcctaggctgggagaaggaagtgattgctaatgggtagggggtcannnnnnnnnnnnnnnnnnnnnnnnnnnnnnnnnnnnnnnnnnnnnnnnnnnnnnnnnnnnnnnnnnnnnnnnnnnnnnnnnnnnnnnnnnnnnnnnnnnnnnnnnnnnnnnnnnnnnnnnnncctctttaaaaatgctgtaagagattgctgctacagacctgtgtgtatctgtacaagtcagaaggaaaaggtctcaaggngcagcccctnatccattctctngactctccaangcnnaatttttgaaagttncagcnggggaatgcctgcttncccagnaatccaactttcctntanaccagccngttgagtanncaagcattttanaagtactacatggcntgtaatttgctctttggttactaaactgagtntanaaacnggtaactaaagatctaatactgttccggcttcctggatatnctgattncccatttcngagcggttcttggctatggaaggatggattntnataccctggccatccaactaccggntgngttttgggtctcaaattttttcaccagaaggcaaaaa

SEQ ID NO: 28240 - DNA, 132 bp, Homo sapiens
gtaggcccagtttagcatcagctgctcttccctattccacactctagttggaaataggaccttaggttcctgttgacaagtcatttactttcagccccgaagaaataaaagagccaagtttttttttttttt

SEQ ID NO: 28241 - DNA, 531 bp, Homo sapiens
  misc_feature (1)...(531): n = a,t,c or g
gctcatgctcagcctgatgggagacnagttnaaggnggngctggagacctggggcttnaacaccaaccaggaaatcttccaagaggttgtcggcggcttccccagccaggcccaagtcaccgtccactgcctnaagatgcccaagatctcctgccaaaacaagggagtcgtggtcaattcttcagtgatggtgaaattcctctttccacgcccagaccagcaacattctgtagcttacacatttgaagaggatatcgtgactaccgtccaggcctcctattctaagaaaaagctnttcttaagcctcttggatttccagattacaccaaagactgtttccaacttgactgagagcagntnngagtccatncagagnttnctgtagtcaaagaacaccnctttgggcanccttagggnanntttttgntnnggggnagttttaacccccttttnaaacaaaaggntgggncntttnaaaatnaaaccttggaaaaaccctngagnggtttttnttnttaaaaggannttttt

SEQ ID NO: 28242 - DNA, 540 bp, Homo sapiens
  misc_feature (1)...(540): n = a,t,c or g
gatctgtttanttnttctcatcaaatgttttttatgagcaatccaaatgaggaccacccactgcattnggttaatatgtctgccaagacgctcttaaaatctaacagntcttacccatctttttctgtacagtttatttgttggaggacataggtcatatgccttgtaaagtttcacatatttggggtttgttgactgcatcctgtngtctcacttaccatgttcctctgtcccctgtatttcctataaactaatattaatagttaagatttgacacagttgngtgnntttttttttgcactaactttngtaaaaatactnnntaggnggngcatggttcttcctgttggaanccctntggcatnngntgcgggantattgcctnncnnngaaaagaacnnccnggggntnggttttaanggnnnnnnatttcntttnnanntttnacccntttcnnngnnnnnnaaannnnnnnnnnnnnnnnnnnnggnaannnnttnngggncccntnnnnantngggcccnnnnaancccnngtgg

SEQ ID NO: 28243 - DNA, 560 bp, Homo sapiens
  misc_feature (1)...(560): n = a,t,c or g
gtcctctccagctcagccgcgtaggtttggacatatnngactcttttccccccaggttgaattgaccaaagcaatggtgatggagaagcctagtcccctgctggtcgggcggnaatttgtgagacngtattacacactgctgaaccaggccccagacatgctgcatacattttatggaaagaactcttcttatgtccatgggggatnggattcaaatggaaagccagcagatgcagtctacggacagaaagaaatccacaggaaagtgatgncacanaacttcaccaactgccacaccaagattcgccatgttgatgctcatgcccnctaaatgatggagcngtagtccacgagatggggnttatntntaacantnaaccaggcttttaggagaacatgcccacggttttnctngtcccggggggctttttnaaannaaantnttgtccccngggggcntcttatntncccaatanngnntttttgggggnttgccttgatctttnngnggnttnncaaaaaaattnnannacctnaaaaaggnggcaacccctgggggg

SEQ ID NO: 28244 - DNA, 548 bp, Homo sapiens
  misc_feature (1)...(548): n = a,t,c or g
ggagatttcaagtcggcagaactaacatgattgattnttagtttttaaaatactgatttttttagaaactttttctaaatcaaacctactaagttttattttgttatttatccagagattttgatgtaaaaatgccttcatttttaagattacttaatactggatttgaaaattattttggatgcttataagttttctaaaacttagataattagaaaaaatgcctaagtttatgatgttttactatgctgctttttagatggaagaaataagcagtttttactttatagtacaaataagttttgttcacaataaaatagatatcctacctggactaatactagatgtacaaggtagtggaattatttcttatattgctttttcccaaaagtaaaacccaaatgtgggccgngtgtggtgggtcatgccngtnataccngactttttgaggctgtggnggcgnatancncgnggggnggtcttnanaacctggtggcnnccnggggnacctttttttntntnaaannccaatnttccgggnggngggg

SEQ ID NO: 28245 - DNA, 544 bp, Homo sapiens
  misc_feature (1)...(544): n = a,t,c or g
gnnnnnnnnnnnnnnnnnnnnnnnnnnnnnnnnnnnnnnnnnnnnnnnnnnnnnnnnnnnnnnnnnnnnnnnnnnnnnnnnnnnnnnnnnnnnnnnnnnnnnnnnnnnnnnnnnnnnnnnnnnnnnnnnnnnnnnnnnnnnnnnnnnnnnnnnnnnnnnnnnnnnnnnnnnnntgaaagaatccctgtaacctccagttccccagggtgggtggtcctgtcttgtagaagagaaacaggccccgatgcggggaaggagcaggggtttggctctgtgaccttggcccagctgtgtcccttctttgaactttcatttttgctatctttacagcggaaatgaatccctacttttcagggtgatcaccgtgggagctagntggcttaagaatatggaattacaggccaagtgcggtggntcacgcctgtnantncagcactttntgaggctnnaggggggccnananttttgngncagattttgannccctcgggccaatntggggncccccnnntttntaaaatccaaantttcccnngnttgttgg

SEQ ID NO: 28246 - DNA, 545 bp, Homo sapiens
  misc_feature (1)...(545): n = a,t,c or g
ggggaggctgtcgacttggacttgacatgacaggaccacagagctgtcggccggcaaacacgcgcggctcttcaccgcagaggaagggtgaccctgaaggtggttcggaaaactcccagccgccgatgccttcttcagaggggaccgcagcccacgtgcctcccacaggccaggagctctgccagcggtgggcgcggggcctccccagtggacgagaggtggagcatggagccacagcggcagctctcaggcctctgggcctcacgggacttgcccctcggggtttggcctgcctggggcctggcaccctccctcttgcctttcccccttttgaaatgggagcgtccgtcccctcctgtcctgctttgnctnccccgtatgtgacccagtgagggtgagaggagactttggagttnatggcaccannccctcggggttcaaaannccgctncttggngananaagattttttacacncnggggaaaacttatngggggnccnttgggccccaggananaatccttgctttnttaannttggtccc

SEQ ID NO: 28247 - DNA, 546 bp, Homo sapiens
  misc_feature (1)...(546): n = a,t,c or g
gcatatttttggtgtggattttttaagcttttttgtgcatatagttcagaggcggtgtagctgagaagttaagagccagttctaatgataggaagcctgagttccggtatgttctcagccatttactggtggtgtgcccctgatcagttacttcatctgtctgttgtttagtttgtacatctgtaaaatgggataatccctaggatctcttttataggattttgcgcttggaacagtggctggcccacagtatgagttcataaatgttagatgttgtagttttggggaggaccgtcactctcccttgggatactgatatccaaattgtaagttgtcagtaggctttctttgaagtttgctccacaccctttccattaaaataagtaatgngtagatccngtatttaaccnggataaaatgggttaaaaaggngccnttnaaaagtattgggaaaanatgggggaacttttttaaaaatcttnaaanggcccaaanttttttaanngtgnccncctntttttnnaaaacggggtncntttgcnttat

SEQ ID NO: 28248 - DNA, 531 bp, Homo sapiens
  misc_feature (1)...(531): n = a,t,c or g
ggagctagcaccataccctgtctgttaaaaacaaaaacaaaaaactatgctgttgcttcatagttttaaaaagtcctttttaaaaacatctggcagctgttctttggaactcttcaggtncttcanctactaaatagtanctcctcaacctacagcatattactttaaggtaaaatttntcagttctactacacagtatgacatttttcattttatgtagatagcatatannganattaggacaaaactcattatgtngacanaagaaccatcnggcangcactccacatgcatncngncctagcctgacggacccacaatgnggctgggtaccaccataacagtnnctaanccccctnaaaggcantaagaaaggggtcccacagatnacangccggctnaaaanntngacaagngaggcnaancaaagcntnnggggaaatgnccgggtttttaaaatntcccaanagccccaaaanttttttatnangaggcncnctaagnggccnaaanttgtcccttttggngggg

SEQ ID NO: 28249 - DNA, 539 bp, Homo sapiens
  misc_feature (1)...(539): n = a,t,c or g
ggannnnnnnnnnnnnnnnnnnnnnnnnnnnnnnnnnnnnnnnnnnnnnnnnnnnnnnnnnnnnnnnnnnnnnnnnnnnnnnnnnnnnnnnnnnnnnnnnnnnnnnnnnnnnnnnnnnnnnnnnnnnnnnnnnnnnnnnnnnnnnnnnnnnnnnnnngcagactgacacatcatacggccggataacnnnnnnnnnnnnnnnnnnnnnnnnnnnnnnnnnnnnnnnnnnnnnnnnnnnnnnnnnnnnnnnnnnnnnnnnnnnnnnnnnnnnnnnnnnnnnnnnnnnnnnnnnnnnnnnnnnnnnnnnnnnnnnnnnnnnnnnnnnnnnnnnnnnnnnnnnnnnnnnnnnnnnnnnnnnnnnnnnnnnnnnnnnnnnnnnnnnnnnnnnnnnnnnnnnnnnnnnnnnnnnnnnnnnnnnnnnnnnnnnnnnnnnnnnnnnnnnnnnnnnnnnnnnnnnnnnnnnnnnnnnntgaatntttaaaanataaaatggcntttcccctcaaaggaacacanntctttnnaanancggaaaaaag

SEQ ID NO: 28250 - DNA, 546 bp, Homo sapiens
  misc_feature (1)...(546): n = a,t,c or g
nnnnnnnnnnnnnnnnnnnnnnnnnnnnnnnnnnnnnnnnnnnnnnnnnnnnnnnnnnnnnnnnnnnnnnnnnnnnnnnnnnagcagcagccaaagcttanaggggttatgtgcctagtttggagtcgcacacagctagctgggaatctaatctgggtctgtcgaactccaaagcccttcctctttcttcttactcagctgtctccctcaggttatctttaggccttgggttacctatgtgaatgtttctctgcttgtaaataccagttggtctgtgaccctactctaagcataaatggagggactagaagaattagactaacaaatacattcagctcctaaacaccctcaagttagtatagatttcagaatcaaaagacttggattttggacacgttagtctttctgaangnattttccttttctacctggctcacaagaatttncaagggncaaaaaanacngtggggaaaancccctggtgcnctcnttttgnggatcagggcncctgncccctgtaaaaaatttntcccacnggnnttggga

SEQ ID NO: 28251 - DNA, 518 bp, Homo sapiens
  misc_feature (1)...(518): n = a,t,c or g
gcccaagtagctgatactacaggcgagcgtcaacatgntcagnnnnnnnnnnnnnnnnnnnnnnnnnnnnnnnnnnnnnnnnnnnnnnnnnnnnnnnnnnnnnnnnnnnnnnnnnnnnnnnnnnnnnnnnnnnnnnnnnnnnnnnnnnnnnnnnnnnnnnnnnnnnnnnnnnnnnnnnnnnttntttcactttanaatttagttactgnganattgnggacaanacttgctccctntccgngcctagcttttctcatttgtgaagtggaggttataataataaggtatttnnnnnnnnnnnnnnnnnnnnnnnnnnnnnnnnnnnnnnnnnnnnnnnnnnnnnnnnnnnnnnnnnnnnnnnnnnnnnnnnnnnnnnnnnnttttttttatattgggctccctctgcatcgaggctggaatacagnggcccatcatgggtactgnaaccttgaccttccangntngatccattctttnaccttaancngggggaaacntnggacttttgccttgncccc

SEQ ID NO: 28252 - DNA, 390 bp, Homo sapiens
  misc_feature (1)...(390): n = a,t,c or g
ggtgtcatggctctgcaaccaccagggaggcagcccgnggtgaggctgcccgccgtgccctgcagtacctcaagatcatggcaggcagcaagtgaagccccagctggactcatggatgtgcaccctttgctccctgctctttctgcctctgggctcatgtatctgcgcagctctggtaccctctgtgggtgccatctctacctctgacacagactgcctgccttgaagctgagaaggcacagggcaaggagccaaggaccacagagcctcagccagcccaggatccgtcctcattttattggtgatgatgaatgggaatgaaatcagggggctgtctactagagcctggaataaatatgctgctttgtggatttttaaaaaaaaaaaaaa

SEQ ID NO: 28253 - DNA, 109 bp, Homo sapiens
  misc_feature (1)...(109): n = a,t,c or g
gaaaaacatgtattgcatgaatttagagagtatgttnggcacagactattgnnatgtttttccagatttcaatttcaaaaaggggtagtaatagctttttttttttttt

SEQ ID NO: 28254 - DNA, 518 bp, Homo sapiens
  misc_feature (1)...(518): n = a,t,c or g
ggataaaagatgcaccaaacccctggatngcagcagnccattaattatttacagcagtaacagcaggtggagtaggatggtagtgctggctccccattcctagggcaacacaatgtttttacctgtaaatgcacaagaatttgcaccaaggagaggggcccccacgttatgagtattatagcttatataggacagctagctcatatgctccttctttattacagggtgaaagttagagacagagaaagagagagagagagaatgctttgttctggcgtataaactacccctctcctgtgagatggcaatttctagagttttataacccaaatatcttctggaaagataagattctctgggtttaccactctagaatgtcagcaaatatttttggagcaatacataatttctaacctccaaggcaaattgccattcaaatatcctgtccccangttgccagtatctttttctctgaaagnctggttttgcngaaaatggaaatntttcaaaacccttgg

SEQ ID NO: 28255 - DNA, 525 bp, Homo sapiens
  misc_feature (1)...(525): n = a,t,c or g
ggaaggtattttcaatgtacataaccagaaaagtattngtatatangataatagccctttagcaaaagaggcagagaatcacctaagataaactacaatnnnnnnnnnnnnnnnnnnnnnnnnnnnnnnnnnnnnnnnnnnnnnnnnnnnnnnnnnnnnnnnnnnnnnnnnnnnnnnnnnnnnnnnnnnnnnnnnnnnnnnnnnnnnnnnnnnnnnnnnnnnnnnnnnnnnnnnnnnnnnnnnnnnnnnnnnnnnnnnnnnnnnnnnnnnnnnnnnnnnnnnnnnnnnnnnnnnnnnnnnnnnnnnnnnnnnnnnnnnnnnnnnnnnnnnnnnnnnnnnnnnnnnnnnnnnnnnnnnnnnnnnnnnnnnnnnnnnnnnnnnnttaataaataaaataaaataaaacaaaaaactacaatgaagaataactacngaaagatgttcaagcttatcatttattatgggagncccaattaaaattaccgggaatcccagntttggngnaaaacctnggtttttnntcgg

SEQ ID NO: 28256 - DNA, 519 bp, Homo sapiens
  misc_feature (1)...(519): n = a,t,c or g
gagagtctctaatggaatttgcccagccagagatacanccacaagagtttcttaacagacgctatatgacagaagtagattattcaaacaaacaaggcgaagagcaaccttgggaagcagattatgctagaaaaccaaatctcccaaaacgttgggatatgcttactgaaccagatggtcaagagaagaaacaggagtcctttaagtcctgggaggcttctggtaagcaccaggaggtatccaagcctgcagtttccttagaacagaggaaacaagacacctcaaaactcaggtctactctgccggaagagcagaagaagcaggagatctccaaatccaagccatctcctaccagtggaagcaagatcacctaaatccaaagcagggtatgttcaagaggaacaaaagaaacaggagacccaaagctgtggccagttnacttcagaaagaacaagattcnaagaagccaacttcaaaggtttgaacccnttcggggcaagggaacagaaccccccaagt

SEQ ID NO: 28257 - DNA, 515 bp, Homo sapiens
  misc_feature (1)...(515): n = a,t,c or g
gggcgctcgggggataaggcgaggacgcaccagcattnatggaataggagaactcccgaagcttttagggccctgggaaagggggcgtggctggaaacggagctactggcttcggagaattctgtgaccctcaccaccgngacgaccccgaggaaacgctgtcagatcgcctttggttggcaaggcgtggttgtcctcgctgtcccgcgccttggcggaatgggcacctcactagccctggcactagctagcatcgctctaaactcaaggttagaggttttcaaattccgtcctattgttgccagacaccctcttcgttcctggtccagtgaggctttcctccctcccgccttcttgccaaatcccaggctcctctggagactccaggcagagaagggaaacgcacagtggagctgaaatgaancntgagaaagagccccttctnaatgncctnggancncntanantttnaaaaaccctgtnttttttttancntaangggttatttaggaaaa

SEQ ID NO: 28258 - DNA, 503 bp, Homo sapiens
  misc_feature (1)...(503): n = a,t,c or g
gaaaataatatgaaattcacatttcagtgtccgtaagtgaagtttcactgaaacacagccacgcctcttcatgcatgtccggtctgnggctgtttccagctgccacagcanagttgggtagtggcagcagagactgtgtggtctgcaaaaccacagatattactatctggcgctttgcanaaaaagttttctgagccctggttgaggatcatagcaaaagagggggcgagaggctgaagaacctacaggannnnnnnnnnnnnnnnnnnnnnnnnnnnnnnnnnnnnnnnnnnnnnnnnnnnnnnnnnnnnnnnnnnnnnnnnnnnnnnnnnnnnnnnnnnnnnnnnnnnnnnnnnngtgcatgcctgtanttccagctacttggaagggtgaantgggaggatcacctgagctnaggaagtcaaggntncantgagccntgatncnccctggacttcaanttggtgaaaantggaacctngttaacnaacnncaacnnccac

SEQ ID NO: 28259 - DNA, 517 bp, Homo sapiens
  misc_feature (1)...(517): n = a,t,c or g
ggttagattaagttggaaagataatgtgagtttcagtttggaggacttgagatgcatgcaaagaagcctaggctttatcctaaaggtagcagggagccattggatgttcaggatcatattgggggaggaaaattgagctcaagatggttgcctacttaccctcaaagggcagtctttagcatccctgatatgatattgatatgatgaatcacttatgaagtccattcacccaactggctaattttctgtctttggggttgggggaggaagaaaggaggtaagttattggatttcaaagtacaaagtggaagaggaatttctcaattggatcaatcagtagggacacactctccctgctgggagccaagagccagctgttgcccaggtcaggtgcaaactatggaattatagcagcacccatttgagcactggttanaangcttctggggtttccttaacacttaacccttttaaacttagccccaaacttttggtttaggccaaccttaacctgttc

SEQ ID NO: 28260 - DNA, 517 bp, Homo sapiens
  misc_feature (1)...(517): n = a,t,c or g
gagagagttgacggacccatagtcaggatggctgctggctttgtcactgagtagttgggttatgtactcaaattacttcacctctctgaggcttagtttcctcatcggcaatattgaacaataatagtgcctgccccactgggttgccgtgaggacccaataaggcaatgcttatggagggccctgctcggtgctggtacagaggacctgatgaatcccagcactgaccttcccatccacctgtttagattccaaatttcagagggacctggtgaccctgagaacagattttagcaacttcacctcaaacactgtggcggagatccaggcactgacttcccagggtgagtctggtttggatggggctctgggctggggccaggccagggaggaggaagttgacccctaagccaagtctccgtgtcctccaggcagcancttggaaaaaacnatngcatntnttaaanctnaaggnggnngggtttaaaccggnaccggangcnagggaaaaaaccct

SEQ ID NO: 28261 - DNA, 517 bp, Homo sapiens
  misc_feature (1)...(517): n = a,t,c or g
gggcttgggtagagtgaagagtgtctggtgtaaccatagtgtctggtgtaaccatagtaagaggtcactagataataaacgaggtgaataaaagaactgccaggtagtagtgtgggctcatttgaaaataagttacaattaatgaaatttatcttcatatatctacaaatagagcaaaaatgttctgatgcagctattatcattctatgtgaaaatatggaatataaatctctggctactctatattatagtaccataaataagtacaaatatatgtgggcaagaattggaatggaacaaagaataaaaaaattgatgtgtaaggctaggnnnnnnnnnnnnnnnnnnnnnnnnnnnnnnnnnnnnnnnnnnnnnnnnnnnnnnnnnnnnnnnnnnnnnnnnnnnnnnnnnnnnnnnnnnnnnnnnnnnnnnnnnnnnngcttacctcctgagnactgggantnagggccntgccncccccccgggtaaatttttggatttttangnaaaaagggga

SEQ ID NO: 28262 - DNA, 514 bp, Homo sapiens
  misc_feature (1)...(514): n = a,t,c or g
gattatcttcttcaagaaaggaaaaattccttcaaagatgtgtctgtactcactgtttcctatttatctcttcagtctcttcccttacccactcacactgggatttgtatcccctccacttcatccaaacctactgtgaaaggtcatctatcaccaccacagggtgctagtcagtgatcagttccccagtcctcctcttactgctcatcggaagagtctgacctgctgatcgtgctttgctgctttctagcacttacttcacttgactttcaggacttcacaaactcctggattttctccagaagcaccagccactcctcctcaatctcattgctggttcctctttatctctttactttacctttggaatgttccagagctcttcaaggtcttcttttatctgcatcgattttcctgatctcatatcatgnatcactttaaaatatcatctgnacaccnttgnttctcaaaattantttaactcaaggcctnatcccngacntggaccttaaat

SEQ ID NO: 28263 - DNA, 521 bp, Homo sapiens
  misc_feature (1)...(521): n = a,t,c or g
gacctgtttgtaattcatcaaagtcatcacataacaatatgtttgttaaaggaactgccagagcaagcagagatgagaggagggaaagagaagaaaccgggagaaggcaggtgagggtgaagaggggcaaatctacttcatttttgcctaggcttcattttaaagctgatctataaaaaatcttacatcctctacatttaagatctcaacgattttattaagccctaagctttcagggtcttaacagattgtgttaatacaggaaatatcaggaacttcctgaaagcagtcctcgccctgctttctcatggacatctcagtgtttgtcctttggctcatacatttgaggcctccattttcttcataaaataacgatgacaatgatgaaaacacccctacacatacacatgcacacagacacagttaacagttctcctctacttttcacacacttttnaagaantntgagaaangggaataaaatnccttnnggnantttcaaagggntttccaaactaaaa

SEQ ID NO: 28264 - DNA, 517 bp, Homo sapiens
  misc_feature (1)...(517): n = a,t,c or g
gcggcacgagtacttttccctttacaattaatgtctccgaagagatactttaaagttatataaataccatattgcatatcaaactttcatgcactagttttatcatccactgatgattcgatcccaaattattaccatgataatttccaaatggtgatttctaattctgccatttcttcaacatgtaccaattggcattctactgtaaggaggtttcccttcttgctcaaatacttatttaaatatgtactcattgattctccttttattcagtgagttataatctgtttctatcttttcttattttgatactcaaatcgtcccanatttggggcaactggaagtctcttcaagcagattttggtgtccttttcatgtcttttccttctgcctttgagtacttccttaatctctggctcaagaaatctctgggcgtggaaaattcttaagctgggtgtgggggctcatnccnggaatncnaacttttgggaggcggngccaantggannccctgggc

SEQ ID NO: 28265 - DNA, 513 bp, Homo sapiens
  misc_feature (1)...(513): n = a,t,c or g
ggtttatgtctctgaggctctcatattaaaaacagaanaagatttacaaatgttgaatcatcctagcatctaggtcttgaatctgcatttctttcaagcatgagtgatcattgnggtttacattgatgtttatagaaacctctctgacttgttaggccctctgtgtccagatcatcacaaaataccttggccttattactattccttagttatagaaagttctgagaactagtatctctacctacaggatatatactgttaatcctacatcaaaacgatacgaaggatactgagcttccagacaccattcttccacattatctctaagtcggtcttaagaagtcctattggaaatcatagccatagatagtttaatgaagataaagatccctctgaggccccatatctagactactttttagcttgacatacccattcatagnctanancctggaaaaattagggcccaggccnttaaanaaaaattnccccttnagggganaaagggccggc

SEQ ID NO: 28266 - DNA, 507 bp, Homo sapiens
  misc_feature (1)...(507): n = a,t,c or g
gnnnnnnnnnnnnnnnnnnnnnnnnnnnnnnnnnnnnnnnnnnnnnnnnnnnnnnnnnnnnnnnnnnnnnnnnnnnnnnnnnnnnnnnnnnnnnnnnnnnnnnnnnnnnnnnnnnnnnnnnnnnnnnnnnnnnnnnnnnnnnnnnnnnnnnnnnnnnnnnnnnnnnnnnnnnnnnnnnnnnnnnnnnnnnnnnnnnnnnnnnnnnnnnnnnnnnnnnnnnnnngnnnnnnnnnnnnnnnnnnnnnnnnnnnnnnnnnnnnnnnnngagtgagactaagtaatttatnnnnnnnnnnnnnnnnnnnnnnnnnnnnnnnnnnnnnnnnnatgtctggcatcttttctttggtgtaatgttttgagattcatccatggntttgcatttatcaatagcgtatttcttttgngtgntcagtancattccattgtgtggagagacaacatttaagttcaccattttanctgttgaganaaaatttgggtgggtttaaacttttgggtttattc

SEQ ID NO: 28267 - DNA, 513 bp, Homo sapiens
  misc_feature (1)...(513): n = a,t,c or g
gctgtactaggagtcaggagatcagctttgcctcaccnccttcctgctgtgaggccttcaataagttccatcccccttcanagccacagagctgtccatgctcttgggcaccaggataaacctcctcccagggctgttgggaaaggacccagttctaaggaggatctcggttgcagaatgaagtgctggcaggcagggacccaccatcccactaggctgctganaaggcaggttcanagtggtgccgggactcaggcctgggtctacccgctacgtgctttccccaccatcgcctcctgctctaggatcccccccacccccagatagggtctttttccacacttgtggcaggctgtggtgctcactgtggggcctgtccagaagtgtgatgttgcagctgacgggacagtaaacctttatctgggcccggcgtggtgggtaaccctgngatccnagacttttggaaggtttaggganaaagaattgtttgnccccngggttcnnaacccccta

SEQ ID NO: 28268 - DNA, 503 bp, Homo sapiens
  misc_feature (1)...(503): n = a,t,c or g
gggatgaattctatgatcccatttttgaaaaagcaaacaaattgcctgtgtgcaagtttggagggaaggatacccgccaaactattggtggttagttggtgatgagtgctgattagtttacacactttngttctgcttcttttgctgtgattgcgtatgaggcatgatttctggntttttttggntttttttgggggcgggggggttngnntgntttntttgttaggttnttttganacanagtctnttnnnnnnnnnnnnnnnnnnnnnnnnnnnnnnnnnnnnnnnnnnnnnnnnnnnnnnnnnnnnnnnnnnnnnnnnnnnnnnnnnnnnnnnnnnnnnnnnnnnnnnnnnncntatcccccngccggtgctgtacngagnattnctctacatgngcgtggcctncctgaatnnctttnatgtnttggaacgcttnagnatnttctganccgncnattccaacggcncaannctttttggggaaattnccantntnccga

SEQ ID NO: 28269 - DNA, 517 bp, Homo sapiens
  misc_feature (1)...(517): n = a,t,c or g
ggtttgctttctaaatgttagttggctgggtgtccttgatagtaccagttttggtggtagtgggcatttgcggtgacatcacagatgtcagaaactgaagcctggtgggtgggggtactgcactttcactcacctttttgtgcacgcatctatcaggaatgcctgagtcctttcactgggaaaaaaatgtggaaattctggggttcacggggtttgaggagtggttcaggcaaatgtaaatgagatccttggataatcagggatcaaagtccagtcccaaagccagacctaggtccagacaccttcccagagtgcttatacagtagtgctcagtacagggctagcgtggaaggggaattggagacacctggatctccaatctccccctccttctgacagctggacttanttgntcctcttctaaaatcaaatcaaactccatcattatttccactttnaangggaaaaanatttnggggnnantttntncaattaaacctatttttnaaanaaaatt

SEQ ID NO: 28270 - DNA, 511 bp, Homo sapiens
  misc_feature (1)...(511): n = a,t,c or g
gaaatatttgnncatggngatatattagaaatntancataacacnnattggtgaaaaaataattatnccaattgtctgcagttaggtaactnggttgtnnataatcaaactgtttanacaataacattgaantagttactgaattgaacacttccttattctatagacgaataatatggagctcaggnagccaaagtaatttgcacaatntcatgtcactanctagggaccaggcaanatatttgctctttccattcnttatgncgtgntcctttcaaaagtctntataagtctccaatattatccnaaggacttggggnaagccnngaaccccattagacgatnccttnggntcatgtaggaaaananggtttangctngtatnaacatanatntacttaacaaaagctattctcggtttagctatnaatacaccttgncnttccntnanaaaagcccgaacccctggganggaanggttaaatnggtcctttggtttnancaaacccca

SEQ ID NO: 28271 - DNA, 509 bp, Homo sapiens
  misc_feature (1)...(509): n = a,t,c or g
gataccctggagatacctaaaaaaggtacactatttaggttcagttccatgaaagcaaggcctagaaagcaatagtgtctttgtgatcacacagaatttgggaacaaggctgagagaattttcctttaagtgatatttcataggacttataaaacataaataaatagttatagaataataactacagaaaacactctatgataccagctgacaagctgcatgagaaaccttatctatctcctgcataaatccctattacaaacagacccatggccaggaggaaatcaatataattaaacctcacagtggggagaacttcctctgccaaacttcaagatcaaagaaggctttgcggaagagatggcattggatctggttctgaaagataggaagaatttgaagtataaagtggactattattcaccntnaaaagaaaatcctggntttggacaacncngatgaaacccnggggccnttncctnaaaanagnctttaaaggncccnccgcc

SEQ ID NO: 28272 - DNA, 523 bp, Homo sapiens
  misc_feature (1)...(523): n = a,t,c or g
gctggangaattattagnngacttacctgaattcatgnatttaggaagntttacttgactatatnnatattngngctcgttggcttaatgttnccacactgngctccataaagtcagagactgtatccattgtgcttactggaattgctcagggccaggaacccagtaggtnttcaataaaatatttgcttattaatgagaacacatcatgaaccataaaggattgccaagaactttgtattttatttanacactgcccgtcaatgtantttactgctcgttagtgtantttaactagagtttaggctatatagacaggtatggntgagagataaggctagacaggtaaaggtacagtgggaccagattgtgatggcccttgaataaaatagngaggaactgtttgaanctttattngtaaaaaatgaaaattgaanangggctttnttttaacctttcgaacctttaaaccnncctttcaaanctaacttgggaaagttanggaattaacctaccttgccca

SEQ ID NO: 28273 - DNA, 547 bp, Homo sapiens
  misc_feature (1)...(547): n = a,t,c or g
gtagagatggggttttgccattttggctagnnnnnnnnnnnnnnnnnnnnnnnnnnnnnnnnnnnnnnnnnnnnnnnnnnnnnnnnnnnnnnnnnnnnnnnnnnnnnnnnnnnnnnnnnnnnnnnnntgaggttttctttaaggaactcagtctactttgaaatattaagctgcctttttcataaattcaatagatcaataataacagagacattaataattgtattaattatctattaactctctgtggcagtcattatgtgccaggcactgttttgagtcctttttctgtgttaacttagctggtcttcttaaaaccatgtgagacaacagactgttatcctctatattttaaacatgagagaactgaggcaaagagagataagnccttattcaagaaatggcagatcnaggatttgaacctaancagcttgagggcctgggtcttaaccatactctggtttttaaangggaancctttgagggnaaacagggnttnttggnaaggaccggtnccctgganagctggcaatgaaaaaaaaaaaaa

SEQ ID NO: 28274 - DNA, 527 bp, Homo sapiens
  misc_feature (1)...(527): n = a,t,c or g
ggttacatctctcttccagcttagtttttagtgtctgattgtgacctctgcatttatcttcaaataccctaattttaaaacaaaagaacaagaaaagtttataacaccatgttcactaaaaccacggttgaatcttgggtgtgggcatcctttcgagtgttgtccataagagcagttcgtggaattttgcccatctgacccatattatcagcttattctgccaccagagtagagtctaataaattccaaagtttttatttgctccatggtgtatgttctgactttgaaaatgtcagattctataatcatacccctaacatccaggaaacaaatgacagattatctttaaactgaaattgactctacaatgcaacccttaatgctgaatggattaaaaaagtcagcctttantactggttggaaagggcccgnaaaaagttgnccttttgtggtggggatctgccnggctaaaccacgtgtggttccatcgatcctgganggngcccccttggatcatcattaaaacg

SEQ ID NO: 28275 - DNA, 523 bp, Homo sapiens
  misc_feature (1)...(523): n = a,t,c or g
gagaatatttgatcctcacataaaatgtccttgtttctgaaagaaaacatggtaaaaattgttattgagtccatgtctttgccaccttgttggacttgatttccctttctctgtgttcctcccgccctcagtctctctcagtctgtccttttttgtgtgtggagttgtgggcaggtcattggactgggactgactttaccagttttcaggctgtggggctagtcagtcattctctctgagccttctacctctaaagttgagttctttttttaaattctttttgttttgtttttattttttccttgccactatacaagcaaggatagataaagctttttattattattgntattattattatttcgagacagtctcgctctgcatccaggctggagtgcagtggtgtgattcagctcactgaaccttgcctccgggtcaancaatcttctacctaagctcctangaannnnnnnnnnnnnnnnnnnnnnnnnnnnnnnntaattttggattttangaaanccag

SEQ ID NO: 28276 - DNA, 552 bp, Homo sapiens
  misc_feature (1)...(552): n = a,t,c or g
gctaaaacttttctatggcattcagttgttctactttcttaatacttccaagaacaaattttcaaatatgttcatcatcagttcaagaaaatgtttgataactatgatagtcttttgctttaaaaaattttacatctgagatcaacagatctttttgtaaattcccatttgagaatgaaagtttctgtttttcctcttgttttgactagagagatctggaaagatttgggtatttacttcccttcaaataaaaaataaaaaactattcttaatagtttcaaattcgaagttcagcagcctgttcttttttttataaaatattaaagagaaaaagccgaaaatgttctacatactctttttcttctagtttgagaagaaactgctttatgtggattgacacctcacataccctgggtttaaaaagtnaccnttntttgnaagggccttttttanggcccctggaatgggtctaacctttgggncccaaagnanggggggntccttttccanaaggttcctntnttaantgggcaggcaattggcataaagctc

SEQ ID NO: 28277 - DNA, 529 bp, Homo sapiens
  misc_feature (1)...(529): n = a,t,c or g
gcactgggggttctctatctctcccactgtcatccccactgctggctgcctctttctgctcttcctcgctgtctgagtctcctttgggggctccagagcccctggtcacttatttttctcctattttcttccttttcagttccacccagttcccacaccactcccccagctgagcatcttcctccatgagaactgtccagggctgctgggagagaacattgtggaacagtgagggagaggtgttttctgcatcatctgagggtcgttactcccgggtcagtgccattgcggtacttccccgaccctataggattttcctaaggattttgatacaattttatagggttgttcagagacatattgggacctcttcctacaattaatagggcttttatccactatggttaatagggttttctgntacagacttaangggctttttttttcctacnnattaaangggttctaaccacaggttttctttactggcttaanaaggcttccccacaatttaaagggttttattccg

SEQ ID NO: 28278 - DNA, 547 bp, Homo sapiens
  misc_feature (1)...(547): n = a,t,c or g
ggaaattttcagtatcatagttgatgtcccagaatcaanctacaggattaggtaggnttcgtatctanactgatgtgtaggagatatgattagtcttagnnnnnnnnnnnnnnnnnnnnnnnnnnnnnnnnnnnnnnnnnnnnnnnnnnnnnnnnnnnnnnnnnnnnnnnnnnnnnnnnnnnnnnnnnnnnnnnnnnnnnnnnnnnnnnnnnnnnnnnnnnnnnnnnnnnnnnnnnnnnnnnnnnnnnnnnnnnnnnnnnnnnnnnnnnnnnnnnnnnnnnnnnnnnnnnnnnnnnnnnnnnnnnnnnnnnnnnnnnnnnnnnnnnnnnnnnnnnnnnnnnnnnnnnnnnnnnnnnnnnnnnnnnnnnnnnnnnnnnnnnnnnnnnnnntggaaaattcacctngaatcntttngggnattcctccaccaaccccaanattgtaagaatttttgnatgggannatttacnggtaattttgccaacttttngcctnttnanngtttaanatggggttttncnanttantnctnntttttnactactaa

SEQ ID NO: 28279 - DNA, 540 bp, Homo sapiens
  misc_feature (1)...(540): n = a,t,c or g
gctgtgagtctctggaatctagtttttgtggaactactaccctctagcttctgaaacaactttagatgattccttttaaaaattattttcttttattccaatcttaacctgttaggtatctgatccttgcctattcttggcagataagcatatccaatagtgtattttattaaataatcgtgctctttgataagaaaataaagaataagtttttcagggacttagatttacttactttgctttaatttcacttttgtgtatgtgtgggtgtgtgnnnnnnnnnnnnnnnnnnnnnnnnnnnnnnnnnnnnnnnnnnnnnnnnnnnnnnnnnnnnnnnnnnnnnnnnnnnnnnnnnnnnnnnnnnnnnnnnnnnnnnnnnnnnnnnnnnnnnnnnnnnnnnnnnnnnnnncacccacaggtttttggatttttaaagnaaaaccggggttaccatttaaggcagctgatttnaactcctggccttaggggaaacctgcctaacctccaaaggtgggatacaggcgggancctcnccccgcc

SEQ ID NO: 28280 - DNA, 546 bp, Homo sapiens
  misc_feature (1)...(546): n = a,t,c or g
gagtttctaaacctttctttacatggaatattgccagacatagttaaaaggattaactgaggttttcttaatgtatctagctccttcagtcctgaaatacattttctgcttttgagtttaacacattttctatatgctgttttaggggaggaaattatattgaccctaaatatttttttaaattggatttatcagtagacattaagataatcnnnnnnnnnnnnnnnnnnnnnnnnnnnnnnnnnnnnnnnnnnnnnnnnnnnnnnnnnnnnnnnnnnnnnnnnnnnnnnnnnnnnnnnnnnnnnnnnnnnnnnnnnnnnnnnnnnnnnnnnnnnnnnnnnnnnnnnnnnnnnnnnnnnnnnnnnnnnnnnnnnnnnnnnnnnnnnnnnnnnnnnnnnnnnnnnnnnnnnngaggnccgaaattgaaacctcctgnttagcacgggggaacccggtttactaaaatcccaaaaattaccnantgcgnggnaggcncctgtagnccaantgntngaaggcttaggcangaaaaggcgtnacccagag

SEQ ID NO: 28281 - DNA, 544 bp, Homo sapiens
  misc_feature (1)...(544): n = a,t,c or g
ggagaaactcagttcaaacacaatgatataggcagctttaaagtaaaaagatgnnnnnnnnnnnnnnnnnnnnnnnnnnnnnnnnnnnnnnnnnnnnnnnnnnnnnnnnnnnnnnnnnnnnnnnnnnnnnnnnnnnnnnnnnnnnnnnnnnnnnnnnnnnnnnnnnnnnnnnnnnnnnnnnnnnnnnnnnnnnnnnnnntaattacaggtggtgtgcannnnnnnnnnnnnnnnnnnnnnnnnnnnnnnnnnnnnnnnnnnnnnnnnnnnnnnnnnnnnnnnnnnnnnnnnnnnnnnnnnnnnnnnnnnnnnnnnnnnnnnnnnnnnnnnnnnnnnnnnnnnnnnnnnnnnnnnnnnnnnnnnnnnnnnnctgtaacaaacttagaagagttgaaatcntncaaagtatgggctntaacatatngaagnancccggactggtttgagaaagaaaatnccccaaagcttanaaattaaccacccccttttaaatggtcatggttcaaaaaggaattccangggaaattccaatnntttgaattgg

SEQ ID NO: 28282 - DNA, 540 bp, Homo sapiens
  misc_feature (1)...(540): n = a,t,c or g
gggctaaacaaactgtggtgcatctatatcatggaatactactcagtaataaaaagaaacaatctattagtacatgcaacaatttgtatgagtctcaagaaaattatgctgagtgaaaaaaaaaagccaatctcaaaggttggnnnnnnnnnnnnnnnnnnnnnnnnnnnnnnnnnnnnnnnnnnnnnnnnnnnnnnnnnnnnnnnnnnnnnngcnctagggatgggttgggggcagtacaggtgtgaccatagagaggtagcatttgggatatttgtagtaataaaacagttctgtatcttgacttttactgnngttacatcaatttacnnnnnnnnnnnnnnnnnnnnnnnnnnnnnnnnnnnnnngagtntaggtaaaaactggngaaatttgaataaattcaanggattgncccattnaaatnccgaaattaaaattggctnnangttttnanaggtnccnttggggaaccaggntaanggtccccaaacgnccttgncttgaattccntgaancttanaatttaaaanaaaggtt

SEQ ID NO: 28283 - DNA, 512 bp, Homo sapiens
  misc_feature (1)...(512): n = a,t,c or g
gggtgcagnacagcggcacgggccagcagcgcccagagcgggcatcgntgcagttcctgcagaactacacggccctggccagngccgncgatgccatggactttatcaacgacgccaccgacgtcaacgatgccctgggctatgtgacccgcttctaccgcgaggcctcgtctggcgctgccaagaanaggctgctgctcttctnagatggcaactcgcagggcgccacgcccgctgccatcgagaaggccgtgcaggaagccnancgggcaggcatcgagatcttcgnggaggacgagggccgccaggtnaatgagccccacatccgcgtcctggtnaccggcaagacngncnagtacnacntggcctacggtgagagccacctgtccggggcccnnntannngnctnttttncggggggnttccacanacnttttnannanggggccttggtaanccaccttgacgcgggacaaaccttgtnttcccctntccaattataattanacgag

SEQ ID NO: 28284 - DNA, 525 bp, Homo sapiens
  misc_feature (1)...(525): n = a,t,c or g
gatcttaacaagacgaggggttaccacacttgcttctactgaagttgcagcatgaactctcagtactggaggtcacatccnttaaaaatgtggncaggnnnnnnnnnnnnnnnnnnnnnnnnnnnnnnnnnnnnnnnnnnnnnnnnnnnnnnnnnnnnnnnnnnnnnnnnnnnnnnnnnnnnnnnnnnnnnnnnnnnnnnnnnnnnnnnnnnnnnnnnnnnnnnnnnnnnnnnnnnnnnnnnnnnnnnnnnnnnnnnnnnnnnnnnnnnnnnnnnnnnnnnnnnnnnnnnnnnnnnnnnnnnnnnnnnnnnnnnnnnnnnnnnnnnnncactgtntttcacaatggttgaactangtttacagtccnaccaacagtntnaaaaggttcctatctttnccattctttncccacaattgggnnctgggtaaaaanttggaaccnntttttggcccaaattttnnngggccnnaaaannaacccncggngtnnnccnnanngggggaattgnccatganacnctttgc

SEQ ID NO: 28285 - DNA, 528 bp, Homo sapiens
  misc_feature (1)...(528): n = a,t,c or g
nnnnnnnnnnnnnnnnnnnnnnnnnnnnnnnnnnnnnnnnnnnnnnnnnnnnnnnnnnnnnnnnnnnnnnnnnnnnnnnnnnnnnnnnnnnnnnnnnnnnnnnnnnnnnnnnnnnnnnnnnnnnnnntttaaaaaataaaaacatcatgcctgatttagaatagagattgcagaagttgtcgtttttagttattaaggaaattgtttttaaaatagacttcacattatgtacttcctatagccagtcctcagttatcttcccttaatagttacagttaatccaaattgtagataatccaaaatattagaatatgtaatatagaaaaattattttagatttactaattagttaccaagttgagggaaagtgggaaaagagaagtntgagaagttaaaccttaaaatgggggaaccccatnnccnttangggnctggaaattttttaacnggngaancacattgggttgaaacntanaaggntcagngatttgataaataaaatgatatcctgttgggaaatgcctgggt

SEQ ID NO: 28286 - DNA, 530 bp, Homo sapiens
  misc_feature (1)...(530): n = a,t,c or g
gccatgtgggatgggagatactgtngnggtcacctctggaaaatacattctgctactcttaaaaactagtgacgctcatacaaatcaacagaaagagcttntgaaggaagactttaaagctgcttctgccacgtgctgctgggtctcagtcctccacttcccgtgtcctctggaagttgtcaggagcaatgttgcgcttgtacgtgttggtaatgggagtttctgccttcacccttcagcctgcggcacacacaggggctgccagaagctgccggtttcgngggaggcattacaagcgggagttcaggctggaaggggagcctgtagccctgaggtgcccccaggtgccctactggatgtgggcctctgcancccccgcattaacctnacatggntaaaaaagannnttttttgggacggtcccggnaaaaaaanaaacnngtatntggnccaagaacnggggctttgnggcttntgccacctttgcaggaggactttggccntanntttgccttattanaaagcttttt

SEQ ID NO: 28287 - DNA, 535 bp, Homo sapiens
  misc_feature (1)...(535): n = a,t,c or g
gctnnnnnnnnnnnnnnnnnnnnnnnnnnnnnnnnnnnnnnnnnnnnnnnnnnnnnnnnnnnnnnnnnnnnnnnnnnnnnnnnnnnnnnnnnnnnnnnnnnnnnnnnnnnnnnnnnnaaanntataananatcatnnaatatntataanaatntagaanggtcaaaaagacaaatttgatggactttattttngnnannnnnnnnnnnnnnnnnnnnnnnnnnnnnnnnnnnnnnnnnnnnnnnnnnnnnnnnnnnnnnnnnnnnnnnnnnnnnnnnnnnnnnnnnnnnnnnnnnnnnnnnnnnnnnnnnnnnnnnnnnnnnnnnnnnnnnnnnnnnnnnnnnnnnnnnnnnnnnnnnnnnnnnnnnnnnnnnnnnnnnnnnnngagaccgaattttaccnttggggnncncgctttgagagtnaatncccnnnannnncntanttggngntttccccttcccnggaaaatntttgaaccncggngnggcaaagtttgnagtagccaaaaatggcncnctnacttccanttgggc

SEQ ID NO: 28288 - DNA, 516 bp, Homo sapiens
  misc_feature (1)...(516): n = a,t,c or g
ggaaataaaacagtttgcaacttctgctttggagannnnnnnnnnnnnnnnnnnnnnnnnnnnnnnnnnnnnnnnnnnnnnnnnnnnnnnnnnnnnnnnnnnnnnnnnnnnnnnnnnnnnnnnnnnnnnnnnnnnnnnnnnnnnnnnnnnnnnnnnnnnnnnnnnnnnnnnnnnnnnnnnnnnnnnnnnnnnnnnnnnnnnnnggaactttaagtaatgcattcactccttcatttattgtccaaccaatgcagatcctacttcttgactccccactttgtaacagaacaagattacaggcctcttcctttcgatttttctcccctttttacctgccaacttcctatnatggcatgtgtaccttaanattgcanggggctgaaatttacaggctgganntgggnnagaaatggntttnaangggggttttaaaagntaaaatcaaaaggggtttaanatattaaactgggtgcaatcanatcccctttccttacaaacctgacttgttgganggaa

SEQ ID NO: 28289 - DNA, 529 bp, Homo sapiens
  misc_feature (1)...(529): n = a,t,c or g
ggcacaggccagttcaactgttttctgcaggcttcccttactgtctctggtcagctgacagggttggttggtgactagatgatctaacatggtctcaggtaacttggctgggacttgtttgttgtccacacagtcttattctccatggctcagngttcacaaggtgatttcaggaaaaaagttgcaaaagagaacctgtccctgatgtgtaagcacttttcaagtctgtttgcttaatgtcccattgccaaagcaagtnacacagccatgcctacagtcagtgcgggactggatatgggaaggggaattactgccatttttgcaaacaatntacaatttaagtatgagcaaacttacgcaaataggcaaggngcaaaggnttacgcttgtaaacccnncacntttggagggccnngnaacgggnanatttgggcccggattttgaaanaactttggccaacatgnaaaaacccnttttttttaaaaatntaaaaattaccccggtntggngcccacanttgnaatcccg

SEQ ID NO: 28290 - DNA, 265 bp, Homo sapiens
  misc_feature (1)...(265): n = a,t,c or g
ctcctccttgcgtanaagttgatcagcactgtggtcagactgcatttatcttgtcattgccagaagaaatcttggacagaatgtaacagtacgtctctctctgattgcgatggaaggtgataaactgatactcctttattaaagttacatcgcactcaccacagaaaaccattctttaaagtgaatagaaaccaagcccttgtgaacacttctattgaacatgactcatggagaagagcttggctctgatgtgcccaggattctt

SEQ ID NO: 28291 - DNA, 261 bp, Homo sapiens
  misc_feature (1)...(261): n = a,t,c or g
ccgaggtccacctcctgctcctgaggggggctcccgggatgaacaggatggagcttcagctgagacagaaccttgggcagctgcagtccccccagaatgggtccctattatccagcaggacattcagagccagcggaaggngaaaccgcagccccctctgagtgatgcctacctcagtggtatgcctgccaagagacgcaagacgatgcagggtgagggcccccactgcttctctcanaggctgtgaccggcagctaaggc

SEQ ID NO: 28292 - DNA, 263 bp, Homo sapiens
  misc_feature (1)...(263): n = a,t,c or g
cctgcttccagctgtgggtgtttctccctgggctccccattgagaacagagagggacatttcactggccttcatgngcttgtcagctttggcgggacctttcactgngtgggcctgcatccatcttccatttgggccacttctgcatctccttccccagaaggcccttccttgcctgtgcctggatggaaagcacgtgtttcaccctctggaccttggtccctctccctcaatccagccatgcatgcgctcagttggatttca

SEQ ID NO: 28293 - DNA, 264 bp, Homo sapiens
  misc_feature (1)...(264): n = a,t,c or g
aggctggccctgcaatggggccctgagccctccctcttcatcccccaaggcctcaactagagggtggtcccccgagggcttggtgtctactaccgaagggcccaagacctcctgggtcctctcaggctcccccttccccaaggcagggacaggccctgggggtgccaccgtgggccctgccacccanaagtctggctgaggtctgggcaggggcagggcaagcttgacctctactgttgaccctttggcctctgnatttggttc

SEQ ID NO: 28294 - DNA, 260 bp, Homo sapiens
  misc_feature (1)...(260): n = a,t,c or g
tattctgttgtattttttgtgatgctcaaatctgtataaatatcacggagcagtggaatttaagattacttttgaaaagagactacatttgggcctctgtttccatgggttttgcatctgtgggtgccacaactatggattcttccaaccataggttcaaaatactcaaaaaaaaatttttttaaatgaaannnnnnnnnnnnnnnnnnnnnnnnnnnnnnnnnnnnnnnnnnnnnnnnnnnnnnnnnnnnnnnnnnnnn

SEQ ID NO: 28295 - DNA, 264 bp, Homo sapiens
  misc_feature (1)...(264): n = a,t,c or g
ctttctgtctccctgtgctcatcatgacggtgtcctagcacaggctttgaagttgaatggtcctgggtttgaattcctagttcatcaccatctgtcactttgggcagaatacttatctctgtgaacctcatctgtaaaatgtagggaaatacagtttcctcatggagctgttacnagggttaaggaaagtggagtgcttggcataggacctgcaggccacatgctggtcacaagtggtggctgtggaaatggactttgttggtg

SEQ ID NO: 28296 - DNA, 528 bp, Homo sapiens
  misc_feature (1)...(528): n = a,t,c or g
gctggaaaccaaagtatactttgcaggattccctcggaaagtggaaagtgaactcattaaaccgattaaccctcgtctagatggatgtatacnaagctggaatttgatgaagcaaggagcttntggaataaaggaaattattnaagaaaaacaaaataagcattgcctggttactgtggagaagggctcctactatcctggttctggaattgctcaatttcacatagattataataatgtatccagngctgagggttggcatgtaaatgtgaccttgaatattcgnccatccacgggcactggngttatgctngccttggtttctggtaacaacacagtgccctttgctgngccttggtggactccacctntgaaaaatcacaggatattctgttatctgttgaaaatctgtaatatatcggatcnaggcctaatctatgtccgatcaccaatctcatttggaattaaagtcaccnnaaacatttggagtgnntacnccnttaaaatgnaaaccntttcccntgaaga

SEQ ID NO: 28297 - DNA, 96 bp, Homo sapiens
  misc_feature (1)...(96): n = a,t,c or g
gctggcaggctggtgcaggtttgcagcanagttttcaccgatttatgggaaaatgggaaaaagtaaggacacgaaagtaaactttttttttttttt

SEQ ID NO: 28298 - DNA, 522 bp, Homo sapiens
  misc_feature (1)...(522): n = a,t,c or g
gaatggaagagcgactagcagagtttatttcctccaacactccgacagcgtgctgcccttggcagatggagccctgagctttattcatcatcaggtgattgagatggcccgagactgcctggataaatctcggagtggcctcattacatcacaatacttntacgaacttcaagagaatttggagaaacttttacaagatgctcatgagcgctcagagagctcanaagtggcttttgtgatgcagctggtgaaaaagctgatgattatcattgcccgcccagcacgtctcctggaatgcctggagtttgaccctgaagagttctaccaccttttagaagcagctgagggccacgccaaagagggacaagggattaaatgtgacattccccgctacatcgttagccagctgggcctncccgggatccctagaataaatggccagttgagcacctgtgacagtcctgaccttccagagaccgatgatctatgagggccatggggaatttttgccattaaaagacc

SEQ ID NO: 28299 - DNA, 529 bp, Homo sapiens
  misc_feature (1)...(529): n = a,t,c or g
gctggaagaataaattccccagctgnggtngggggaacatgcctgttgtcccagccatttgaggggctaagggagggggatagcttgagtcaaggagtttgaagttactgngaggtatgatcacaccactggaccccagcctcggtaacggngataccttatatccaaataaaataaaatncaatataaaattaagttaaaaaataaataggcatgtaaagaaacaagaaaaacctaatttataaccaagagaaaagtcaataggtgaaaatatatccaaaatgaaagagatgaccaaaaatnanaaaaataaataaataaaattattctaaatgcactccacatgttccagtagtaaatataggcatgatgaaaaaaataaaatanaatanaagatgtggaacagacccaaatggacttattgaaatgaaaaatgactatttaaaagaaaaatnccttaatnggaataaagnaaantttccntganaggagaaataataatgacttgagacttaaaactatccaaatc

SEQ ID NO: 28300 - DNA, 524 bp, Homo sapiens
  misc_feature (1)...(524): n = a,t,c or g
gctgggacattctttaggtgctngtttgagtttctgttttgttaggcacattagaggactctatatgaacaagttcctaggggaggaaattggtgacttagatgaaagggtgaaaaaggtgaaaccttcacattattgngtaagggattgtcccanaatgtgtgaaatttgatgtagtccttcttggcttcgttttttcctcanatgttctggatgaaacagttccccctgtcacacgtggagataaggatgtggctctaggcagggcatatcctgtgtttaanactgtgttgactcttcttttacagngtctgccacttgtttcctgcctaggtctttagttttgagtgaagtacagctgtgaagtcctagacttgtaatgctaaggcgttcattatgttaaattcagtttctcttttttttttctctgnttcacatnaccttggctttaacncgtttcnggncaanccttggaacttggctggnnggntccttgacccgccctttgaagcngaaacnccggc

SEQ ID NO: 28301 - DNA, 381 bp, Homo sapiens
  misc_feature (1)...(381): n = a,t,c or g
gcttttcttgtgtgcttatgtcttttataaagttcttcatctaaaattatagagatagngcatttgcacccaaattaatgaaacaataccattaaagagaaagaaaagnnnnnnnnnnnnnnnnnnnnnnnnnnnnnnnnnnnnnnnnnnnnnnnnnnnnnnnnngggnnnnnnnnnnnnnnnnnnnnnnnnnnnnnnnnnnnnnnnnnnnnnnnnnnnnnnnnnnnnnnnnnnnnnnnnnnnnnnnnnnnnnnnnnnnnnnnnnnnnnnnnnnnnnnnnnnnnnnnnnnnnnnnnnnnnnnnnnnnnnnnnnnnnnnnnntgactgcactccagcctgcatgacagagtctnaaaaaatctgtctcaaaaaaaaaaaaaa

SEQ ID NO: 28302 - DNA, 533 bp, Homo sapiens
  misc_feature (1)...(533): n = a,t,c or g
gggaagtgtgtcctggctcctcgccacgctggctctgggtgtccctctgaggaagtgtatcctggccacgcggagatcccctggngctagggctttccaccccctgctcctccttcttttcccagtgtcagaccctggggccactgggacaggcccgtccctccatggagagccccagtcacagaggaggagacgggagggaggaggagacgggagggaggagacagtcatcagcacaccctgaatttcaggaaccgcagngggcgggctggatgtttatttagttcctttttgagtttntgttatttttccatcttcagtttctttgcttataagagtaaaaagagccagttatcttgtttaatgtgcacatgagctctagatcggtgtcacattctgccgttgttagatgtagggcaccgaggcanantggggagatccagcagcttacagtagtntgcaggtnaaaatgncnaanttaagccttcanngnaaacnntggttgaaaggnccttcaccctggttccacccac

SEQ ID NO: 28303 - DNA, 496 bp, Homo sapiens
  misc_feature (1)...(496): n = a,t,c or g
cgtgnaannnnnnnnnnnnnnnnnnnnnnnnnnnnnnnnnnnnnnnnnnnnnnnnnnnnnnnnnnnnnnnnnnnnnnnnnnnnnnnnnnnnnnnnnnnnnnnnnnnnnnnnnnnnnnnnnnnnnnnnnnnnnnnnnnnnnnnnnnnnnnnnnnnnnnnnnnnnnnnnnnnnnnaagccaagtttntcttcagaggtaaaaaggtactcctntaatagatcattactaagcgttaancgnttccgtaaattataaatgagttgcaaaacttccgatacaagctcctgtccaaacctantagttgcaggnaaagtctggttaaaggnatccagggangacttatagagnagagcaaacaacctacattgnaactgaaaattatgnaccgnctttttatccccctaaagagaccgntctactttggtggccaggggctaacaatgctcaatggacccttaanctcttgaactaanggatttttccacannacctccagg

SEQ ID NO: 28304 - DNA, 526 bp, Homo sapiens
  misc_feature (1)...(526): n = a,t,c or g
gctgaagtccgngtaggattcacagtatcatgggggacagaagtgctataggttgttgaaccctcctgtcttgacgcatatttctagtcatttccagatgcctacataatccagtaaaactccttctgtgtagatcttctgatgtacttgtatatgcagatttttagcaaatattcctaaaattgaattcctagaattgctgggctggtagggtttttaattctgatatcgtgaaatcgatcgctagagaaattttggtacctctctttggatcaaaggcatcagcatttttaaatgaagcttgaactgatttgtgtactggaatccatatcaaactacacaaatttgctaaatccctaacnaaaacagtaatgtttcagcaaactgtgagcagacccaaagggcgttgatggtattaattatacatcacttgagtggaagtaaacccagctaggtttagaagctntcnnaactggtaaggnaaacctgaanttttaaaaattggganaagncncnacataaaatc

SEQ ID NO: 28305 - DNA, 574 bp, Homo sapiens
  misc_feature (1)...(574): n = a,t,c or g
ggtattattaaactcagtttaccaaagaagcactgagacacagaggctgtgtgacttgatgtgcagggtcacattgctagtaagtagcacagctggaaaccggtcccagacagtgggatgccaggaccccttttgcaggcagggccaggcaggtagtggggacagcatgagctaaggacaatgtgcagctgagcccaggaggctgaccgccgggaggaggctgaccgccgggaggaggctgaccgccgggaggaggctggccatggggcctgtgcgctgcacccggtagcctgcctncaaccccaaggctttgcagagcctctgagtgttttacttaggcaaggagtgatggcatcaccctggcaagaatatggctcttggaccagcccaggcaagagaaagtggggtctggccaatgcttgcgtcgtgngttcagaagatnccctttaatgctaatggatgggattgacttgctgggtgacctgtaagtgtaaggaatggtttgttggggtaagcggaacccatgttaagctttggcaacaaaggggttncaattccanatttttangccttg

SEQ ID NO: 28306 - DNA, 574 bp, Homo sapiens
  misc_feature (1)...(574): n = a,t,c or g
gatttcatctaaaccattgctctaaacttagacttggctcngagtcagtaatacttctgtttactaggtttgaaatatctccctcnnnnnnnnnnnnnnnnnnnnnnnnnnnnnnnnnnnnnnnnnnnnnnnnnnnnnnnnnnnnnnnnnnnnnnnnnnnnnnnnnnnnnnnnnnnnnnnnnnnnnnnnnnnnnnnnncgtcttttaaaagaaggaaaagaaatatctcccttttagaagaaacctaaaagtctctattttgaggccacttaagatctctgaaatgattttaatgttttagagaattgtttatggtattacctgacctttttttcttgattngttttctttttctttgttattatcctatgtttaagggagaaaaataattttaaattgagcgattcttggnataatncttgctaattttaaatctaattttagcttaatcttaattaaactaaaatcttaatttaatataagtggtaaaaaatnctctacaagtgttagggctatcattattccactggatatttaggaaataatggcagattcaatattaaacccgatcctt

SEQ ID NO: 28307 - DNA, 569 bp, Homo sapiens
  misc_feature (1)...(569): n = a,t,c or g
gaaatttatatgtttaatatgataaaaaataattaggggagttgaaaataaaagtaagtaaattagaataaccagttaaattggacaaacataaacagaactataataaattgaaagtataataattgaaactgtagatcagaccgtggaatgaaaacatgagtgaattagggaaatatagatgtgaggaaattcccaataaggcagaagagaaagatagagacacaacacatgaaagagagattaaggtacattaaatatagatttagaatatatatctagtcagagttccagaatgagataataagagaatagggtagaggtagtatttgaaaacataaaggctaagaattttccagatatgattaaggaagcacatgtatacaaagcangagaagtcaagagaaatctaatggggcaggtgcggttgctcatggctgtaatcccacactttggaagctgaggtnggcagatcacttgagtccaaagttcgggccacttgggtgacatggggaaccccatntgtccaccaatncaaagtactggcatntgnacggtcctgagtccca

SEQ ID NO: 28308 - DNA, 571 bp, Homo sapiens
  misc_feature (1)...(571): n = a,t,c or g
gaattgatcttatcactattataaaacattttgagcccaggngaaatcccaagtttagatttaagtgggtatgtaaacncaaagttgttaaactgtgggctttttctttctgatttttattatagatattagtagtaagtattctattggattatgttatcaggtatacactttgttataaagttttaaaattttgctcaaggctaaaccgaaaaatagattatggaaaacctaaagaatttcacttnnnnnnnnnnnnnnnnnnnnnnnnnnnnnnnnnnnnnnnnnnnnnnnnnnnnnnnnnnnnnnnnnnnnnnnnnnnnnnnnnnnnnnnnnnnnnnnnnnnnnnnnnnnnnnnnnnnnnnnnnnnnnnnnnnnnnnnnnnnnnnnnnnnnnnnnnnnnnnnngnaatctagctactcaggagntgatgcanganaatcacttgaaccnangaggnggaggttgtangagcnaatcgggccctgactcaccctggtgcaaacaagggtttgcttaaacaaccaacaanaaggattccttgattattttccttggccaaacntgaaag

SEQ ID NO: 28309 - DNA, 570 bp, Homo sapiens
  misc_feature (1)...(570): n = a,t,c or g
ggccctgcacttgaccgcagcaggagggagtcgnggagcnggggttgncgcggtgtctccgtcagcctcaccatgaacctggaaccgcccaaggctgagttccggtcagccaccagggtggccgggggacctgtcacccccaggaaagggccccctaaatttaagcagcgacagaccaggcagttcaagagcaagcccccaaagaaaggcgttcaagggtttggggacgacatccctggaatggaaggcctgggaacagacatcacagtcatctgcccttgggaggccttcaaccacctggagctgcacgagctggcccaatatggcatcatctagcacgaggccctgctgaagtccagaccctcccctcctgccactggctctaaaccctgctcaggattcctgttgaggagatccctccttacccanatggacntggncncaggattgganttgaancntaagnctcccctacatattntancagtcaccaaacccaacacttcctttaggatgcccttagggcttggcaggccttgttaacatttgagaacaggccacccttagtct

SEQ ID NO: 28310 - DNA, 633 bp, Homo sapiens
  misc_feature (1)...(633): n = a,t,c or g
ttaanacccattgaacaccntttctnnnnnnnnnnnnnnnnnnnnnnnnnnnnnnnnnnnnnnnnnnnnnnnnnnnnnnnnnnnnnnnncacnagcaattccantcttcctccgatgtccacttngnntcgtaggggnacaaaccattacagnacctattcctgtacnccttctgccaacgggacacacagnataatggcaaatagaggaanctggncatncnnctantccnanactgganatgctctggggaaagcactngcttcgatntattcnccaaatcacantancancaccttttataaaaccnttcaactcctgtgggntctcctcnatctttctnaacaggcacantgtntttgntntaaaaanggnaccaggcctnatngtctcctaattatnaaggacccttacnctntttgnaaanccnnattgaanatcntttaaaaanactggatnatgctatttatnttctccgaancnatacnggngggcctatnacagctatncctggnggtcatgggnacatgcnatggaatcattggaccttttnataatgganccttggttggnctggctnagggtntgaaccnggccttttttancaananacattnnntnttggggggacca

SEQ ID NO: 28311 - DNA, 533 bp, Homo sapiens
  misc_feature (1)...(533): n = a,t,c or g
gaaccaattcgaattatttatacacttttgcttattcaaagtgctggtggtacaaagtgtatttgcttattgaaaggattgactgtattggcaacctgattagggaatgtggtaggtatggaaaggctttaaaaagcaatgagatttagtcatgtaaagtgtgaggatgaaatcctaaccgaatgatatctattccgtacttcctgggaaggaggatcagcctgcaaancctgctctgagggattctgagtatanaagaaaatctttccttactctgagatttgtaatgccctgacacaggccaggacagtgtgcagccagtgccctctccaactcttcctccccaacctgggagcacaaggaccttcacgaagtgcntgttgcttccaaataagtganattgatganattatnatgctttctttggtaaattanacttcccanccaancacnatggnccangccgtatcccaatgctttgggaagttaagnnaganaanccttgaggcaggnntccaaacacttggggaaaa

SEQ ID NO: 28312 - DNA, 544 bp, Homo sapiens
  misc_feature (1)...(544): n = a,t,c or g
gcattcaagtctgccacctctaggtgagcttctagtttcaggtggaccttaccaagcatgatgacattatgttacattacatcataaaattatggcccactgtctcatcctaaggaccttaggcactgaagaattaaaatctatggccttattctagccaataaattcaacctttatctcactttagtanccatttccctgaacaggaacantacaaactggnttgtgtttcatctcactgtggaatgcaagagtganaangctganaancagggaggtgaantaatataaagtgtgtataacanatttcaaatctcttgcttgggggagtctaccaggttttattatacttcagctcaganatggttctgtggntgtggcnctggccttgtngggattcttcaccagcntggaacaccgngaagtcatcactattaggaacagatacatcatngcancaaaggcaatggcaaagcctttgtcacatcangancactggcnaggttgaanctccatggggacttncnccnttangttgcaaccc

SEQ ID NO: 28313 - DNA, 551 bp, Homo sapiens
  misc_feature (1)...(551): n = a,t,c or g
gnnnnnnnnnnnnnnnnnnnnnnnnnnnnnnnnnnnnnnnnnnnnnnnnnnnnnnnnnnnnnnnnnnnnnnnnnnnnnnnnnnnnnnnnnnnnnnnnnnnnnnnnnnnnnnnnnnnantctannnnnnnnnnnnnnnnnnnnnnnnnnnnnnnnnnnnnncatgncancctagagagagagaaattaanttannanttacnaaccttcagaaatcaggggagaaaaaaaaaaggtctacttggtttcacantgaattcnacaaattgtttangtaatnatcantncnagcattaagaggcagggaggttccactganggccactangtttacctcaaatctacagcttccagcggngngcnatgcagagcatggatgatttcnagacttnaantngnngngccgggttaattgcactggggcttgtgagacantgggtgcaggccatgggagngttcctaaacaaggcagggaancccncnccaagggcaccananggggcngggnanccnctttccagncanngaancccaaaannggccntggaaaatt

SEQ ID NO: 28314 - DNA, 539 bp, Homo sapiens
  misc_feature (1)...(539): n = a,t,c or g
gaaaatatgcacaaatganagatgcgtggagatgtgtctcccagtggtcaattggtagatactatgangaaaaataaggcagcataantanatagacagtattacaggctgacactactgtaaagancangaatanttctaacatctgaacaganacctgaatgaagtnaaagtaaaccatgacanaanantanntgtgaggatcctgaggtgggcacatacatgctatattcanatactagcanggaggcaaagccattgtggctggaattcanttgacaagggggagtactaaaagtttcattgataggtaccaagaggccatgtcatgtgagctttatagtccacagttagggttttgaagtttatactgattgagatttgaagcccctggaagtttttaaatggaaaaggcatgggctctgacaaccattttancagtatcactctggtggcccggattaaataagccaananggtaccattgggattggnnaaattacntgtnnnaaaccnnttgaaaaaanctntttggggag

SEQ ID NO: 28315 - DNA, 540 bp, Homo sapiens
  misc_feature (1)...(540): n = a,t,c or g
gctagcaacccttctccacgatgttgttcccaggttctgtctaaggcaaacttggacttggactggaaggtactgcctcccctgagcaaacttgcctgcccttctaccttagatgctcccataagcatctgggtgggtttaagaaccttgtataaaggtccatgttcaggaccctttacattcccatcccaagagaaggccttaaacctgtgccagtgcagtgccacaagatgcttggcgtaaagggggaagagaaagcatagaccaagcacaactgggtttcacaaggacccctctttgccttcggagaagtcggtattggcagaaacggcacagccttgagagcctcagcggggcgccactttctgcaaggatgcccttccgttctcggttccagcagtccctgactgtccactgtgagaattccttttacatcagagatctctttcggtaagataattatgctcncaataactgtggatagaaaaatatgaccgaaaggaccatgnnattaaaattttttttttttntgggnaaggg

SEQ ID NO: 28316 - DNA, 535 bp, Homo sapiens
  misc_feature (1)...(535): n = a,t,c or g
gcttgagcctgtttcttactccttgatatttgatgtgttttctgcctgtgtgcaaatcagaaagttggtgctggtattggaattgagagtatccctggtaggaggtcacatttactaagtccctacctacactatgccaaggattctgtactttctagtttcagaatgatcgaaggaagctccttacaacgtgctgtgttgccttggtgcactgcctgttacacccacattctgcatgaagtgaatggggaattattgctgtatttgtgcttcctttaaaattgagtaaacgaaagaacttacgtagttgggatcatcatctggaaaatggaagtaatgctacttaaaatgaggttgtgaggattaaatgagttaaggaccctgacttgaaactatattcacttggtgtacttatacacagtgggcctgggtagtggcccgttcctaactcatcttctcaaaaggtaagcggaaggacaaccaatgcccaatgccaaaaaaggcacatggntaagnaaaagnggatttnccccgg

SEQ ID NO: 28317 - DNA, 543 bp, Homo sapiens
  misc_feature (1)...(543): n = a,t,c or g
gttttttttcccatgggcaactgcccccttgattaatcccatttcccttagtcctagtttttccaggcagctgagcaaacaaagatgcaggcagccattttaacgtgcttcctccctcaagccctctgggatgggccgtctgttcatcctgttcataaaccaacggcctgaatgggcttgganaaagcagcaaggatcttctgtcaggattaattttaataggccatagtctgtcacccgggaaccatagcccaggcaaatggctttaaattactatttgctgataaaaagggtgatatgagctgaaaatttggttcctcatttaaaacaacttggataactaatgcaagaatttacttttagtgtggagtgcaggtactttacagcctaaacccttgggtagctgaggaaaatctttgttgccatgggatcacagtgaaatataaagangggaaatgtggaatttgtagaagtatagaatttttaanccnggaaggaaataaaaaannnccgggnnattccnaaggnctacnnttaangctt

SEQ ID NO: 28318 - DNA, 523 bp, Homo sapiens
  misc_feature (1)...(523): n = a,t,c or g
gaactgggacaaataaatttgtatggtttataagctactggttaaaggtatttttgttataggagcctgagtggattaacacattgaagacaatatatttcaaaacatgtgttaactagacaaaagtaattttaaagtgttcttattaaagacaaggttgaaatttcctgaaacattttagagtattcaggaagcaaaactatattctagctttgtccaaaagcttccaattagggggttgtttcttcactaatatcaagacttcagggaagcaatttttactgtattcccatcctttgtaactcaaaatgtgctcaccttagttgtcattaaagtttaaaaaacaattgagtcacacttaagtccaaatacagactcatccaacaagacacaaacattcactccatattttgagaggactgtattttagaagaactgataactaatttggcaaaaacanagaaaggaaacctcattctaatacacactcaattcatcanggtccatccnnnaagcaaaggcc

SEQ ID NO: 28319 - DNA, 539 bp, Homo sapiens
  misc_feature (1)...(539): n = a,t,c or g
gattttagtcattttggcgacaaacaagataagaaaatagctccggaaactcgtcgttcaatagaagtacccctgaatgagaggatttgtctgcaagtggggtcccagtgtagcaccaatgagagtgagaagcctagcattttggttgaaaaatgcatctcacccccagaaggtgatcctgagtctgctgtgactgagcttcaatgcatttggcacaacctgagctacatgaagtgttcttggctccctggaaggaataccagtcccgacactaactatactctctactattggcacagaagcctggaaaaaattcatcaatgtgaaaacatctttanagaaggccaatactttggttgttcctttgatctgaccaaagtgaaggattccagttttgnacaacacagtgtccaaataatggtcaaggntnatgcaggaaaaattaaaccatccttcaatatantgcctttaacttccngtgtgaaacctgatccccaanattaaaacctccccntccaaaanggnngnccnaagngtgg

SEQ ID NO: 28320 - DNA, 544 bp, Homo sapiens
  misc_feature (1)...(544): n = a,t,c or g
ggaaatatctcttatcttgaacattttgcttatgttatggacaggggagagatggaaaatttaagaattaaagcataagccacatgttttggaactatttttctttgatttcaagtagaagaggtagacaggaaactgtcttatgtgcccaatgtacatagtcctaaaaattattccttggttttaatttaactcttaagccttgaccctgattaatagcagaaagtctggtctcacttctaggtaaatcaggaacttcagtatttaactttagtcatttagaattatgccccttttgcttcttattggtgttatctaatatccagagagtttaggcattttattggcattggagcattggtatctggctaatgatatcaatttctattatgcctaagaataacattcattgcttaaaatcctaacatattactctggctttcaagccccattttaaatacnttactcntctctgcaaggacgantcccctcctccntaaacatgcctangnacnttgnacttggnccaacntanacttgggca

SEQ ID NO: 28321 - DNA, 599 bp, Homo sapiens
  misc_feature (1)...(599): n = a,t,c or g
nnnnnnnnnnnnnnnnnnnnnnnnnnnnnnnnnnnnnnnnnnnnnnnnnnnnnnnggnacnnnnnnnnnnnnnnnnnnnnnnnnnnnnnnnnnnnnnnnnnnnnnnnnnnnnnnnnnnnnnnnnnnnnnnnnnnnnnnnnnnnnnnnnnnnnnnnnnnnnnnnnnnnnnnnnnnnnnntcaggttttaaaanatatgaaacagtatgccagctaaanatatctggtaggtggaattcagaggctagataagacagcagtcctttataggtgtaactaacatattctcctctaacagaaacaggtttataactgagattctagtagattaancactgcaagtttatanaggctgtgtaataggcattttantaaaagtcttcatagtgaataggactaaagtgnatangatgtanaactgaggcgtgaaagatttgttatggcattttaagctctttganagcangaactatttcatatatacctctaagaatgttatgntacntanntntananagtananatcanagantnagnaatatnacanngccnanngcccctagtnttaaggntanagtnnccccccaaaangntgcngttt

SEQ ID NO: 28322 - DNA, 543 bp, Homo sapiens
  misc_feature (1)...(543): n = a,t,c or g
gctgagccctaaaagggtaaaaattagcctgatgaccaaagaagaaaggatgtgtctgagtggtgtaggctgagggaacagtatgtccaaaggacctgacgcatctgaagaactgaaagttaaagccaactgcggctggataagaacagttcacagtataaactatttcctctctacttcctacctgcttctcttttagtactannnnnnnnnnnnnnnnnnnnnnnnnnnnnnnnnnnnnnnnnnnnnaatgganttncncccttgttgacnaggctggantgcaanggnanattcttggctcacnaaaacctccgtcncccaanttcaagcnattcnccnaccgcnccnggcccnaggnaacncattttatanccnaaaatctgaaaggctcaaaaattggtanaccatgttacccttaatggcttggatnaaggttggnctaagggcaacagaatatctaanccagcactttgggaggctnaggaagcgggtcacnaggtcaaaagncaaagacnanccnggcaanaaagngaancccct

SEQ ID NO: 28323 - DNA, 550 bp, Homo sapiens
  misc_feature (1)...(550): n = a,t,c or g
gctgaaatttgagataaggaacaagcctatagtttatgcccctcccttccgttcatcctttccaaagcaccaacagttctagaggccatggggatttatatataaataagtccctctcatggaatttataatctgtgttgctttgatccaatccaaatataagcattagtagccatgccactaaataagtcaattccaaacagttatgcctgccccatctttggaacatggtgggaagtctcaggaacagacagcaaatgtctacaatgtccactggctcttgtatatctctaaggcttaccatcatgctttctgaaagtccctgctctcaggaactcactatgctcgttgtagaattgtctagcatgttgacagtctcttttctgtgtgtgtctaagtcctacatgccatgtgtatcatggtacctgtgtgttgcactgaagtgccatgagctgtantaggaagagcnttggcaccaaagagggcaanagatatatgttttaaacggtggtggtccaanangttgggtcaactgaanngcccaanaaaa

SEQ ID NO: 28324 - DNA, 538 bp, Homo sapiens
  misc_feature (1)...(538): n = a,t,c or g
gcccagacattanagaatgggaatacatattctcatanataaatgtccaaatctgctttgagatacttggtgagcggcatcatccttaggcatcaggaaacaggaccanagccttctcaggtaaattgaggcgggctgaaggaaaagccagcaacttttttggnttaaatgggaccaatgtggntaanacagaatcnatgaaagctctnacaagccaaagtgatcatcacaggagacaanntggaagggangaacagaaaggtganaaaaggctcagaggagacgttacacatggtgggtggtgatggagaaggctggtgatatacaggatccttaagactctaaaatactgacccgcaaccatatgactgtgtgaatgtggatttgcnctcacgtttgttttccttctgaaaccaggtgtggaccanntantggtgactgcangtcnagcagcagnttccganagtcccctccantggttaggccacnnngaaggcccaacnncantgntnnccaanactcaggagggnctntaact

SEQ ID NO: 28325 - DNA, 542 bp, Homo sapiens
  misc_feature (1)...(542): n = a,t,c or g
gagacttggtctcaaaaacaaacaaacaaagaatccgtgtatgttatgcatttggctataaacaaatggtagtaaactagaatgagtgtatttactattatgccctttgcagagaatcctagttcccagcactgttgtgtttattttatgaagtcacaagaggatgaagttagtacttctaacatttttattctaagcttttctactattgtacaacatttgtattttactaatatgcactttattaaatgaactgatttttttggtatattatcagaatattttaaattaaagttgcttcagtaagatttctaaaataaaattgaattttgggtaatttagtgttattattgaatttttgctctgaatgaaatgtgattttgaaaaaaaatttctatctcttcactttttttttctttttccactaataatagctgtagtaggacaggaccttgctgggaaccttcagtaagttggccttttctttcncaaactcccaagcagtccggggggccaaatcgtattcccagaatttctnaagg

SEQ ID NO: 28326 - DNA, 539 bp, Homo sapiens
  misc_feature (1)...(539): n = a,t,c or g
gcggcacgagcggcacgagagaagatgagaatcccctttggttgttttctgaaaaagagattgatgtcttgttttataccaatgtgtaactatcctcctctatactacattatcagtcagctatttctatttatgctacattaacaaatcactaaaaactcaatggcttaaagtaacctatacatttattctcaagctcacaggtctgtacgttgcctgaatttcacctgatctaggctgcacctcatgatgggtacagagccgggtcaaaacatcagctccatctgcttccacacagaagtgacactacccagatggtggacagcagctgctatggagcaggagctaccactacttgcattttacaggagccccacaatctctcagccttcctaggaggagaagagagagactgtgcacctcctgttgacagccaagccaagtctctcaacccaaccacccagccttctcagcactacttatggaacaaccaggncactgtaggtttcccccaaaagatgttgggatanagcattaaa

SEQ ID NO: 28327 - DNA, 610 bp, Homo sapiens
  misc_feature (1)...(610): n = a,t,c or g
nnnnnnnnnnnnnnnnnnnnnnnnnnnnnnnnnnnnnnnnnnnnnnnnnnnnnnnnnnnnnnnnnnggnacgagacacgttactgtccagggacaggccctaggcatggtggtcctaagtgaggggtgccggcaccctggggagactacgtgcccagccatgagctctaggtcccagcggcagctccgactcccttgctcccccagggcctcgtcctcctgcctaanacggagtgcgacgtgcgggaagtggagctgatgcggtgcctgcggctgcgtcagtcctccctggagcctgtggccttccggctgccccgagtccgggtgagggtggggacctgggactcccatgcccaccgccttctcggtgcctaaaggggagtttgggtcccgtctgacccagcttccaaacttccctacccattgttcatggggacacctacccccttcngctganatgctgaaactcatggnaaccccaggctggtgggagggtcccaagtcttgccctgtcnctcnccaanatatgcccgtgtgcctgggaactgggcaattccaagganaaccgtttnccctctgannaaaaattctccaggtgacnttttcaagaa

SEQ ID NO: 28328 - DNA, 533 bp, Homo sapiens
  misc_feature (1)...(533): n = a,t,c or g
ggagagagctagcaccatgagcttcaatacccngggacaaaataagtgctcagtaaatatcagctcttgatcttactgctaatattactgctacatttacaactgctactatcactactaaggataccctctggagtgacacatatcaatcttcaatcctcttgttcatatcagctcttcaaatatttgaagactcctatccaaagcatgagcttcaaaggtatgcatctctctgctttatattaactctgtattaggcaagttatctgataccttcaaatcagacactttgaaagcagataacacctactatcctnnnnnnnnnnnnnnnnnnnnnnnnnnnnnnnnnnnnnnnnnnnnnnnnnnnnnnnnnnnnnnnnnnnnnnnnnnnnnnnnnnnnnnnnnnnnnnnnnnnnnnnnnnnnnnnnnnnnnnnnnnnnnnnnnnnnnnnnnnnnnnnnnnnnnnnnnnnnnnnnnnaantacttggangntnagnaaggaaaaccnntngtccaagggaaaaaggttcagt

SEQ ID NO: 28329 - DNA, 715 bp, Homo sapiens
  misc_feature (1)...(715): n = a,t,c or g
caacacataaccnanatgatcatccagggaacccggtttctgaggttaagaacctggtatgaggtgccaccggcgtacgattaatgggtctaaagattatatagatactattaagactttcgtagcgaagccgaatgagtcgtctgagaatccccacgctattgctaagaagagtgatggtctggatccttcggttattctgtcttacgtcacctgttgaggttcggattgtacttcgaagaacgtaggcgctggtccccttactattagtaagtattcctagtcttcttattaagaaatctaaggagaagtcgcgggcgtcgagcaaggtaggtacgctgggtgtgtgcctctgtaatactgctcatcctctttccctcgatgaggaggagacgcggtaggtagggcgctcgggggacgataagtttcactatctcttcgcttatcgcggntaagcntaaaaagtatcnctcgaanacccggggnttctaanaggaaaacgggngnctcgcccngggggatactaantcgtctaaanntttttaaaatangtttnancccgtttggatgganagtgctaagtgggaaaactggatggcttataaaagcgcgctatgggaaaactcatacgantacctttggggaataaanagcgttccatngttttttaaaagcanacgctactatgggggttantaaaccgnggtaanctttt

SEQ ID NO: 28330 - DNA, 715 bp, Homo sapiens
  misc_feature (1)...(715): n = a,t,c or g
catgcacnntaaccnanatatctatannagggaacccggtttctgaggtnagaacctggtatgaggaaattttggatcgggactacggtaagttgagatctggaatgcggttggagtagaggttttattgttttaagaagtgtcatcattggtaatgcgtctatcttaattttacggtggattatatgtcgtgtcatttcgcgaagttagaggagacggatcggctcgagtcacatttagagcctcctgtcttatctatctaaaactagagttatgacgatttaaaggacaagaaagaaaagagagtctaggtttaagcggagcccgtagatacaggtcgcggtcacggcggttcgccagcggaatcgctattgtcgcctttaagatatatccacctcgggctcggagacttgggcgaaggctctaaatcacgcctaagattggnccttgggttnangtgtaancttcgtaagnggggcncnnaaaaanttntgncgcttttccaaaaccgtacgaantnttccttaaatcctcctaaaagggtaatcganaagacncctcttctccttttgattaaacccnaagtgggtaaggtataagcggggaactacnancttatttcgtaataaaacacgttatgcgtaaaaaccggggggtcgggccataanattgacnctcgngtcaantacggcnggtattaccnnaaatnttacgc

SEQ ID NO: 28331 - DNA, 717 bp, Homo sapiens
  misc_feature (1)...(717): n = a,t,c or g
cgatacgacnatgaaccnanantgatctatancagggaacccggtttctgaggttaagaacctggtatgaggtaatccctaacgccccttcggaacacgactaggactcaagcgccaggtggaaaaacatcaaagagacgcccggcggtcctcctaaaagcgcggcgaaaagcgtcgacgaagcttcccccatcggagccaaggaggcagacgatcctcccgagtaagagaagaatccttccaccaatcaccataacaggactaaagacctccgcgcgaaagtcgataaaacgattaagactctacaaaaacgccgttgacgatcacacttatattgtagttcgtccatacagttcggtcccagaagagtttatagctactaaaaagcattcaccgaaggccgtcgagtcacccgaaaaatcaaggaaagcagagggctgagccctactagacgaaaacccgaagtcaataaagtcttcttgnnatnaaanggttataacccnatngtgnnagnggcttctccanaanggtgtataaanntttttaccgntcacgagaatctaaataaagtctcgganaaggtttggccaaagagtaaagatctaanccggcgaggnatatantaggagcgtcgttaaaanccgataanccttgaactcgtaaaagaagaatgacaaacctaatggaagaaagataaatnagctcctacctgcgcga

SEQ ID NO: 28332 - DNA, 707 bp, Homo sapiens
  misc_feature (1)...(707): n = a,t,c or g
cacataaccnaatatctntanagggaacccggtttctgaggttaagaacctggtatgaggggccctattacgccggttatcacggctctacctcctcgatcctgcgactcgttcgttctagttccttaaagcgtcgggaccataggtacgagttatcgtattcggttaacacacgaaggcccctacaacaaaaagccaaagataatctactaagactcccaggaaaactaaagcccacaaagtcgccgcgctccattcaacaggcactcgtccctatacctccacgacgaagaactactcacatcaactctatgaagacgcagaacaccaaggagtaagcaatcctccgttcagaaaacagtagacatccccacctcccatcgcgaccaaaactaacggggttggctacggnggnctanattcgcaactttaataccccgggagggtaanataagnggggtnttcccgttttaggggcccccaannantttggggnacccgcgggattttntactttcatagaaaataanntannttagaaanccnaacccaaaaaatggcacccaggttcggnggnatncgttcggcannttaatcccggaccgggganggcgttaaagcgggangnctatccnantcggganaatancgantcgaaaattngntatcgctttaaagcggcntagccaantttgncnaaaaaaaaa

SEQ ID NO: 28333 - DNA, 694 bp, Homo sapiens
  misc_feature (1)...(694): n = a,t,c or g
ccatgaanccnagcntgantctatnncnggggaacccggtttctgaggttaagaacctggtatgagactccggcggagaaggtctaggacgagactttagtatcgcttgcgctttggttttagattggttcgcttccttcgggtttcgagttcgaggattcggaggattcgcatagttgtcataagaagtcgtagtaagagtcggagccttcggaggcgtaggaggaacatactaaagacgagtaaaagaattcgaaaaaggaaccctcttacgtttaggaggaggcgaagtgaacttaaagtactttgtcggctactggataaccctcggaggtcgcggactagaacataagttactgcgggtctcattataggtcttaatcaccacgcgtgtacttcgagtattactgactgggagtcgtctaagtttaatgttctagcggnttcttataangtataataacgtatcggcggattccccgtttttttnaatnngaanaanagcactnngnngtctattctagntaaaatttancccccacncntttgganactggngggacggatactaaaantagaggcttggangttncgagtctttgtcnagtaccctngtctaaaagtaagctggactgacttttttgaggngctctaccncggttatcggtcgcggaaaatacccggaaagnggcgg

SEQ ID NO: 28334 - DNA, 710 bp, Homo sapiens
  misc_feature (1)...(710): n = a,t,c or g
cgatacgacnatgaanccnancntgantctatnnccngggaacccggtttctgaggttaanaacctggtactgangtcaaataccaatcctgggagaggcggagttangggtattcggatatctagggaggaaggaaagggcgatagagattcgaagaaaaggaaggacgagggttttaaagttattacctctattagagaccgggagttacgcgttttcgttcttgggtaccggatctcgtcgtttanatttcanagttcttatcttcctagtacgtcgttattagattatcgtactcggtttttgtaaagttttctattactcttctttcgttatagtacaaggattaaatctcctactacccgacttaactatccttcgttatcctctcatataaaccctagtcttaagttaagcagatggntcaccttttcctttcggagtatattctttaccccgttgttccgacctntgcggttgcccccttnttttgnaanccctgtgtcncgngaaancccttttanggaaactattggaanctangnaaatttaagntncctaaaaantttttnnangtatttnggtncgcgnctctttgggtttaaaacntatgaanttcgggaattnccngangtaaancgcggaanttggnanaactaaagggaacngttatnatcgcaaatgcaanggttgggaccctgacccaatt

SEQ ID NO: 28335 - DNA, 705 bp, Homo sapiens
  misc_feature (1)...(705): n = a,t,c or g
acattannccnatcntgatctattacnggggaacccggtttctgaggttaagaacctggtatganggagaaagaagtggagtctaaagaggtacgagaaagagtcgtatgagaagcccgattgctcgaagaaatcgtattaggatgagaagaagaaatcggagaacaagaagaaactttcggacgacgaagcgaacgtccctaagtaaagaaagatggtggtcgagtcgtcttagctttagggtctttaggtcggaggtctatagatctcgaagagagataaagagaagaaaaacaacttacggtcgcgcatcgaacagcaccttttgtcatagtcggatcggatcttacccagttccccaagttgaggccttcaccccaatcgatagtcccttcccggggcgttaggtagtgangttttttantttcacttcgttacgcatcctaagnctatccttctccccccagccnttttanaccgngttcgggntttaantttcnggantcggataaggnttattgatctanccccccccnnaancccttcnccccggatnttcntccctagnnaaatcctaantaaggnccacgtaaaaccctagggttcccngaatccccganaaggggaagggacctttanccnnccagagctanncnngnntnnnnnnaaanntccgaatngtantacncgttgtntncccncccg

SEQ ID NO: 28336 - DNA, 714 bp, Homo sapiens
  misc_feature (1)...(714): n = a,t,c or g
gcacnntaaccnacatatcatnncagggaacccggtttctgaggtaagaacctggtatgagagtaaggaggaggagggactatggaggcggcgttcgcgcgctttataggaagtaaaagtcgacgtttagcctttagtacattcaagcaaatcctaggcttatcttcagtatgccctctgcgacagcaaaatcacgaaggaatctagcgcataaggagtcctcataaaacaggtagaagatagcagttagacgggttaagggttttagttatttatgttttctttctcttccgaagattcctggccttaattttattactagtagggtctcgtctaagccttcttccgcgcgcactattatagggtcgtcggtctgcgctatgcctattattagattttatactaggaagctttgttaggggcgcngggaagtaacgtcgttnggncgggttcggattncnccggaaanccggggtttataaaggaacccnncccggnntttnggnttgggggcgcatntttntcggaaagggacccccgngggcttanganccncacaacanaaataccncctanangtcccagctangatcctacccccaagcctagggcancaatttacagctaaaacctttaancccttggccaacccaaanangcaaaacgaaacgaaaatannaggctnaaaanccantancttcggaagggtggccc

SEQ ID NO: 28337 - DNA, 696 bp, Homo sapiens
  misc_feature (1)...(696): n = a,t,c or g
caaacgancnttaaccnanatgatcatacagggaancccggtttctgaggttaagaacctggtatgagttcggtcgttttagccctcggggtacgcgccgccccccgtttcgatcgaattcgggcgcgagcggcggggaataggcgcgtccagtcagacgacggcggtctagttagccaaagggtaaggaacccggggtatacgtaaaggggacgcttctacctaaatcgcantagacagtcgccanagtttccgtcgttagcgcactcttccccttagtcatctcccctttacgcccttccggctgagcggattaagcgggaagagaggggggctttcggaagaatgcaagacccgggatccgcgcggtttctttcttgccacattccttctagaagtcatagtaagagttagcgggtaagcgactatttatctaggattatcgcctcgtcgatttaaaacttcctcgggtngancgngctaaaccgngggttttaaagccnttggnggnntttcccanggnngattttaanggccnaatgngatgggctnanannntataaggtnncggggcgcattcccntaggaaagaaanaacctcggccccgtcttcctttaggagaatcatacgattgtaaaaatttcgtnnttagccgctanacnagggtcgaccntggccgggggaataaattcccg

SEQ ID NO: 28338 - DNA, 599 bp, Homo sapiens
  misc_feature (1)...(599): n = a,t,c or g
ccaacctacgtgccaggccccgtgctgggtcccagggatgcagaagggtcaaaacccatcatcctgacccttgtggggctccgtaagaagctgaaaccttcgaccgtttgagctggaggggccctganaaatcagagtctacgtatcatttacttagggggaaacttaggctggagacagggaggccttccactctgccccattancttagaaaatcaagattcagtccagcagatgcanagtccatgtccatcttgtgccttctcctggacaaacctttccttcctggnggtgattaaaatctctttctgccattggccatgctgggaccncanatntcnaagcagatgaacctgggntggttccctgcttggctnangcctgctactncancagcctangtttccangggtcnaggatctttgtcccatctataactagngactgagcagatttctcaataggtgctgaanggtctgggggttanacctttgctntcttcaagtgtagtgncgctttgagcacnccgcctnagcctgaaaaattgggctgaataactctctgctgggangaaaggactntngcttcanaangccacc

SEQ ID NO: 28339 - DNA, 618 bp, Homo sapiens
  misc_feature (1)...(618): n = a,t,c or g
gaaagggctttacatgagcaaactctagctaaaagcatgcgtgtgtcacagaccaaaaaccagagagagcaaactctagctgaaagcgtgcgtgtgttacagaccattcagaagggctatagagagaatactctatctgaaagcatgcgtgtgtcacagaccattcagaggggctatagagagcaaactccagctgaaagcatgcgtgtgtcacagaccattcagaagggntatacagagcaaactctagctaaaagcatgcatgtnnccagaccgaaacnanagaaggcaaancancttgaaagctncgtnggtatnaannnttnaaaaggcttttannaangtnttttactgaaancngcatntgtacaaccttcaaaggggtttaaagactntactgaaagatgctgttncanaccgtcanagggctcngaaagaacttcactgaaagctncnnttnacagacgaaaccagngagagcaacttactgaagcggcgtggnanaaccatcaaanggtggcatttctngggttttcccatnntgttgaagngttgtaattaaanccgatcaagttgggaaacccccaaagggttntagncaaanggtgnttncattga

SEQ ID NO: 28340 - DNA, 513 bp, Homo sapiens
  misc_feature (1)...(513): n = a,t,c or g
cagcatgcatcctccttgtcatcctntcccccaaccctgtccccagccccagaaactaaccccctgggacccactcttggtttctttgtctgaagttgccttgatatgtgcacacacacatctatgcatgcatgcacagatacntacacacacactagaacntatatcacaattacaaactntacttgcccacattggngaanttgcttncntccccattgcncacnnggtcccatgnccanacaggcttncccctggnnncctggttcttcggnngccntgganacatgtccttggggcagcnntgcaagcctagattcatgacacctgcntagtgctganancatggcattagaaggagattntgagggaaacgtcctcctttgaccgctggtggcaagagcgttaccccngaaaaaggatagtgaggtttggggtnctagtactacaantcttgnnttaaagtagnttcngattangngtaagaaangaagttgtnaatanaagtggcgg

SEQ ID NO: 28341 - DNA, 606 bp, Homo sapiens
  misc_feature (1)...(606): n = a,t,c or g
tagaaatgaatataaaggtgaaatgaccatataagtaagctctgaagctatgatattttaaaaaaagttatcaagggaatataatgaaggaagaatagaaggttaagtccaagtattggaaactgccctacgtcttaaaggtctggctgggagtgatacagaacagcagactcgggaaaagcaacaaaagtgaggctgataagtatttggagagccaggttactgccatgaaacagaagacaagcaaagaggttttctctcaacaaaggtttccacttgttaacatttggaacaaaanntgnngcattncaaanccattgctntgnagcacaaaagtgattcagngtatttggngcttttnanacctaagctttaccacttgacttancaggatcatgcacgctgtgcanggtnataacctgttgcacaggcaaatgtgacaacctttntaatgaggactactantatccaactgctgactgctgcatgttgtcttgtgctcaagggagnnggtnanccaactgtnntntatggacncttgtcatgatttatcgagattttgaccnccctaaaangaaggttggtggttcaaaattgnggaagagg

SEQ ID NO: 28342 - DNA, 615 bp, Homo sapiens
  misc_feature (1)...(615): n = a,t,c or g
aaggtcaggaagattgagaccatcctggctaacacannnnnnnnnnnnnnnnnnnnnnnnnnnnnnnnnnnnnnnnnnnnnnnnnnnnnnnnnnnnnnnnnnnnnnnnnnnnnnnnnnnnnnnnnnnnnnnnnnnnnnnnnnnnnnnnnnnnnnnnnnnnnnnnnnnnnnnnnnnnnnnnnnnnnnnnnnnnnnnnnnnnnnnnnnnnnnnnnnnnnnnnttaattttgncntttttttnanngngnggnttantggcccnannanttngttttaangccggcnnagcaccnntgggggtttnttgaaanncggatngtnccttttaaaaaagtntcaanggggtnaagtanctncgcttntntttaaaattnccccttttttaaaananaaacctttntngnctattttttcccagnggggntcttnngaattttccnganttttnaanttngctaaaaaattttgncccganaanctnngaaanttttcccttattnggccnnttggngnccaagnttcaaccggngggntttcncttntgggncaaananaatntttgnggaaaaaattggccatttggacttagaattattcnatcggagtttattggaaa

SEQ ID NO: 28343 - DNA, 604 bp, Homo sapiens
  misc_feature (1)...(604): n = a,t,c or g
gctgtgctattanttagggcttttaaagtccgtggcagatgttcttaggcggtgttccagccttgttcacttcccacatatggcatgatactgtacacagaaaaaagagggactctttaacaaatagcttttccatgaaatgcatcactatttttttcccatgaacttttttcttttctttcttcctctgtctctgtttctttgtttctctctctgctgtttgttctttcttctttctccgttnatctttctccctctgctctttcttgctttcctctatttttctggatnctnattctccnngctttccttcatcctcnttctatacttccttctttgcctttgaggccttttattaancctttngaaacttgaaaggcnccaaggccctgaaaaaagntggnattttaaaataaagggngcctannnttatnaaaggttanaaatnnggtagtntaggggacattctanaaanttttgcagacctntttnatgcnggtacttggtgctttacncttggcaagnagttgcngatgttacnaangctgaacttcnggncgtanttnnccatgggnngtgtggtaanccttggacgaaccggtag

SEQ ID NO: 28344 - DNA, 603 bp, Homo sapiens
  misc_feature (1)...(603): n = a,t,c or g
cgatctgagtgggtcttatgcgaacaagggttctttaagaatctatacctcttaaacagcaagtagatatttatgttctataaaattaaacaatatgtgagtagtgtttacgataaatacagaaattgctgattcagtacccttattaaaaaaaaattataatcactactgctagtgatgactcttgaagaatgaatgtttactaaagtcttcccctattcatagtagttggactgaaaaggcccaaatagcaaaatgatatcccatggtaagggcaataagctttaagatgcataaaagtccacacaagaccgtgtgccgggggtatgcctcaatccagccttttggaggccaagngggtggttacnnagggcgagnnaanacagctggccacntgggaacctnttttctaaaatccaaattncnggggggngngatgccnaatccagtctagagntnaggaaanatcnctgaccggagcgagtngnaggaatatgcncgctcactggnacagacnaatggttaaaaaaaaaaaagttttttanngccgggttttctttggggnaattactggcngcggttaaantnnnnnngnnaagaagc

SEQ ID NO: 28345 - DNA, 599 bp, Homo sapiens
  misc_feature (1)...(599): n = a,t,c or g
ggtatncgcaaanatgnctttggncnaaggantgnngnanaccnncnnacgntcctgtntcccttttantggctgnntggcannnatnagtcttcntggggtcgatggatccaacctggggctnatggangtnaggncgnnngnngtgaggnaaggganngtgannctntnnannataagngangacngaatgcctnaatgggggaagttnantgtgtaacantnnaattggatgntngtaaatggaccttncccngangntgcatgnncaatttancttgatcncnggntgaattagcntgtnncncagntttttnccctnaagncccctcaaagnctnanttctggaanctgaaccnttctgnnttnanctttncgtannctcaaaacntgggttnttgaggtctctntatanctntggnggacagatgcatagnnnttctggctgantaaacattangctaaatttcaaattatngngganttnttaactggancnaaatccgggntggaatccanaattcntcgantnntttcnttggantanccattaactttnagagcctntntggggctaannggtttnnngnttttaactc

SEQ ID NO: 28346 - DNA, 509 bp, Homo sapiens
  misc_feature (1)...(509): n = a,t,c or g
gnnnnnnnnnnnnnnnnnnnnnnnnnnnnnnnnnnnnnnnnnnnnnnnnnnnnnnnnnnnnnnnnnnnnnnnnnnnnnnnnnnnnnnnnnnnnnnnnnnnnnnnnnnnnnnnnnnnnnnnnnnnctgtttttgtttaaattattgtttgggacacatctcttaagttgtttttttgagacagggtcaaaaaaaaaagannnnnnnnnnnnnnnnnnnnnnnnnnnnnnnnnnnnnnnnnnnnnnnnnnnnnnnnnnnnnnnnnnnnnnnnnnnnnnnnnnnnnnnnnnnnnnnnnnnnnnnnnnnnnnnnnnnnnnnnnnnnnnnnnnnnnnnnnnnnntttnaccgngttggctaggctggcttgaactcctaaccttaagngataggcccgcgtaacctccaaagggctgggattacaggngtgaccaccatcctgggtanatccttaagtttganaggaaagggatttggttctnaggctnccnaaaaagncccaaactggntact

SEQ ID NO: 28347 - DNA, 536 bp, Homo sapiens
  misc_feature (1)...(536): n = a,t,c or g
gcggcacgaggaatgctgaccctggctagggaagggggtagttatggggacgtgacatgaaatgaccaggcatgagcatggccagtatgcagccacatgcaagaaggtatgggggaaagacatggtaggcagtgacggtcaggaaggcttgctggaggaggcgggccttgcctgtggtggaggatggtaggggaaagaaaggaagcgagaggncctctgtgtgcanagcccatggtgggctgaagccagcatacaggaaaaggncccataccttgngcaggtacaaaaatgcatggnnnnnnnnnnnnnnnnnnnnnnnnnnnnnnnnnnnnnnnnnnnnnnnnnnnnnnnnnnnnnnnnnnnnnnnnnnnnnnnnnnnnnnnnnnnnnnnnnnnnnnnnnnncccatctctgttaaaatacaaantacccggccttgtggcgcatcctgtgatccaggtctnangagggtaagcaaaaaattntttaaccncgngntaaattccgggaacttnaattggncnnttgcttcaacct

SEQ ID NO: 28348 - DNA, 525 bp, Homo sapiens
  misc_feature (1)...(525): n = a,t,c or g
gattctgaataaaatttcatggcaggtacttgcgagangcagttgtaattttaaaagtttaacattaggttaaaaaattgacaggnnnnnnnnnnnnnnnnnnnnnnnnnnnnnnnnnnnnnnnnnnnnnnnnnnnnnnnnnnnnnnnnnnnnnnnnnnnnnnnnnnnncaatttatgaatggataaaatgttgtatatttgtagtacatgtaatattattcagccaataaaatnnnnnnnnnnnnnnnnnnnnnnnnnnnnnnnnnnnnnnnnnnnnnnnnnnnnnnnnnnnnnnnnnnnnnnnnnnnnnnnnnnnnnnnnnnnnnnnnnnnnnnnnnnnnnnnnnnnnnnnnnnnnnnnnnnnnnnnnnnnnnnnnnnnnnnnnnnnnnnnnnnnnnnnnnnnnnnnnnnnnnnnnnnnnnnnnnnnnnnnnnnnnnnnnnnnnnacaaaggttnaatgagcttagaacattacctggcttcaccttggcacaaacaaattcttgcttnaaaaaaaaaaaaaa

SEQ ID NO: 28349 - DNA, 531 bp, Homo sapiens
  misc_feature (1)...(531): n = a,t,c or g
nnnnnnnnnnnnnnnnnnnnnnnnnnnnnnnnnnnnnnnnnnnnnnnnnnnnnnnnnnnnnnnnnnnnnnnnnnnnnnnnnnnnnnnnnnnnnnnnnnnnnnnnnnnnnnnnnnnnnnnnnnnnnnnnnnnnnnnnnnnnnnnnnnnnnnnnnnnnnnnnnnnnnnnnnnnnnnnnnnnnnnnnnnnnnnnnnnnnnnnnnnnnnnnnnnnnnnnnnnnnnnnnnnnnnnnnnnnnnnnnnnnnnnnnnnnnnnnnnnnnnnnnnnnnnnnnnnnnnnnnnnnnnnnnnnnnnnnnnnnnnnnnnnnnnaaaaaaggaaaatttggaagttttaaaagctatgaaagctggcnnnnnnnnnnnnnnnnnnnnnnnnnnnnnnnnnnnnnnnnnnnnnnnnnnnnnnnnnnnncccaggagtttgcaccagctccaacatggngcaccccattttncaaaaaataaaaattgcctgggnggnggatnttcctngggccaactttaancttggagnttaagnggaggaaaatt

SEQ ID NO: 28350 - DNA, 537 bp, Homo sapiens
  misc_feature (1)...(537): n = a,t,c or g
gtgccagtgtcccaggctcccctcagcccaggctttgggngggnattcttcataatgcacagccttctgggagagctgtctgcagagaatccagctggacagctaggatgtctgtgttgctgcctcagctcactctgtccctgggcagtttgggcatcagtttctgcatctgtcaggtgagataatggttcctgatcatgtgcttcccagagccgtcctgagggtggtgggtagacaatgagggtcagagatcaggagagtctcccagtgccacgtggcatctcagcacagtcaaacctctggagcccatacctggtacagctctcagagaatagctcttggggaagagggaaaggaacagagccgtagtcaagctgcttagacaagggccaaggttttggcacccccactgcactccctnactacttcaagcttgacacatcgtgagggagttnaagncctatctgntacattttcccagaacctttttacaancctacggttttggcnnttaaattgcttgccccaacntttttt

SEQ ID NO: 28351 - DNA, 537 bp, Homo sapiens
  misc_feature (1)...(537): n = a,t,c or g
gaataccctggggaggtgggtgaatctgatttccagagtttccacattatattaaatgtctatagnnnnnnnnnnnnnnnnnnnnnnnnnnnnnnnnnnnnnnnnnnnnnnnnnnnnnnnnnnnnnnnnnnnntcannnnnnnnnnnnnnnnnnnnnnnnnnnnnnnnnnnnnnnnnnnnnnnnnnnnnnnnnnnnngttttcaacaaaaaaataactaggcatgcagaaaaacaagtaggacctatacacagaggaaaagcagtcaatataaactactcctaagaaagcccagacactgaactttttagaannnnnnnnnnnnnnnnnnnnnnnnnnnnnnnnnnnnnnnnnnnngtgccacactntancctngcctnntaggcccaaccaattttccacattannctnccgaggtgcccggcccaggtgcntntcccccatnnccggtaacttttccntttttngggggatgggggcccacntggtgctaaggntnntttaanncntgggaaggntccttcactttgnntccaaa

SEQ ID NO: 28352 - DNA, 308 bp, Homo sapiens
  misc_feature (1)...(308): n = a,t,c or g
tttactntnagtcantcacggaaacncnnaaagtttttncagcatntacnnntgcttttnannngnngnanaaanncntcaggangcttaacanactgcntgnnntccacatgnaacgggttcactncctccnttnggannccctgggctgtggagaacggtgtcnaggagggatgagcccactcagctccangcattgttctnccgggaccccaataactcggggtgtnacacnggcaanngaactacctgccnttcanggntgncgacgtcacatggctgcacacatcacagnntnttntccttac

SEQ ID NO: 28353 - DNA, 321 bp, Homo sapiens
  misc_feature (1)...(321): n = a,t,c or g
gattacatttttatacctaacatgacatagtgaccattggatatcctcaaaacactgtgaaaattcattcaatgtacaaatatattctaatttatatagacatttaaattcataattcatacttgttaaaaatttttgctattacagataaaaatgtggtgagcatccctacaaatanatattcacaagcatgtcnnnnnnnnnnnnnnnnnnnnnnnnnnnnnnnnnnnnnnnnnnnnnnnnnnnnnnnnnnnnnnnnnnnnnnnnnnnnnnnnnnnnnnnnnnnnnnnnnnnnnnnnnnnnnnnnnnnnnnnnnnnnnn

SEQ ID NO: 28354 - DNA, 329 bp, Homo sapiens
  misc_feature (1)...(329): n = a,t,c or g
ggagagctagcacatgagcttnnnnnnnnnnnnnnnnnnnnnnnnnnnnnnnnnnnnnnnnnnnnnnnnnnnnnnnnnnnnnnnnnnnnnnnnnnnnnnnnnnnnnnnnnnnnnnnnnnnnnnnnnnnnnnnnnnnnnnnnnnnnnnnnnnnnnnnnnnnnnnnnnnnnnnnnnnnnnnnnnnnnnnnnnnnnnnnnnnnnnnnnnnnnnnggtaataaaataaaaatcaaccccaaatctgaaacacaaaaactcagtgtggccatcaggaagctcaggaaacgcccagtgaacatcagggagctcaggaaacactcagtaaacgcag

SEQ ID NO: 28355 - DNA, 316 bp, Homo sapiens
gagggtattatgataaactctgatctggggaggaaccaggactacatagatcaaggcagttttcttctttgagaaactatcccagatatcatcatagagtcttctgctcttcctcaactaccaaagcagaaaaacatcagcgaagcagcaggccatgcaccccccaaaaactccatctggggctcttcatataaaaaggaaaatggcagcctggcccttctccaggctgtggaaagtctctgatccaattctcttccaaatgaccttgatcgctgctctgttgcctgctgttcttggaaattgtggtcctccaccc

SEQ ID NO: 28356 - DNA, 314 bp, Homo sapiens
  misc_feature (1)...(314): n = a,t,c or g
ggagtgggcaacagactgtggggttgagggaggaggaagatcaaactggaagctactgccctagtcgaggtgaggattaatggactagagttgtggcttaggcaatgtggctagatctggatttgtgttttttagaggggcaagtcaannnnnnnnnnnnnnnnnnnnnnnnnnnnnnnnnnnnnnnnnnnnnnnnnnnnnnnnnnnnnnnnnnnnnnnnnnnnnnnnnnnnnnnnnnnnnnnnnnnnnnnnnnnnnnnnnnnnnnnnnnnnnnnnnnnnnnnnnnnnnnnnnnnnnnnnnnnnnnnnnnnnnn

SEQ ID NO: 28357 - DNA, 328 bp, Homo sapiens
gcctggttctaatcaaaatactgaactttggaacaaattaacattccacagccctcgcagggaaggagaattcagctgagacgacttcagttcacaaccacaacaaaaatagcttctcccggggaagacacattctgctaacaaggtcacttttgttttgcttcccctgccatctggttgagcggcaccaggggctggctttggtaccagcttattccgcggagaggggatgggagccgggtggcgctgcagaaggcttctcagcttcctggcaaggggcgccagcacaaagttaccttcagacatccccagaaagcacgcaggcaga

SEQ ID NO: 28358 - DNA, 326 bp, Homo sapiens
  misc_feature (1)...(326): n = a,t,c or g
gggcatggagtctaaagttttatgtttgttatatttagttagtgcacttatgtttttacattaacatgagtccataagatgtcctaatttaatactttctatgttagtgtagcaaagaatctatttaatatattaatctcttgcttctccttcagttttggagagtcaaaattcagaagtgattcgtagtttcatttagattacatctgggaaaagtcagtccaaggccagtgcccttgttcctttttagaaaaggcnnnnnnnnnnnnnnnnnnnnnnnnnnnnnnnnnnnnnnnnnnnnnnnnnnnnnnnnnnnnnnnnnnnnn

SEQ ID NO: 28359 - DNA, 317 bp, Homo sapiens
  misc_feature (1)...(317): n = a,t,c or g
gccctgtgatttgtcaagcatnnnnnnnnnnnnnnnnnnnnnnnnnnnnnnnnnnnnnnnnnnnnnnnnnnnnnnnnnnnnnnnnnnnnnnnnnnnnnnnnnnnnnnnnnnnnnnnnnnnnnnnnnnnnnnnnnnnnnnnnnnnatgagatagaccttctcattaataacaagagcnnnnnnnnnnnnnnnnnnnnnnnnnnnnnnnnnnnnnnnnnnnnnnnnnnnnnnnnnnnnnnnnnnnnnnnnnnnnnnnnnnnnnnnnntgtgagaaacagccagaccctgtctctaaaaataaataaataattaatgaac

SEQ ID NO: 28360 - DNA, 316 bp, Homo sapiens
gaagatgctaaggagcctttgtgtttcttagttttacaaaattgtgtttaaggatcacagcagcagcagtcacagtagtagccaaagagatagtagaatcttctatttattgggaacttactggactaagagctttgtacataatacttcactgacttaagctgttctgttgttatatacacccacgtatgagtggtaagtgctgcaggcattttaaggtaggaaaggttattattcccatttatggacgcaatacctgaggctcagaaatattaagtggcttcccaaggtgagtggcagagcttcagtggaaacg

SEQ ID NO: 28361 - DNA, 328 bp, Homo sapiens
gggctttgttgctaggtaaccacagagcgccctggttacctagggacggggaggcaggttcctctgttgctaggtgaccatgatagggacccttttacttagagacctggtgagggtggttttctgttgctaggggagcagaagagacagcgtttttcgtaggaataggaataagggatggagggacgtgtgctgccaggagactgccagggagcggggtcaggggcccagtgtcttcctgggctgctccgagtcccagctcaatcaatggcgatgccccaaaggcctgctgggaggctggacctctagatcccgggcccctgaggat

SEQ ID NO: 28362 - DNA, 614 bp, Homo sapiens
  misc_feature (1)...(614): n = a,t,c or g
ggcaaatggagaggatacaggtgtgctatattaataactcaaatagcatggccttcagcaatatcgttctctaaaatagtaggagacacttggtaaagttccaaaaagaacaaaatacagtcttccctcagttactctgcacttacatcccaagagtgtataaaaaccatgcgaaaatactttgatatatgtgtgaaacagagtttggttccatgctcaagtgattttaagcacatttcacttacagaaatggctaatggcactttgggaagtctttggggtgtgggacggcgttttcattgtgcaagaccgaggcattgtgggacatctaacattcctggctcccagccattccatgccagaggcatctccctatcattgtcacaaccaaaagtggctccagggattccacagtgtccccgagggancaattgcaaactcactgagaaacacaaggtgggttgttgggcctcanaactcatggaccggtacagggnaatttggcnatnagggcagggggaaanttggtttncagtccanaaaagggggttgggttcccggnntttttnncagggaaagcccccttttctaaaattttcaanccggggnttttc

SEQ ID NO: 28363 - DNA, 621 bp, Homo sapiens
  misc_feature (1)...(621): n = a,t,c or g
gggatgctgggaccccctgggattgagattgggctgtgtgggggtggtaggagggaaggtaagtggtcagaggagctgaaggctttgagaaaagtatgggcaagtgctagatcatggcacccagtctttttaatagtaggctgaaanaagatacagatggtcaaagatttggggattgtgggagccaacaggttgttatcaaaagcgaagagaatagagttgaanatttcagatgtanagcaacanttccgagtgatactaagctccaaggtatggcagttcgtgtgcanaggctaggcaagagtcctaggagataaggaggccgaaaaacctggagaccaaagaaccaggaggtcaaagaatctggaggtgccaagccttgtcctaagggccctgaaaccctcagggtgatggcaaaaattggagggaagagagagtggaagtanaactcccaaatcttcaatgaacagtgggctcantatctgcataagagtgaggattcatgggaaaatgtgcncccaaaaaaaaagcttcttacttgcattaaaattattaggngtaacnctaaaaaatgntttnacccaaatttcccccatgggtttttaggggtttggaaaagcc

SEQ ID NO: 28364 - DNA, 608 bp, Homo sapiens
  misc_feature (1)...(608): n = a,t,c or g
gagtgactctaatgggtgaaaggtataatctaatttaaacatttaatgaagaaatgctgtgccagataatgttaaaggtattggtgagtaaagccaaaaagaagagattaggaaatttcctggatggcagctgaaaacatttttgtctttgtttttggagcttatggagctaatgaagccctttgagcagtaatgtgctcttacctcctataggaagtagcaataattaattgaataattattgtgttttaggaaatgttctaagggctttgtctgcattaatttttaaaaatcctcagacacctctgtgagcgttctcatctcaatgtaagaaaaccaaggcccagaaaaccaagtcaagtaacttgcccaagatcacaaaatggaattaggatatgaactcagcagttggctccagagctcatactctcaaccaggannataaatctaatagcattgcaaaagaattaattggnaaatggagactgggacaggaaccagttagntactgctgnaaaattcaaggaaaggaaattatgtgnaatnaaanagnttttccgggcacgggggncnaactgtancccaanatttggaaggcnggggaaggg

SEQ ID NO: 28365 - DNA, 605 bp, Homo sapiens
  misc_feature (1)...(605): n = a,t,c or g
ggctagactctcttacaagataaataatcattttctccttaaccattttcaagtacatactggttttcagaaatttcanagctcagtggcctttgggagtggggttggggcaggagggtggtagcaaaggctctagtttttttttttccttcactttcggcaatanctaaaaattcttgtaanatacnanttaccngnaattgaattcctgcccaancctgtgaaaaanaaatagancccctttcanaaatantgacnccacaanaccaccttaaaacaaattttgggtgntnccaccnggaaaccttactacctcanaantatnacatttngggaacactaaggctaggcccaggcggcccttcttcaaaacagtgtgtntgaaatgagcancatagctcanaacaggttttccantacantcaanggggtaantaaaanggggcccaattgcagcaccaggggcattnnatgggaaggcntccantgatcaaangggccggaatatcctttagggccggnaatttntcttaaancggncnagttannaatttnaaaaccttccggnnngganggnntttccaaanggganatccccntgccca

SEQ ID NO: 28366 - DNA, 613 bp, Homo sapiens
  misc_feature (1)...(613): n = a,t,c or g
nnnnnnnnnnnnnnnnnnnnnnnnnnnnnnnnnnnnnnnnnnnnnnnnnnnnnnnnnnnnnnnnnnnnnnnnnnnnnnnnnnnnnnnnnnnnntatagatagtacataaatggattattgtgtttctgacaaaactttagggactctgaaatttgaatttaatgtaatttttcatgtgtcagggaatgttcttttgattgttttttaaactattaaaacatgtgaaaatcattcttagctcttgggctatacagaaacagaagggaggtctcttggatttgacatgcaggcatagtttacctacccctgctgtagggtatatttgaggaggtgattgctcaggcctaggcaggtgtacattctcaactttgctagaaacgcaaaacttagtttcttttgtgnnnnnnnnnnnnnnnnnnnnnnnnnnnnnnnnnnnnnnnnnnnnnnnngcatgggattttggattttantnagtaaatacagttgggcctccggnaccatggntcctgcaaccaancgtgggtanaaaaagccataagtttaggggagtnaaacctgnnttaaaaangggnngntnttttttcaaatcangangccccgncaanggtggggg

SEQ ID NO: 28367 - DNA, 620 bp, Homo sapiens
  misc_feature (1)...(620): n = a,t,c or g
gggacaatttgtcatggatgggaatgggcttgagggccgggaatcagggcatgatggggcctcattcatcattttcccgttatcccagcagcgtgcaggggancaggtacagcacctgcctgtgcagctgcactgcctgcccgaaggccctaggccctgggccaagtgagtgaccanagggggactgggaatggaaaggacctcaaggaaggacaagctgagctctgggaggccacctcctccaggaagccttccctgattcatccttcacaggcagtctcaatttgcagtcagatatccactgctctgattcttagatcagcaagtatctccctacccanactgcaggctctgctggggccgcggctgtttctgacttgtgcacaatggcatccctgtacctagcacaggactgagtccagagaaagtgctcagtgatgcttgttggccttgtctctcctctgtgggcaacactggacaagggcacccggcgggtcctganggtgtggacatcccacggcaaaagcctgcgggttgatccngancatgaaccaaggccttgaggnnggnggtggcnaatcagggcanttctgcaaganaaaantggtngtaacnggggg

SEQ ID NO: 28368 - DNA, 498 bp, Homo sapiens
  misc_feature (1)...(498): n = a,t,c or g
gtttttactttattcaggatttattttggttataaggccatcttcaataaaggacattacatcccttctggtataataaaatactttttgtctcttctgccaagtcttttttggtataaagacaagtgtcctggtttgagtactctggtttctacaaaatttatgttctgtcactgaggcatgtcttttctggtgaatttgccttcgaggtttagtttgtttgtttgttttactttttattatttctgcatgactcatttaacattttatttgatctgcacaacctgggttaaaatttttgtgagcactttgattttggtttggttgtatgtgtctgtaagtaatttggctcttcttccttgcttgtatccaaaaatcttccaagagcaaaagnaaacataaatantgtgancaaggtggccnaaccaccacnaggggggnttgcnacggncnaaaactgaccaaaacncnnggattcctnncagaatttatanggtt

SEQ ID NO: 28369 - DNA, 510 bp, Homo sapiens
  misc_feature (1)...(510): n = a,t,c or g
ggggaggccgaggcgggcatatnnnnnnnnnnnnnnnnnnnnnnnnnnnnnnnnnnnnnnnnnnnnnnnnnnnnnnnnnnnnnnnnnnnnnnnnnnnnnnnnnnnnnnnnnnnnnnnnnnnnnnnnnnnnnnnnnnnnnnnnnnnnnnnnnnnnnnnnnnnnnnnnnnnnnnnnnnnnnnnnnnnnnnnnnnnnnnnnnnnnnnnnnnnnnnnnnnnnnnnnnnnnnnnnnnnnnnnnnnnnnnnnnnnnnnnnnnnnnnnnnnnnaaattgtaacaaatgcatatagacttaccttatcccttttaaaagttaggtagtattccattgtcnanatgcaccttagttaaccaantcccatttganagagatttatttcaactgttttgcngttanaaccanttctgtctgcaatgaaaaanccttgtaggnggttttgcccaaattgtgtaagttatanaaaatttcnggctggggcccantggtncaacctggtaatcccagnactttg

SEQ ID NO: 28370 - DNA, 490 bp, Homo sapiens
  misc_feature (1)...(490): n = a,t,c or g
gtttagaggaaaactttacatagcccatttatcttcatgtcttcttgagtcagcaaaacatttacaactataggaaagaagatgtttttcagaaatgaatgctgatcaaaaagaagtatagctactgtggcaaaattaggtaaatagttctatttgttaaggaaaaaatctgtcttgtggagttgtatataaagtacgaaattgaatatatagttatatgttagtgttcctattgcatactagagtctggatatacataggctcagagtaatttgttatggtccacaggaatatatattttaagatggactctcctaagagtgagaggtgatcctacagccagtggcttgcttggttgtaggatcagatgtgattaagttcagagaggagacattttgaacttctctggttgtngaaatgctgcctcccnattcccaaaantatacaagngaccncgggatgtcttctgggacagagtanaaatacttgc

SEQ ID NO: 28371 - DNA, 500 bp, Homo sapiens
  misc_feature (1)...(500): n = a,t,c or g
gccaccacaagactttgggagaacatctcaggtgggtgttacttggtgaccatgccagaaagccagcgacttccacctcccagtccccaccctgggatcctggtgaacttcatgccggctcttctctgtgtaagagccttgtaccctgtgagtttcatgctttgacttattctagtcactgtgtggacacagttatgtagctattttcaggtaagaccagtgtaggtatgcctgttaattgacagtctgcgctcccagtgatggaataaaattactaggaataattattttttggtgaccaccttgtaagtgccatggtatagtggaaagcccttttcaaagggtctcaaaattagtgggatggtaatataactttctatgttaacgaatgtgagtttcttgaacatggnaaattagagaaaacatgcccaaaaggttaattcaagcaannnnnnnnnnnnnnnnnnnnnnnnnnnnnnnnnnnnnnnnnnnnnnnnnng

SEQ ID NO: 28372 - DNA, 506 bp, Homo sapiens
  misc_feature (1)...(506): n = a,t,c or g
gagagactagaccatgagcttcaataccctgtagaggaaaaggctgtctcctacttatttttgtattctcctcagtacacagtgcagggtgcttcatatattacatatgcaccaaatgtttactgagttgaactaaaattacacgagcttgttaatgaaaaatagctaagagctaatatttattgagcatttattacatgccaggcaatgtgctaggtattttacctgaattatctcatttaatctttgcattatccctatggaatatgtatttatattattctcatttagaaatgagaaactacgctgagagttaagtaacatggtcaagatcatgcagctaagtaaagtgacagaagaagggcttgaatgtagatatttcctagatatctgttcaaaganacaggnggngaaatncaaattccaatggcggcnggccttcctttggcnacaagttnngaaggngatnnattcaacncgtttantagaggaatantatcgcctac

SEQ ID NO: 28373 - DNA, 493 bp, Homo sapiens
  misc_feature (1)...(493): n = a,t,c or g
ggggtgaaattattttgacaccctagagttaaccgggccttagagtcagtacattggttcaagtaacaaatatcaaagcagaactcttagtgtggcaaacaataaataattgtctcctagattcttatacaagtcactgtccgtccccaattggtagctcttagaatggctcgagttgcattcattgtcacagcaagacacaatggttttgatagcaaagcagtagagaaactaaatgtagagaggcagagagaactgtattaagtctgaggacctggtggttgtcatgggcagcaggaagtgtgaaggagagggttttccctccgatgaaaggaaggctagggcttgattcaggggagcaagtgggatgggccctgctggtccctggctgtgcctanattctgagtcngtctccaantcaaccttggggacaatncacttttnaccaancactgggaaaggggatcncgtgggtcattacccncatgggtat

SEQ ID NO: 28374 - DNA, 509 bp, Homo sapiens
  misc_feature (1)...(509): n = a,t,c or g
gtttccctgtctcctagaagactgtaactacagcttctatgattaccacaaagacactacctctcgtcttgaaagcagcaactgcgaccatgcctgcctctgtggtgggccagagacctaccattgctatggtgaccgccatcaacagtcagaaggctgtgctcagcactgatgtgcagaacacaccagtcaacctccagacgtctagtaaggtcactgggcctggggcanaggctgtccaaattgtggcaaaaaacacagtcactctggtaagccagcagctgctcctcatgtgtgatcacatgagaaggttaggatacgcatttgtatagtatatcccttctaggctcctgctggatttctcagtttccatcaatcttctagcataccaaattccctttgggggctgacaagggaatatggcatttcngcnanctgntcaaatcactacanaagcgtcctgacaccaaggactaaattcagtgcattatctgaggncaaagtatgac

SEQ ID NO: 28375 - DNA, 495 bp, Homo sapiens
  misc_feature (1)...(495): n = a,t,c or g
ggataaaatggaatttttgcattattaaacttgagaccagtgatgctcagaagctcccctggcacaatttcagagtaagagctcggtgataccaagaagtgaatctggcttttaaacagtcagcctgactctgtactgctcagtttcactcacaggaaacttgtgacttgtgtattatcgtcattgaggatgtttcactcatgtctgtcattttataagcatatcatttaaaaagcttctaaaaagctannnnnnnnnnnnnnnnnnnnnnnnnnnnnnnnnnnnnnnnnnnnnnnnnnnnnnnnnnnnnnnnnnnnnnnnnnnnnnnnnnnnnnnnnnnnnnnnnnnnnnnnnnnnnnnnnnnnnnnnnnnnnnnnnnnnnnnnnnnnnnnnnnnnnnnnggnacatgcctgnaaancccanctacatgggaagnctaaggggggaaaattgcttnaacccnagnnggnggnaggcaanngcngcagtgnccca

SEQ ID NO: 28376 - DNA, 497 bp, Homo sapiens
  misc_feature (1)...(497): n = a,t,c or g
gggtgaaacaggtcaggcttgatcctaaaacctgccacagagtcataggagactcatttggtccttggccatcttcagcttttatgttggcctctccttgcatgagtcagttgacagtagcgtattatgccagagtagttttgtttgtggcaaactcttgttctggagatagtttgcacacaaggtaactacagttaatgttaatgtattgtgtagttgaagattgctgggaaaatacatcttaagtgatctcaccgnnnnnnnnnnnnnnnnnnnnnnnnnnnnnnnnnnataagtacannnnnnnnnnnnnnnnnnnnnnnnnnnnnnnnnnnnnnnnnnnnnnnnnnnnnnnnnnnnnnnnnnnnnnnnnggtttccttacagataacanttttaatcccnaggtaacnttgcnacatcnggggaanatttttaaaatnaaanaaggtaagggagantcatcaaacngcactgtgggatgagggctggaaatca

SEQ ID NO: 28377 - DNA, 487 bp, Homo sapiens
  misc_feature (1)...(487): n = a,t,c or g
gatcggggtcgtgcaggcactgattgtggggtacgcattccacttcccgcacctgctgagcccgcagatccagcgctctgcccacagggctctgtaccgacgacacgtcctgggcatcgtcctccaaggcccggccctgtgctttgcagcggccatcttctctctcttctttgtccccttgtcttacctgctgatggtgactgtcatcctcctcccctatgtcagcaaggtcaccggctggtgcagagacaggctcctgggccacagggagccctcggctcacccagtggaagtcttctcgtttgacctccacgagccactcaagcaaggagcgcgtggaagccttcagcgacggagtctacgccatcgtggccaggcttctcatcctgggacatctgcgaagacaagtcccggaccccaaggatntaaaggaaaggttancgggaanctcctggccgccntgattgnaaccggccgcgcttcttgg

SEQ ID NO: 28378 - DNA, 507 bp, Homo sapiens
  misc_feature (1)...(507): n = a,t,c or g
gaactggatgaatcttaaattcgttttgcttagtgaaagaaaccaaacctaaaaggcgtccatactgtatgattctatctaaaggatgcgctagaaaaagcacaaccataaggaagacgaacaaatcagtggttgccaggggttaagagttggggaaaaggagttgatgacaaagagagtcagaggcagtttggggagtgatgggactgtgttagatttgactgtgcacctgtcaaaacccatggaactgtgcaccacagaatttcactaaaatcaacatagatgtttgtgtatgtgttattggggggagtgcccaaatgatacaaactgtgacagatgaatcaaatggtattacaaacttatcccataatccaggggtcccaacccctaaggccatggatcggtaccaatcccntaccctntnaggccctnggccaanagccaggnggtgaccaaagggaaggnnggcatnagggcctganccngcccctgtcaggtcaanaaaaa

SEQ ID NO: 28379 - DNA, 502 bp, Homo sapiens
  misc_feature (1)...(502): n = a,t,c or g
ggccagttccgtcttccctagaccttggcatcctgtgcttctatttcttggaatacgttctcctctgacctgcctgtaccacgtgggtcctcttcaagtactgttttgaagctgggctcttttgtgtagctcccacccacctgtagggctagctcggcttaagggaactctccccattggcaaaccggacccggccgccgccaggactgtgtttccaaaggttccccgcccccaaccccagcatcagcctgtagctcccctgctgaggcagtgtggttatgttcccagcagtgggggtcaaacacccttcctcannaatttctaaatgccctctannctgantccnganttgtaatccctttnacannanacctcttccctcggggaaccnaaaaaagtgnggtgtgtggccnaaanttgggggggnattnannccgggtttnnttnaanggggggaacncaaatngggnntnaagnggnacccnnnaccnggngctttttt

SEQ ID NO: 28380 - DNA, 535 bp, Homo sapiens
  misc_feature (1)...(535): n = a,t,c or g
gttttccacctttattcttggtcttatacatttttttcacatgagggttgttggggttgtaccnnnnnnnnnnnnnnnnnnnnnnnnnnnnnnnnnnnnnnnnnnnnnnnnnnnnnnnnnnnnnnnnnnnnnnnnnnnnnnnnnnnnnnnnnnnnnnnnnnnnnnnnnnnnnnnnnnnnnnnnnnnnnnnnnnnnnnnnnnnnnnnnnnnnnnnnnnnnnnnnnnnnnnnnnnnnnnnnnnnnnnnnnnnnnnnnnnnnnnnnnnnnnnnnnnnnnnnnnnnnnnnnnnnnnnnnnnnnnnnnnnnnnnnnnnnnnnnnnnnnnnnnnnnnnnnnnnnnnnnntggngcncctgtcccgggttgtatcttttatgtgaaaatggtaaatatgactacagtgttccgctganttctgtgagtagcccaacaaatagtaanntcagttacattatgggaagccccaanttcgaanaantccncgaananaaagggcttaaaanttgngaccgggaancnccttngggaatttttgaa

SEQ ID NO: 28381 - DNA, 506 bp, Homo sapiens
  misc_feature (1)...(506): n = a,t,c or g
gggcaaggatagccccttttattttttttctggaggtctttacagacccagagccagagctgtcccctgaaaaggcaaatgggagtcacccaggccctgtggcagccgaagcgagtacgctgggaggggtgctgggcagaccaagagtgggaaggaagggttccaacagctggggtttcaaactgaagaaagggaggatcagagggcctcattcaccaagccagaacatttccatatgtgtccaaggtgacgcgtctctcccattccacagatgctttttgtggttttgcttagaagttcaaggtcagctctcacgtctttgtttaattttaaagtgaggctcattgtagccagatttcccctgaactgcctggatgcgtanaggangggcctcaccccanagcctgcccancctcaaccctctgnnnatccncctgactnancctcatccatgcnaccttccaacctccggcccttgtcattcanctcttggcnggcaattgggg

SEQ ID NO: 28382 - DNA, 512 bp, Homo sapiens
  misc_feature (1)...(512): n = a,t,c or g
ggagagagctactaattgatctgttcggaatacttctgtttgtagataattgagatgcaattacataaaatatttgaaagtctgcaatataactagaaataaagagactggtgttgttgaaaagtatctgtattttctaagtagaagcaaaccataataatagaaatcttaaggtaatgacagataatcaaaaaattctttcaagaatatataatttcaagagaatacataactgtgaatgttcctctggagctgatgctaatagaatttaacatttaatagttaaagaagttaattttgctcaaagaagaaaacannnnnnnnnnnnnnnnnnnnnnnnnnnnnnnnnnnnnnnnnnnnnnnnnnnnnnnntaaaggggtgagcaacaaaatctacctccccccaaaattaanatcccgggtttttaaatagtacnttgtggnaactgagccncaaatgaacggtaangnggganaactggttccantgggaacctgntaaanaaccaagg

SEQ ID NO: 28383 - DNA, 514 bp, Homo sapiens
  misc_feature (1)...(514): n = a,t,c or g
gcggcacgaggttaaacgagctttcttctccaagtccaaagagctgcacccagaccgggaccctgggaacccaagcctgcacagccgctttgtggagctgagcgaggcataccgtgtgctcagccgtgagcagagccgccgcagctatgatgaccanctccgctcaagtantcccccaaagtctccaagaaccacagtccatgacaagtctgcccaccaaacacanaagtcctggacaccccccaacgcaaaantacnggtcccaatttcanagcgtnagggcanaagggncccaatttaggnancaanaacacaancaaaacaaacaaantgctggggtantgctcccccncaanntgggggggcangggnctganaaaattgncnttaggaagggggaccnannncccntnaattctcgggntaaaagggcggggctcaaannctttttaaaaaaaanccggggaacnggnangggggaaaaangggtctttntcaggggggnnaanagggt

SEQ ID NO: 28384 - DNA, 548 bp, Homo sapiens
  misc_feature (1)...(548): n = a,t,c or g
gactgggtaacccaaaaacataaggtcgaggtccctgttcttcaccggaaagagggtcaaggaccaaagccatagatttgactggtagtttagtttagtcctgtctacgaagaagaagagcggttgtttgttttaacagattcaagagcaggaagcactcatttagataactaccccatagttaaaagaaaataaagttagctgtaaactctaggcagagctatgagaagaaatgtgaagttctgcagcatgcctgggagcaagcccaacatcctggcaaaaagatgtccctatgtttgaaagatgctcagagatcctgtctgaaatgcaggaaatgaacagttcttgtgctttaaacataaaaaacacaagtaatattactaactctggtacccattaaaaacctggggttgggagctaatgttgccaatacagagtttaatccgcttaaanggttcctgacanacaaaacccctggactgggcccaataatggaanaaggtggtgagtcccccgtcaaaacnaagggtgcaacnaatggcntcaac

SEQ ID NO: 28385 - DNA, 533 bp, Homo sapiens
  misc_feature (1)...(533): n = a,t,c or g
ggcaaaaaattaagttaccaattactcataggtcagcacaaattagtttttcaaaggactgggctccaggactagtaagttttgattgtaggctacanaggggaagcttgtaagagggaacactgcatcactaggccctgggcgtagggcagggctganaggtagaggaggggagtgctanaactganaggtgctaanagatantagatggtaatgaaaatcactttcgaactacttgatttctgtgatcatcangatcccttcaagctgtcccatganctttgggtggggccangcagagggagagaggcacctttctttcatgtgtattttatgttggggttctgttgtgaggcaacatttgaaaaaatcactatcctgccnaagcangnttaaaagctcatctttttactcgttacctgagctgtggnaagagtttgaaaactaaaacaaatgcctgtcccaaagcnnnaanggangngcnaacnaaaggggtccnggggtttggccaaanccaaaacnnttncgaacca

SEQ ID NO: 28386 - DNA, 434 bp, Homo sapiens
  misc_feature (1)...(434): n = a,t,c or g
atgantcantanangggaacccggtttctgaggttaagaacctggtatgagtcctctcctctgtccgggaatcttagctctattctggtccgtaacggattttaatcgtcttcgtgaggtcggcggtcttcgtgttcgtgttggtcttcgtaagcgtaaaaagcgtaaacgtattcttcgtaagaagagtcgtcgtcttcgccgtttttcgggtcgcgttaagcgcgtttagggtcgtactcgtaaaggggtgctagagaagcgtaagtcgtcgcgttcgacgctgggatagtttcgtcgctagacgaaaatagaacgatatgcaaaacttaggacccccccccctcataatcttgatctacccgtcataccttccccccctcgcgaaacacgcgaacaacaaccaaatatccagatccgaaaaaaaaaaaaaa

SEQ ID NO: 28387 - DNA, 563 bp, Homo sapiens
  misc_feature (1)...(563): n = a,t,c or g
aatatctatcggaagggaacccggtttctgaaggttaacaacctggtatgacgtcattaacgcgaggccaaaagatctatccgctantctctcctanccccgcaacggtaaaacnacgtcgaaccagtccggacagacggcgctccanacacgagatgcccttaaaagcggatataggggccaccccaaaanaaggagaatcaaaggacgacgganaagatctacgagacgtaatgcggaagtctttctagacctnagtgccacagtataatanaaggttacgaaaaagctcgcctngagacgacgaaananaaataggcgaanaaagcgaggactaccttcatcccggaatttccgttattctacgaggccttcggatactaggctagcccccacgaacgaattaaggtcgctagatcctaagtaagcctctccatnggaggggacctaagtcgaacccgcaagaggngcatccgcccgnaaaacttagcctangcttntaaatggnaatcgggttttcgggncanaaggnngttcccgtaagaccccanagncaagagatt

SEQ ID NO: 28388 - DNA, 567 bp, Homo sapiens
  misc_feature (1)...(567): n = a,t,c or g
atagtgantctatcanatgggaacccggtttctgacggttaagnaacctggtntgatgtcggaagggatgacatatacgcaagaggacggtacgtccttatttcctctccctacccgcctcggaacaanacaacgtctcacagcanaaggccggtaaagccactaagtatctattacgacacctcggatcgagataatagaatacggacaagttaccctagatattatcccaacgacaatcgagcttatgctcccgggaaatccgcacagaaaacatcgagaacaacaaaaaganagatacgacccacacccatacgaacgggaccgcccttctcatcaccaggtataaaacccacatgcaaactcttgcgnactcttaccaacgaacctagctagtctcctactctacatacancgagaaatcaaactcgtgtanggtctcgcgtaagnaccaagaacacgtagcancaanntaaagntagttnccccgnnacggcggnaaatttcccttangggaaaagaacgantacccacccttattaaatccgttagatccaagccggcctt

SEQ ID NO: 28389 - DNA, 553 bp, Homo sapiens
  misc_feature (1)...(553): n = a,t,c or g
ctcactcnaagggaacccggtttctnacggttaanaacctggtttgangtanacaaanncgcctaaaggggttcgatgaaggacacagagcccactcatatggcttttcttctggtagcgcgcggggctctgtcggatgccggaggaaanaaggaacactctaccgtaggaaaggttgagggggatggtaagacgtatactatttctcgcgatcctactgcgtttcgggatatttcgagtattatttagaagaagagttcgaattataggcattanacgggtcgtgagcgtaagactatgtgtcgttttacgactttgcgtcatactcttcttttggatgagcgttctcggacggatcgggctatagagaacaatactaatgggtattaggttaagcctcctgttcgactaagagaagcnatggcttcgcgttcggcattgtngggtggggntttttaaatnagannccctttnaactagggtttacaagtaggtntaaatgtttcgcggtaatcgaaaaaaagtctaaaggncctatcggctagctcgtact

SEQ ID NO: 28390 - DNA, 556 bp, Homo sapiens
  misc_feature (1)...(556): n = a,t,c or g
taaccnanatactctatcanatgggaacccggtttctgaggttaagaacctggtntgagggtaatgcgagtcttcgcggggattactttcttgaaggtcgccctcgtttcttanacaaagctacgccggaaggtantcgcgctttcgaagaggttcgtatctaagcgtaccggcgaggacggagcttaagtattaagccttcggaaagttcgggctttggattattaagtttcgctagactcgtatgcgttctaagtgggtggaaggctaatcgtataatgtagtttcgttttatggttaaagtctttatgcgcggttcgcgcgaagcagtttgttcttgttagaacgtagattagcgtcgttttgagcacgagcgcgcgcgcgatttagcgagtcgcgattcgttttagcgttctatcgcgaatgcggtctaagttaaatcgataanttcggtgaagcgaantttaatccaatcgggntcngaaggaagngggacnnnaaaaagcctttattctcgttttttgatgcccgttattcctgaagattagcgcgcaca

SEQ ID NO: 28391 - DNA, 509 bp, Homo sapiens
  misc_feature (1)...(509): n = a,t,c or g
ggggcatatggtagtaaactgaattctcctgtctgcctacagctgcatttctcacttgtttctcttctctttagtgctgtgtacatacctctgtcagcactaataacgtgtaattattttatctatttactcagcctagcctagctgtagattgcggtatctggagtcttttatttagtggtgagtctctcttgagcttagttgctccatgacatgcatgctgagtaaatgaataaatgagcccgtagctattgaaatagactgtttcagctgagaccttgtaatatggtgattgatttaagccctaaactaaggacttaagtcaatttcctgcttaccgagtcgtggnactagtgtgtgaaactgagaaagtttanagtaagggtgccagcatcactaagtgtgtgacagctgatgcaactccctggtatgtcacggncnaactccctggccanaatgcagagaatccnccccaacaaacctggttgnccanaagattncgangtcct

SEQ ID NO: 28392 - DNA, 509 bp, Homo sapiens
  misc_feature (1)...(509): n = a,t,c or g
ggactgcatagggctcggcgggagcagcgagtagggaagatcaatagctctgactgcccctcctctctgtgcccacaggtttttaggaatctgatcatgaagacaggcaggctccgagggcccagcacagcctgcccatcttgcagcatgattctgcctgggagtcagggaacccacactggctgatggagggctgggagagctgcggggagcctgaggggcgggcagagagatccggagccaagaactgactagatcaaccagtaaataaaaggncacaatgatttttccaggcacccagggagaagcagacaagagagcccagctgacggcaggagctgacaactggcaaatgagcctccacagttatctgntttccttccttattcttggctcataagacagangctagaaatagatgtaactggcanatgacntaaggntgaaaaaanggccaccgggtaaatttggggggaacncttggganngnaaaagggggnatanctttg

SEQ ID NO: 28393 - DNA, 487 bp, Homo sapiens
  misc_feature (1)...(487): n = a,t,c or g
gcatgtgtagtgaacacagcgaaggnccctgagaagccaggtggtcagaggattgacccagcgactgcatctgncagttctaaaatgaagttgaaataaggaattcctagagatccctaagtaatcaaccatgccagagtaacaggataaagaagcatattttgcatttgnctattgactttattccaagcgtaaaaacacttagacgtgttcaaagctaaataaacttggaacagagcttcaagactctgaagtcccatagcttagtgacttcctatatgcacttcctagagaaccctcattttcggattctcctcctcttttttggtagncttgaccgaagataanagacctggnattccctaggganctggncctttgncccctattggtcaagcctaaaaaatacatctgngncctccttgttacngggggcaaaacagcatttgntttgatttgnagccccccattttnaaggttccaaccc

SEQ ID NO: 28394 - DNA, 440 bp, Homo sapiens
  misc_feature (1)...(440): n = a,t,c or g
gctanatggccagggcaggctgagctggcctgtgctgtttctgtacccagagtatgcccagtcggacttcatctctgcttttcatgaggactccaggnctactttgaggatgaggacagggcagaactataccgggtgcctgccaagagcaccttgctacaggntctacagcaccagaggtactttgtaaaagccctgacaccagcatttttggtctgtgtaggatcctctcctttttgcaagaattttctccgggggagaaaggngtaccagatacgatgactaagccagggcccctggatctcctcccttaccctcctctgctgggaacctagcacacctgaatcagctggacatactgntggagtccaggctttctttccggcaccctggggntaggccttctggannnngggggggnagnanctnngnntccttaa

SEQ ID NO: 28395 - DNA, 484 bp, Homo sapiens
  misc_feature (1)...(484): n = a,t,c or g
ggggtgggtcanaacaaggagctgggngtctgaaacnggtcagtgtgctctttcttggctagcaagttactttaccttggtagtcattagtttcttctttgactaaatgaaaaggnttttatctanatgctgctgtgcatcttgaagcatgttaaaagaaggntaaggaaaaccagtttgtggaagctgactgagcaggcggctcactggccgtattcagctctccacccgtagggacctgctgtggcagccataaaactgtgcagaggngaaccacttcagcagaaagatgcttccccacagagatctgggagcctttgactgntgaacagggaaaaattccccatgcttttaggatcgtggtgtaagaccccactgngganagatgctttctatcttgnaacacagaccagggaggtacggccanngnttttggaaccccttaacttcaaggnaaaggctaacttgttanggccccgtcaaa

SEQ ID NO: 28396 - DNA, 491 bp, Homo sapiens
  misc_feature (1)...(491): n = a,t,c or g
gcaaatggttgaaatgggaaagttngngttctgtacgggttcgcacacccacacacagagtgggccactggagagacgcctgngacatcccagcaggtgccactggggaggccggggcagctgggtacttcagctctctctcttctgcgtctccaggccccctcagctgcagcagctcccccgattttacttagtccgngttcctagggtcacattccctgaggcagcacctgtggcgcggcgtgcgttcctagtaaacacgcaccgagagcacggngtgcgttcctagtaaacgtgcaccgagacaaggntggggcttgggcttctggncacctgcatcccaacgagccctgggaanatggtctggaaggaaanantatgngtttggatattagggagtganagtnttggactcnaaanatgtccgttattcttgggaaatttctgaattgaanaaaaggnctaaggaggnttcaatttanccgcttaaa

SEQ ID NO: 28397 - DNA, 501 bp, Homo sapiens
  misc_feature (1)...(501): n = a,t,c or g
gaccactttactaaatgtctccaaataaccaatttctantaatttanaagntgtagtatagctagngngcattgcattatgataaaagagtgcttattacctgtgcacctaatttttggaagtcagattcatatagctttggttaatctttgttctttttacannnnnnnnnnnnnnnnnnnnnnnnnnnnnnnnnnnnnnnnnnnnnnnnnnnnnnnnnnnnnnnnnnnnnnnnnnnnnnnnnnnnnnnnnnnnnnnnnnnnnnnnnnnnnnnnnnnnnnnnnnnnnnnnnannnnnnnnnnnnnnnnnnnnnnnnnnnnnnnnnnnnngtttctcgnnnnnnnnnnnnnnnnnnnnnnnnnnnnnnnnnnnnnnnnnnnnnnnnnnnnnnnnnnnnnnnnnnnnnnnnnnnnnnnnnnnnnnnnnnnnnnnnnnncggagggnctnctgggntcaaactnaactttgtcttggaagcaaatttggaagcctttnttttt

SEQ ID NO: 28398 - DNA, 486 bp, Homo sapiens
  misc_feature (1)...(486): n = a,t,c or g
ggtcatctttactgccactactgttccttgtgaatatgncgcatctctgggctgttaacatatgattccttccactttgaatggcttgtgaaaaagacgggggtcttttcacaagctggngatactcttttcagtcatgtatttagaccaaatcctctcactttgnggagtcttggaatagtgtccacgtaaggctggcctggttagtttctcctctgcttcctgagtccttgagtggtctttgtatatagcgtgaagtgcacagcattgggaagtctgtgtctgcaagcccatcaccttcactagggtacaacattttcatctttggacctctaggctaaccggagattgaaacttacttggcctctacctaaacatttcttgagcactcagtgactgncatggagttaaccnacgttccnngaatggtcatggggnttgggcaaccggggaaggacttcttggaggncaaanccttatgnccca

SEQ ID NO: 28399 - DNA, 537 bp, Homo sapiens
  misc_feature (1)...(537): n = a,t,c or g
gctaatcttttgcttttataaacaatgctgcaaagaataattctataatatattatttttgcacatatatgaataaattcccagaagttgacattttgggttaaaagttacgtgccttaacattgctataaatagatattcccagattattcacgttggaggttttgatgaaatccagcctgcaatacaagatacatttttgtttgttttttgagacaaannnnnnnnnnnnnnnnnnnnnnnnnnnnnnnnnnnnnnnnnnnnnnnnnnnnnnnnnnnnnnnnnnnnnnnnnnnnnnnnnnnnnnnnnnnnnnnnnnnnnnnnnnnnnnnnnnnnnnnnnnnnnnnnnnnnnnnnnnnnnnnnnnnnnnnnnnnnnnnnnnnnnnnnnnnnnnnnnnnnnnnnnnnnnnnnnnnnnnnnnnnnnnnnnnnnnnnnnnnnnnnnnnnnnnnnnnnnnnnnnnnnnnnnnnnnnnnnngggcctgggccnaattttgganttttnggaaaaanggggtncaattttgtncccagttgt

SEQ ID NO: 28400 - DNA, 544 bp, Homo sapiens
  misc_feature (1)...(544): n = a,t,c or g
gtgaagaatagtactcaaattttctaggaagttgtgcacttctccactctactgaagaccccatagtggaaatcacgcaagtatataccatgctccagtttgtcttccttcgctttactttctgatctaagactacaaattcagacctactgttccctttaggaattctagtatttagataatgngttacattattgaggtttaatggttcacctggctttggggatttaagatttgtttaactgaaaaaaacaccaagacctgcagtaaagtacctggttttgtgtgtctttgcattcattcattctttgtgtgtttccctaaatttctgtaagtatgcacaactttgcagttcttgcctattcaaacccttgtaatctttctataagaatccagtttaataaattgaggaaaataacctggttaggagaaccaacatacttttnggcagggacttgtattatgntaannaacnncctnnaaangggngaancctttcnaaaattttnnncgatttttattttnaaaatatcctaaanccctt

SEQ ID NO: 28401 - DNA, 532 bp, Homo sapiens
  misc_feature (1)...(532): n = a,t,c or g
gaaaggccctcagcttttagagacacanaaatccatgangtctcttcctttctgggctttgttagtcagagcaggggatcagaggagactgaagcagaaaccctgcacacgggcccaggatgtggctgattttgtggttccggggagtatgtgatgataatcacccccagcagattccattacctcagcagctcttgttcccccgccactggcagttctgcaatgccatagcattttccagagctaagatctctgggttgnatttgctgacagcctgcaagcttgcatgctctgaaagattttttttagtttttaatttttttgtaaagatggggtctcgctttgttggcnnnnnnnnnnnnnnnnnnnnnnnnnnnnnnnnnnnnnnnnnnnnnnnnnnnnnnnnnnnnnnnnnnnnagactttcaacttgngctcagtgcagttcttgactcacctntctgggcctcaaggttncaaatgccnaaacccntcnnaaaancctttgggttttcctgggcttgtttngaaat

SEQ ID NO: 28402 - DNA, 164 bp, Homo sapiens
  misc_feature (1)...(164): n = a,t,c or g
ggcaaacagaatggagccaaaaaagaatngatttgggaaggcccaaggaatttgaaaccgttgagatgaacactttccgtttttgctacactgatttatgttgtgctgggaattgtacaagcctttgaccagaccttagggttgttctttaaaaaaaaaaaaaa

SEQ ID NO: 28403 - DNA, 537 bp, Homo sapiens
  misc_feature (1)...(537): n = a,t,c or g
ggcggccggggcgtgttgcgcctgcggctgcttctctcagcgctgaagcccgggatccacgtcccacgggccggacccgcggccgcgttcggcacctcggtaacctctgccaaagtggctgtgaatggcgttcagctgcattaccagcagactggagagggagatcacgcagtcctgctacttcctgggatgttaggaagtggagagactgattttggacctcagctcaagaacctcaataagaagctcttcacggtggtcgcctgggatcctcgaggctatggacattccaggcccccagatcgcgatttcccagcagacttttttgaaagggatgcaaaagatgctgttgatttgatgaaggcgctgaagtttaaaaaggnttctctgctggggtggagtgatgggggcataaccgcactcattgntgntgnaaatatccntcttacattcncnaganggggaattnggngcccaacccttatttttganaaaacnnntgtntntgnggcttccaaatttccaaanggnngagaa

SEQ ID NO: 28404 - DNA, 538 bp, Homo sapiens
  misc_feature (1)...(538): n = a,t,c or g
gagagtcgcctaaatagctggtttcagcatcggcccccaggggcctcccctgaacgctacctcggcttgccaggatccctgaagtgggaggacagaggtccaagtgggcaagggcaggggcagttcttgatacagcaggtgaccctgaaaattcccatttccatagagtttgtgtttgaatcaggcagtgcccaggcaggaggaaatcaagccctgccaagactggcaggcagtctactgacccaggccctggagagccatgctgaaggctttagagagcgctttgagaagaccttccagctgaaggagaagggcctgagctctggcgagcaggtttgggtcaggctgccctcagcggcctccttggtggaattggctacttctacggacaagggctggtattgccagacatcggggtggaaaggctgagcaaaaagnggcccaccctnttttnacccggcctctttttnannagaggccncccgggtntttttcccaaagggttcntttggganaangntttnnccacctgggggtc

SEQ ID NO: 28405 - DNA, 535 bp, Homo sapiens
  misc_feature (1)...(535): n = a,t,c or g
gccaaaacaaaaacaaaagccaatccnggtctggaagctggaccctgcatccaaccctggggaatccactggggagaatatggagacaagagaaagaagtccaagcagtaatcagccattttggaatgaggtaggataattttcaaaacagctccatagctgtgccaccatgcaagctaagcaaacaccatctagggtgagggaagctaanagcacagatgctgctatttgaccttaagcaagtcactttcatctatctgagctccagttntcttatttataaaangggggtgatactaactatgcctacatcatagcgttgtgatgagtaaatgagatgatgcaatgcattcaacaatgcaaaaatgtatnatcatttaacgatgccatgtatttaacaacgcctgnctaatantaagccttttgctttcagtaacnaaangnaaactggantaaggatacgaagaatanaanaaanngatcccttttaacccacccannangggggngatttccnaacctnggaataaaaaaa

SEQ ID NO: 28406 - DNA, 526 bp, Homo sapiens
  misc_feature (1)...(526): n = a,t,c or g
gggcgggcaagcggtccggctggagccgggcggctctnctccagctccttctcggcgtgaacctggtggtgatgccgcccacccgggcccggagtctgcgcttcgttaccttgctgtaccgccatggagaccgttcaccagtgaagacatatcccaaggacccctatcaggaagaagaatggccccaggggtttggtcagttaaccaaggaggggatgctacagcactgggaactgggccaggccctgcggcagcgctatcacggcttcctaaacacctcttatcaccggcaagaggtttatgtgcgaagcacagactttgaccggactctcatgagtgctgaggccaacctggctggactcttcctcccaacgggatgcagcgcttcaacccgaacatctcgtggcagctattcctgtgcacactgtcccatcactgaggacangcttgttaanttnccgttgggcccttttcccctttannnccattngaaaaaagaacccggaaaccccngtttttaaattgg

SEQ ID NO: 28407 - DNA, 539 bp, Homo sapiens
  misc_feature (1)...(539): n = a,t,c or g
ggtttgttgttgtgacacttttgtattgctttgctggcagacggctgatgcgggccaaataagaaatccacaatctggcacagagtacacgcctagacagatttatcatatgtcctgataatcaagcacaattgtgtaccccaacctttgccagatgccggcttcctcatgaatctgggttctgtacatggactccccaaaggacagtaaatcagcgcactanatatctctgcaaagtttccagcagatgcttgtcctgtgcttaccctgcccggctccagatggntccacatcctgctccttcctctcgcgggcacttcagatatgtcagcaacgcagggtgaggaagaaggtggaaggagcagaactaacgtagttctttaagaagccccgcagagcccanaggtattttatatatgcntatgaggagctctaacccggcagcataaatcactggcagcttttttannnngnnccccnttttaaagggaaaaattgtaacttgttgaaaaaaggtttttgtcnagtaacntgcccgc

SEQ ID NO: 28408 - DNA, 535 bp, Homo sapiens
  misc_feature (1)...(535): n = a,t,c or g
gcaatgtagtatgtgattctgttaatantattttatttcagatttttacatcagcattcacgtaagtgatattggtttgcagtttagcttttgttcaatttattaggcaataatttacattaattacaaatattaatattaaatttaattatgttaataccattagttaatggtgctataatcatgatgtattaagttttatacttctattgttttattaaagttgaggtgttaatgttatgcttccttcattttctgtactctggaacaatttatatagcatcaagtctgtctgacctttgaagatttgatagtttccctcttaaatcctttggggatttggtacttttttgnggagttagtttcatgataattttctttatttttgatatggaagttggcttgnttaagcactctttctaaagaaggtcagtttttataaactattgnctngnaantattcatgcntctatgngtacctgcntttaaagnnncccngnagnttttnggccnnantannnnattaangggtttt

SEQ ID NO: 28409 - DNA, 533 bp, Homo sapiens
  misc_feature (1)...(533): n = a,t,c or g
gataatacttactaaaacttttgctctttataattttaatctttgtttttggcattcccagcagcctgtcactgggcatgcataccttgtttgtgtgattcagtgttaaccgttgtgtcttttgcattgttgaagattttgtccaggctgatcaagctttggtcccatcaggaccatcaccgaaagtactcggggtgaacattagccccctaatttactcttttggggtctgcctttttattttttgcaaagtgagtaatctctcagggaacatctccatcggacaggatcatggatggatttggtgttggcaggttgctcttggtagctgtctcccccacaggctgctcttgggtctggagcaggttttgggtcgggtcctgctgcctcatggaacctgggcggagcagtgagtctgctgagcttcacttcctaaccatcaagtgaggcataatgcgnaccctgangggcatggggngggttttcntaaaccaaancnaaaaaanccntgngaaaactcnccnngaattttt

SEQ ID NO: 28410 - DNA, 543 bp, Homo sapiens
  misc_feature (1)...(543): n = a,t,c or g
ggtcttgggcaagtctcagcctcagtttactcatctgngaaaggtgctaacagcgcctttcttgcgggcctgtggtgagatgctgtctgtaaaatgcctttagagtgggccatcaatcagtgtttgctagtctagtttttcgtaattatggtttaaaagtaaccctgaatctgcccacccagaaggcttttgatgttcttgatagaaatcgaggacacgagaggaggagcagggagcagcggaaggggctgaatggtttanaggcatttcccatcccaaaattatcatttgcttgtgcaaaacttaatctcaagcaaggacctgaatgacttaatttctttgcaatagttatggctgtgctgaaatgggctggcacttcctgggggtttgggagtggggactgatttaagaagctgctttagctaggtaggatggctcacgcctataatcccacacttttggaagnttaagcgngccggcanattagggccgggatttngaaatacctggccactngggaaaccctgcctgactgaaaaaaaa

SEQ ID NO: 28411 - DNA, 533 bp, Homo sapiens
  misc_feature (1)...(533): n = a,t,c or g
ggtataatctagtgcaggattcagcagnctatagctcatgggccaaatgcagcctgctacctgtttattcagtaaggttttatgggaacacagccacagccattcatttatgtattgtctatggctgctttcatgctacagtgacagaattgaatagttgtgacaggaacaatatggctcacaaaatcaaatatatttactttctggctgtttaaagaaaaagtttgctaccnnnnnnnnnnnnnnnnnnnnnnnnnnnnnnnnnnnnnnnnnnnnnnnnnnnnnnnnnnnnnnnnnnnnnnnnnnnnnnnnnnnnnnnnnnnnnnnnnnnnnnnnnnnnnnnnnnnnnntgcanggtgaaagacatatctcacatggcagcngatattagaagagagcttgtgcanggaaagtcccatttttaatataaccatntgatctcgggagacttattcactnttccatgaacagctcnngntaancccnncnctnagagattnatnnctccnccgggncttttccnnacncntgga

SEQ ID NO: 28412 - DNA, 659 bp, Homo sapiens
  misc_feature (1)...(659): n = a,t,c or g
gaaattttacatgttttctagcttgggcaatatancaggacctgtctcttggagaaaaaattagttgggcatggtgtacgcacctgtagtcgcagcgccttaggagtctgaggtggaannnnnnnnnnnnnnnnnnnnnnnnnnnnnnnnnnnnnnnnnnnnnnnnnnnnnnnnnnnnnnnnnnnnnnnnnnnnnnnnnnnnnnnnnnnnnnnnnnnnnnnnnnnnnnnnnntagaaatttacgtgtctgtagaatagtctataatgattaatctctgcaacatctactcattgttttgggaagacaaaacaatgccgattttcctttggggaacaactctttctaccatgtgtaaaccatgtgttttagatagaatggctcaactgcatgggtggacctggttggctgtggctactagacataacacatgcccttgggccctgattatngttattggncccaaccaanatcagacccaattaatgccaatggnntnnaanaanaatncnggaaccnntgaaaaanaanncntanttcctgggannctcccacaanaaattncgncatttaaanatcttnttcaaaccgggcaannnantntgtncnttgaccccnggtgggggncttcnttganggccaaaaaatnatgccctcattg

SEQ ID NO: 28413 - DNA, 580 bp, Homo sapiens
  misc_feature (1)...(580): n = a,t,c or g
gctggaagtgtagtctgctgcagaaaacagcatatactctagagaatgaggggtcagcatgaagattatagcaaggggggcttgttcaggcacagagataaaggaacgtagtaccttggcaataaagagggaggaagttcaaatgaaagtgaggtaagctcaggctatttgctcaaaatgacaaggagcatgaaggatatatttgtcaggtaggattacagtacaggatagaaagagtagttttgtctttgtcatatagatagcttggagattcttggactcccatcagaaacaaggcnnnnnnnnnnnnnnnnnnnnnnnnnnnnnnnnnnnnnnnnnnnnnnnnnnnnnnnnnnnnnnnnnnnnnnnnnnnnnnnnnnnnnnnnnnnnnnnnnnnnnnnnnnnnnnnnnnnnnnnnnnnnnnnnnnnnnnnnnnnnnnnnnnntggcgtgtactgtgatcncaactttcaagangctaagcaagagaanccctttaacacgggtcccggggttcnattagccaattcccaatggntcccacccgggaaaatnngacnccncnccaaaaaaaaaaaaaa

SEQ ID NO: 28414 - DNA, 648 bp, Homo sapiens
  misc_feature (1)...(648): n = a,t,c or g
nnnnnnnnnnnnnnnnnnnnnnnnnnnnnnnnnnnnnnnnnnnnnnnnnnnnnnnnnnnnnnnnnnnnnnnnnnnnnnnnnnnnnnnnnnnnnnnnnnnnnnnnnnnnnnnnnnnnnnnnnnnnnnnnnnnnnnnnnnnnnnnnnncaagaatataatcaagttcaaaatgttaaacttgttcagttttgtaaagaactgtcctcagttttgagaaatgggttttctcaatcatgccaagctgtcttttctttaaaaatcatagtgactgacactaaatggtagttgggggctttgtgttttttaaatgcttccttcatgaaattaaaagttacctgtgtttttcccgaaatctcttgacccgtgaaaccctgaggcctgggcccggtgccttctgagtccagcccctgaatggtccattctcctcccagggtccctggatcccctcttccncatgtcacaggcanatntaccaagccttngcaacctggganccaagtnacaaananaacgggtaaggancagtaacctgnncannnatnggggtncccaggcnnnnaaaattncnnattnagaaccttaaatcangcaggcnggtnagtgnccanctaannnccncatttggaggccnggaaacngncacntaggc

SEQ ID NO: 28415 - DNA, 663 bp, Homo sapiens
  misc_feature (1)...(663): n = a,t,c or g
ggaactgcagagagagttccccgacctgcctcacccagcctgccctttcaacaactagaggtgagtgctggcaagtccctgggtgcacactggagccaaaaaatggcccattgtctggaagccctgagccagcctgtcccctggtgtcatgccacacgaggccttgctcacctgtcagcctttgctcttcctggccccagatgtaggtagaacaatggcctctgaacacacccaagctccacggtggtagccggtgtctgataagacaagtagggaaatgatctctttcatgttccctttctcctcagaatcagaacgctgcgcccaggttcaacctgctgtttcttcaccaggtgaccctgcataggcttttgaaaccaccctgaccctcatccgtctagcgacaagatgggaatcatcaagacttcgttacgtaactcaagaagtcngtgtgagaacctgggananaaggttttnaactgggcgcaaagggtcaagccgnaattccaaaactttggnggncaaccaggaancnnttnggccaggatttgaaaaaaccgggcancanggaaaacccctttnancaaataaaaaatttcccgggtngggggaacctntaacccggnccncgaaggtnngngaaatcnttnaccgggagggggt

SEQ ID NO: 28416 - DNA, 736 bp, Homo sapiens
  misc_feature (1)...(736): n = a,t,c or g
gcttntatgaggccnnnnnnnnnnnnnnnnnnnnnnnnnnnnnnnnnnnnnnnnnnnnnnnnnnnnnnnnggcacgagtcccatgggggaantgcaggctccttcctgtggtgcctctttatancctcaccaccatgctaacactgancatggtgaggaggangaagctttggntagctaaacatgtttaanaaggccatanaaactganaaagaaaaacattcaactttagctgaanctcctttgatacaaaagtttcattctgtcagaaataanccatattacagactcagagatagaggnagtttctagagaactcggtcttatcgtgggttctggagcacacctctcanaccagtcaggaacactggggaggtgacagcaggtccccaggggcctgcagggaatctttcangctgcacggattgggatttccctccaaaccaaactgtcctttaaaggggaacctcctcttttactaactcaacctttctcatctctgggaccagcanggacctggacangncancaggcattgcaaccttngtnnnctcnaaanattcnctnngaggccaaannnnttccggntnaccnagggnccnangggnaccnatccttcnnnagtnnaanattntgcnaanttnttgggnaaactgtttttnccaaccccatcnnggggccccangcttnaatnggaaaaagggnccnaaaaaaagccncaanaccttntcttttg

SEQ ID NO: 28417 - DNA, 561 bp, Homo sapiens
  misc_feature (1)...(561): n = a,t,c or g
tctatnancangggaagcccggtttctgaggttaaaaacctggtatgaggaaacgancggtgatcggaatgttagagctctaagtgtggcctggctagcttgcgaaggggtcctctatggagaaggcgattattcgcggcatcgatgcaactgtgtctattaagtaggcgtcgaaaggtctttggagtcttgagtcgtcaggctaggtagtctgaaatacggcatcttaggaagacgttactccgtatctaggaagacagcccaaggaagacggtaacaacaataatatactcctaacattagtaagaagtcacctagaagaacgccgaataagctactggactcataggattangccgaactactcgccgaaacagaacgatacgcaagaagcgtcgcaggatcttcccgttcaacgtcgaggagcaaacattccatatagtcgcttctcgggcccggccctaacccttctnttaaaagccnagnccgaaagcctggccnagggttggttttgcanttatgtcgcaacttaggatcccggaggttaggtgggcggctata

SEQ ID NO: 28418 - DNA, 573 bp, Homo sapiens
  misc_feature (1)...(573): n = a,t,c or g
tgaaccnanatgantctatcanagggaancccggtttctgaggttaagaacctggtantgagttaaaactatagaatagaaccctagcagtttaggtcgttgcgccgcccgatctagaaggtttcctcatcctagccccgaacttataaagaaccaaaaatcggcaatattataggtccctcgattacttacctgccgggccccgtacccgatttaatttctcgttcattcgaggagtccctcccggaaattaggacggaaatcctcctttcgttccattccttccctatcttacctaccgcttctctcgcgcgtaattcgagtcgggaaaggtacccggacgttctctcgccggggttcggggtcgtagaatatattcgtgccctatcggttcctaccaggcggtttcagggagacggtccctcgtcccggactatcgcctttcagtacgggcttcgggcttaacggacgcttaacgggtcctttaactaaactttctaanggttnttaccnaacccggnanaanggcggggcaaaantaananaattcgnaananatacggacgtacggac

SEQ ID NO: 28419 - DNA, 561 bp, Homo sapiens
  misc_feature (1)...(561): n = a,t,c or g
taaccnacatantcatanagggaacccggtttctaggtaagaacctggatgagggatcgtgtgctccgtagggtgtgattgtatagtgatcctcgttcgggtcgtgtcgtagtattcttcgtttttccttggtcgtcccggtttacttccgggggtgtctcgagttcgattcctgcgtcggggtcgtccctcggtcccccggctcggagatgacgttgtaggagagagaagcctattatttttacagaggagattggtggagagggtcgtttangtcgcggtgtcgacttagcgataacgcgtttttcgttagttggggtctgtttatctactacctacctacttacctcagangttagctctcgttctttaagatgtggtgggaagttaagtcttcttaattataaggggggcggggggtggcgaactattcttgaggttcgggtttaaggcctaagggaaatcctaangngctngggcctttcgtttttgggntaaaaaaaaaagggagtttatncgnctanaaaantagcntntcganaaggaatcnaatacccgtta

SEQ ID NO: 28420 - DNA, 520 bp, Homo sapiens
  misc_feature (1)...(520): n = a,t,c or g
aacctggtntganggttggccggggcgcgaaaaggcccctctgtctcagggagacctcctaagtaactatcacgctaatagatataggcgccctttccttcctacacgaggaagactagggactaaaatctacctgaaaagtcaaagaggtattacctgcatttgccggaacagtgggccccgtatgtaaccgccgtacacggaccacacaaatcgaagagtaggggaaacatcaaaacgcttacctactcgacttatacgtgcgcggtagtttaaggtcccgccgcaggagtaacgatcgccggcacgggtcaccttacgcactgggaacctcgggtaaaattcaagttccagaagaagagacgtcgctncggctccgccggaggagtncgtcccagncagacgcttcagcancaanccattcancnnccgcggnaacaaatnatcccncnggggcnaaangggaaacggnncccgnaaaccggccttccctcgnaggccacccgtccgggngattaac

SEQ ID NO: 28421 - DNA, 571 bp, Homo sapiens
  misc_feature (1)...(571): n = a,t,c or g
taaccnacatagtcatcanagggaacccggtttctgaggttaagaacctggtatgagagaggggctagatcaaggcggtataggggtcttcggaaagatagtaggtccttcgtcgggtgcctttccgccggagggaacagagcgggggcgggatctcgtaggggcgcttccgcttatctgtattttctgttgtttattagggttacgtctcgcgatccgggtcgacttttatttccctcgggttcatagtattataggttgtcgcatttttccanagtcgttttctctcggttcggttggtaggtgctcctccaatcttcccgcttctcacacctangtacgccttccgctaagtcgtcgggttggtttcgttccgtgtcaagtagagttctcttcggtagtcctctaggctctttcaacggagatattaaggtcatcaggatatcggtcggggtaantttcttcgtttaacgtctantccnaaatcnggganaanncnagtncggaacggtttananctttaaaggnaaacccgggtcggcttanttcgagtctantcgacnttcaatct

SEQ ID NO: 28422 - DNA, 545 bp, Homo sapiens
  misc_feature (1)...(545): n = a,t,c or g
acccggtttctgatggttaagaacctggtatgagaaaaaagtcancgcnctcaaangtaacccaaggcatctagaacggaacgaatcgcaagangacccaaaattacgtaagcctatcagaaccaattcaaatttcgccgcatagggacagaggcccaaagccaccccaccgcaaaacataccgaacccctcgcacatctcgaccatagatacccacttcccaaaaaagacgcaaactccaacccccacgttactcaccaacccattaacgagccattccgcaaacgagaagctacgacagtatcgaaccccaatcagccccgatcctcaagcccggcatcgcgaggtaatgcatccaaaacccctacgtcggccatccaaaaggtacccaagagaccctaagaacgaccccgccataacgccccaaaccccgatcgantntanagnttctanagaancggaagnantttaaccgngcgaaattttgnaannctaaggagcggttcaaggntataatanatnggaactanatttccctatccggg

SEQ ID NO: 28423 - DNA, 508 bp, Homo sapiens
  misc_feature (1)...(508): n = a,t,c or g
tgaggaccccttcgctatcgcnaattcgangttagagtatgaattaggaagggaaacgtcggcgggcccttaatttgggagacggcccccagacgacggtcacattacccttgcctttcgcagctgcccttaccaacgtcgacagccaatgtccgataggcacgcctacgctagctaccaaaggagacgtcccacgcgcantcgcgtagtcgcgggaagccgtcgtcgactcttctcgacttcttaccctactactcgccaaatggggacgaggacaaatcatacaggtacgccacgaagataaaacgaggccacgctcaaaacatccaatcgggcgcccgatgtacagcaagcgtcgagctagcaacagggcccccgcccgccgnccgccccgcccgnccgcccganacggngcctatcttcgccgttaagggcgnnccttaccgnttaaccngggtnttcnaatcttgnttttaggccnantnacntttngtcanttctaagcagg

SEQ ID NO: 28424 - DNA, 573 bp, Homo sapiens
  misc_feature (1)...(573): n = a,t,c or g
ttaaccnanataatcantanagggaacccggtttctganggttaagaacctggtatgantcgtgaagctcggaaccgggttatgcgtcgggcactaggcgttcacgcgaataagtctttaacaaatttccgggtatcgagccgtcaancgaggtcttctcggcatagaatatgctatatcggcctaagcgccgtggtcggcccaggggagaaccaaggcttgcttcgcttgctcctttcggcgaggatcttanaagtcttcgttcggggtttcttggatagtttagatattctcctgtgcggtcgactctgtctcgtgcttccccgtcgaacgcantccagtctcgagggcggtctcgcgtcggatttaagcgatctccttcggggaactactaaattcgggggttttaaagtagttgtaggtataagtctatacttctcttgggaagnactttgctcgttcttctttgggcgtgcttatgcnntcngggganttcnntaannaanggcggttttaacaaggaccatnttnnngggggaaggtcccgttnnancggaaccccangtntaaggt

SEQ ID NO: 28425 - DNA, 576 bp, Homo sapiens
  misc_feature (1)...(576): n = a,t,c or g
gttaccntgaaccnanatgantctatcagaagggaancccggtttctgaggttaanaacctggtatgagcgtcaacagctcttcttttgcgccctcgcctcttagttttagatcgtatctgtagctagcgtatcgtgctccangcgccgtcctcgttaatagtcgctccanatgaggcggtctcgttaatattcgctccagatgaggcggtctcgttggtattcgctccagatgaggtcgtcgcgctaaaaccttatagattgatcggtcctatagtagataccctccctctttagtctcgtaggtcgggagcttagttcttaggcgttatagatttangccttcgccgagggattatttttagtccatggataagaagttctccgtctacgcgattgctttgcgcgcgtcttcggagaggaggtcttggcgctctcctttacgngggtatctactctacttgcaagggcttttanggcttctcttaanntggcttttnntttaaagggtaancctaaaaanggntcntcggggncagganccanangcgaatngnnggcnggnaaagcnntatct

SEQ ID NO: 28426 - DNA, 562 bp, Homo sapiens
  misc_feature (1)...(562): n = a,t,c or g
tctatcancacgggaatcccggtttctganggttaagaacctggtatgaggagtctgctttgtcttaagtatattaagagtacgtaacgtataataagaagtgtanttggctttggctgtgactttgggataaggagtgtgcgtggaagtgccttaaactctgggaaagcaaatggaattggtggtgggagctgtggctttgcctgtgtcttattaatatggttgcgctttggtgtggtgggattgggagtgtgttctgcttttgtttgattgtactgatactcctgggtgtatggcgagtaagtgtagtagttcggatgagaagtanaagtgagaggaggaggagaagaaagtggagcctgagtggtagtgaaaaacctgatagtaagaaacagaanaaaaatctactgaggaagaaatagtatgangagcanaagaaccggcantaaaaagggcggngggannatnggcaaaaaggganggcaaacccatgaaanncctttnangggcgaggaagttaaanttactacggaaantaccgtcttaaaatctagtatagaga

SEQ ID NO: 28427 - DNA, 487 bp, Homo sapiens
  misc_feature (1)...(487): n = a,t,c or g
gcaatcgggaatcgtcttgtagcttgtctaatgcggattttcgcgggaanagtaaggctanggatacgtttcctctctcttctccttagttcgcttagcgccccttccaaggaagaagttactagacgctaccgtcctcgtaatcttcgggccagaggaggagatagaataagtataaagaaggggagggtagggcggtcccggccctccgaatagcaacccttctaagctgcttccacctacgtaggaacagcccaaagctttcgaagacacctttgactcttaagttgcgactggaggttacggacatcggagcgctctcggagcgattcgacctatttagtttcttcctcaagaaacgtcgcttcctcttctcttttcgatcanaaacttccgtccttannggnggncccttccttgctttccaagccnanggantttttgccattancnaatngcnacccgccaaacccgccattaacgaaaa

SEQ ID NO: 28428 - DNA, 546 bp, Homo sapiens
  misc_feature (1)...(546): n = a,t,c or g
tctatcanaagggaacccggtttctgaaggttaanaacctggtntgacggtacgtacgttgtcacggaaactcctaagcgcagcgctcgcgtcaatttagcggcaaactttccagacttttcgtcggctctcggtagctcttccgaccccgggcattacgcacaccccttgtcccgatcccaatgtccctcaggacagggcaagtatttccaacctaggtatcgcttaccagtccttcccgtaaaggtcatccacggttggctataacttagtatctagatagagttaaggtaacacttctccgtttacggtcacgacgctatgataagcggacgggtcttagtaataagagataaaacaatcaaaggttcccgtctcttctcgataccgaggttcggggtccatagcccggacataatacgcgaangccccgccgccgccgagccccaaacgcaatncggcancccaacggtaaccaaaacaaaaagnntcnggncggccgcgaaaaaaaaaaaagnataanaaagttcccnccaagggggttaa

SEQ ID NO: 28429 - DNA, 538 bp, Homo sapiens
  misc_feature (1)...(538): n = a,t,c or g
acccggtttctganggttaagaacctggtatgangggtcttcgtgaagggtccggcccagggtcctagtctctcgtgcctctggtcttgggaggttctggcgacctagttatagttctcgttctttgccgtctcgcgattcgagggcaccggataacccgcagtcaagatctttggacatttcgaagctgggaaacggaatctgcaatacctagggacgcggttacagaacctcttttcgaagagcggaaacgctcggatttcgtttagtagaacccgcacagagacgcgacgccggagaatcataggaattcggctctttcgggccccgcgactctcaatttagattcggctattcgctcggagtaaacaaaagagtttcgtaacccgagacatacgngatatagttaaaattttaancgcctantatcctcggntttctaacctngnnacggacccaggnacgntnttccccccccccngggnngncngggggcgnntnngtaaantggccnnntgnngctttntntntgggaaaa

SEQ ID NO: 28430 - DNA, 326 bp, Homo sapiens
  misc_feature (1)...(326): n = a,t,c or g
ggagagctgaaattatgtattacagtcacttcctaaaattatggttcctgcttgtgtcctacttctttcaggccccatacaccagtagtcaggggagattcttccctgctttggagtctgatagagatggagttgcacagccagcatccggagataataaatttagaattaccactttctaaaaggaagattaggggtttgatagctgccgactttatccacagtcttaaatatgtaanccnaaccngcttgggtantacncagggaaaggcagnncatttcggcttnccncnggaccatgtatcaagagggacctagcagatctt

SEQ ID NO: 28431 - DNA, 539 bp, Homo sapiens
  misc_feature (1)...(539): n = a,t,c or g
gtaaaaaatgaaagtataaaagccccagaagaaaacacaggannnnnnnnnnnnnnnnnnnnnnnnnnnnnnnnnnnnnnnnnnnnnnnnnnnnnnnnnnnnnnnnnnnnnnnnnnnnnnnnnnnnnnnnnnnnnnnnnnnnnnnnnnnnnnnnnnnnnnnnnnnnnnnnnnnnnnnnnnnnnnnnnnnnnnnnnnnnnnnnnnnnnnnnnnnnnnnnnnnnnnnnnnnnnnnnnnnnnnnnnnnnnnnnnnnnnnnnnnnnnnnnnnnnnnnnnnnnnnnnnnnnnnnnnnnnnnnnnnnnnnnnnnnnnnnnnnnnnnnnnnnnnnnnnnnnnnnnnnnnnnnnnnnnnnnnnnnnnnnnnnnnnnnnnnnnnnnnnnnnnnnnnnnnnnnnnnnnnnnnnnnnnnnnnnnnnnnnnnnctcaaccattgtggagacaatntgggaanccccccgggcncnaattaaaanccattngcccaaaanccanttcggggtatatcccaagggttnaanccattcccnataganncactgc

SEQ ID NO: 28432 - DNA, 511 bp, Homo sapiens
  misc_feature (1)...(511): n = a,t,c or g
gaggaaagtggcctgcagcacacccgaaagatgctgcatgttggtgacccaagtgtgaaaaagacagccatctcgctgctgaggaatctgtcccggaatctttctctgcagaatgaaattgccaaagaaactctccctgatttggtttccatcattcctgacacagtcccgagtactgaccttctcattgaaactacagcctctgcctgttatacattgaacaacataatccaaaacagttaccagaatgcacgcgaccttctaaacaccgggggcatccagaaaattatggccattagtgcaggcgatgcctatgcctccaacaaagcaagtaaagctgcttccgtccttctgtattctctgtgggcacacacggaactgcatcatgcctacaagaaaggtcagtttaaggnnacagnttttgtnancagcgggnctggcaaaggctacantcccgtaaangcngngggaaattgcnagttttnnccgggggaaaatcccnanggggaac

SEQ ID NO: 28433 - DNA, 529 bp, Homo sapiens
  misc_feature (1)...(529): n = a,t,c or g
gcatgggccaaattactataaatacatacttaaataagatataaatacactgattaccacataatcccagaagaaagattgtccaagatgaaactgcatttattgacccaagaatggttcacaatttatgatggagagagattttcctcaagcaaggaacaagattcaaataccagctgttgaaataattgcacaatattgtgagctaagctatagaatctgaaatgtaagacatannnnnnnnnnnnnnnnnnnnnnnnnnnnnnnnnnnnnnnnnnnnnnnnnnnnnnnnnnnnnnnnnnnnnnnnnnnnnnnnnnnnnnnnnnnnnnnnnnnnnnnnnnnnnnnnnnnnnnnnnnnnnnnnnnnnnnnnnnnnnnnnnnnnnnnnnnnnnnnnnnnnnnnnnnnnnnnnnnnnnnnnnnnnnnnnnnnnnnnnnnnnnnnnnnnnnnnnnnnnnnnngnccnaatnacnagntngngnccnggntccanncnangggcnnanttaanccnntnccaaaaaaaaaag

SEQ ID NO: 28434 - DNA, 531 bp, Homo sapiens
  misc_feature (1)...(531): n = a,t,c or g
agtcattgtgggctggctgtgtgagggggaaggagagggcctttgtaattgtgcgcataccaggggtttgagctaaacttcttactggggggtgtgagctaaacttcccgcagactcaaactttttccagttaagtgccttgttactggttactaggctgtcctcccagtcttcctttccactcccagagggggctgatcgcacaagtacaaagtatgttgctgcattcctaaccccaccagctctgagcccttcaggaataaatcacatggcaagctggagggagctgcagggacagaggccaaagctgtctttccttgtgtaagggaggaactcttgctggccggggaatctcttggaattggtcttttttggggtttcagaggcaaagcttgaacaccatcagtcaaaagtggntccgcgtctccagccggaagtcgtccaaccctgccgtgggnggctcctaactccanaagtccaacctaatcccaaanttctnnaaccggttgcaaattggccnccnaagggaaa

SEQ ID NO: 28435 - DNA, 519 bp, Homo sapiens
  misc_feature (1)...(519): n = a,t,c or g
acgaggtacatacaagtcatccattaaaacaaagaagaagaatatagagtgccagcagcaacttagtattttctaaaaagaacatttattatttatttttagcctgtcattttaattcttcaagagattttactgctggtattttttaatgcactcctctttgtaatttcattcaagccatttgtctaaagtcannnnnnnnnnnnnnnnnnnnnnnnnnnnnnnnnnnnnnnnnnnnnnnnnnnnnnnnnnnnnnnnnnnnnnnnnnnnnnnnnnnnnnnnnnnnnnnnnnnnnnnnnnnnnnnnnnnnnnnnnnnnnnnnnnnnnnnnnnnnnnnnnnnnnnnnnnnnnnnnnnnnnnnnnnnnnnnnnnnnnnnnnnnnnnnnnnnnnnnnnnnnnnnnnnnnnnnnnnnnnnnnnnnnnnnnnnnnnnnaaacctgcnncagcncccaaaggggagngcccnncgccncnggccaantnccctttttgggcccanncnaannngnaananaatct

SEQ ID NO: 28436 - DNA, 522 bp, Homo sapiens
  misc_feature (1)...(522): n = a,t,c or g
gccgttccgcctatgcactgggtgggttaggctcaggcatctgtcccaacagagagactttgatggacctcagcacaaaggcctttgctatgaccaaccaaattctggtggagaagtcagtgacaggttggaaagaaatngaatatgaaagtggttcnagatgctgntgnnaattgngtcacggncggtannatggaaaatgttgatgccatgggtgttcacacaggtgactcagttgttgtggctcctgcccagacactctccantgccgantttcagatgttgngacgtacttcantcaangttgttcgccacttgggcattgngggtgaatgnancattcagtttgcccntcatcctacccaagtgganactgcancttnanatgaaatgccagactgtcccnaanctctgctctggnctcnaaagccnctgggnacccttgggnannanttgcnnnaaannnttcccnaggggnnccnttcnaganntanaaccctntttccggggaanaatnncctt

SEQ ID NO: 28437 - DNA, 521 bp, Homo sapiens
  misc_feature (1)...(521): n = a,t,c or g
ggnnnnnnnnnnnnnnnnnnnnnnnnnnnnnnnnnnnnnnnnnnnnnnnnnnnnnnnnnnnnnnnnnnnnnnnnnnnnnnnnnnnnnnnnnnnnnnnnnnnnnnnnnnnnnnnnnnnnnnnnnnnnnnnnnnnnnnnnnnnnnnnnnnnnnnnnnnnnnnnnnnnnnnnnnnnnnnnnnnnnnnnnnngctngcatngnccaaganttanncaatggccctcaagcctcggnaanaggnnaaaccctcatctcnaaaaannaagtannataatatcttaggggaatttgncaaaacattagaaatattgtggggttaggtgcctgttgaccccnaggntttagtccattatncactcatagcttcatgtcccantcantaaatncntattaaaagnccacaccangaagntnaganccccattcnaccggggttnnaagnggacaccggataggggntttcccnttnggggaccnngggcncctangggattccaggnttccangtngntncnaaccggcg

SEQ ID NO: 28438 - DNA, 515 bp, Homo sapiens
  misc_feature (1)...(515): n = a,t,c or g
ggcaccatgagcttcaataccctgtaatttgggtgaacacacttaattttttaaattatatatgcaatcatagggttaaagaacattaggtccagaaaaaacctctcagagattcaacataacgtgttaaggatgaagcaactgaaatccagaaacaaatatcttaagtcacaaaaggcttattctacatggcaacccatttacttattttggtgacctaatgaagcattaaaataataagttannnnnnnnnnnnnnnnnnnnnnnnnnnnnnnnnnnnnnnnnnnnnnnnnnnnnnnnnnnnnnnnnnnnnnnnnnnnnnnnnnnnnnnnnnnnnnnnnnnnnnnnnnnnnnnnnnnnnnnnnnnnnnnnnnnnnnnnnnnnnnnnnnnnnnnnnnnnnnnnnnnnnnnnnnnnnnnnnnnnnnnnnnnnnnnnnnnnnnnnnngtggaaccaggggganannccccgcaatgggnccaaaatagngcaatnggngcccangcctgggnaaag

SEQ ID NO: 28439 - DNA, 505 bp, Homo sapiens
  misc_feature (1)...(505): n = a,t,c or g
ggggaggtaccaggtatttgagagcaatcgccaccgctttcctggaacttgaggtaaatcccttcacctctggacctggtganaaaagggtttggaagttgtagccatcactggatcccatctttcctgttttgaagctgtgtgcttcgtggagcatcattttctgtctccctggcggcancggggctccgggtgtagcttttgggatgcgaaggaggaagccctaaattttaagggagtaganagacaactggaagacctggattcgtgatagcttagtcgacatgtgaatagcgcaataatgattttcgagatcattggtgttactantgaaaggtttaggacttttaaaataatttgactaaaaggctctttagtggnaaaaacgactcncccagtgttagggttatttttatgagggaaattatcgatcnnnaanattccaaannaanggttngggaacnaatggcccgggggtaggnaaaatngganttatnanccagtt

SEQ ID NO: 28440 - DNA, 602 bp, Homo sapiens
  misc_feature (1)...(602): n = a,t,c or g
gaaatnnnnnnnnnnnnnnnnnnnnnnnnnnnnnnnnnnnnnnnnnnnnnnnnnnnnnnnnnnnnnnnnnnnnnnnnnnnnnnnnnnnnnnnnnnnnnnnnnnnnnnnnnnnnnnnnnnnnnnnnnnnnnnnnnnnnnnnnnnnnnnnnnnnnnnnnnnnnnnnnnnnnnnnnnnnnnnnnnnnnnngtaaaaggtgttactcttcttagaaagggcatttcagaagtgagtttatctgtgggagcgctcttgtgtggcagggagataaattttgggttgcgtggcaattcattgttctttaaatcacacaactcagtcagccacttttagcactcatgctttacagctggtcatggttggtgagaaagcactgaatttccaccctttttgtacatcactttaaactttggagatgtagatcttattgagatgtttactaggcattgctgtcataccactgtttttcaagtctgcttttcacttatttttgtcaggcatgtcctggaaaaaagaaaataagtaaaaacattantgatgatagcttcccaaattgacagtacatcaccgacaatttaatggggaacaatttgtccagacctca

SEQ ID NO: 28441 - DNA, 402 bp, Homo sapiens
  misc_feature (1)...(402): n = a,t,c or g
gcacagaaatggggcagntatttttacctggnatttaattacatggtttggatcccagaggagagatgagatggtgatcccaggagctgcnagggaggggcattccggaaactgtggggaccctgggaggacaggcgagggcntgatccttnaactcattncnttgnaaggatggtcgtttgtcccccaacattaagcngnntcnttanacaggnactccccaggctttanntcaccgcnntttatcactattganaattttcccnctgnttgnatggggcttgangcacacagcaggttgcttgtgtncccaaagngaatnttgaangnccccnagatnngggtntgccaanacttttgctttccntcctcanntgttaaaatganggngcctcntnataa

SEQ ID NO: 28442 - DNA, 406 bp, Homo sapiens
  misc_feature (1)...(406): n = a,t,c or g
ggggctcggcgtggggagtggaggcgtggcctggagagatggggtgggagcctagggggagatgaaagggtggcaggcaggctgcagctgctcacttgtccagaactcacctcctgatccaancaaacntgaggnaggnncaaaaccancancaaatncagccaggncntgccannccagttttcnntngttccccntttantgccccaggggnaggcagnaccgnantggtcncaaaaantacccaggcntntggncgtgaagggtgctctntgcagggacaaaancctggnggttacctttccagggnccaaaaccttggcnttggaaggacagntcaaaaaatntggngaaggggngaaanctggccntccntttagnacctagggngaaacagggaggatct

SEQ ID NO: 28443 - DNA, 386 bp, Homo sapiens
  misc_feature (1)...(386): n = a,t,c or g
ggaaaactagagctttcagtttgataagcaggacacatggtaacttggcatgggtcggcctcatgttagagctcagaaacaattgtcccttcagctttcctttggagagcgtgaaattaggaacatgtgtgtgctgattagcaacatgtcagagatgaatcacgattacggctttggtctggtgcacaggcggtgctttgggagaagtggattccctacttccccgagcaaatctttttattnanctaaaaatctccggntctttttggccaatgnggnaattgntgggggnaacccagcagcattccccaanagcttgggggtncnttgtacgcatccaaanacctaacctccaaatcaaactgtggcatcctttattnttgaag

SEQ ID NO: 28444 - DNA, 394 bp, Homo sapiens
  misc_feature (1)...(394): n = a,t,c or g
gaaacaacctctctccgggttccttgtggccagccatcacgaaaccctcgcacctgttcaccctgcaaagcgtgatatgtctgaactatttaaacggttgggtttactgattaatttctcctcagcctcatgcctggatcctgggtgtccgccatcggagtgctggtgactgttgtggaggcaggacccccagcttagggtacagagtctcctgtgttgtggagagctgagaagaccaggtatgaggagcctcatttgtgctctagctttattattaagttaagnnnnnnnnnnnnnnnnnnnnnnnnnnnnnnnnnnnnnnnnnnnnnnnnnnnnnnnnnnnnnnnnnnnnnnnnnnnnnnnnnnnnnnngactgaccccatggggaaacccc

SEQ ID NO: 28445 - DNA, 385 bp, Homo sapiens
  misc_feature (1)...(385): n = a,t,c or g
gaatgtggaagatttaaatacttgaaccaataccctcctcccaaaaactggaattggcttctgtttctgagttggtccaggcgcaatgttcagcgtatttgaggaaatcacaagaattgtagttaaggagatggatgctggaggggatatgattgccgttagaagccttgttgatgctgatagattccgctgcttccatctggtgggggagaagagaactttctttggatgccggcactacacaacaggcctcaccctgatggacattctggacacagatggggacaagtggttagatgaactggattctgggctccaaggtcaaaaggctgagtttcaaattctggataatgtanactcaacgggagagttgatagtgagaata

SEQ ID NO: 28446 - DNA, 400 bp, Homo sapiens
  misc_feature (1)...(400): n = a,t,c or g
gggttgaggaaaggatagagcccattttgccctacactagttagtttattttgcagacacagcacttgtctgtttccaagtctgcttctatgccccatggatggagttctggtgggaaagcccagagcactttgattccagcctcagtctttggcagccaagttcccttgacatccagggcactgaaaagaaaagtcagtacaagacaaatgggcagacgttgaatggtctaaggtaaagtttgagactaaagcctgcttcgctagtaatgaaaaagtatcttttaggtcatgcttttgcaccatatctgaaggttaaaagattaggnggntatttgttgttttaagctggctttatctttaccatatggnccagaaaatgaatagccggtagtttccat

SEQ ID NO: 28447 - DNA, 385 bp, Homo sapiens
  misc_feature (1)...(385): n = a,t,c or g
gcaggttctttaagggaaaggcctgatgtgctaagacgaaatctataccgtgtgtagccgcttatgagatatgaaactaaggagagccacaggtgaaaggtgtagcagtcactcggcctacacccacagcatcgaccttgtgaacccagcgacctgactgccttgggagaattgaagcgaatgagagtggggagtgtgagaggtgcgtttggtgcagcatttctggcatgggaacagaactggccaggaggaagtgacgtctgggttctgcccgcacacattcctngccaccttcttggtgtctgagaacctccagcttcacctccttttctggacccgaggcctggcngagcttccagcttgggaccagacctcatggatccac

SEQ ID NO: 28448 - DNA, 382 bp, Homo sapiens
ggggactttctatttctgcctctaccttaagccagtcctctgtgttcagcctacatgaacttgagttgaggagggaaaccaggcaggatctagtgaggaccagagccaagggctctgggtcagggaagaggcttgagaggcagtctatgtgtgaaggatagtggagaggccaaaggaaaggaaaggattgagaacataggtgccaaggggcagagcccccatttctacctttcctcaccccagttcctctctgctaagatcctcagcctcattactcacctctgctctagtttcccaagtttcatgcacaaatcctgggacaactcagggaagatgaactgggatgggatactaagaccccttcctcttgctttctgccact

SEQ ID NO: 28449 - DNA, 522 bp, Homo sapiens
  misc_feature (1)...(522): n = a,t,c or g
gaggggttaggttgttcacaaaaggccacattccaagtatttgtaatctagaaagtgttatgtaagtgatgttattagcatcgagattccctccacctgattttcaagctgtcacttgtttccttttctcccctctctgggttgactgcatttctagactctcgccggcccaggcccatcttccaaagcaagaggaaggaatgataatggtgactcaggggaagaagaaacagccctcctctgaaagcctggactgtccggctgtgaactggctggcaggttctgcacgtgggtgggggccagggcctgggctttactcaattgcagagaaaaaactttctccctgcatctcatacctttacctctggccagttggccaccanggggantgggctgaagggagagtanatggtgcanagnaagcccatntctaagtnaaaaancnccccnngnnaanngngnnccnggaaanngggggnttnganacancttngcccagggngannnntttntttnggaaag

SEQ ID NO: 28450 - DNA, 511 bp, Homo sapiens
  misc_feature (1)...(511): n = a,t,c or g
gaaaatacaaaaaattagccaccacgcccggctaattttttgttatgtaaatataattgttttttcctctaggttgaagaatttaggtaatctggccaggtgagccaccacgcccagccggacctagtgtgaatagagggtagataactaagtgaggattacccttgctaggccttagtaactgttgtctaaagaagaagatgttagggaaaagcaagggataaagtgggtatgaaggagtgtaaattatgacttgttgctatgatatttagttattggtttaatttttacatgtaagcttgtcattgatatactgaatattaaaatatnnnnnnnnnnnnnnnnnnnnnnnnnnnnnnnnnnnnnnnnnnnnnnnnnnnnnnnnnnnnnnnnnnnnnnnnnnnnnnnnnnnnnnnnnnatgcaacataacnagncctgtctatcaananaaanttcccnggaaggggngntttncccncggnccaanngncnngnccctgaanngngggg

SEQ ID NO: 28451 - DNA, 200 bp, Homo sapiens
  misc_feature (1)...(200): n = a,t,c or g
gggaggtcttgttatctcgctcttggcaataaatcttgctgcctcagcctcccaaagnnnnnnnnnnnnnnnnnnnnnnnnnnnnnnnnnnnnnnnnnnnnnnnnnnnnnnnnnnnnnnnnnnnnnnnnnnnnnnnnnnnnnnnnnnnnnnnnnnnnnnnnnnnnnnnnnnnnnnnnnnnnnnnnnnnnnnnnnnnnnnn

SEQ ID NO: 28452 - DNA, 508 bp, Homo sapiens
  misc_feature (1)...(508): n = a,t,c or g
gcggcacgagggagttggagctcaagttggagacagcgaggagaaacctgccatagccagggtgtgtctttgatcctcttcaggaggtgaggacaagccagaggtccttggtgtgccctcagaaatctgcctgcagttctcaccaagccgctgtgaaaatggggataaacacccgggagctgtttctcaacttcactattgtcttgattacggttattcttatgtggctccttgtgaggtcctatcagtactgagaggccatgccatggtcctgggattgactgagatgctccggagctgcctgctctatgccctgagaccccactgctgtcattgtcacaggatgccattctccatccgagggcacctgtgacctgcactcacaatatctgctatgctgtagtgctaagattgattaggtgttctccaaagangctggncccaaagggggncnantgtttntccngggnaaggganttttccccaaaccttaagtgnaaatntttaa

SEQ ID NO: 28453 - DNA, 513 bp, Homo sapiens
  misc_feature (1)...(513): n = a,t,c or g
gcaaactgaaaattctcttgtccataggagggtacctgtttggttccaaagggttccaccctatggtggattcttctacatcacgcttggaattcattaactccataatcctgtttctgaggaaccataactttgatggactggatgtaagctggatctacccagatcagaaagaaaacactcatttcactgtgctgattcatgagttagcagaagcctttcagaaggacttcacaaaatccaccaaggaaaggcttctcttgactgcgggcgtatctgcagggaggcaaatgattgataacagctatcaagttgagaaactggcaaaagatctggatttcatcaacctcctgtcctttgacttccatgggtcttgggaaaaaccccttatcactggccacaacagccctctgagcagagggtggcaggacanagggncnagctnccananaanntggggnaaanccngggggncnngggananatgngggannccgcagnaaggnggccggg

SEQ ID NO: 28454 - DNA, 518 bp, Homo sapiens
  misc_feature (1)...(518): n = a,t,c or g
gggcacagaataatcaccaaaagtgagaaaaacgagtttgggtggctggggaggactttgggactcttgatgcaaggcgcaacttgagaaaattctgggtgtgatatttgcacagacaccctcctttcaaaaacagccaccccccaagctattctcagctccacacctgcagccccagctaaggtaccaggtctcctgagcaaggcagagagaagccttgagccttctctgtgtcttctttcaagaaccccgctgtgtcttctttcaagattttttttttgagacagtttcaagannnnnnnnnnnnnnnnnnnnnnnnnnnnnnnnnnnnnnnnnnnnnnnnnnnnnnnnnnnnnnnnnnnnnnnnnnnnnnnnnnnnnnnnnnnnnnnnnnnnnnnnnnnnnnnnnnnnnnnnnnnnnnnnnnnnnnnnnnnnnaggacntgcccccaagtttgggggnanttttngggnttttnaggnanaagggnttncnnancttggcaagggtgggnncaaa

SEQ ID NO: 28455 - DNA, 517 bp, Homo sapiens
  misc_feature (1)...(517): n = a,t,c or g
gccaaaataaacttcctcttttgtcaacaagacatttagacgtaatagtgtatagcaatctgtaaagatctgcctacagtagatttacatataatgatattgatcagatgagcagggtagatcagttaacaggttcagcaaacattgtgacataaagattaagcctgggccaccagaaaactgtggatcaaagaaacaggtgactgaagaataggtgagaggcagaagagtggtatagatggatgttctggtgggtggtgggaacaagcatttgagagagagattggatattggtagttactgacagtatgcctgacagatattgatgggatgtaaggatatagagaacttgacttcttaatagttgttangaaaatcttgtactcagtctgtttttctaaancactcactangtatactttaacattcttaaaaaaaanttnngggccggngtngtggntccccccctaacccccancntttgggnggcncgggnggggaattntnnngggcccgg

SEQ ID NO: 28456 - DNA, 529 bp, Homo sapiens
  misc_feature (1)...(529): n = a,t,c or g
ggagagagctagcaccagattcaataccctgaactatatcacatctaatctgtgagttctaagtagctgattcacattaaagaaaaaggcatcctacaactcaacaacnnnnnnnnnnnnnnnnnnnnnnnnnnnnnnnnnnnnnnnnnnnnnnnnnnnnnnnnnnnnnnnnnnnnnnnnnnnnnnnnnnnnnnnnnnnnnnnnnnnnnnnnnnnnnnnnnnnnnnnnnnnnnnnnnnnnnnnnnnnnnnnnnnnnnnnnnnnnnnnnnnnnnnnnnnnnnnnnacaacaagtgttggctgggcacagtaaaccattattttttgaatgatcaatgtatgcagttacaaaatcacacacaggtcaaagatccattcaaagtgcaagatggaccagtggattttaatgttacagagtacacaaaattcnctganatggggtcanattcaccaatggggcnccnnattttaaaaatcggggnggaacnggggggtgccccggnnanccccaaaatttgggnggnccgggga

SEQ ID NO: 28457 - DNA, 519 bp, Homo sapiens
  misc_feature (1)...(519): n = a,t,c or g
ggcctgctctcctacacaaccactgcccttatcttgcctgagctgcccaccattcagggaggaagggctgggcctgacctcagtgcctctggggactaactgcacggtgactcctgccccatctgataccagctggacgggggctttcccggctgctaagactgcatgtgcctgaggctgccctgggcactgcacacatgcacgtgcacatgtgggggtgagtagaggtcagcacagctgtttgtactatttaaggcagatgtggcagcagccatcccagacacgtctgttcctcagccaagctgcagtcctgatgcagatgtagccaaaagctcctgggtcctaaatatggccacagggtccactgcccgtccccattaaccctatccaaccatgtgttcctccanctcaacantgctggcctgtggggcgggcccaacanaancaatgttcnaaggtttcnnntttnccaggngnttgggntncgncaatncntngggggngatccaaaatttggtt

SEQ ID NO: 28458 - DNA, 512 bp, Homo sapiens
  misc_feature (1)...(512): n = a,t,c or g
ggctgagaggaactcctcactcagctagcttcaggagccatgacatcatctctaccatggaaattccactcactctcctgtgcccccacatttgtcctaggcctcagagtccctataaagagagattcccaactcagtatcagcacaggacacagctaggttctgaagcttctgagttctgcagcctcacctctgagaaaacctctttgccaccaataccatgaagctctgcgtgactgtcctgtctctcctcgtgctagtagctgccttctgctctctagcactctcagcaccaatgggctcagaccctcccaccgcctgctgcttttcttacaccgcgaggaagcttcctcgcaactttgtggtagattactatgagaccagcaagcctctgctcccagccaagctgtgggatttcaaaccaaaaggggnaangcaatctgcgctgancccaangnnnnccggggtccggggttncttttngnccgnggganggancnngnntngnccaa

SEQ ID NO: 28459 - DNA, 521 bp, Homo sapiens
  misc_feature (1)...(521): n = a,t,c or g
gcaggaatttgatctagcactcaaaatgtactgccaagaggagctttttgaagaagctgctattgcagtggaaaagtatgaagaaatgctaaagactaagacccttcccatttccaagctctcctattctgccagtcagttttacttggaagctgcagcaaagtatctgagtgcaaataagatgaaggaaatgatggctgtcctctcaaagctagacatagaagaccagctggtgttcttgaagtctcggaaacgcttagcagaagctgcagacctgctgaacagggaaggtaggagagaagaggctgccctgctgatgaagcaacatggctgcctcctggaggctgccaggctcactgccgacaaggacttccaggcctcatgtctgctgggggccgcccgcctcaatgtggncaagggttccnggatatnanacacncagggaattttngganaaaaccntnngattcggntncaancgggncaattntnggaatgcgggggcnattccngaagggggg

SEQ ID NO: 28460 - DNA, 504 bp, Homo sapiens
  misc_feature (1)...(504): n = a,t,c or g
gtacatgtcctccatctgcaggttgtatgtgcattgggctgtagccatttggtggcaaggaccatggtagaggccagtctgagagtgcacctggtagatccttaaagatgcaacctttgggaaccacctttgattgctataaacaagtaaatcccctagttgatcatcactcaggaatcttggctaagcaaggcctatgaggaaattgatttcttgacagatacatttggaaggtctttaagttattctccttaccaatcacataaattttttaatgttttctataacttactgacttcagtcccatttttttttcatttattcaacaaatatgtattaagggcttgctgtgtgctaggcactctgaaagacaagacagcatttttgccctcttggaactaatgctttgtanatantaagtttctcctgtagcatatccaatttacaccttgggactaaatttccaatttccccnttttaacnaaaaaggttcaanccaaaaac

SEQ ID NO: 28461 - DNA, 522 bp, Homo sapiens
  misc_feature (1)...(522): n = a,t,c or g
gtgcatgttctcgacatgtttgtgctggtttcttggacctcttggccatgtcatttctgtgtacttgcctagcccctcatccatcctgcttgcatcacttccagatacgtgtcatgtcatacttgtgtccctgtgtctgtctgtacgtcttccatgcttgtgctggtttgagtattgacttacatctgagccttgtatgtatgtcctatgtgcatgttcctcctctttccctagtctggccatttcctgcgatttgtaattaggatattctgtgtttgatgtttcctggtgaatcacagcaatatttctgaaccatattgaagacgtatgtgctgtcctgtatggagaggcacctaaacactctctatgccattccgtccagtttatctgtctgggtcctgggttttcggtcanctcncctggggcctaaggtanacctncnggggantntcncccnannnnaagcgnngtncnccannncttntnannanagggcnnggtcaaacntttcccgnncncttg

SEQ ID NO: 28462 - DNA, 595 bp, Homo sapiens
  misc_feature (1)...(595): n = a,t,c or g
gcagcacgaaaacaaacaaggccatacactttgaaaatttgtagccaaagannnnnnnnnnnnnnnnnnnnnnnnnnnnnnnnnnnnnnnnnnnnnnnnnnnnnnnnnnnnnnnnnnnnnnnnnnnnnnnnnnnnnnnnnnnnnnnnnnnnnnnnnnnnnnnnnnnnnnnnnnnnnnnnnnnnnnnnnnnnnnnnnnnnnnnnnnnnnnnnnnnnnnnnttagtagccaataaaataagcaaaagatttcagagtagagcagaaggcagattcgtgtggctctgacctgccaccaagcctgagtcccactggtacacaagcggagccccaggccgcctctgtgcttgggatctggagacagggagtcttgcaatgcctctggcagacatgggaagataactgtgagttgaaactcnccgtaaaaagtggaaggntccatggatncnttggctgtgggcatgggctgagacaangatgggtgcaccagtctcccngtgatgaggnganccagctctggctgggncatttacaggnttcagancagggcagancctcagcatttggcnaccttctcacntcgggtgagctcctcggg

SEQ ID NO: 28463 - DNA, 602 bp, Homo sapiens
  misc_feature (1)...(602): n = a,t,c or g
ggtgtctttgtggtctgtttcatcattatttgcttacccaaatgtcatgtcttttgatggagcacatgtattcaaggcctttttcctccanattctgtgctttttacattctatgctacaagactgatattttgtctgtttgtaattacccagttgtggtcatttgcattaaatgacatgagaatttagagtagaaatgccanttttcaaaaagcgctgggagtcatcatgtcaaagttcattcaactcattgggagttttccctcaagcagcaaccannnnnnnnnnnnnnnnnnnnnnnnnnnnnnnnnnnnnnnnnnnnnnnnnnnnnnnnnnnnnnnnnnnnnnnnnnnnnnnnnnnnnnnnnnnnnnnnnnnnnnnnnnnnnnnnnnnnnnnnnnnnnnnnnnnnnnnnnnnnnnnnnnnnnnnnnnnnnnnnnnnnagtcccaagctacttgggaggctgagacgggaatcactcgaggtccaaaagtctgangctgcagtgngctatgaacgtgcaatgnacnccatcttgggcacagagtaagctttgcctcccctctccaaaaagnaagagaaananggccttatttacgggg

SEQ ID NO: 28464 - DNA, 430 bp, Homo sapiens
  misc_feature (1)...(430): n = a,t,c or g
ggactgcatagggctcggcgtgggacttcccgggctttgtttagcatcagcacgcttgtcacccagtgaaggctaaaggataactcttctctggctttcctagacttttttcctaggttcttttctgctgaacctcagggtggagagagttcaggagatagaaaatcatanccttctgagaagggaatacgtgacaagtacactgtgagagcccttcatgggcttgtctgcacaagcaacgaaagaaaacttcagccccagacacgatcgatctgcaagtcattccaagaaatggtgggagtcctggatgttttaaaagaatgtccaagggactagggattggggatgaaggaaaggagacaccgggtcaaatcctgcccttaccncanagnggncaatggtgttaaccttggggattccaccttcaaga

SEQ ID NO: 28465 - DNA, 424 bp, Homo sapiens
  misc_feature (1)...(424): n = a,t,c or g
gnnnnnnnnnnnnnnnnnnnnnnnnnnnnnnnnnnnnnnnnnnnnnnnnnnnnnnnnnnnnnnnnnnnnnnnnnnnnnnnnnnnnnnnnnnnnnnnnnnnnnnnnnnnnnnnnnnnnnnnnnnnnnnnnnnnnnnnnnnnnnnnnnnnnnnnnnnnnnnnnnnnnnnnnnnnnnnnnnnnnnnnnnnnnnnnnnnnnnnnnnnnnnnnnnnnnnnnnnnnnnnnnnnnnnnnnnnnnnnnnnnnnnnnnnnnnnnnnnnnnnnnnnnnnnnnnnnnnnnnnnnnnnnnnntaggagcattatangggccanggcangtnagctcanatntgtnacccagcactttgggaagggccaaggncgangatttgntttgaagccaaaantttggggctacacttnancatgattngcacactngcaac

SEQ ID NO: 28466 - DNA, 423 bp, Homo sapiens
  misc_feature (1)...(423): n = a,t,c or g
gcatgaatgaaagggctaagtatttggtggagagaatgagaagtctcccactgcccacacattttttcttcagagatttcttttccaagagccccttgaataaaggaagggagggagcactgaatgccccagaaatcagaatgcatggtgcgggaagacgacaggaaatagttctcaaagagatcagaaaataaattggaagcaatttcattaccacaaagaacagacattttttctaaggcacccctcccctttccacccaattgtcattcagcaactactgaatacttaccaatgaaaaacgttaccctgacctcaaggntgctcctgaactctgggtaaaaaatgccttccctgtccataaacatgggaaagcaaggcaggatttaacagtaagggcacaattacaactgcaagccttca

SEQ ID NO: 28467 - DNA, 429 bp, Homo sapiens
  misc_feature (1)...(429): n = a,t,c or g
gggaagaatatcaggtgattttactttttgtccttatgtttttagattatttaaaatttttaaagccttgatcatatgttatttagtcaattcaaaaaagatatttttatggtggagaacatgcgtattgtgaaacaactaaatgcatagtaagttggttataggctcatttgcacctggttctcctgatctcagagggttcctccatcagctgatggatatgggataaggttggctttgaagcttgccctggggctggaggcaaaacataaccacctccaatctgcccctagcnggnacctcctatccctaatanntacagtgnngnagtcccccaaggggacccannttcaactccngcnnaaatngggnaatatttaaccancacntgggnncanaataaacccccggggtnccaaatgacaaagt

SEQ ID NO: 28468 - DNA, 414 bp, Homo sapiens
  misc_feature (1)...(414): n = a,t,c or g
gctttcttcatgtaatggatgaagnnnnnnnnnnnnnnnnnnnnnnnnnnnnnnnnnnnnnnnnnnnnnnnnnnnnnnnnnnnnnnnnnnnnnnnnnnnnnnnnnnnnnnnnnnnnnnnnnnnnnnnnnnnnnnnnnnnnnnnnnnnnnnnnnnnnnnnnnnnnnnnnnnnnnnnnnnnnnnnnnnnnnnnnnnnnnnnnnnnnnnnnnnnnnnnnnnnnnnnnnnnnnnnnnnnnnnnnnnnnnnnnnnnnnnnnnnnnnnnnnnnnnnnnnnnnnnnnnnnnnnnnnnnnnnnnnnnnnnnnnnnnnnnnnnnaacctgggatgtagtatttaaggaaaaacaaaaacccnttacggngaaatacttcaaacataaaattgtccaaatttggctaaaactaccttccgttcc

SEQ ID NO: 28469 - DNA, 419 bp, Homo sapiens
  misc_feature (1)...(419): n = a,t,c or g
gtgctccnnnnnnnnnnnnnnnnnnnnnnnnnnnnnnnnnnnnnnnnnnnnnnnnnnnnnnnnnnnnnnnnnnnnnnnnnnnnnnnnnnnnnnnnnnnnnnnnnnnnnnnnnnngtgttggcaaggatgtggaaaaaatgaaacaactgtattcactgctggtggaaatgtaaaatgatcactgtggaaaatcgtttggtggttcctcaagaaattnnnnnnnnnnnnnnnnnnnnnnnnnnnnnnnnnnnnnnnnnnnnnnnnnnnnnnnnnnnnnnnnnnggtactcaaatatttacacatgaatgttcatatcagcactagtccccattannggtngaacacctggtnccaangggtcacccngtntcccaacactttgggagggcnaagtgggaggatgcnnnaccncagggatt

SEQ ID NO: 28470 - DNA, 432 bp, Homo sapiens
  misc_feature (1)...(432): n = a,t,c or g
gtgttatttggcaaccctggcactggggcctcagacactgcaggtggaatccaggccccgcctgggaggaaatgggcccagggctgtttcacccaggcggcagcttcctgtcctcttgtatcactatgagagaggcagaattgcagatggtaatgagtgagggctttgtcctcagccccatctgagtttgaatcctgaccctgccacttagactgtggggctggttaagtgacatgttgtctctgtggcttagtttcatcatcagtaaacatggggacaatgataccctctcctggggctgttgcaagggtttaaatatatgtcaagccttggcaatggggtaaacaaattgctcactgaccggaatgcctaacanccnngggtgtcancanggncanaanaacgtgtnccaatgccctggnacccctggga

SEQ ID NO: 28471 - DNA, 423 bp, Homo sapiens
  misc_feature (1)...(423): n = a,t,c or g
gaatgaactactgttttacatgcagcaacatagaagaatcttataatgttgactaaaagaagccaggcatgnnnnnnnnnnnnnnnnnnnnnnnnnnnnnnnnnnnnnnnnnnnnnnnnnnnnnnnnnnnnnnnnnnnnnnnnnnnnnnnnnnnnnnnnnnnnnnnnnnnnnnnnnnnnnnnnnnnnnnnnnnnnnnnnnnnnnnnnnnnnnnnnnnnnnnnnnnnnnnnnnnnnnnnnnnnnnnnnnnnnnnnnnnnnnnnnnnnnnnnnnnnnnnnnnnnnnnnnnnnnnnnnnnnnnnnnnnnnnnnnnnnnnnnnnnnnnnnnnnnnnnnnnnnnnnnngactccatctccaaaaaaggaaaaacaaggatgctgggcacaatgggtaaggnnnnnnnnnnnnnnnnnnnnnnnnnnnn

SEQ ID NO: 28472 - DNA, 417 bp, Homo sapiens
  misc_feature (1)...(417): n = a,t,c or g
ggacttgcctaaagtcaccagctagttagagggcaggccagcatcagatatcatacctgtctgactctccaggggctgctcccaaccaccgccctacgccgaggggctgagtggccagctgcacccagtattatccctctgcctaaagcaagagtgaccaaaatttcaaattctggaatttaaggactcctcaatgagtttgcataatcccctgtccaggccactcttaccagaagcaccaacgcttttttgagtgatcctactctaccctccccacccttcagaaatactgtttaagaaggaagtctaagaaacagcttttgagatagggacacggggggaaaatatttggtccccgggtacacctcaatgttgggttgagattcctcctcacaanggcnanttcgttcctnctga

SEQ ID NO: 28473 - DNA, 429 bp, Homo sapiens
  misc_feature (1)...(429): n = a,t,c or g
gtacaattctaagcgtatcaccctgagctatagaatgtcttatttgacctgcatttctctaaattaatagaaattttaaagtttcaagagtaaaatagaaattaattttaaaatgatcactgannnnnnnnnnnnnnnnnnnnnnnnnnnnnnnnnnnnnnnnnnnnnnnnnnnnnnnnnnnnnnnnnnnnnnnnnnnnnnnnnnnnnnnnnnnnnnnnnnnnnnnnnnnnnnnnnnnnnnnnnnnnnnnnttaaaattaaccaggtgtantggctactgaagaggctgaagtaganggatcacttgatcctggggaaggcaagggntacattgaagctgtgattggtaccactgttctccancctngggnacananccagattgcctcaaaaaggaaaaaggacatttncaaaaccctttccaattag

SEQ ID NO: 28474 - DNA, 425 bp, Homo sapiens
  misc_feature (1)...(425): n = a,t,c or g
gcggcacgagaactggcatagggcttgacggtcatgttagaaagtgcttcatgggactcatgagcccatgtcattacctgtctgttcctcttagtacatcccatgagggcaagaaccatggcgttctcattcatggctacatccttggtgccaagcatggtggcagacacatgctagggacttaacacatgggtatccaataaatccccagaaagctagatgggatcaatagaggaagaangatggagaaaagganttctacggcttgacatctcaagttaggaatgangatgatgtggccctgganatgaagaaagccaactttncagntcactgttnggntaccaagganaaatnctggttaatttataatgngaaanggttanaaaaaanangnatggcccccggggtnccnttggtccaca

SEQ ID NO: 28475 - DNA, 421 bp, Homo sapiens
  misc_feature (1)...(421): n = a,t,c or g
gccaccagctggtggagaccctgcccactgttggtttcaacgtggagcctctgaaagctcctgggcacgtgtcactgactctctgggacgttggggggcaggccccgctcagagccagctggaaggactatctggaaggcacagatatcctcgtgtacgtgctggacagcacagatgaagcccgcttacccgagtcggcggctgagctcacagaagtcctgaacgaccccaacatggctggcgtccccttcttggtgctggccaacaagcangaggcacctgatgcacttccgctgcttaagatcagaaacangctgagtctanagagatccaaggacactgctgggaactccggggctgcattgcctcactgggggaagggctgcccaaggcccngcaaacctgttgggcctcctgaaat

SEQ ID NO: 28476 - DNA, 423 bp, Homo sapiens
  misc_feature (1)...(423): n = a,t,c or g
gccccacactaggtatggatcacccacaaatgtagctttcagcatgatgcgacctggaaatgttggcaatttggtaatgggaaaaggaaagggcagaatgttcacataattcctgaggaggagaatacaagtctttgcctgtaataccaaaatacagggagctatatctaactatgcggataagtcaacatttcactacagttctttttcagtgggagccccaaagagacaacataggtaattgaaaagaaacttaattctaggggtagttaaacgagattgtggttactgttgtgctccccacattcttccagttaacataaatcaaaggtgttcaatgcattcnaaagtgtaaaaccgggtacattccaatctttgtgcangacattaacagggctgaagtganccactttataaaacata

SEQ ID NO: 28477 - DNA, 520 bp, Homo sapiens
  misc_feature (1)...(520): n = a,t,c or g
gaaaggattaggaataacccagttcttgtttgttnacaggnggatggaaagccgatttccagtctttatgataacgccgatgttccacttgggaaagatactgtacaacaatgaaagtagccctttcttttgtctttcaaagaatgtatttttaacaaacagcctctgtgtgatccttttgaccacacaatttgtagagttaacgctgaaattttcattagcaacaatgaaagcacacacaggcccatattnanaannaataataatnaccnnatttnggccaaaagggctnnttnaaangttnaanagacanaagtcccaaatngtannantttnttccactaccaggaggaagctcagaattagtttttctacancantaaggaattctacntaaaaattaanagggattacccntggtccctnncacaccnnggtngannttcaangaattgggcntngannaanccaaccccnaaaaaganataaaatttataggancccatttnttaaaaccttt

SEQ ID NO: 28478 - DNA, 526 bp, Homo sapiens
  misc_feature (1)...(526): n = a,t,c or g
gaagaaatagagggccattgttttanagcagtaggcctcagagtgcagccnnnnnnnnnnnnnnnnnnnnnnnnnnnnnnnnnnnnnnnnnnnnnnnnnnnnnnnnnnnnnnnnnnnnnnnnnnnnnnnnnnnnnnnnnnnnnnnnnnnnnnnnnnnnnnnnnnnnnnnnnnnnnnnnnnnnnnnnnnnnnnnnnnnnnnnnnnnnnnnnnnnnnnnnnnnnnnnnnnnnnnnnnnnnnnnnnnnnnnnnnnnnnnnnnnnnnnnnnnnnnnnnnnnnnnnnnnnnnnnnnnnnnnnnnnnnnnnnnnnnnnnnnnnnnnnnnnnnnnnnnnnnnnnnnnnnnnngngaaatgataaggcagtgatcccatggatttttactgncaaacataattagaactacagtttntcaaggcacctcccaangaactnttttttgngggtccngttttccaaanagnggactaangntnggccnaantaacaaggtcctangggccnncacttttgggngggnaaaaaacca

SEQ ID NO: 28479 - DNA, 526 bp, Homo sapiens
  misc_feature (1)...(526): n = a,t,c or g
gagtttgactatttttccccaagaaattgactgaacccaggggttattttggagtcaaatgatctcagtcttttatgacttacctgtgtcagcgggtgtatctgtgtcttctctaaacaagttcccctagctgtacaatgggatgagatgataagaggctggaaggggcgaataacatatgtggtgtgcttagcacaagcaataatttgcttgatccagggaaagccttcgcaccgctggactgttgtgagctaccactgggagggactcccagtctggagaaggagggtccgttccctggggctggggaagccaggcccaggaaccctcctggctgtgtgtgccccagaacgctgtggggagcccctctgctgggctcctgtgacttctccagggtggcaatgcaagcagagtatgtcttantctcaagcccctggctactggagatccgccccccaaccagatgatcacctggcaagngcctcctggnttccttttgaaaaggnaaccangggttacttaaggg

SEQ ID NO: 28480 - DNA, 529 bp, Homo sapiens
  misc_feature (1)...(529): n = a,t,c or g
gcagataaacaataggatggctaatgggaaaggggggagctataatgcttcactcattcacagacctcatttcttaagtccctctcaccagtgcagtacacaagttctcacttgctgcaggtaaatatttgtgaaatgaatgcatgtatgaatgagtgactccataaatgactggtctctggctggaaggcatccccaggactttagatgggagtgtgagagatagacagtgtattctgcactccaagctgcttgtgtggtcttccctctgcccagcatccttgggtcttgctgggaacatcttaactcatgaggccttccaggactactcagactcagttatcttcctggctgtatattctacatgtgctatatgtactttctgntctgtaacatgcatcaaacctcaaatacacgtacagcgcttaccggtcacactagactggcactntgcagcagggattgggtgnatattggcagcacccaaacttttncaacatgtgcnctttattactcttaaaggnggggg

SEQ ID NO: 28481 - DNA, 525 bp, Homo sapiens
  misc_feature (1)...(525): n = a,t,c or g
gaggaatttggcaataaaaaagataaatgggttagaaggtattttctaaagaattcaaaaaatgttttaagtgatagaaacattgtcaaaataagtgtatcaccttctaaaatgacattttgaaaaagtaaaattgataatgttaataaattatagtatgtcagaccctgtcaaactgtcctccatgagaacacattaggcacagctatagagataattcacatattggaaaatagaagcaaagaaactaactatatggtacgcttataccatataagcatatcatatggtgtaagggggactatttgaagacataatagctgagaactttccagaattgaagaaaggcaccaagccatgatttaagaagcccaacaaacccaagcaagaattctttctagacatattgtagtgaaactgtgggacaataaatataaaatcttaaaagacagaggaaaaaggggccgggtaccgtggctcacgcctgtaatcccacactttcggagctnaagtgggtggaccctt

SEQ ID NO: 28482 - DNA, 533 bp, Homo sapiens
  misc_feature (1)...(533): n = a,t,c or g
gcattgttcagttccgacctgaagttatgtagaacaaacattgttctgagttcaactagatgatctttctttcatagctgtgtggacattatgttacctgcagggagtaagtcactgaaggtagagcctcaaaaaaacaccctttgatcttactcctaagaaaaaagagagaaattggaaaaattcatcatagaaacacaaaaatatgcggaaataggaaaaaggagaagaaggaaagaaatgcaacataggaaataatattatgtagactgagataaagaatgttaagaatatttgaacaaagtttgaaccagatgaaatgtaacaggcagaaacagaagtaggaggatttttggactgatttaagttggtctcttgngacttttatgactttccactgggaagaatagtgattaagaatggtcactctgcttttaaaaattgagaaagaacgctgcgtgcantggcttatgcctataatcccacactttntganggccanancgganggatncnttanggttaaaatccaa

SEQ ID NO: 28483 - DNA, 559 bp, Homo sapiens
  misc_feature (1)...(559): n = a,t,c or g
gagagcctggggtgggtgtgagcagggtgacccctcatctgaaaggcccaaaccagggggaagcaccagcctcagtgcagccccctcctgaccccacctagaatggaagccttcacctgcagccccaggcctccctcccccggggtctccacctcaggggagacttaggccagaggtgaacattcatgtgtaggaagaggccgntgcagggtggcatnttagggtaggggangtntgctgaggtgggccttcatgggcatggccgttgcctntntgccagccnttggngccaccanttgggtttttnannncattgccttnagggcntggccantttcntgggnaacatcccctttttncntnaaagaaaggggaaaaagttttacnnaccttggggngaaaacatcgngaaagtnggggggcnctanggtttttaanggcaaggccntttttacccantccccatannantgaaaatgcccngngatgggnngctntgcttggcctttnanccnaantatnnnntngctnnctgggntntctttnaaaanntnnttta

SEQ ID NO: 28484 - DNA, 342 bp, Homo sapiens
  misc_feature (1)...(342): n = a,t,c or g
ggaaatcccaatttatgggcctcatggttattgccaagtgtcatcaaacccatataagtacagaaccttactttagatattatatttgcactattgaaattcaggcaacctgctgtgtttgagatattacaaattcaccttgcattgctgtgcttaattattctcatttgtttttaagtagacaagatggtgtagaatattttaaccctacaagagaatcttcatgatcaaaaaggttaccaactttcatactggatcacacttctcttgantagggattantagtgnggatttggatttaattttttttaacnatttttagtttaaatttttttttttttt

SEQ ID NO: 28485 - DNA, 547 bp, Homo sapiens
  misc_feature (1)...(547): n = a,t,c or g
gaactggggtcataatcggttccaggctcaagggaaacaggcagagaaaactctcatgttttctttaaagcattccggctacatccaccacgataggaaaaatgacaagaattcaaggcagacacccaggtcaagaataaacactgtgagttttgccgtgagcattgtttgtgcttctttcacagggtctcctggggctggagaactgccgcactccccggaatcactcagaggcgcccagcagcacaaagcgccttctgactcgctgngggtttctgaactaaaatgcgcactaacttatcaanggttaccaaatatcggttnattttaaccctnggaaaacctggnncttttggncccggcnttaacnanttgccntttttcccaagggtangtncntnnaaccgggatncttnancnaactnaaaaaaacatgggcttccanaccttnaaacnnggccattttcaaaacaaattttcacctggganggaggaaaagntttaggcnctcttcaagcctttaatntcccggaganatgcacaggtt

SEQ ID NO: 28486 - DNA, 532 bp, Homo sapiens
  misc_feature (1)...(532): n = a,t,c or g
gatgtattatatagtgtgaatgtaggtgtgtgcattaaacctatttgtatttttgcagttaacatatatatcattgataatctatatcatcactttgaaagaacggcaatgacaaccaaagaaagcattatatatatttcagaaggtttttatttggttttagtaaaaaaaaaatactcatccattggggaaatgttatttagacagacaggctgatgtcttaaggctgaatggcatggtaagaatacggttcaaacagggatcacataaattaaggctttngtataatcctgctcttaattacccggaccccaagttgctggccatangaanccttgccannggaatgtggnttgnatccctnanggannccctaagggnccccnttatgnacccntttttgganagggnacctttcaaaaaattccnnatgaaccgngacctngngcnctatnttntangcccccgtgggctttcctgggtctaccngggaancattttcnctgnggagaaaaaatnagattnncttttt

SEQ ID NO: 28487 - DNA, 551 bp, Homo sapiens
  misc_feature (1)...(551): n = a,t,c or g
gaaataattcacttcaagaattttataataaaaccaaaagcatcaacatcagatagatcaagttcaggaaataacctcagagcttgaagtctggttcttcaaagcaactcagtgagacaaaaataaaacataattttagannnnnnnnnnnnnnnnnnnnnnnnnnnnnnnnnnnnnnnnnnnnnnnnnnngtgactcattagcatatacctgaaagaaactctacaatctttagcgcatggcttccaaggcactctgctnatttccttcccagctgagagaaccagggaactgaatttggagcacccatgntgcccctggaancccccagcctaagtngnctnccctttttcantttcntttgggggcnaaaataagcntnttggnacccctaanttttaaggggcntnagaaangcntctatatgtggcncacnaagagccctagcatacatgttggggaacaactatnactctgatagaancnctattatcaaaatgtaaggggagggntaccaatgcntaanggngacaatgggagatnaatttaaa

SEQ ID NO: 28488 - DNA, 545 bp, Homo sapiens
  misc_feature (1)...(545): n = a,t,c or g
gtggctgtcttggggccgaacagcccctgccctgcctctgagggcccaccagcctgtgctgcatacccaccgcccagcttctccctgagggcccaccagcctgtgctgcatacccaccgcccagcttctccctgagggcccaccagcctgtgctgtacaccccgttagtccctgatcccaaccttntccctcntgccagcacaccgatgcacacaccggaattggcnagcccaagccctggggacaggtgtagganaaaagcancccaagncntaaaagncgtttccaatcttggtnaaaggggggaantgcttnaagggnntttaaaggnnncacccggttttgnttgtttcaaagngggccccttncnagggntcttaaccctngncacnctttgcctnggtntncctttncccananacacnnanattgncnttgnccaaccnaanggnggncccccantngtanancgganncccccagannnttttttgaaactggcanacnaaannggagnttgacctttatgaaaggccntttnttgt

SEQ ID NO: 28489 - DNA, 542 bp, Homo sapiens
  misc_feature (1)...(542): n = a,t,c or g
nnnnnnnnnnnnnnnnnnnnnnnnnnnnnnnnnnnnnnnnnnnnnnnnnnnnnnnnnnnnnnnnnnnnnnnnnnnnnnnnnnnnnnnnnnnnnnnnnnnnnnnnnnnnnnnnnnnnnnnnnnnnnnnnnnnnnnnnnnnnnnnnnnnnnnnnnnnnnnnnnnnnnnnnnnnnnnnnnnnnnnnnnnnnnnnnnnnnnnnnnnnnnnnnnnnnnnnnnnnnnnnnnnnnnnnnnnnnnnnnnnnttacngatgcntacaccccagttggntaatatttaaatttnaatttttntnaaaacagggctttggtaatntcccnagcctnngntgganctcnngnntttaaggaacttctanattaggnttcaaaangnctggaatatatggancgcccnntgaatttggnntnaanaanccntttaanatttcttatatggncaggtttntanagnggaantctccctntanaangggtnaatcccaacactngaanaccnatactggngaggatgtggagcncaggaactcttttggtgggggga

SEQ ID NO: 28490 - DNA, 539 bp, Homo sapiens
  misc_feature (1)...(539): n = a,t,c or g
gaaatatagccctggtcacagattgaaagattgagagcagggagaatttttccaggtacagtcattcttaacccattcaaaaagcaaagttcatcagcgaaattaaccagtaatgtattaatagtactaaaagttatttgttaattagaaaatgccaattggtacaggaattggaaatcgttttaacacctaaaaactccttttgatgtaaacaagaaggaccgttagctttataaggaccctggcatggantttgtggattcccagttntggaanagngcttgcnctgnaatggctgantnattngatcctngggtaaaaccnttttnaaaaatggtnangnnggnttanttggaccctttaaaatnncnggcatgccnagnccnntttcncangcnggngaaaccnagatnacntntgcctaaggcctttaggaggntatacntctgatggggaacccgncaccnttngaaaattnaaagntttgagaaactgctactttntnacancccgngaatnaggnggnnttccnggnaaaa

SEQ ID NO: 28491 - DNA, 534 bp, Homo sapiens
  misc_feature (1)...(534): n = a,t,c or g
gaccctacaccatacccacaaaaatttcataaaggaaaataaaccagtgtttttcccactggcctcactctagttgttgcttatttgtattctgtacacttaagggttatctggaaagcagtgtcttttctcctgtaaagtaaggtgacaggcaccacagcctgcagcctacagccttcantccacagctccaagcagattcacctttcgcatacctagagcccagttccnttccaacaggcatggcagtaggaccttttttgncagngaaaatngccctttggnnnaagggcntnaaaggggggtntaagaaatcccgggccnttgggttgggnccnacggntacccnanggtnnntggaattcccncatgggcttgagccnaatgctttgaanggcctctctnaagggagancccctttttgggantnggtgtaaaaaaaaacttcacattnttgngaagcctaccntttgnaaggggtaccncgccccgtangnggggacaagancccttttttnacaaaggggaangggc

SEQ ID NO: 28492 - DNA, 442 bp, Homo sapiens
  misc_feature (1)...(442): n = a,t,c or g
gnnnnnnnnnnnnnnnnnnnnnnnnnnnnnnnnnnnnnnnnnnnnnnnnnnnnnnnnnnnnnnnnnnnnnnnnnnnnnnnnnnnnnnnnnnnnnnnnnnnnnnnnnnnnnnnnnnnnnnnnnnnnnnnnnnnnnnnnnnnnnnnnnnnnnnnnnnnnnnnnnnnnnnnnnnnnnnnnnnnnnnnnnnnnnnnnnnnnnnnnnnnnnnnnnnnnnnnnnnnnnnnnnnnnnnnnnnnnnnnnnnnnnnnnnnnnnnnnnnnnnnnnnnnnnnnnnnnnnnnnnnnnnnnnnnnnnnnnnnnnnnnnnnnnnnnnnnnnnnnnnnnnnnnnnnnnnnnnnnnnnnnnnnnnnnnnnnnnnnnnnnnnnnnnnnnnnnnnnnnnnntagcaatatnaacattaacccttcctttancttatcaantttacaanttntaanttaac

SEQ ID NO: 28493 - DNA, 415 bp, Homo sapiens
  misc_feature (1)...(415): n = a,t,c or g
gnnnnnnnnnnnnnnnnnnnnnnnnnnnnnnnnnnnnnnnnnnnnnnnnnnnnnnnnnnnnnnnnnnnnnnnnnnnnnnnnnnnnnnnnnnnnnnnnnnnnnnnnnnnnnnnnnnnnnnnnnnnnnnnnnnnnnnnnnnnnnnnnnnnnnnnnnnnnnnnnnnnnnnnnnnnnnnnnnnnnnnnnnnnnnnnnnnnnnnnnnnnnnnnnnnnnnnnnnnnnnnnnnnnnnnnnnnnnnnnnnnnnnnnnnnnnnnnnnnnnnnnnnnnnnnnnnnnnnnnnnnnnnnnnnnnnnnnnnnnnnnnnncaataaccctgggncgtacgnntanccgnttacatttactggagggcncctaattatggcccctattngaanncgccnccntaacatttnaacctttaacctttccttt

SEQ ID NO: 28494 - DNA, 388 bp, Homo sapiens
  misc_feature (1)...(388): n = a,t,c or g
gaagtatgacatgaaccttctctttttctttcttgagttaaaacagaaactacatctttgtgtgcaacggttctttgaacaattaggacagcagtgatcctatcagatagctttaaaaccctcctgattcatactgctgaactgagtggtacaacttgttgatctttctggtaacattgttatctctaaggattgataaagaattgatnnnnnnnnnnnnnnnnnnnnnnnnnnnnnnnnnnnnnnnnnnnnnnnnnnnnnnnnnnnnnnnnnnnnnnnnnnnnnnnnnnnnnnnnnnnnnnnnnnnnnnnnnnnnnnnnnnnnnnnnnnnnnnnnnnnnnnnnnnngcttgggggcangganctggaatcccagttcttggnaactt

SEQ ID NO: 28495 - DNA, 395 bp, Homo sapiens
  misc_feature (1)...(395): n = a,t,c or g
ggagagagagagaaataggcttggatttggtctgtaaggaccagaagcaagagtgtcctaaacctgaaagggcaggggtcttaatgccagggatgaaagaaccttggcctccagtgatctagctgagcagccaagcccatcctgacactgacagtggggcttaatgctctaagtattcagacaccaaagttagtgctgggatctgaggaaagtaaatttttttttttttaattactgggtttttagggtcaggcagtatcagggattgaagtcatttggggaaaattgagggggattttgnatgtgggggaaacttcctctttgggggggtacatanttttttcccantncctacttaggcnttgcactttttgnaccctnncnggggnnttttg

SEQ ID NO: 28496 - DNA, 452 bp, Homo sapiens
  misc_feature (1)...(452): n = a,t,c or g
gcggcacgaggccaagactgcatcctgagaaggaagttttgtcagttgctcttgctggggtgaagctgaccagaccgcaggttcttcctggagccagcgacaatgccgacagctgacacagagggagcacatgacttgcgcttggcattttcacctgcattatcttgtttattcctcacatcaaccctataaggtatgtgccattactgtccttgtcttccagccaaggaaactgaggcacagccctatcaaatgactctcaccaggtcacgcagctgataggtgccagagctggctgcagacccagggaggctgcctgcagaccccaagctacaaacctgttctaatggctgagagctgaacacaccttcggagcctnccaagggaaaggaagggatgaactgggaanatggacagtgctncccaagaagggaccggggnaaggnnncaaa

SEQ ID NO: 28497 - DNA, 418 bp, Homo sapiens
  misc_feature (1)...(418): n = a,t,c or g
gcnnnnnnnnnnnnnnnnnnnnnnnnnnnnnnnnnnnnnnnnnnnnnnnnnnnnnnnnnnnnnnnnnnnnnnnnnnnnnnnnnnnnnnnnnnnnnnnnnnnnnnnnnnnnnnnnnnnnnnnnnnnnnnnnnnnnnnnnnnnnntgggtgactctggttggtggttgnnnnnnnnnnnnnnnnnnnnnnnnnnnnnnnnnnnnnnnnnnnnnnnnnnnnnnnnnnnnnnnnnnnnnnnnnnnnnnnnnnnnnnnnnnnnnnnnnnnnnnnnnnnnnnnnnnnnnnnnnnnnnnnnnnnnnnnnnnnnnnnnnnnnnnnnnnnnnnnnnnnnnnnnnnnnnnnnnnnnnnnnnnnnnnnnnnnaccttcggtgacccanatcggccacttgccttcacttggaaacnnanccnaattttt

SEQ ID NO: 28498 - DNA, 436 bp, Homo sapiens
  misc_feature (1)...(436): n = a,t,c or g
gtaacacagtaaatagataacaacaagtagaaataacttnnnnnnnnnnnnnnnnnnnnnnnnnnnnnnnnnnnnnnnnnnnnnnnnnnnnnnnnnnnnnnnnnnnnnnnnnnnnnnnnnnnnnnnnnnnnnnnnnnnnnnnnnnnnannnnnnnnnnnnnnnnnnnnnnnnnnnnnnnnnnnnnnnnnnnnnnnnnnnnnnnnnnnnnnnnnnnnnnnnnnnnnnnnnnnnnnnnnnnnnnnnnnnnnnnnnnnnnnnnnnnnnnnnnnnnnnnnnnnnnnnnnnnnnnnctgtgacttcttacttcccccatcatcactactgtggnctcagcaatcatcacctttcaaatggattattgcagtgacctacccattctcgccttgctccttgcagtcttctttcaactcagcatccagggagatactgntaaaa

SEQ ID NO: 28499 - DNA, 393 bp, Homo sapiens
  misc_feature (1)...(393): n = a,t,c or g
ggagaggagaaaaacactagaaacatatcagcagctgttttaccttttacagaccaaccctttatacttggctaagctgattttccagatgccacagaacaagtccactaaatttatggatactgttattttcacactatataattatgcctctaatcagcgagaagaatatctacttctcaagctttttaaaactgctctggaggaagaaataaaatcaaaagtggaccaggtacaggacatagttactggtaaccctacaggnatanaggtgcccngnngncagantncctgggccanctntnggttcttggggtantannnattttcgtcatnttctcgttnnttcntcnntnncatnncctgtgtnnnannntnnttttntngntattc

SEQ ID NO: 28500 - DNA, 428 bp, Homo sapiens
  misc_feature (1)...(428): n = a,t,c or g
gcaaggatgagcatttttgcttctggttcaaggagtgatctggatcagatctttcagatccatgagagcaaagcaaaggagacttggaagagctgtcctgctgagaccatctggtctgtgtgtcagtgcccagcttctccatgactctccggggagccagctgctgtcctaactgcgtctaccctcaatccagataaagcctctaaactaagtcctttgtgtcacctcctgccccaactccaatcaccccacctcatggcccagtatgtactaatcctcaggtcatctctgttcaggggtcttgctttctgtgtctggccacttagcccttgcgctattccctccaccccccaggagccagttgcagntttaactttgccctggttctacccctacccaaataaagcctgtgaactactanncagagg

SEQ ID NO: 28501 - DNA, 454 bp, Homo sapiens
  misc_feature (1)...(454): n = a,t,c or g
gagtctggtaacagacatgcccacggtatccacaaaggtgaaacaggacccccacaggcatctcaaacaggaaggggtttaacacagggagtttggtgcttatggggttgctgggaaggctgcagagtgaccatggctcccacccacgtccaaccctgcaaccctgtgagagcagctgctttgtgcggggcaggggcagctctcctgcgagcccctccacctcccctcctgccccgtggggcctcanacacctgcccatcgcccgggcagaatggctcccggccaccctcgtttctgagccctggctcacccngcggtttggcctggcgattccttgctcttgtnaccctggtttgctgggngttcctgatcaccatctctttcccttacccatggnagancttgnnctcagtccttncgtaaaggccagctgggnangggggagtccttgccc

SEQ ID NO: 28502 - DNA, 435 bp, Homo sapiens
  misc_feature (1)...(435): n = a,t,c or g
ggctgaaggtgggaagggcaagaggagatgcacgggaggagatgcaagaggagatgcatgggaagggcaagggagatgcatggccggtggtgtgggcagagccaagctcaggggagagacggaagggtgcaggctggcggagaggcagcctgctccgaagggtgatccctcgaccaatgggcagcactgcccaggcatggttctggagctggggggcctgaggtggggcctgtgtgcacggctgaacgtgcagcgccatcactggcgggctgggtcagcagtgtcccaaggcgtgaagccgtcttgctggcccctcagcctgctgagcagcggtgtctggcggcttgccctgaccgtggccatgcggatactctgggagtgtgggcctanaatgcctttcccacccaaantcttggcttccttctttnanttttc

SEQ ID NO: 28503 - DNA, 484 bp, Homo sapiens
  misc_feature (1)...(484): n = a,t,c or g
gatttttgtgcctttgtggtgaaatgccttctctattccaatatcatggaggtactgtagttgattacattctaaaagctatactattttgccacttacatttctgtcattaattcacctttatatttttatatgctgtgagttaagcatcaaaattaacccccccccacagagacatagttgtcccagcattatctattgaaaagtttnnnnnnnnnnnnnnnnnnnnnnnnnnnnnnnnnnnnnnnnnnnnnnnnnnnnnnnnnnnnnnnnnnnnnnnnnnnnnnnnnnnnnnnnnnnnnnnnnnnnnnnnnnnnnnnnnnnnnnnnnnnnnnnnnnnnnnnnnnnnnnnnnnnnnnnnnnnnnnnncagctcctcgggagtcccaggagtggtggnnnnnnnnnnnnnnnnnnnnnnnnnnnnnnnnnnnnnnnnnnnnnttgggagnggnagcttnnngtggccnnnaancncncccctg

SEQ ID NO: 28504 - DNA, 463 bp, Homo sapiens
  misc_feature (1)...(463): n = a,t,c or g
ggggggggatgtcagatgctctgcagtggtcaggaccatccacatcacaagtgactgtccctcatcactttcaaatgtcctgctcaatgtttatgtccatgaaaacttgtttatacataggtggatctagcatccaaccccattttatatataaacacacaggatttattttttgcagttttaaaatacactgaatttttcaggaatgcagcatagagtgaagatggtacatatttgttcaggactttatgaagattgttcaccattttggaaaatcatgttacaaatggcaatggtaatcacagtgtttgagccatactaaaaacacatgtgactctgtgtgcatttaaatctattgcattcatggcgactctacacataggtgcagacatntaactacttagtaggatttccagngtangtcatgtacaagatctgttagntactganatacttattttgt

SEQ ID NO: 28505 - DNA, 428 bp, Homo sapiens
gccccgagaaccaagtgtacacggagatggcagttctccagagcaagggaacagatgctgggccagccagagcaacagctattccccagtgccttgatggttgagcctgggggtgtgtaagcccagagaacccagccagggtgtcaggaaaatcttttctgggtcatgaaggatgaatacacatttcccaagcatacaggggcaatatgggcatttgaaagataatgtacagcttcagcaaagggctggaggcaggaaggtgcatggaggggcctgggagcagagaatcagggagtgggcatagctgagttcagggaaaagaggctggaaagaggtgggcagaggccagatttgggaagccaaggatgccactctaaggagcttggacactgcccgtagccactggaagactccgagcagggaatggt

SEQ ID NO: 28506 - DNA, 424 bp, Homo sapiens
  misc_feature (1)...(424): n = a,t,c or g
gagcattctgacttcccactgaccacggaaggcatgtcagcttcatgcctcgggctagagttctgataatcggggctgaggggtgaaaagaaatccagtcagacagacagtggggagacaggtccctgccctttatttgcgggatcaatcagggactcccagaaaggaagganaatggtganaagggccctaanagttcgtctctcacctgggggctggtgacctggncaccacaagctgaaaacaggntaatgggnnggnggntgtntgtttaaaccttangnncctgnaacctgtncattgaccaaatgatgnatggaagngctaaccttnnatacagtgggcaggcggttnccntaagacaagcagcatgtgatnaaantggnctannnagnangnccnttatgtacaaaaactnngatgt

SEQ ID NO: 28507 - DNA, 430 bp, Homo sapiens
  misc_feature (1)...(430): n = a,t,c or g
nnnnnnnnnnnnnnnnnnnnnnnnnnnnnnnnnnnnnnnnnnnnnnnnnnnnnnnnnnnnnnnnnnnnnnnnnnnnnnnnnnnnnnnnnnnnnnnnnnnnnnnnnnnnnnnnnnnnnnnnnnnnnnnnnnnnnnnnnnnnnnnnnnnnnnnnnnnnggaagtcaccaccttagcccatcccatttttttcccaanaggtcntacccncatatgccgtctttgattngnatttgcaaaagtaattcatgtttatagtaaaaacttggatcantgaaaaaagctnaanaaanaatttgaaaatctatgggnatgagttatntatngntatatancangttnccccaaaatttaccagnttaaaacaaacttttatctcccatagtttganagtcattaatcttgggantggcttaactgggnagttctctct

SEQ ID NO: 28508 - DNA, 428 bp, Homo sapiens
gaaattagaccctcccaacttagatttcacaaatcagattaaaatgtattttcttaagagggattttttttctcccctgtgagcactttgattaccccaaaatagcactgagtattgtgaatgcattttggagcatcttcagtccaaaggaggcttgacagtttaagaagccaaatgcagaagcagctgtcggctgattggtgtagctaagataactcaaaaatcatatcccaaaagcgctttgtggtgtgagcaggacagatgtgctgcctaccttcgggagtccttcagtccttcagggacttggacaagaagcaaagcaatgagtgtcagatctgtgacagaatcccactgaacaaggggaaaggggactggaggaggtgacccctctctcaaaaggtgacctttgagcagagacctgagttccg

SEQ ID NO: 28509 - DNA, 463 bp, Homo sapiens
  misc_feature (1)...(463): n = a,t,c or g
gnnnnnnnnnnnnnnnnnnnnnnnnnnnnnnnnnnnnnnnnnnnnnnnnnnnnnnnnnnnnnnnnnnnnnnnnnnnnnnnnnnnnnnnnnnnnnnnnnnnnnnnnnnnnnnnnnnnnnnnnnnnnnnnnnnnnnnnnnnnnnnnnnnnnnnnnnnnnnnnnnnnnnnnnnnnnnnnnnnnnnnnnnnnnnnnnnnnnnnnnnnnnnnnnnnnnnnnnnnnnnnnnnnnnnnnnnnnnnnnnnnnnnnnnnnnnnnnnnnnnnnnnnnnnnnnnnnnnnnnnnnnnnnnnnnnnnnnnnnnnnnnnnnnnnnnnnnnnnnnnnnnnnnnnnnnnnnnnnnnnnnnnnnnnnnnnnnnnnnnnnnnnnnnnnnnnnnnnnnnnnaagcanacctacagcaagtttggcnccaactttnnacaaccatggagcccttgttaagaananaangggttgtttantttt

SEQ ID NO: 28510 - DNA, 455 bp, Homo sapiens
  misc_feature (1)...(455): n = a,t,c or g
gcaggcgtgcgactgcanacagagctccttgcgcgagatggacagaggctgcctgtagtccaccactatggccatgggagtgggggcatctcagtgcactggggcactgctctggaggccgccaggctggtgagcgagtgtgtccatgccctcaggacccccattcccaagtcaaacctgtagatgacataaaatgacagcaaagagactgagagactgttgatcaaagcacagaacaggttcaaataacttttccactgcatgaaagtttaattagacatttctttgttttcaacattagaagtggtgtaacatgtaagctgagcacgnnnnnnnnnnnnnnnnnnnnnnnnnnnnnnnnnnnnnnnnnnnnnnnnnnnnnnnnnnnnnnnnntgagtgcaatctgggtaacattttttagaggggccagtttccacctctaaaaaaaacacca

SEQ ID NO: 28511 - DNA, 421 bp, Homo sapiens
  misc_feature (1)...(421): n = a,t,c or g
gagtggcgttggctgctagagcgatgccgggccggagttgcgtcgccttaatcctcctggctgccgccgtcagctgtgccgtcgcgcagcacgcgccgccgtggacagaggactgcagaaaatcaacctatcctccttcaggaccaacgtacagaggtgcagttccatggtacaccataaatcttgacttaccaccctacaaaagatggcatgaattgatgcttgacaaggcaccagtgctaaaggttatagtgaattctctgaagaatatgataaatacattcgtgccaagtggaaaaattatgcaggtggtggatgaaaaattgcctggcctacttggcaactttcctggcccttttgaaaaggaaatgaagggtattgccgctggtactgatatacctttaagnnaaggtcactttaa

SEQ ID NO: 28512 - DNA, 422 bp, Homo sapiens
ggcccttgtgagaattatttcaaataattttgtaatttcaacccagtaaatttctccatcactgttcctgatccctggcattatgaacaataggtttcagaaagcttccatgttttagaacctctcctacctgagattacaggtgtgagccaccacatctggccaaggtgttatagattctttaacctaaatttggcttattacttggaaatgttattgaggaaattggttatcagttttatgattttctaaattactatataacttctagtcacataaaaagtgtctaagcttgtccatagcaagagagggctgcttcaaattatgattaatgatattgcagaacaaattctgggttggtagtaatatttattggttaaaatatagtagtaggcctttaacatggatatgactgtagatct

SEQ ID NO: 28513 - DNA, 425 bp, Homo sapiens
  misc_feature (1)...(425): n = a,t,c or g
gctgggataatcaatttaaaaccttcttcccatttgctttcttttagcccaactaacgtaaggggaaaccgtctttggatgtgtttttggtggcttttaatattttctaagtctccctttcctactttttttttgtctttaatgtctttgtttagttattctcttctcctgtctctcctgcacgctcctccctttccacttctttcttctctcttcggtcctccccgtgggaacctaatgtatacgaaaatctagtggtgcctccagttgaattttcccatgaatgctttattgactttgcttcaagcctttcaaatggnatnnggtgcttacctgtgagacatcccacctgacctgccagatnaanacgattaaccctattttgaaactgagataaacctgcttggaaaagttacctaccccaa

SEQ ID NO: 28514 - DNA, 510 bp, Homo sapiens
  misc_feature (1)...(510): n = a,t,c or g
ttgaaanccntnnnnnnnnnnnnnnnnnnnnnnnnnnnnnnnnnnnnnnnnnnnnnnnnnnnnnnnncctcatggtccagccccagcatggcccgcctgcacccgccccggtcccaggctgcaacttctcccccagcagctgtcctcccggcagcaaccaccagagggcgtctgtgagcgcctgggtcagggcctgtccctcttctgcccacagctctctgtgagtcccactgtcctcagggtcaaatcccctaagtcctccccatggcccaccaggccctgcacgacctgccctcccctcctccctctactccagccacacaggcctcctccctgttcttccaacacaacatgccaggtgtggtcctgccccagggctttggcactacttgtccctccccattggcctggaatgctctgacatcctgcaggtgtcagggccacgtcacctcctccaagaagccctcctggcttctgcctggctgtcaaggttctctgancgttaccttt

SEQ ID NO: 28515 - DNA, 432 bp, Homo sapiens
  misc_feature (1)...(432): n = a,t,c or g
ggactagccctgctgtctcctctctcctgccaccttgtgaagaaggtacctggnnnnnnnnnnnnnnnnnnnnnnnnnnnnnnnnnnnnnnnnnnnnnnnnnnnnnnnnnnnnnnnnnnnnnnnnnnnnnnnnnnnnnnnnnnnnnnnnnnnnnnnnnatttatagccatgtgagaacagactaatgcagtaagaaaaaatgcatcatggggaggagggaagagacacataatgatagagagaaagcatatagacactcctcccatcccccacgaccaaagaaatacaaattaatagataacacaaatgctgagacattaatttcttcaggtcctgacaatttttcccttcctgctttcatttctcatgatacgggcctttctcccctcgggttctctaaaataaaactagngngngagactctgntccttg

SEQ ID NO: 28516 - DNA, 423 bp, Homo sapiens
  misc_feature (1)...(423): n = a,t,c or g
gaactgggagaactgtgtgagtctggatacttaggggtagagaaaagaaggctgacagaaaaaaaaaattgtgggggggtaaatagatggatgacaaaaataaaaaggtacaatacaggattcttctaggaactaatagactcactgcataggcatataaaactatggcttacctattctaggctaggataaagaaagactgtcaagggcaaacattcttttcattctaagacatctatctgatggaagtgtgaggacaaggccatgcacaatgcaagctgcctctcaaagcccccataacaccccattgtggtaggctgcctcaggctaagtgaaaacaaggatcactttcccaggagcaaatgctatttttctaccaaagcattcccatgcaaacggccaaagagggtanaatgagaaatt

SEQ ID NO: 28517 - DNA, 417 bp, Homo sapiens
  misc_feature (1)...(417): n = a,t,c or g
gaaaatggtgaatgtaaaataaannnnnnnnnnnnnnnnnnnnnnnnnnnnnnnnnnnnnnnnnnnnnnnnnnnnnnnnnnnnnnnnnnnnnnnnnnnnnnnnnnnnnnnnnnnnnnnnnnnnnnnnnnnnnnnnnnnnnnnnnnnnnnnnnnnnnnncnnnnnnnnnnnnnnnnnnnnnnnnnnnnnnnnnnnnnnnnnnnnnnnnnnnnnnnnnnnnnnnnnnnnnnnnnnnnnnnnnnnnnnnnnnnnnnnnnnnnnnnnnnnnnnnnncgtgacatcacatcacatcacatcacatcacatcacatcacatcacatcacatcacatcacattgcatcacatnacatcncaacataacatanattttcaaggcagaaatcttgtagcagccntactggttggtgacaagacacc

SEQ ID NO: 28518 - DNA, 394 bp, Homo sapiens
  misc_feature (1)...(394): n = a,t,c or g
gnnnnnnnnnnnnnnnnnnnnnnnnnnnnnnnnnnnnnnnnnnnnnnnnnnnnnnnnnnnnnnnnnnnnnnnnnnnnnnnnnnnnnnnnnnnnnnnnnnnnnnnnnnnnnnnnnnnnnnnnnnnnngcagggttcttcaggancnttatgttnnttctggggtttnaaatcatgtantatgacnttaaattttgnggtaaatacnttctggngnacttggtaaatctgggngtatgctttnaatgatnactggncaggtgggaaaggaatantnttaaaataaccagggaatagnanttcacctgaattgatnaattatatattnaangatngctttctacatacaggtttactcagtgtttattgaacatgtgtcactgaggatatagcagaa

SEQ ID NO: 28519 - DNA, 198 bp, Homo sapiens
ggcaccatagcttcaataccctgtctcaaaacaaagacaaaaacaaaaacaaaaaaatacaaagcagaaagaaggaaacgatagagattagagcagccataaattaaatagagaatagaaaaataatctacaaaaccaaaagttcggtttctggcaagaacaaaaaatctgacaaacttttggtaaaaaaaaaaaaaa

SEQ ID NO: 28520 - DNA, 418 bp, Homo sapiens
  misc_feature (1)...(418): n = a,t,c or g
ggggcccaacccggctgggtgggtgggaagtgtggctggtaacctggcagccgcggagagagagaagattataaatggcagagccatttaactgtggttagctgttggattctgatactttcttaaaaatacgttcttgcaccaacatcttcattgggaacagttcagaaaaagcaaagaggagagccaacattcacatttaccatggctataccaataacagtgcttgactgtgacctcttgctatatggccgtggtcaccggacattggaccgttttaagctggatgatgtgactgatgaatacttgatgtccatgtatgggtttccacggcagttcatttattacttggtggagctcttgggggcgaatctttctaggcctactcagcgatccagggctattancccagaaacac

SEQ ID NO: 28521 - DNA, 420 bp, Homo sapiens
ggcctagatagagcggtgaaggaggtccattccccactatgagggagattcacctggggaggagggccactggcagcagacaagaaacagatcttagttctcacatccaaataaatgttggctttcaccctcctgtcccatcatcaccagtctgggtcccagaccaagcacctcttccctgccactctggcaagagttggtttcctgactctgttttttgccactctagtccactatgcacattcttcccagattgttcttcataaatcctccactcacaagcttgcagcctttcctatcacagtcatatccaatctcaattcccctgcccagtataatgggactcgactctagacacctgacctaatttctctccactccatgcacgcttccttgagccagcctctgttcctctcttgg

SEQ ID NO: 28522 - DNA, 403 bp, Homo sapiens
  misc_feature (1)...(403): n = a,t,c or g
ggcactattctaaatgttttcctgtgttaattcatttcatccttgcaacaatcctacaaggtaggctataataccccattttacaaatggggaaactgtcatagcaagatttttttttttttgccanggncncctgagngagtgataaagncctgnaatccantntttnaaccactgnnctttgntncctgtnanncccaggcctgccaaanncttcctgnaccttttgacctaancttacntgggggctgtnccnaggcaaggatcnncttaggttnccacctccctnaaaattnntttttccccatttntccccctannttggaggtngntagcaggcttttttttaacaaanaaccntttaacancaacaacaaaaacttgttgtttnaaactgaaaaaa

SEQ ID NO: 28523 - DNA, 402 bp, Homo sapiens
ggaaagttaaattgccatggtagtttgatcatcccagaaccgtagtgtacctcatcagctccttttgaagatgattgtggacttaatattatgtgttctcatgttttctcagctggacaaatgactagaatttctgaggacatacatctcttctctcttggctattttccaagcctgagggaaggactcctgtacttcgtgactatatagaaattagggctgctggttctgcaattctgtctgccaaccatgtcccttgtttttcagcacattatcaggctatgcagtcttgaacatgtagatcccaagcagcaaaactagaattttcaaaataaataagaaaggggtttgtattattattactatgttgtagagacaggacctcacttttttgccaggcta

SEQ ID NO: 28524 - DNA, 410 bp, Homo sapiens
  misc_feature (1)...(410): n = a,t,c or g
gaaaacgtatatattttaggacaagtctaggggatgcaactcttttcattaatatgtcctggaaaacattaagtatttttagcccaccttgaacatttttaatcagatgtgactttgattagtggcgacgatcaccacagagcttcagagcctgggccctgaagtatatgagaaacctgccttcaaattcctgttctgcttcttactagttacatggctttgagaaaggaagtgaacctttctaagccttagtttccacacctgtaaaaggggaataataatgctgtttatttcatggggttgtgtgttcattaagtgaagttatatacataaagcacccagtaaagcatctggtaaataggaaagactcagtaatttttagtcctcagagcaagggnaaagctaatatt

SEQ ID NO: 28525 - DNA, 412 bp, Homo sapiens
ggcattttacatgtgaaaagaagggagttggggaaagtgaattatggtcttgcactcagtaaatctacgttttacataagataaagtaagcttatgaaattagagctgtctgtttgggaacaaaaagaaggtcagtttttgcatgactcacttcccaagcttaactttctttttctttgacatagtgagtttagggccctgaggttttatttttctttcacagcacaaagatacccagttgaccttttttttcataacagaatgatgcattttggttcagtagtgtttcctccaactgctctacccctaatttaaaaaggggagggggtgagaaatcagtcccaaatgtccctgtaagttttggtgtgatgccagcctccaactggctgacatgagcagttttgtaaaggaa

SEQ ID NO: 28526 - DNA, 407 bp, Homo sapiens
ggtcttgaaatgtttttgaatcatctgaatgaagatatctagaacattaaagccgtgagcgtgggctagatcatccagggaaatcagtgtgagaagatagcctggcatgggaacttggagaaacatcagtttttaagagacaaggaggagtcgcaaataagaacaaaaagaggtagaaagaaaatcaggaatccagggaggaagaagtggttatggtttgagaactgctccttagcttattactgtgaagaggggccaaaaccaaattggcatgagttgaggaatagaaaatgagaaagtagagagaccaaatgtaggtatctttttcaagaagtttggctgtagaggaaagaagagaggcaggcaatttataaaagagtttttgcttctcatttaatgtagttatt

SEQ ID NO: 28527 - DNA, 455 bp, Homo sapiens
  misc_feature (1)...(455): n = a,t,c or g
gccagaagagtctgaaatatcatctaaccttcagagacctggagcaggatcctgacttttgcagagtcccaagctgattagggaagcagcctggacttaagtctcggccatctgatcccatttttcatcttacattctttcctatatgtaggtttgagagggaagaaacagaaatcttgacatcattaagagtttgggaggagggggttaaagaaataaggaaggactggaaggtaaagaacaaaaaagagaaggctgtggacctcgaagtcatatttttctctttgatattggtacttgatcctgngtattntctccattctctggcttctgnaacatctattcatatccttccttttggacatctgaactatttctctcttttcanattgaaggataacagntggcatatctaggtataanggacccggggngaacccgacnttttgtttgaa

SEQ ID NO: 28528 - DNA, 456 bp, Homo sapiens
  misc_feature (1)...(456): n = a,t,c or g
gtgtaattgtccatgttagctgcataattgctgaataattctaacgctgagtcgtttatcatatggtgatggttcttctcaaggttggtatttgccacattttctaaaactctttttttcctcctggtttctcagtctgtgaagactatagattttcagaaatacgttgaattattgctctaaaattggaaaaatatacttttgaaatattttttataatttggaggccagaattcagaatgagggcatactgctgtaatagaactttcttataaaatggttttatctgtgaggaagactaaaggctcaggcctcaaggatagttttatagtatgaatacaatgtttatggaaggagaaataaatgaaatattgctcatgattttttttagacctgtggctagattcaggcatgagtttctatttcacataaantagcatttcgttttatctcttt

SEQ ID NO: 28529 - DNA, 456 bp, Homo sapiens
  misc_feature (1)...(456): n = a,t,c or g
gcggtgtgggctatagtcatttgtatccaccagcaaatagaattactattggccattcacactatagtaattccttccaaaggcaaatgtgcactttcacactaatcttaaactgagggttcatttagaagttgaaaaaaaaaaatgggaaagatgtttcttctgtggccaaaaatcggaagataatgaaactttatatagttccatgcttaaaaagaaatacctgagagggcaggaagagaaaattctgagggtttgggggtaatctttaaatgatgcanggattcagagaggataccaggtatttccacacccccaccccanggtagatatttcagttctttgngttgctatagctccatgattggggttttgaatgcctagtgtgagtaactgtttgagttgatatgggttcactttatgtagacttaaatatctggtaaaattattttggtc

SEQ ID NO: 28530 - DNA, 419 bp, Homo sapiens
  misc_feature (1)...(419): n = a,t,c or g
gcagcaacagtggagtgcttcagtattgtgttcctgtaaatttaattttgatccgcaatcatttggtatacaatgctgtttgaagttttgtcctattggaaaagtcttgtgttgcaggggtgcagttaagatctttgtgatgaggaatgggatgggctaattttttgccgttttcttggaattgggggcatggcaaatacagtagggtagtttagttctctacacagaacatgataaactacacctgttgatgtcaccgtctgtcaatgaatattatagaaggtatgaaggtgtaattaccataataacaaaacaccctgtctttagggctgacctttcgtcctttgacctcctcagcctccattcccatcttcgctcanactgcaagtatgtttgtattaatgnactatgtaggcggc

SEQ ID NO: 28531 - DNA, 410 bp, Homo sapiens
  misc_feature (1)...(410): n = a,t,c or g
gaatttcacttgaacacttagaaatgcaattctgcaaattagttctcctggctttttcagagtatactacatgaccaggttacattttcacatgaaacacatttgctattagagtttcatttactgatttatcctgggattttttaaaattttannnnnnnnnnnnnnnnnnnnnnnnnnnnnnnnnnnnnnnnnnnnnnnnnnnnnnnnnnnnnnnnnnnnnnnnnnnnnnnnnnnnnnnnnnnnnnnnnnnnnnnnnnnnnntcatgcacatgtatgttcactggaacactatttcacaatgccntgaatcaaccccactggtcntnatgntagactagattaaaaanaatgngctcangtccccctagggaactatgcccccttaaaaagaatgggaacgngtcctt

SEQ ID NO: 28532 - DNA, 448 bp, Homo sapiens
gcggcacgagcacagataagacaaaaagcagggtgtttatgatggctcggcagtacagtcagaagattaagaaggcgaatcaacttttaaaagtgaaaagtctggagctggagcagccgccggccagtcagcatcagaaatccatgcacaaagacctggctgccatcttggaagagaagaagcaaggagggcccgccattggtgccaggattgctgagtattcccagttgtatgaccagattgtattcagagagtctcccttgaaaattcagaaggatggctgggccagccctcaagaatcctccctcctgaggtctgtgtcaccttcccaggtccaccatggtagtggagactggcttctgcattcaacctatagtaatggagagttagcagatttctgctcccaccagagcaagacttgaggtcaagatatccacgtttgaaatca

SEQ ID NO: 28533 - DNA, 495 bp, Homo sapiens
  misc_feature (1)...(495): n = a,t,c or g
gaccgnttgacnnnnnnnnnnnnnnnnnnnnnnnnnnnnnnnnnnnnnnnnnnnnnnnnnnngttcctgtccttgacctcaaagcctgtgaaacgatgatggagcccagttctgctcctccttggagtgcccgctttgtgctgattctcttccagagtcgacatctgaataaccgtcagtgagcctgccttgctctgttatagggtctcagggcacctgctcacgttgacaatgatattagtgaaacggcagagcctcaccggactgccagaaaaggacaggccacgcaggcagcttgctgagatggcttcctgctcagaaaatgaaatatgtgagatggcaccttcctgggtattcatgcagaggtggagaactagacccatatgaatgttggttgataagaggagagaagaaatcaaaggaccattcacctccaagtgaacatancacatgtgagagaaatgtaacggtagtacagcngctnatttaacattt

SEQ ID NO: 28534 - DNA, 417 bp, Homo sapiens
gggaagagttaggaaccagccaaagcccagccccagacccacggctctccccagcctctcggtctcatggagtacttgtttgaggctatgggaatagccaagaccacctcctgcccaccttcctcgtgacggcctcctctctggtgctgaggccagaggaagatggggcttaggctgctgagggccccccagtaatgcttcttcaggccccaagaccagcctgaactaaatcctcagttagtggctggtgggttccaggtattcagataaagcctctgagtgtccttcaaggcttggtgttgggtgggcactcaatacacgtgcacaaggtggaacccaccctctgaaaccattgccgtcagtggagagggacccctctggtgctacccagatgggagcgcccactccttttggggc

SEQ ID NO: 28535 - DNA, 420 bp, Homo sapiens
gagaggaaagtgtagattttgggtgattgtggtttgaggcagaagtagtcattagtggaaataggggtcagaagtgtgaagctgagttgcggttaggacttgctcaatgatatcttgatctaaaaatgatgatgcagaccgaatggtggatatttatcacttaaaagatcatggaattctcatgtgttgctggtggaagtgtaaattggtacagccattttggaaacctgtttggcagtgtcttgtaagggtgaactttatgaacttcatacttaatgacctaataattgtacacctgagtacatatgcagcagaatagggcgtatgtattcaccaaaagacatactaaaatgtttatagcagcactagttgtatcagccccaaattctcaaattcccattagcagtggaagtttcccag

SEQ ID NO: 28536 - DNA, 419 bp, Homo sapiens
ggtaaaaagggagtcttggggcctatggtgaaaaagagactcacttttaattgcacatctatttttactgtttgattttttaaaccacgtgcatatgctactttagaataagctcacttttataaaaatatgtatacttatttaaagtaaatgtttgtaggccatttggtagcaaaagcaagacaggtatatgggaacatgggtgtgtgtggaatttcccaggtgccaggaaaacaagccaggtctggaactgagcagtgcctggggccagctccagcatggagagcccaggaaaggggggcacggtgaccctaggcatccatccacacatgcacagacatatttccgtggcctttcttctcactacacctgacggggggtgcccatctcccctctcttggacttctgcttaaacccaa

SEQ ID NO: 28537 - DNA, 396 bp, Homo sapiens
  misc_feature (1)...(396): n = a,t,c or g
gtgtgactctcagtttgaggttgaaggcctgagaatggagacttagcgggggtggaggtgaaagtcatggagtatgaaggcccaagaaccttgagttatgatgtccaaggacagagtaaatgtcccagctccagaagaaagagtgaatttacacttccttcgtttttttgctgtgttcaggccctcagctggattggatgacatccatccacattggtgagggtgtatattttgtactaagacttttgattcaaatgccaatcttttctggaaacaccttccagacccccccaaaaaaanggttanccanccttcggngaaaccttnacccnaccnagttggcccctttaaatcctatgagaaattggactttnaaacncattnaggggtaaaggg

SEQ ID NO: 28538 - DNA, 424 bp, Homo sapiens
  misc_feature (1)...(424): n = a,t,c or g
gtgcttttaatcagcattgactcttcaagaaaaatatttagctgctacatctcagaggagacagggtggaaagcatctgagacctgcaggctcagacttagaaccagaagtgccctcagagttcatccggccctgacccagcgggaaatgagttcacagagaagcgggagaactttgccccaggccctgccgttgctcataactgccccaggtccttacatttgctccaggtcctgccccaggccctgcagttgctcataactgccccaggtccttatatttgctccaggtcctgccccaggtcctgcagttgctctgtgtggtgggtgtgatctggagccctccgccattgctgcacctggggcaggcattgctaattgatcccaggactccttctgnggagcacgccctggttttcaggcag

SEQ ID NO: 28539 - DNA, 428 bp, Homo sapiens
  misc_feature (1)...(428): n = a,t,c or g
ggaactctgagggaagaagggactggcaatatttctatcatgagccttttctaagagtgtataactcagccataaatacttgtcattgccagaaacttagcctagagggtcacaatcctggagtaaattatttttttatatatttcactgacttgctttaaattgttttaactgtatttatcttctgtgatgtaaggtaatggttttacagttcaagacacttctcctcctatgaatcaacacagcattgggatataagtgaaaaaagttagcaaaaaatggcttctggaaacaattcttcttttttaaagaaaagggcttccttttttaaagaaaagggcttcagggctgcattactcattctgacntctattagcaaacttaaaanacttaaaggtatgaactggtngattanttcccantcttcc

SEQ ID NO: 28540 - DNA, 439 bp, Homo sapiens
  misc_feature (1)...(439): n = a,t,c or g
gcggcacgagtgaggtgaaaaaatctgatgtttgaggaagtttttatttttatttatttgttttgtttttttttttttnntgnccccnggnttntccngcctaancctnncaantancnggnactncnggctnncccnnccacccccagntaattttngnnttttnaccaaaaacngggnggaanttttnatttttntaaccaaaatnngnngttcaaaggccccgttttttacaataaangtngagtcttagttaaccaggantttntgancccccntttccggactttttgcttnaattnaaattttncnccatccngtttttagcccaaaaatttncctgcngggttncaaaaaaaaatttatggnggcctgggcccaaaagggattnttnaaaattttnaactttggttttgaacattggaagtcctaaaaacat

SEQ ID NO: 28541 - DNA, 389 bp, Homo sapiens
  misc_feature (1)...(389): n = a,t,c or g
gaaaaaacccaaaaccagaaaaattgagtagagcaggaaccctccctctgcttctctctttgtgccacatgacacaggccacaggtgtttgtgatctccagatgagagaaagacttcatgattggccactggcctcaggctagaacactgaagaaaaagtttctttgtgccaaggttggtatgtgaagccctgggtttcaagcccccttgttcccatctgccctggatgcaagtgtgtctgaaagccatgggcctaggcagctgttggatgcattgtgtggaagaaagaacagcggggctccctgaggtacacagctggccttctcagccggccctttttgggggtgccacctggccatgcnaagntggctctggatcaacaacagctt

SEQ ID NO: 28542 - DNA, 412 bp, Homo sapiens
  misc_feature (1)...(412): n = a,t,c or g
gacaaaggcatagagctagtaaaggccgatccaatgccatgtcactccagaacctagcgcttagctacaaatttcattcattccttcagatacttattgaacgtttacagtgtaccagcattgtgctgggtgttgtggatacaatgatgatcaaaacagataaagcccctgtctttaaattgcttataaatctagcaagggagatagtaaatatataaataaaactaaatattaattacgattgtgatgcatgctgtggaggacagtagagggtgctgtgaggatacataatggagtcaccggcatgcggagggggaaatgaggagagacagggaaggctttcccaagaaaatantatttagctgagacttaaaggactgagtttggagttaaattggacaaagagctaaca

SEQ ID NO: 28543 - DNA, 280 bp, Homo sapiens
ggttggcaagagtacagcacaggaacgaagtatcacagtctcagacatgttttggtgtttgtatttgcataaagcaaaggaagcaggaggcggcagcctttgtgtctgtcacagttgatcttcgtgagtgccacagaggcagggggtgcattcacccagtcacctgggagctggcggggtccgggagaaagggcctgctggaggggtgaggccgggagctgtctgcctcaggagccctgtgtgccggcctcaggagaggcagcattgcctccctggcaac

SEQ ID NO: 28544 - DNA, 436 bp, Homo sapiens
  misc_feature (1)...(436): n = a,t,c or g
nnnnnnnnnnnnnnnnnnnnnnnnnnnnnnnnnnnnnnnnnnnnnnnnnnnnnnnnnnnnnnnnnnnnnnnnnnnnnnnnnnnnnnnnnnnnnnnnnnnnnnnnnnnnnnnnnnnnnnnnnnnnnnnnnnnnnnnnnnnnnnnnnnnnnnnnnnnnnnnnnnnnnnnnnnnnnnnnnnnnnnnnnnnnnnnnnnnnnnnnnnnnnnnnnnnnnnnnnnnnnnnnnnnnnnnnnnnnnnnnnnnnnntctctttactttcttaatgttctttgatgcacggcagtttttagttttggtggagtcaaaatttgtttgtttgttttttcctgttgctcatgctttgggtgtcatatccattggcaaatccaaggttcatggaaatgtacccctatgtcttcttctaagatctgacagatttaactcattgttcgatttt

SEQ ID NO: 28545 - DNA, 388 bp, Homo sapiens
  misc_feature (1)...(388): n = a,t,c or g
ggtagactgcaaattctgcttgatgaaattataattgcactctaaaaggcttgaataaaatataattttattttcctttaaatgtgtgtttttgttaatgttctaaaatatagtaggttaaaaaataaaaaataaatttgtgtttttgtgtgataaatatagaggccttttatcctcctttaacttgttatcattgtggtatagaggaaagaaaaaacagtagcctggacccagggaacctaggtactgggcctggctctaccactaacaaaatgtgtgctctttgatgggccactttaccacttggggcctgggtcttcacatttataaaatggggagttgaattanacgatttacaagatctcttccagctctaaccttctataag

SEQ ID NO: 28546 - DNA, 400 bp, Homo sapiens
  misc_feature (1)...(400): n = a,t,c or g
gtgatataaaaatatcagcacttggatttgtctgtagtcagtagaaattcgaagttttttcaagctgttccttcacactggctttgcaggttgttgtggcaccttctgttttactagcttaaactactttattgtctttttttttttgctgngncannnnnnnnnnnnnnnnnnnnnnnnnnnnnnnnnnnnnnnnnnnnnnnncttaancnattctccngnttcagcctntcangtaggtaggactacaggattagncctgtttcggnaattgaaanatgcttntntgagggcttttccatggaaattgcagccttccaanggancccaaagnttgccactttgangncaaangttnacatttaaanatctctccaatcaacccattgcanggggcctt

SEQ ID NO: 28547 - DNA, 420 bp, Homo sapiens
  misc_feature (1)...(420): n = a,t,c or g
ggagccagatgccagcaaccgactctgtgtgtgaggcggaagatctcaattttagtgttcaggtgaggaacaaagctgagcagacgtgatgtggaagagagagcttactgagttaattgccaggagatgtatctaagtcagaggttggagttgctcctctgtgttttgctgggttcgtgcagagctgcttttgtaccaggtttctaccacttggggtgctttttgcttttcttttcacttcccacatctcaagcacctgctgtgggtcagctctgtgcaggggtacaaagatgatcgatgtggcagtgtacaaaacagtcagaatccactgtggtggctgtaccagcagtattcacatagtgcagtaggaacatggaagcgggggcaggcagggccagggaaccctcanggtgatctaaa

SEQ ID NO: 28548 - DNA, 490 bp, Homo sapiens
  misc_feature (1)...(490): n = a,t,c or g
tatacnntntnngnccctannggcccacaattcggcncgagctgnaatgctgtatanntgtanaanacgaataggagaacatttatagactactannaaanaatctttacgaaatanggntanctgagaannncttagtgcntagcatacgtacacggnatgtgacntccatatatacaacagagaangaagantatanaagggtatccaacngagtntctgcnnatncantcntanaacctagcnacactgcctangaggaggngacctgnatggatnaggnntgangtctattgnanacctttccntncnttgtagatcctggatcatgtatncgatncggtancnannngaaannactntttgnttacaancctgnnctttacaatacggtgaantctgataaaggtggctgaaaganagnntggaacattgccnttgcggnccncncgganttngggccnctctcnnaattgcttnnganataaaa

SEQ ID NO: 28549 - DNA, 418 bp, Homo sapiens
  misc_feature (1)...(418): n = a,t,c or g
gaaacgaaaagtactgaaaatgcaaatttttgaattttattttgtatccaatgccaacaaagtttaataggcttttctggagaaaggcaaattatgcagccgtattcaagtttgttttgcaaagtcttacacttaaacagttggagagctttttcaccgttagtgttcatagtggtaatgctaatggctctagtgacaaagaagatgtatttcagaaacatgttattacacttgaaaataatatggaaagcaaagaatcttggtctaggacaacagtgatattcttatactgaaaggaagtaacattatgtatcaaaagaaattatacaactttgatgtgagatataacatnnnnnnnnnnnnnnnnnnnnnnnnnnnnnnnnnnnnnnnnnnnnnnnnnnnnntgcaaccataactt

SEQ ID NO: 28550 - DNA, 421 bp, Homo sapiens
  misc_feature (1)...(421): n = a,t,c or g
ggtgacttctaccacaccatcgaccaactcacctccaaccccagcccctagacagagctctccatccaaatcatctgcatcccatgccagtgatcctaccacagatgacatctttgaagagggctttgaaagtcccagcaaaagcgaagagcaagaagctcctgatggatcacaggcctcatccaacagtgatccatttggtgagcccagtggggagcccagtggtgataatataagtccacaggccggtagctagatagcgcaggtctgggagccagagcctctgtacgcgcagatcaacagacctaagaaatagcatcgatgcgagctcgtggtgggtgctcaagactggcatggacatcagcatcacgacaggctctcttgnattctttcacctcttccacaagaaattcatgattgg

SEQ ID NO: 28551 - DNA, 492 bp, Homo sapiens
  misc_feature (1)...(492): n = a,t,c or g
ggttgaatgaagtgaacttcatttgtcagcgttcggttcatgaactggaatgtaagaggcaccagaggattcctgctctgtcccctggtttgcggcttgcgacgttggacatccccggattgttgtttaatagagaaaactcacctgccttcttgcttttaagtagccccaaaagcagaaccttgatttgtctgtaaggaagaaacacaaaccttttaaaaagttccacttcgactctgcaccgccgacccccaatctctttaattttgccatagaagaggggttttttcaacatctctctcactatctggtgctgatctcactgcataatgactttctatttgtttggtattcgaagctttccgaagctttggaagagcccataccttgggctaggcccagggcactcttatgtcctcgctgtttctggcanaccgctgtggcatcaggaaccagcagaggttgtttctcttaaaacaatgctccacagaa

SEQ ID NO: 28552 - DNA, 477 bp, Homo sapiens
  misc_feature (1)...(477): n = a,t,c or g
gaataaaatgatatatgtaaaagtttacattatttagctcataacaatatttagtggggcagtctctcccactcttcaatttaccattttgtattactgacccctaaaaattacatatctacataatatctaatatttatcaggaagctaagtcaggcttagatcgttgatgaagaccagttcttgacggtaagcatggaatggtgtcttgagtttgctcaccattgcaccgtgaaagcctactacagcacctggtgcaggataggtacccaataaatatttgttgactgactgtcgaatgaatgaatgaatgatgacccaagatactgcgcgtttttgcctaacctctgttcttctaattcataaggaatatttaattccacctttgntcctcttatatccccccaagtatatttttaatcaaatgattacatcctcaatgcctctcaccccctgggttgaggcagagagattcat

SEQ ID NO: 28553 - DNA, 382 bp, Homo sapiens
  misc_feature (1)...(382): n = a,t,c or g
gcggagaactgctggaactgtggccgcaaagccagcgagacatgcagtggctgcaatatcgcgcgatactgtggctctttctgccagcacaaggactgggagcggcaccaccgcctctgtggtcagaacctgcatggccagagcccccacggccagggccggccgctgcttcctgtaggcaggggctcctctgccaggtccgccgactgcagcgtgcccagcccagccctcgacaagacctcggcaaccacatcgcgttcctcaacacctgcttctgtgacagctatcgacaccaacggactctgagccccggactctgnttaccctgatggctgntnancaccacanantgcttgggctnaaggactnactgttggaaccc

SEQ ID NO: 28554 - DNA, 384 bp, Homo sapiens
  misc_feature (1)...(384): n = a,t,c or g
ggttcaagaccagcnnnnnnnnnnnnnnnnnnnnnnnnnnnnnnnnnnnnnnnnnnnnnnnnnnnnnnnnnnnnnnnnnnnnnnnnnnnnnnnnnnnnnnnnnnnnnnnnnnnnnnnnnnnnnnnnnnnnnnnnnnnnnnnnnnnnnnnnnnnnnnnnnnnnnnnnnnnnnnnnnnnnnnnnnnnnnnnnnnnnnnnnnnnnntattaagattcctaccaaatcagcctctggtgaacctctctaaggtgcatgttaagcaagcttcccaggcatcgagaacctacaatgcaagaggactgcctcccaagtcagtgccttgggaacccgtgttccttatgganaacngggtctctttaaccccgttggatcctncccatggggg

SEQ ID NO: 28555 - DNA, 396 bp, Homo sapiens
  misc_feature (1)...(396): n = a,t,c or g
gagatattcattgtgcttgttcaagggcatatagcaatgggagaaaatgacaaatctgcacccctgtggaaattacattcaaatggaaagcgtgtaaacaaaaagtaaactattgaatatacagcataccagaaaagttgtatggagaaaaattgagtaggggcagggagtgttattttcaacgtggagattagggaatgacacactgaaggtggtgtaactaaacatacccctgaaggaggagaggaattgagctgtgtggccacatggggaatgtggttccaggcaaagcaaacttttgaagtgctaaggctctgaggcagtgctagggtanctgntgttgangcaggaagttngaagaccggggttgggnaaaatgggtaggagatgaagccc

SEQ ID NO: 28556 - DNA, 373 bp, Homo sapiens
  misc_feature (1)...(373): n = a,t,c or g
gcttgctgaggcttcctccctagaacttttgctaacttaagcaaataggaaatttatggagaagatattgggtagctcaaagaatcacagtaagaacctaacaatcagtctggaaagaacaggatgtgggactcattcattcatgcattcatttggcagatgtgtgctcagaatgttccaggtactgttcctatagcaataaacaacatgttcagaaattcctgccattctggagaccacattcttataggggaggcagtcttgaggcacataaataagacgtgtggcatattagcaagcagtgagtgccacgggagactacagcagggatgggggtaggaagcgcccangnggcatttgnaanttgcaattt

SEQ ID NO: 28557 - DNA, 388 bp, Homo sapiens
  misc_feature (1)...(388): n = a,t,c or g
gcccctgtattttctggagcccattagcccctcagcctattgtgctgctggtctgtgacaacagcttccctcttcattgtcttgggaagtccactgactggaagcctgtcttcgtcctgctcaatttactccctcttttgctaggactaatcttccaggggcatcctacatgaaaggtaaatttttcgagtcttcaaaatatggaaatgtcttggatctgtcctcagacttgattagtaatttggtggctacagaacattcaaagttggaagtaattttctctcgggattttaaagacattttcgtattgcctctggctctagtgncactcttaatatgagatgccagtcttgggtganaccnctttcggtctctgaaaactttagga

SEQ ID NO: 28558 - DNA, 411 bp, Homo sapiens
  misc_feature (1)...(411): n = a,t,c or g
gcccaagaccattcttcttcttcctcttaannnnnnnnnnnnnnnnnnnnnnnnnnnnnnnnngcttagaaccttcagctctgttccggaggtacaggaccagttaggaggcatcaggttctaaccatctggtcataagggaacagatgcgaggcctggtcacagtaacagcccgtgcatagatcaataggaggaaatcaggaatccactgagggtctggggatctaggtagtgtgggctgcaaagcattttcagaggttagtgactctccttttgtttcctgctgggctgtgagccctggcggcttgatgcatccgtgtgtcttgcccactgtgctgccactgggttgggcgtgctcaggaattgaatgggcctgttgagaaagatnttaccngcactttttgggaaaag

SEQ ID NO: 28559 - DNA, 413 bp, Homo sapiens
gggggatggaatccgaaatggaaacgcagagcgccggggcagaggagggctttacccaggtcacccgcaagggtggccgacgggcgaagaaacgacaggctgaacagctgtccgcagcaggagagggcggggatgcgggccgcatggacacagaggaggccaggccggcgaaaaggcccgtcttcccacccctctgtggggacgggctcctgagtgggaaagaagaaacaaggaaaattccagtcccagctaacagatacacaccattgaaagaaaactggatgaagatatttactcctattgtggaacatttgggacttcagatacgctttaacttgaaatcaaggaatgtagaaatcaggacttgtaaagaaaccaaggatgttagtgctctgacaaaagcagctgatttt

SEQ ID NO: 28560 - DNA, 415 bp, Homo sapiens
  misc_feature (1)...(415): n = a,t,c or g
ggtaagagacattttattcaaagttagaagaactacttatagcaaaagtaaataaaaactatttgtcatctaagtccgtggttctcaacgtggttctcttaggggtgatttttgccactgcccccgccccacaacatttggccatgtctggagacacttgtatgtcccatcctggcagggcagggcggaaggctgaggaagggcatctagtatgtagagcttatgtatgctgctaaacattttatagtgaacagggcagccctcaacaacgaataattatccagtccaaaatgtcaatagtgccgaggttgagacaccctaaataaagaattggaatgaatccatttcgtgatgacccaaggaaccatnttatgctccaggaaaatttgggcntcaataagccagggantnttgt

SEQ ID NO: 28561 - DNA, 425 bp, Homo sapiens
  misc_feature (1)...(425): n = a,t,c or g
gaaatgaattgtttggggaaagtcgtgtctgtcagactgccctgggtggagggagacgccgggctagagcctttgggatcgtcctggattcactggctttgcggaggctgctcagatggcctgagcctcccgaggcttgctgccccgtaggaggagactgtcttcccgtgggcatatctggggagccctgttccccgctttttcactcccatacctttaatggcccccaaaatctgtcactacaatttaaacaccagtcccgaaatttggatcttctttctttttgaatctctcaaacggcaacattcctcagaaaccaaagctttatttcaaatctcttccttccctggctggtccatctagtaccagaggcctcttttcctgaagaaatccaatcctaccctcattttaattatgnacatctg

SEQ ID NO: 28562 - DNA, 448 bp, Homo sapiens
  misc_feature (1)...(448): n = a,t,c or g
ggtagaagtctgtttcccctggttgcctggggactgctgtgagtgaccagcagcctaactgtaatacttggatttctgctgttgcccttgagtgttgttgccaggcagactgtccttaataggtcaggatgttttattaccatgggaaagataagaggagaatgtgtaactctgggagacctgcccttggcactcgggggtgctgtggaaagaaatgcctgaaacgatgatacttcaagagataacacaagaaaagttgtcttcatcagaatctcagaaaagataaagtcattataaaaaaaattcagacagaggagcttccgggttggtgaccacatcgaggtgctgggagggggtggcatgccagggagggcatgggaactccgtgcacccctnattcccgcataccttaccctgggggcttcccctttggntgtcctgagatgaa

SEQ ID NO: 28563 - DNA, 426 bp, Homo sapiens
  misc_feature (1)...(426): n = a,t,c or g
ggaaagttcaacgaaaaggtacaacatcgtacaatgaagtcgctgatgagctggtgtcagagttcaccaattcaaataaccatttggctgctgattcggcttatgatcagaagaacattaggcgaagagtttatgatgctttaaatgtgctaatggcaatgaacataatttcaaaggaaaaaaaagaaatcaagtggattggcctgcctaccaattctgctcaggaatgtcagaatctggagatagagaagcagaggcggatagaacggataaagcagaagcgggcccagctgcaagaacttctcctacagcaaatcgctttcaaaaacctggtacagagaaatcgacaaaatgagcagcaaaaccagggcccgccggctctgaactctaccattcagctggattcataatcatnaatacnaagcc

SEQ ID NO: 28564 - DNA, 283 bp, Homo sapiens
  misc_feature (1)...(283): n = a,t,c or g
gagaatcaataagacagtcagagcttactatgtgccaggcactttgaaatttggagctcaatgcttttagctccacaatctggcgtcatggtgtaagcattacactggaagtctagtttttttttctaaaaactcactggtaggctgtgtggctttaggtgagacccattctgtgttagtttcctcctctctgcagtggtattgctcactctgtttacttcgtagcttttgaatgggcanaaatcaaatgaaatggtggttttgaaagagctttggaagtcca

SEQ ID NO: 28565 - DNA, 400 bp, Homo sapiens
  misc_feature (1)...(400): n = a,t,c or g
gtccagggttttgcggacgagggctggagcagacccgtgtggaaataattacataagacctaacaaggatgaagaggttgctttggacatactatggagggagatgctctctttggcggggaggattgggaaagcctctaaaaggagctgctattttgaccagggcttgaaaatagcacttccacaggtacagttgctgggaaaggcatattgagaagaagaagagtttaagtaaaggtcctggggcagggaaagagaggtgctggtagaacatgccacaggctggctgtgcattgtcacatgaccagtgcttctccaagtttcagttgagaaggagacaattcccttggccccagaggagtccaggacctttanggccaccaaagcccatctttatttt

SEQ ID NO: 28566 - DNA, 397 bp, Homo sapiens
  misc_feature (1)...(397): n = a,t,c or g
nnnnnnnnnnnnnnnnnnnnnnnnnnnnnnnnnnnnnnnnnnnnnnnnnnnnnnnnnnnnnnnnnnnnnnnnnnnnnnnnnnnnnnnnnnnnnnnnnnnnnnnnnnnnnnnnnnnnnnnnnnnnnnnnnnnnnnnnnnnnnnnnnnnnnnnnnnnnnnnnnnnnnnnnnnnnnnnnnnnnnnnnnnnnnnnnnnnnnnnnnnnnnnnnnnnnnnnnnnnnnnnnnnnnnnnnnnnnnnnnnnnnnnnnnnnnnnnnnnnnnnnnnnnnnnnnnnnnnnnnnnnnnnnnnnnnnnnnnnnnnnnnnnnnnnnnnnnnnnnnnnnnnnnnnnnnnnnnnnnnnnnnnnnncaacagagtgagactccatctggaaaaaaaaaaanannggaagnaaggg

SEQ ID NO: 28567 - DNA, 428 bp, Homo sapiens
ggtaaaggacatacactttcttccccctactcctcctctcagtagacccactcactcacttccactcatcactcagatgcaggccacagttgtgtcatgttctgtctcattactcagtctgcaactctgatgacaggccatagcgagcacagtgcccttcttggtaccatggctctgcagagaaaagcaaagtctcatgtcaggcagcaggcgggtaacagggaagaaagggaaaacacaaataaattctagaaagcaatggctgggctgatacactcgcgtgtaacataccagactatgctattcattcactcattcagcgaatatatttactgagaacctactgtgtgccatgcattgttctgggcactgggaagacagtaatgaccatgacagatgaggccttggcctgatgagcctgacttttt

SEQ ID NO: 28568 - DNA, 395 bp, Homo sapiens
ggaaacaccatgggcacttgctgttcttactgagattccgtgttttttcttaaataagcacttctcaatctgttctataattttggtgaatttccaaagtactaaaatggttgcttttgacagtttcatccagttttattattgctcctgggagagagattttgccgagctcctccctgtggcattccagaagtctggataattcatacttgcatttatttatcgttaaagatgtctcggtaaaattatttcacctgctgatgttacccaggttcccgtttattttcattgcacaggttccaggatgccagtgctggctggggtggctgtataactctaaatcacagagatctgttacccattaccatggcctcttaggttctatgctaaactca

SEQ ID NO: 28569 - DNA, 404 bp, Homo sapiens
gaggcagctcaaagaagaaactgaatatcatatgaaacaggtattgggcatcagtgataatcagatgaaattctattttactgtcaccaagttggcaaaaatgtaacagctgacaatatcaagtgttgacaaggatgtgggggatagggaatgataatgccactgctggcattatcacagtacaactactgtgaggagcaatctgaaagtatctagtaacattgtaagtatgtgtaccatacatagcagttccactttcgtgggtgtctccttgagaagatcttgcatatatgcataaggaggatgttcattgtagttcatgagtctgggaaccgagtccagctgcacaggtttgaatcctgacaggaatatgcactagaccatgactttggataacttacttt

SEQ ID NO: 28570 - DNA, 403 bp, Homo sapiens
  misc_feature (1)...(403): n = a,t,c or g
gcggcacgagggcagataccatctagtctcactttttacaatttagcattggatttgttgagcatgtactctctgcagagcattgtgataggttctgggttgggaggggagccgggaaggcaagcatcctctctcaaagctgcctttctcatttgagaggcgagtgtgtgtggcacaggggcaggtagaaggagacagatcctttatacctgagagcaagatgtgcagccaggaaagctcaaggacacaggccaagggaggtgaagtgacttgcccaggccacccagttacctagcacagctcagccacaagcccaaatgaatgattctgagttccacatcagcgcatcgggcagccaccatgagcagttccacagtgacaggtggggctctaggnggcttct

SEQ ID NO: 28571 - DNA, 422 bp, Homo sapiens
  misc_feature (1)...(422): n = a,t,c or g
gctttcattcatttgactgatttttttttcaatataatctacttaatgggaaagtaggaggaggcaggaatgcataaagttctgttcagttggaaatcagtttaaaactcaatgtatcttcttgcagtcacttaggcccaactccagtctgttgtttatagcagcaatctnnnnnnnnnnnnnnnnnnnnnnnnnnnnnnnnnnnnnnnnnnnnnnnnnnnnnnnnnnnnnnnnnnnnnnnnnnnnnnnnnnnnnnnnnnnnnnnnnnnnnnnnnnnnnnnnnnnnnnnnnnnnnnnnnnnnnnnnnnnnnnnnnnnnnnnnnnnnnnnnnnnnnnnnnnnnnnnnnnnnnnnnnnnnnnnnnnnnnnnnnnnnnnnnnnnnnnnnnnnnnnnnnnnnnnnnnnnnnnnnnnnnnnnnnnnn

SEQ ID NO: 28572 - DNA, 413 bp, Homo sapiens
gccggcatccttgcctgtctaaagccttaactaagactcccgccccgggctggccctgtgcagaccttactcaggggatgtttacctggtgctcgggaagggaggggaaggggccggggagggggcacggcaggcgtgtggcagccacacgcaggcggccagggcggccagggacccaaagcaggatgaccacgcacctccacgccactgcgcttccccgaatgcatttggaaccaaagtctaaactgagctcgcagcccccgcgccctccctccggctcccatcccgcttagcgctctggacagatggacgcaggccctgtccagcccccagtgcgctagttccggtccccacagactgcccagcccacgagattgctggaaaccaagtcaagccaagtgggcggaccaaaa

SEQ ID NO: 28573 - DNA, 396 bp, Homo sapiens
  misc_feature (1)...(396): n = a,t,c or g
gggaccgtctgccattctgtcctgcctggagtccctttcccggccagggctgctctggtgctccctcagtttacccagggcaggtgctaggcccaagtgactgcacatggagggccgggaggcagcaggtggatccctacccacccgaggtggtttgggacagcctagaaagaggaagtgcgtgagttcctttcctttgngcttccgagcaacctggacctgcacagtcatggcctgtgctcctccaacctctggcccaaggggctcctgctcacacgcctcggtgcctccccaatgctagggcacaaagcgagggtgcccgacacttactgcttgtggatgcctttgctgccctgctctgacctgatcccggcctggntgacctanttttttgct

SEQ ID NO: 28574 - DNA, 398 bp, Homo sapiens
  misc_feature (1)...(398): n = a,t,c or g
gggacaggcttcgatgggctcggtggccggacaaaattcatccagcctactgacacagtcatgatccgcccattgcctgttaagcccaagaccaaggttaagcagagggtgagggtgaagaccgtgccttctctcttccaggccaagctggacaccttcctgtggtcgtgagaacagtgagtctgaccaatggccagacacatgcctgcaacttgtaggtcaaggactgtccaggcaggggttttgtggacagagccccactttcgggaccagcctgaggtgtaagggcagacaaacaggtgagggtgagtgtgacacccagagactgctcttctgcctaccctgcccactnctacgactgggaacttgacattgaancagcccactgatcctgtcaa

SEQ ID NO: 28575 - DNA, 413 bp, Homo sapiens
  misc_feature (1)...(413): n = a,t,c or g
gtgtgatactccatatttgctaaaacaagagctgaatattttttttgttccatatgcaattccaaattttcagtcacaatttcatgaatattcagtatttctgcatgcccaggagtaattagcaaacagtgtaaatgtgtgaaggcctgacacttacacatacattgcttttttctctatgtaagggggcagttgctggagtaccagggcaccaagtggaggatgtggtagacagcctctaatatgcgccccctgccaatgatctctgcctccagggaggagctagaaggcagaganaaagccactnaggacttcccatcccagangataaaggtgaggaaagcagcagcagcngccacaggccagtattncanagcagctttgggttcctgtaaaacctgctttgagaaaga

SEQ ID NO: 28576 - DNA, 392 bp, Homo sapiens
  misc_feature (1)...(392): n = a,t,c or g
gaggcagtctagggattgcagtaatccaatccctagattggctgcattcttgataaacgctcatggtaagtaaatcagtggttggagaatttaagacctaatgggggaaaatagggaggccttgaattggtgtgggtatggggaggtcagtctggttaggagttggacttgggttttattgttgctttcattaccttcactgtactacaggcctcaaaaccttctagaaggctgccaagaccttttgcctgagggtggggctggggtgccagagggtatttctcagcatctgngcttcccctcagctttcagccttctctgccagcatgccccacaaagggcatctctctccaaattcttgccccctcttctggtggcancctgctgctttt

SEQ ID NO: 28577 - DNA, 426 bp, Homo sapiens
  misc_feature (1)...(426): n = a,t,c or g
nnnnnnnnnnnnnnnnnnnnnnnnnnnnnnnnnnnnnnnnnnnnnnnnnnnnnnnnnnnnnnnnnnnnnnnnnnnnnnnnnnnnnnnnnnnnnnnnnnnnnnnnnnnnnnnnnnnnnnnnnnnnnnnnnnnnnnnnnnnnnnnnnnnnnnnnnnnnnnnnnnnnnnnnnnnnnnnnnnnnnnnnnnnnnnnnnnnnnnnnnnnnnnnnnnnnnnnnnnnnnnnnnctacttannnnnnnnnnnnnnnnnnnnnnnnnnnnnnnnnnnnnnnnnnnnnnnnnnnnnnnnnnnnnnnnnnnnnnnnnnnnnnnnnnnnnnnnnnnnnnnnnnnnnnnnnnnnnnnnnnnnnnnnnnnnnnnnnnnnnncacaatcctagtccaccttnatgttccaacctgtcacctggntctggcatttagttagca

SEQ ID NO: 28578 - DNA, 427 bp, Homo sapiens
gcggcacgagcaaagcctgacgaagacagtttctagcatccagagagtgtctctggcatcctttcccagatggaactcacactgattggtgactcccccactgtcttctcctggcaggggtattctactattttgtcagtgccctgggcataacagcaggagctcatcgtctgtggagccaccgctcttacaaagctcggctgcccctacggctctttctgatcattgccaacacaatggcattccagaatgatgtctatgaatgggctcgtgaccaccgtgcccaccacaagttttcagaaacacatgctgatcctcataattcccgacgtggctttttcttctctcacgtgggttggctgcttgtgcgcaaacacccagctgtcaaagagaagggggagtacgctagacttgctgacctaaaagc

SEQ ID NO: 28579 - DNA, 429 bp, Homo sapiens
gggaggagtttaagaagttaacatcaatcaaaatccagaatgacaagatgcggactggaaaccttccagccaacatgaagaagaaccgtgttttacagatcattccatatgaattcaacagagtgatcattccagttaagcggggcgaagagaatacagactatgtgaacgcatcctttattgatggctaccggcagaaggactcctatatcgccagccagggccctcttctccacacaattgaggacttctggcgaatgatctgggagtggaaatcctgctctatcgtgatgctaacagaactggaggagagaggccaggagaagtgtgcccagtactggccatctgatggactggtgtcctatggagatattacagtggaactgaagaaggaggaggaatgtgagactacaccgtccgagccttctg

SEQ ID NO: 28580 - DNA, 430 bp, Homo sapiens
  misc_feature (1)...(430): n = a,t,c or g
gaataaatgggaaagagaaggaaggatagatgagggagagaagagagagagagaacacaaaagggggtagaggaatgtcccaggtgtggtggtcacaatcaggtctcacaaagctaggcttggagcctgagaaggaagggctgagtttctcagggcgtgccggtgcaaatttcaggccactttgatctgctggccttggtgaggcccatcacccttctgtcaccttcctgcaaagcctgcttgcctctgccactggccttacgcctgtccacatagttcatattgtaaggtctgaagccaagcctgtgacctgtctctgtggggctcctactgngttcaagtatcatgaaataatgaaatttgngaagtggaagaanataattgggacgtctacttctttctccanggtctggnttttccaaaacgttat

SEQ ID NO: 28581 - DNA, 430 bp, Homo sapiens
  misc_feature (1)...(430): n = a,t,c or g
gaaaattgaaatttgaaaaatgttcttaccaaattaaatcttcagtgtataatttttttgatcacactaaaatactgcctactctatatttgtgaaacgttttatcctttaaaaaaaattcnnnnnnnnnnnnnnnnnnnnnnnnnnnnnnnnnnnnnnnnnnnnnnnnnnnnnnnnnnnnnnnnnnnnagttagtttgaggctacagtgagccatgatcacgccactggactctagcaccttgggcagcagaatgagactgtgtctaaaagaaaaagaaaaaaaccagttatataagctgattaatacaaatggcttatgatttataaggcatttttatatgcatttgttttatttaattacaattgaaaatnggtacnataatttacattttacaaataatccacagtgtaatgcaggtaaatagttt

SEQ ID NO: 28582 - DNA, 427 bp, Homo sapiens
  misc_feature (1)...(427): n = a,t,c or g
gtggaactcatggagatcacagtggaaacccaggaaacatttctcctgagggctgcgtctccattaatgttttctgcctagggaatgtgcttgctctggctctatgggtaaacaggagggtgaagaggaggctgactgagttaaagacatcagcaggttgggaactattaacactgaggatcatctttctgnnnnnnnnnnnnnnnnnnnnnnnnnnnnnnnnnnnnnnnnnnnnnnnnntcatggggctctgcagcctcaacctcccaggacccagcggttctcccgccacagcccctcgagtagctggaaccacaaatattcatcaccccacctggctaactttttcctttttattttttatagagacaagttctccctatgttgcctangtgagtcnttgactcttagctgnatcatcctctgc

SEQ ID NO: 28583 - DNA, 431 bp, Homo sapiens
  misc_feature (1)...(431): n = a,t,c or g
ggaaaaacacctgagactaaatttatnnnnnnnnnnnnnnnnnnnnnnnnnnnnnnnnnnnnnnnnnnnnnnnnnnnnnnagcctttgcttctagggaggtctcaggtagctccggnnnnnnnnnnnnnnnnnnnnnnnnnnnnnnnnnnnnnnnnnnnnnnnnnnnnnnnngcggggcggggaatgtgccacatactatcaaatgaccagatctcacaagaactcactatcgtgaagactgcaccaagccatgagggatctgcccccataatccagatgcaggnnnnnnnnnnnnnnnnnnnnnnnnnnnnnnnnnnnnnnnnnnnnnnnnnnnnnnnnnnnnnnnnnnngatcccaaagtatatcaagaactgtagtcaaattattatctcattctggactgggtacatagcttcctaagtatttctct

SEQ ID NO: 28584 - DNA, 430 bp, Homo sapiens
  misc_feature (1)...(430): n = a,t,c or g
gcagcccagccctcattctttcatggtcagcaaccccatagccaggtatagccaggctggagaaaagaagctgccaccatggttgcactttcactgaagatcagcattgggaatgtggtgaagacgatgcagtttgagccgtctaccatggtgtacgacgcctgccgcatcattcgtgagcggatcccagaggccccagctggtcctcccagcgactttgggctctttctgtcaaatgatgaccccaaaaagggtatatggctggaagctgggaaagctttggactactacatgctccgaaatggggacactatggagtacaggaagaaacagagacccctgaagatcgtatgctggatggaactgtgaagacgatcatggtggatgactctaanactgcactgacatgctcatgaccatctgggccgcg

SEQ ID NO: 28585 - DNA, 290 bp, Homo sapiens
  misc_feature (1)...(290): n = a,t,c or g
gatctgccttgggctaaaagaccggtggttggtcactcctctaggatcttaataaggccaggacctaggatcacagatgcatacctgtttttctttttttttataaagggaatgctgagctgcaatgaccattactgtagagttacaacaagagggtaaagttcatacatggcgacctgtgtcaaatccgtccattgatctgccctccagcacacatttactgagcttttgttacnggcctgtgntgaatgacatgacatcactgagttaagtancttggccaaanggga

SEQ ID NO: 28586 - DNA, 432 bp, Homo sapiens
  misc_feature (1)...(432): n = a,t,c or g
gagagtactgacacaggctgtttgttgcctctacaaaatccaactgtatcaatgtcagagaaagtaaaggaatgtatctctatttaaaaaatgaatgttaaatcctacagaaactcctggggagaggaaggcagttgtgacctggcatggaatggcagaagtagtctaggctaaaagaaggcttaagctaggagttgccattaggagattggttaggagaaaactctggagtggtgctgcttcaaaaaagaaaaaaacacctgcccagcatagttttgtctccaggttgtagcagggcatcattaaagtctggcaaatgtgtaaatagactgcctgagcctttagagttgccttctactttctcctacattctgaaagttatatgattgagaggtaaagcctttgaaaaaaancaatgtnccnggaaaaaaa

SEQ ID NO: 28587 - DNA, 430 bp, Homo sapiens
gggttaaggcttttttcatagtatctcatttaatcctcctaacagtcctatgaggtactcatcattatcatgctcagttataaacaaggtaactagtgttaagatcacagaactggtaaatgactgttgacctttttgctagaatgtggtaagggcgccatcattttttatcgcaggtcagtaattcaagaatggaaaggctggacacaattagcagaaaggtccactgggactggacccgctagagctgtagacctgcctctgggacactgacctgcacaggctgcctgaccaaattcactccttaatgtccacaataggaactggtaaggcagggagaggggacagcagtcctaagcaccaggagccagaagtgagagtagcgcaagtggagcactcaaaggcagaattggcattaatggccaccccc

SEQ ID NO: 28588 - DNA, 421 bp, Homo sapiens
  misc_feature (1)...(421): n = a,t,c or g
gcaaatacatatggggactccagtacctggagatgtgaattccataaaaatggaagcatctaagaggcagtgaacactggcgcccacaggagaaccaggtgcatcagcgcattgcggagctgaggaaagcaggtctgtggtcccagaggcgtctgctgaagctgcaggaggcccacgacccaagtcccactgggactatctgctggaggagatgcagtggatggccacagactttgcccaggagaggtggaaggtggcctctgtgaagaagatggtcagagctgtggcccggcagctgcaggacaggacgcgcagggaggccggggccaggagggaggagccgagcaggctgaggcagacgtcacctgtactaccagagaaatcgagcgtccctggtctantactgcgcaggtaaagattc

SEQ ID NO: 28589 - DNA, 418 bp, Homo sapiens
ggatctctgttttaatatgtccagtgatggagaggttagtgcctctcatagcaggcctcctgtgtttggacatctccttattgaggagaaatcttttctcctgttaatgccactccttgttcttgggtctgcccctgcattcacactgagcgagttattcccttctcccaaggggcactgtgccacctcaatacccacccacttgtctactcttactccacccacatggtttctccttgttatctctcatggtttccccactatcatccaggtctccccgctgaatggtctgcactttgcctgtgctccttcttaaggtgtggtgcctgaacaaaacacccaccactcttgacatgcccagagcaggcatcacccagtacacatggctccgtccagatgaaaaccttccaggagtggc

SEQ ID NO: 28590 - DNA, 431 bp, Homo sapiens
ggaaaggctggactgatttctcccctctctcctttcctggttctgttctctgaccctgggtgattaatgtaacctagctgtgttcaattacccacccttttcacgatgctgggatgtctgccacctgtccctagtgcccttcttggcttcctgtgagtcgtgactgtgggagccttgcgacttttggaggagagcaggaggccctgggtctgccatcagcatgggctccctaatcacaccattgtcaccggagcctacccaagctgctgggaagtagcaaaataagcatgcagggaacattcttccaccccaatatgttcccctcatgaaatcatcaagcaaaccctgaatgccttctcttggtgtggtcaggcagaagggttgtctctctcatactagagcagtcagtggccattggctgactgatccta

SEQ ID NO: 28591 - DNA, 428 bp, Homo sapiens
gattttatattaattctttcatttaatcctcccaccaatctcaggcaataggaactattcttgttattttcttgaggatgaaacacatgagatctagagaggtaggtaatgtgccaaggtgtgacacacacaaagtggatggtgtagctgtaattcaagcccaggagcctacctccaaagcccacaggtgtagccttcctgacgcctgctgctgtggtttcagatcatactgaaaagaatgtgtttggtattgtagcccattgggcagacttgactgtttttgattcccaactctgaatgtacccagagcatctgtgtttttgagggggcaaccaatttcaatccaaatgaggaaacctcttccagtagtcaccaagggctgtaggccaccaagggctgtaggcaagggtgcatgaccgtgtgtgtct

SEQ ID NO: 28592 - DNA, 425 bp, Homo sapiens
gcttcaaaacacagaatcactaagctcatcaattctctatcatttagaaactatattttggcccaacagagacctgtataatatgccttaaatgaggtctaaggtttttctctcaggtaaaagaagtcttgaagtaggcatttggcttgtccattttgggctgctatgatagaataccacagactggtaatgtataaacaatggaagtgtattcctcatagttctggaggtgttgaagtccaatatcaaggcactaggaggttcggtttcattgtctggtaagactgcatccactataagggcaggatgctgcatgctcatatggcagaagaggtgaagagcaagctagccaaatcctgctgtgtgaaggctttttaaaaatgaccttaattccctaacaaagaagaagccctcataacctgccc

SEQ ID NO: 28593 - DNA, 420 bp, Homo sapiens
gggctcagcgagatgagatgaggaatgttttcctggggctgtggggccagggtggctctggaggcaagagggaaactcaggaacgccttggaaccgcaggccagggcggggatctaaggtcctgagtggggaacaggagggaagctgcacccttgggtgtcagtggtgcaggtccctgtgggtgtgtgtcggtcagtatggtgcagtggatggagcaccatggtggatgccataggttcctgtcctggctctgctgatggccagctgtgtgaccttaggtgggtcacttccctctctgtgcctcaatgtcctcctcattccctcaacacacatttcctgaggatctatgatgtgctgaacactgccggccactggggagtaattcagtgtggaaacataaagtgcaatgtagggggagtt

SEQ ID NO: 28594 - DNA, 421 bp, Homo sapiens
  misc_feature (1)...(421): n = a,t,c or g
gggcgtggttaggcccgaggctcacacacttttacagaaaaagcgtctggacctttctgaggtcctgagagcacgtacataagacgatgggcgtatgctctgtaatcaatgcaacactgggccacaagccgaagcttcaaagcaggtcacagtcatgaacacatgcatcaggaatgcaaggcaaaacagaacggaagagaaatggctgtgggaaaacatcacggcaggcacaacagtgccctgtgtttaaatgcttgacttgttagtccaaatggtcacaggaattcactaattccaattgcaattaactggtaaaaactgccttaccaactagttaaacaaaaactagactaagccgacctcatgaaaggcacaatttctgagttctaaacagagattgnatcttttgtgatgagaaagc

SEQ ID NO: 28595 - DNA, 427 bp, Homo sapiens
gctctttacaggtgctgggctgtgctgtggagctccctgatgtcagctgcaagcggtttctggatcagctagttggattctttaatttttacaatggacctgtttccctagcttatgagaactgttctcaggaagaactgagcacggagtgggacaccttcatcgagcaaattctgaaaaacaccagtgatctgcataagattttcaattccctctggaacttggaccaaactaaagtggagcccctgttgttgctgaaggcagcccgcattctgcagacctgccagcgctcgcctcacattctcgctggctgcatcctctataaaggactgattgtcagcacccaactcccgccctccctcaccgccaaggtcctgcttcaccgaacagcacctcaggagcaggtattgtaaagtccacccacctg

SEQ ID NO: 28596 - DNA, 441 bp, Homo sapiens
ggagtacatccagaggaagaagttccccccagataattcaggtccttatggggcccggtatgtgggctccatggtggctgatgttcatcgcactctggtctacggagggatatttctgtaccccgctaacaagaagagccccaatggaaagctgagactgctgtacgaatgcaaccccatggcctacgtcatggagaaggctgggggaatggccaccactgggaaggaggccgtgttagacgtcattcccacagacattcaccagagggcgccggtgatcttggggtcccccgacgacgtgctcgagttcctgaaggtgtatgagaagcactctgcccagtgagcacctgccctgcctgcatctggagaattgcctctacctggaccttttgctcacacagcagtaccctgacctgctgtgcaccttacattcctagagag

SEQ ID NO: 28597 - DNA, 428 bp, Homo sapiens
  misc_feature (1)...(428): n = a,t,c or g
gattaggcacagtaagagattaacgagaaccaataataaagcagaacaattataacaatatgccaacatcactacttctacactttaggactgttatttagtaaaataagggttacttaaacatgagcactgccgtggtaccatgacagtgaatctgatctctgaaaagactcttaagtggctgatgggcagggagcgtgtacagtgtggagacgctggagagaggaaggattcatgctctgggcaagatgtagcagcatggcgtgcgatttcatcacactactcagnnnnnnnnnnnnnnnnnnnnnnnnnnnnnnnnnnnnnnnnnnnnnnnnnnnnnnnnnagagttaactgaaaccacggaaagcaaaactgtgttactgtaacattgaaaagacctcactcacctaacctgctgtgcagtatg

SEQ ID NO: 28598 - DNA, 441 bp, Homo sapiens
  misc_feature (1)...(441): n = a,t,c or g
ggaagaagcgtcagaacaaagacctaatggagctccaggccctcatcgacagccactttgaagcccggaagaaggaggaggaggagctggtcgctctcaaagagagaatcgagaagcgccgtgcagagagagcggagcagcagaggattcgtgcagagaaggagagggagcgccagaacagactggcggaggaaaaggccagaagggaggaggaggatgccaagaggagggcagaggacgacctgaagaagaagaaagctctgtcttccatgggagccaactacagcagctacctggccaaggctgaccagaagagaggcaagaagcagacagcccgggaaatgaagaagaagattctggctgagagacgcaagccggtcaacatcgatcaccttggtgaagacaaactgagggacaaggccnaggactctgggagaccct

SEQ ID NO: 28599 - DNA, 434 bp, Homo sapiens
  misc_feature (1)...(434): n = a,t,c or g
gttttttttttgtttttcagtgaggattttaaaaaatgctgttgttgttaaaacagaatggaacatgctaaattgggataaaaagggtccactggaggnnnnnnnnnnnnnnnnnnnnnnnnnnnnnnnnnnnnnnnnnnnnnnnnnnnnnnnnnnnnnnnnnnnnnnnnnnnnnnnnnnnnnnnnnnnnnnnnnnnnnnnnnnnnnnnnnnnnnnnnnnnnnnnnnnnnnnnnnnnnnnnnnnnnnnnnnnnnnnnnnnnnnnnnnnnnnnnnnnnnnnnnnnnnnnnnnnnnnnnnnnnnnnnnnnnnnnnnnnnnnnnnnnnnnnnnnnnnnnnnnnnnnnnnnnnnnnnnnnnnnnnnnnnnnnnnnnnnnnnnnnnnnnnnnnnnnnnnnnnnnagaagagaaangaaagcntccacaaanaacttgaa

SEQ ID NO: 28600 - DNA, 431 bp, Homo sapiens
ggttactaggtaatgtgtcacatgtcaccttgtgacatgctttgtgtttttctcttcgacgttcctgtgtagccaagtgtggagtcatttcactatctctgcagccgggtggggctccccagcccagacacagccttggtgtttgttggatgttgattgctgaggaatgtttggtactttggggagggtgtcagctcttcaaggccactagagggaccctggagctcgttcctccagcaatctgtcatcagtctctctttttatgaaatttcctgtgctttcatttaagaatagatactattaaatataaagtgatttttagaagttgattattgtgaattttatgtgtaaagttgaggtgcaataaaatagaatttagctgcaaagtgtggagatgttagggagattttctttgttgatgactgatatga

SEQ ID NO: 28601 - DNA, 439 bp, Homo sapiens
  misc_feature (1)...(439): n = a,t,c or g
gaactggagctgagagctggccggtgctcagcatccctggtctactgaaatctccacacacatggtagagaacagggacacgcccctcttaaaaggcagctggcaactagcctggatataaaaggggacattagaacttaagggtaatgttgaaattggttcaccaaacggcttaaagttcaaacatgcagatcatggctaaagataaaaattcccaggcatacaggcctgagatttaagctggcacattgctgggccatcttttaactgaagttttaaattttctatttattatcttagcaatgaacttgactgagagaaccattaaaaattgctatagatcaccatttggcatctgctacgggttgacttgtgtcctccaaaaaaggcatgctgaaatcctaactcccagtacttcagaatgngagcttattttgga

SEQ ID NO: 28602 - DNA, 440 bp, Homo sapiens
  misc_feature (1)...(440): n = a,t,c or g
gggatttttttttttgaataaacaaatgtgagtcaaatataagttcaaatcaattttatggacaagcaaaccttaaaaattgcccatgtagcagcacacctatttccaaaaatacagtagccacttggatacacctctctttctcatgctattttcaaaggttggttaatctgccttattataggcacagagatggcacaaaagtcctttcccaaaccaactattgaaaatgattctaaaacctcgttcaggcttcagtagcaaaaagctttgtgatcaattatcaacatctaccacagntntgggaatggggaccattggctcaaangccaacctccaattcctctgtaaaaaaactgcaaaataacccncagggacnggaagaagacatatgctggtcactttcctgaatgccctgtttanatgcccctaaggggggg

SEQ ID NO: 28603 - DNA, 470 bp, Homo sapiens
  misc_feature (1)...(470): n = a,t,c or g
ggagggatggagtttgaagtgcaccccttcaagggtgcacagaggccaagacggctgaatctgttgccaaagttttgctgtagccaaaatgtttaataaagccctggtcttgtcaagaaaagtattacaaacagtacagaaaagatgattctagtcttgtattagaccttattgtcctgaacctgaagtgaatcaaccagcctcaatgaagacagtcttcaggaaaaaggcattaaagtggtcaaacggatagcttatgggagcagagagggaagggataggctcctatatgaaggcagactaaagatggtgaactgttctgcatccggaaagggacatagcccatgttcccaaagccatgaaaggtttnagtcanggaaaacccttataagccaagttggtgaggaggaacctgaacaaatggangaagttncaccttcccctgtangtaaggcttggacccgttattt

SEQ ID NO: 28604 - DNA, 441 bp, Homo sapiens
  misc_feature (1)...(441): n = a,t,c or g
ggtacagcgcatcgttaagggtgaggtgagtgtggcgctcagggagcagcaggccgccgtcacctccagcatcatgcaggccatgcgctcagctgctggcacacctgtcccctctgcccaccttgactgccaggcccagcaagcccatatcctgcagctgctgcagcagggccacctcaatcaggccttccagcaggcgctgacagctgctgacctgaacctggtgctgtatgtgtgtgaaactgtggacccagcccaggtttttgggcagccaccctgcccgctctcccagcctgtgctcctttccctcatccagcagctggcatctgaccttggcactcgaactgacctcaagctcaggtaagtggggacagccagggatggggagatgagctggggagtggggcagtgggagggagcagtttgaaggtgacnccactt

SEQ ID NO: 28605 - DNA, 430 bp, Homo sapiens
  misc_feature (1)...(430): n = a,t,c or g
gaannnnnnnnnnnnnnnnnnnnnnnnnnnnnnnnnnnnnnnnnnnnnnnnnnnnnnnnnnnnnnnnnnnnnnnnnnnnnnnnnnnnnnnnnnnnnnnnnnnnnnnnnnnnnnnnnnnnnnnnnnnnnnnnnnnnnnnnnnnnnnnnnnnnnnnnnnnnnnnnnnnnnnnnnnnnnntataaaatgcaggtgtctttctgatataacgatttcttttcctttgggtagccgtcttgtttctttaaaagagctgacgaaatgcactttctagtgctgnccgattgcccattacatacgttcttacacttgatacccagcagtcggcaaaccatancccgcctgcaggccagatcccgcctgtcatctgtttttgnaaataacatttattggggctgggcatggnagctcatgcctgnaatcccagcccttt

SEQ ID NO: 28606 - DNA, 432 bp, Homo sapiens
  misc_feature (1)...(432): n = a,t,c or g
gagtgtataaagcacttgaccctgaagcccgtggcctggcccaagacaggagtggagggctgggtaggggggttcttgtccccactgctgcaaaggcacacagggaccccaagcctccggtgagacctcccgtccatgccagaccaacagtcatccagtttctgaatttcatgccattctggtcacaggtgccacgctgagacacaatttattttcaaatagtgccaaattctacaggttcaatttgaagatttggagaaagcttgagacatcctatatacgtttgctagggctgctgttacaaatgaccacanagatcatggcttaacgcancacgcatttattcactttatagttctggaggccagaagtttaaaatggggtccactaggccaaaagtaaggtgatggcatanctgcaaacctgnaggct

SEQ ID NO: 28607 - DNA, 364 bp, Homo sapiens
  misc_feature (1)...(364): n = a,t,c or g
ggagagagctagcaccatgacttcaataccctgtttctgtctgctccttctcagccattaccattccctccctccttagagttccaaaaacagtatttaaaaaggaacnnnnnnnnnnnnnnnnnnnnnnnnnnnnnnnnnnnnnnnnnnnnnnnnnnnnnnnnnnnnnnnnnnnnnnnntgatcagatgttcgagtnnnnnnnnnnnnnnnnnnnnnnnnnnnnnnnnnnnnnnnnnnnnnnnnnnnnnnnnnnnnnnnnnnnggtacncncccctgnaatcccagntactccaaaggctnnggcnggaaaatccccgaacccaggaggcgggggtcnaaggngcccaaaatgggccncctgg

SEQ ID NO: 28608 - DNA, 399 bp, Homo sapiens
  misc_feature (1)...(399): n = a,t,c or g
gctgtcacttccctacctgaaatgtttcagtgacttcctactattttaggataaacccaagatgttaacaggttcacagggctggcatcatctgctctggctcctgcatgtgcctcaccctgggtggctgcacccccacatttcttccactgactcagatgcctctggtctctgccatctgctctgccctctcctgcctgctcccacaaccttgtcccaaattcacttttcagagcccagatactaagtcacacaactttttctggggcctttttttgggggaagtggcaggctacagcccatgtgctcatggggaccctgttctccagtcctgacaggtacccttaaccacacttgagtctctggtccttttaaggctctgaggnccaggaaggcaag

SEQ ID NO: 28609 - DNA, 441 bp, Homo sapiens
  misc_feature (1)...(441): n = a,t,c or g
gaccgattttaaattttctattccgttactgtttttgatatgttttgctacatttattttatttgattagctttgttcatattgccttcccaactaaagttgggatttcacagtccttgactttgatatgaatacactgcctaactcagtttatgctccacaatttttatccttcctctcctcacaaataatgtagtgagctaaatctgccacctgctacactagttatatgtaaatgcagaggaagggtgttgcttaatgtgcttatcctgtcacaaagatttcgccaaatattgactattaaagaactgtcgcatgttttctagcgagttggtggaagtattcggccatggaaacagatgtatgttgtccttcggggtcattcactttacctgtcaaagatnaaagagagcagaccactccgtctgaggaanaaccccc

SEQ ID NO: 28610 - DNA, 448 bp, Homo sapiens
  misc_feature (1)...(448): n = a,t,c or g
gtgaagatcggatgtccgtaatatgggaaaaaggcgtgcatagtggtaaaatggatgaaaacagatttgtggcagttaccagcacaaatgcagccaaaatttttaatctctatccaagaaaaggaagaatagctgtaggatcagatgctgacattgttatttgggacccaaaaggcacaaggactatctcagcaaaaactcatcatcaggctgttaacttcaacattttcgagggcatggtttgccacggggtgccccttgtgactatttcaagaggcaaagtggtatatgaagccggagtgttcagtgtcacggcaggagatgggaagtttattcctcgaaaaccatttgctgaatatatttacaaacgaataaagcagcgagaccggacttgcacacctacccctgtggagcgtgcaccctatangggagaaatcccacactgtaa

SEQ ID NO: 28611 - DNA, 381 bp, Homo sapiens
  misc_feature (1)...(381): n = a,t,c or g
gaactggaagtcaaactggatggttttcttagtgtcccggagatgagggactgtaaaccgaaggccaccccacagactggctcctgccttcatggggttgcccaggtcacacaccagcaggcggctctggttcacggcaaagtagtcacagctcaggctggagaagttccctgggtgtctgacgaatcctgagtactcagcctctggaggggccggtgacccgaagctcaacctcataggcgccacccttacccacattctgggcatggaaagtgagggtcaaggcattcttgtcacccaggtacacatgggtctgnttcccaaacactttcanctgcangttaaggcacacagatggttggcttnttcacagttcaacaa

SEQ ID NO: 28612 - DNA, 381 bp, Homo sapiens
  misc_feature (1)...(381): n = a,t,c or g
gaactggagcttnnnnnnnnnnnnnnnnnnnnnnnnnnnnnnnnnnnnnnnnnnnnnnnnnnnnnnnnnnnnnnnnnnnnnnnnnnnnnnnnnnnnnnnnngggaccagtctgacatgtctcccactggccaaacttgggacaccatgagtatcaaaataatcatggtaaagaaccgcaatccactgagtaaaataagaatccatcaatcttctttactgatataacaaagaaaggacatgcactttagtagtagtannnnnnnnnnnnnnnnnnnnnnnnnnnnnnnnnnnnnnactccaggctgggcaannggnnaggnnccngnttttaagggcaattattaatnagnccaggnaananggaacntctttncnnccaa

SEQ ID NO: 28613 - DNA, 444 bp, Homo sapiens
  misc_feature (1)...(444): n = a,t,c or g
gctagcacgagcttcaataccctaaatttgatggaccaaaatttaatcaaccagtcctccacagctggcaatcgacatggcatacctttattttgcttatggaatataaactattaaaatgagtggccaggcattcaaagagagcagtctgggaacatagatcaaaggccatggaaacgggtattcaggtttggggcagaggagcctcactgcaggtgcagcagaaggcgtgagcagcagctctgctggacggggagggccaggcgctgggacctttgggaggtggccccatcctctgcctccttcacctcttgtcatgaggcctcacctcccctggctcctcacctgtactgccgcggcagtgacagcaatgtgcagccagcaactgctggcctgcttatcggtatgggctccccanggtctaantgtgagttataaanaaca

SEQ ID NO: 28614 - DNA, 398 bp, Homo sapiens
  misc_feature (1)...(398): n = a,t,c or g
gnnnnnnnnnnnnnnnnnnnnnnnnnnnnnnnnnnnnnnnnnnnnnnnnnnnnnnnnnnnnnnnnnnnnnnnnnnnnnnnnnnnnnnnnnnnnnnnnnnnnnnnnnnnnnnactttggactcacacattgtcgggtgggagttctggtttaaaaagccgattgcagtgaagtaagccgaggtactgaaaccctctatgccacagttccctcatctaaatgagtgtcgccatagtcccaggcattaaaggcacgtgcgttggatgttgatgagagcactgcatctgacgcacagaaggtctcacagacgtnagccactactggngttggttgntcctgggagtctatngaaagactcttgttcaaattncngngctttaaatnccccnttttnaaaaag

SEQ ID NO: 28615 - DNA, 402 bp, Homo sapiens
  misc_feature (1)...(402): n = a,t,c or g
gtcaggaactgtgtgtctagatgtaattaatcaaacttggacagctctctatgatcttaccaatatatttgagtccttcctgcctcagttattggcctatcctaaccccatagatcctctcaatggtgacgctgcagccatgtacctccaccgaccagaagaatacaagcagaaaattaaagagtacatccagaaatacgccacggaggaggcgctgaaagaacaggaagagggtaccggggacagctcatcggagagctctatgtctgacttttccgaagatgaggcccaggatatggagttgtagtagaaaaagcacctgcttttnagaaagactattatttcctaaccatgagaagcagactataatattnatatttaaacaaagcaantttttttatt

SEQ ID NO: 28616 - DNA, 434 bp, Homo sapiens
gagtcccatgtatatctgaggaaagagcattccaggaagaaagcacagcaagtgcaaatgtctcaagtaagaagcaacagcaaggatgccagtgtacaggaatgagagaaaaataatagaaagcgaagacagaagatgatgtagattcgatcacataggaccttgaaggcagttgtaaggactttggcttttcctcttagataggataccactgagaggttttgggcagaaaacatagaagattgtgtcaaaactgacctagcagcccagtagaggataaactgtaatgaggtaagcagagaaaccaagtagggggctatttcaatcattcagttgagagatgaaggtggtagagtggaggcagtaaggtttgaccagattcagagccaaaaggaggtcctgacacactggaagtgaaaagtgagggaaaaaga

SEQ ID NO: 28617 - DNA, 434 bp, Homo sapiens
gcgtaatatcttgtgccaaaacgaaacaattgcgagttgtaaatgggattccaacacgaacaaacataggatggatggttagtttgagatacagaaataaacatatctgcggaggatcattgataaaggagagttgggttcttactgcacgacagtgtttcccttctcgagacttgaaagattatgaagcttggcttggaattcatgatgtccacggaagaggagatgagaaatgcaaacaggttctcaatgtttcccagctggtatatggccctgaaggatcagatctggttttaatgaagcttgccaggcctgctgtcctggatgattttgttagtacgattgatttacctaattatggatgcacaattcctgaaaagaccagttgcagtggttatggctggggctacactggattgatcaactatgatggg

SEQ ID NO: 28618 - DNA, 423 bp, Homo sapiens
  misc_feature (1)...(423): n = a,t,c or g
gcggcacgagggaagaagatacagtccattatctcagtgcagccacaggctacttgggaagggaaacagatcactccagtatcttgtaataattgctgggattctgttgactctggggtgaggacagaagccagtggcaagggccttactctagtcttgggaaggtcaggaaagggttcccagagctagtggagtctaaggtgagatataatgaggtcagataaagaggcattggccaggtggaaagaaatgggggaacaatagttaggctgaggagacagcacagcttgaggctcttggaagatttgcagcttgttcaagagagctgcatgaaattcagcatggtggcagctgagtgagatgccagaagccaaggccagtggggtanggagggaccaaatcatgaaggacctttgaccatac

SEQ ID NO: 28619 - DNA, 409 bp, Homo sapiens
  misc_feature (1)...(409): n = a,t,c or g
gcggcacgagaacctcctaccatcattatggatttgtccatttttctttacagttttattagttttttgcttcatgtattttgaatttccattattaggggattttttttttgaaacaaannntngctttgtnncccaggctgnaggnccggnangcaatnggggctnacngnancctccacctcnngggctnaaagnattntaangcctaacccccccgagnagnnggnattncnggcntgccccnccnngtccannnaattttttngaattttttcgnaaaaacggggttnnatcangttgggtctaaaactccnggcctnaagggattcgnnggngtnggcctntnaaagggcngggattncaggcttgagtcnnggnccnggccaggggcataaatgtttaatcc

SEQ ID NO: 28620 - DNA, 410 bp, Homo sapiens
  misc_feature (1)...(410): n = a,t,c or g
gccggctgccctgtggcctcgctcctcggagggcaccttactagggatatgaaggtgagaagaagagctgattcctgctgtcaagaagcatagagtccaatggcattatgtctgaaaaatgagtaaagatggaagccaaagtatcacttttattgtggtttgtgagaggaagctgggcccatcagctggatctcccgaagtaggcggacttacataactctggaggagggcagaacattgtcctctgaaggcagctggctcccaaaaggaagaagaccaaggagaactgttcatacccaacgatcctgtcaaaatttaccagtcatatcaactgtctctgcacagacagattgtacctcagtctnnnnnnnnnnnnnnnnnnnnnnnnnnnnnnnnnnnnnnnnnnnnnn

SEQ ID NO: 28621 - DNA, 408 bp, Homo sapiens
gattgaatgctgttccattcttatttctttctagaagatagctcattctgactcctgctgtaaactgttcagagattattctttccagagtctgttacattcagaatgtcttgctagtctgtcacttgctgcccttctctttctacttagtttcagattactttgcatctcctctggcctcccgtttttaaccttttcattgatgtatacacacagaaaagtgcactgcttgatgagtagacatggcatgaacataacctgtacatccccaacgccagaagacccatgggcccccttaccaggcaagccctcttctattaagaaaagcgtttttcttgatgtaagcacaagaaaccactaatagtaattatactagggatggggcgcatacaggattcggaatttttg

SEQ ID NO: 28622 - DNA, 412 bp, Homo sapiens
  misc_feature (1)...(412): n = a,t,c or g
ggggagtgacagtatgttttgcccaagcttcttggttgcaaacaaaacaatttgtcctgtctggtctaagcagaaaaggtatttttgagaagatatgaagttgcttacagagtcattgggagggcaagggagagagattctagatgattctcaaactttagcctgcatctaaaagggcttgttaagcatgttaccgggccccatctccagaatttctgattccgggaagcctgggatggggcctgagaacttctcacaagtttccaggtgatggtgatgttgtggtcccagagctacacttggagaatcactcctttatgctaaactttaaggaatacccaaaagctgctctagaactgaccttacaggaaacttgcctctggngctgctggcctatagaaattcactttat

SEQ ID NO: 28623 - DNA, 409 bp, Homo sapiens
  misc_feature (1)...(409): n = a,t,c or g
ggaagcagccaaacaatgaggaaacctgccctctcacgcgcccttccccccatatttctccttcttactacccagggtagccagtctccaagtgtggagggtagttattcaggattttttttttctgtgcatttaatgagtgtgctttagaaacaagattgggatcatatatagtacagtatatcgtttaattagccaacagtgcatcatggatattcctccattttattacacacctcattattttaaaaaccattattactatgtattagagaatccaatctacgtaggcttggggaagccttttcttcattgttaaacatggtcgccaagttttcaataatcagtagntttgaaaagggntacaagccaatattttgaaacaangtggcaaaactttcanaatgtc

SEQ ID NO: 28624 - DNA, 411 bp, Homo sapiens
  misc_feature (1)...(411): n = a,t,c or g
gnnnnnnnnnnnnnnnnnnnnnnnnnnnnnnnnnnnnnnnnnnnnnnnnnnnnnnnnnnnnnnnnnnnnnnnnnnnnnnnnnnnngcgcccagcaggatgaggtttcttgaggatcctttcagggctttggcctctcccagctcctatcccactattattagggtcacagaggaggaggtcaagactgggatttacccatgaaggctctttggatgaaatcagctggatattggctgggtcactttgttaaagaccagaacctggggtgggaagcctgtgcctgtttggatgtcagagcccacagccatgggcccctggcccagcttcctaaccagtttggccctatttgccttggaagcacttgggctgtggggcaaatgggnccacgcgctgatcttggccttggcgct

SEQ ID NO: 28625 - DNA, 408 bp, Homo sapiens
gtgtccttcatggcccttcttgacacgacacatattaatgatatatgcattaatctgttttcttgatgtccaggaaggcagggccatgtctgttttgttcagcccctctccccatacctgggacctaggtgctccataaatgaataaaatgagtaaggcatgaggggagctagatcagatgagcaccatctggcacacagtaaatatatcacgaagaaatgaatggacttcttttgcttccccagcctccaagctctctcggcactgagccgcgccatggccctctgcttgggatgcacctcccccaccctttctgctggcataccttgtccatggctcagttcggtcaccatctccttcctccccagatccctccaggacctggtgtgaagtccctgtgtgcctccc

SEQ ID NO: 28626 - DNA, 411 bp, Homo sapiens
gccgagttttagagagacttctcggcatgtgtctggattttggatatagagggccttgcaaggtttgccttgcagagagtggctgcaaacattagttctctgactgctcatattcccacctcttggcctgctctatgtgcatggttgccattttatctctgcctatatggaagtgaatttatacttgttccagcttgctctttcttggagcaagtataaaagttcttattccttctgctgcccaattaaacacggggagatttgtagcatttgctgatttctgtggctgctttcaagctgttgatatgacatcactgaaaacagatttagaagagatggtcacagcaagctgtcttgagtcattgtatgccagctccagtatcccactgcgcctcacccacagctaactgg

SEQ ID NO: 28627 - DNA, 407 bp, Homo sapiens
gttctttttcaaccctgagtaatcagtcctttttgtccccttagtaaagagaacactgtatttttgtacagaaaaggtggggaggaaaggaaaataaaagaaagacccctttcctccctaaatttcagcgcaaatttccacaaaatagcaacaaataaaagatagaaaggaaaataaacacagaattgtccagaataagggtatttgtcaagtgctaattgaggatccagttttatttgtacattttgaaatgttttctttcaagttctgggtatttaggggttaatgatgtggctgaaaccctattgctttgaataggagggattagttttgttgtttcaggattaaggtcagtcttatcaagaggctgtcagcagccaccctcagccctacctacaatcactctg

SEQ ID NO: 28628 - DNA, 358 bp, Homo sapiens
  misc_feature (1)...(358): n = a,t,c or g
ggggggctttctacccagcagtagaaggttgaggccctggaagcaaaaggatttcagcctgaggggcttgttaagggagagttattctttcctgttcctagtagacctgagagagcttgacgttggtggcctctggtcagcctcatggttgggactgcgtggaaatgctagacctgagagacctcatttcccagcagtcttagagagactcaaaacaaaaaatggtctccgggtcccaccgtggtgtgtggccgctgtgcccgcagaggccaggtgtccataggctgagtccccacgtggacctgctaggtgggtagaaaggagttgaagatgttgngctgntggatggaggancttg

SEQ ID NO: 28629 - DNA, 430 bp, Homo sapiens
  misc_feature (1)...(430): n = a,t,c or g
gcacacaacctcaggatggttcatctattagagaatccaatgtcacggaagatgggggtgaggcagggaccaggaacaaggtagttctttaaaagaggatacagagctactaaagctcatgtccccaggtctgcagtcagtgtcctgcctttctcctccaatgaaggaagaggagttttattaactggagacattgagttgacaggctctaagctgagagatatcaggcacagagcaaggtggagccaggctgcaaataaaaagactatgagacttgagaccccagaccccttctctcacccatgtccaggtcaccagcagccaggtcacaccctncccatgcagaagacagagtatctcctaggagacaattaactgcccaggaaaaattctaacagatattgacattgttgnggaanaaaaccctatt

SEQ ID NO: 28630 - DNA, 428 bp, Homo sapiens
gtttttttttaataatgttgttttttcagtttgtgattttcgttatttatacgaagagcgagctggttttcttaccaaactggaaacctagctgtttgaactatgatgacatatctaacatattctacctttttggagtttatcttgaaccaagaaaaattatgggaggaaataacagctcattgcttgattaatgattcaaatttttaaaatgtttctcatgaaatgaaagaatggcagatgttaatattgttattatcttaatggccatgactcaattgaccctagaatgagatttcatttgtcacatagcatctgcaaggctgaattttcatgatgccaaccaatctggcacatcttgttttctggcaagctcttctggcctctgcaggtttagcctaatggagcactatcccccaacgtccagt

SEQ ID NO: 28631 - DNA, 421 bp, Homo sapiens
  misc_feature (1)...(421): n = a,t,c or g
gtttaggaggaaggggaggggtgtgttggaagacagagcatgccagtggaggaccaggagaacaatcaaattgcagtttagctgatgacctgagaaacaacgaaggccctagccagggcagtgtcagtgagactgggaaaaagtcagcctggggaagcattgcacaggtgaatgacagactgacaaccaaccaatggtggggtctgagatacaggagatacctggatggcagcaggagagaaggtagtatttctagtctcagccagaagtggaaaatgtgatcaactgtttttctctgctgcaagttcaccatgaacatacttgtggaagggctgagaatactgttagcttgcacaagctttcaccaggctttcagctttttggtaggctgccattagctgtgcanatgcccaggggaagt

SEQ ID NO: 28632 - DNA, 244 bp, Homo sapiens
gacaatttcctttatatttagtgaactacgcttgctcattttttcttacataattttttattcaagttattgtacagctgtttaagatgggcagctagttcgtagctttcccaaataaactctaaacattaatcaatcatctgtgtgaaaatgggttggtgcttctaacctgatggcacttagctatcagaagaccacaaaaattgactcaaatctccagtattcttgtcaaaaaaaaaaaaaa

SEQ ID NO: 28633 - DNA, 425 bp, Homo sapiens
  misc_feature (1)...(425): n = a,t,c or g
gtcttcacagagctgtcagggagatcagttcagaggccattcccacctgaggtaacacagtgccgacacctcttcctgggattcctcaaaagtgtcacctcacctggacagttttattcttttctaggtaattagaactcagtattctagaatgtggaggcttagcacccaaaatttaggtgaagggttgatgagtttgggctttaacatttaccttgtgacaggatgaagcacttcaacttgccaagtcttgtttttctcatctgtaaaataataatactaatatctgccctgtctgctatactgccgtttttgtgaagatgaagtgagaagggtatatgagaacaaggtggcagttatcgagagagaactcaaggnctccagcatgcaggttttcactgagcaanttntgaaacccttacaaa

SEQ ID NO: 28634 - DNA, 425 bp, Homo sapiens
  misc_feature (1)...(425): n = a,t,c or g
ggttatttttcctaatagcaaagcaaagaataaactgtcgctttctttgaaagccaattagtcccctctgcaactatccaatcagtctcctgtttgagttggctgaaaatgcctgaaataaccataaaccatagcacctaggacaatgcctggtccttggtaggttttcaataaatgtatcttgaataaataaatgagaatcatgattttgcttatgagtatttttgaaaagctgtgcccatcctcctcaacaaatacttctctagcacttggcaatgtgacacctttcttctccttggcacaaactgcaggtgttacaacaaaaatgtggcaggctgttaagtcagtccagagcaattggtaattagcccacatcagggcaacacttgatatttccagcaggacaagctnttgcttgnacgggg

SEQ ID NO: 28635 - DNA, 409 bp, Homo sapiens
  misc_feature (1)...(409): n = a,t,c or g
gagagagaaagagagagagagcgcgagagagatcaagacccaagttttgaatctcaaccgaggtccagggcatgacacctcctatgtgggttttcctttcgacgcagtgtaggtcaaaagaatgcatgcacgcttctaaatgaatcttgtctgaatatgtcgtgcaggctgtggtgccgttttccttgtaacaaggatttattagtgaattatcccaagtactccatatatctgtctgtggttgtatgaaatgaaaaaaggggcagagtgcaaagacccacactcacgcacacgcgcttcttctcccacccccacccccttcaaactttattcggaaccttcctttgctgntctggggccgctattgnaaaagcctgggctcctntantacttgngccanccccccttg

SEQ ID NO: 28636 - DNA, 424 bp, Homo sapiens
  misc_feature (1)...(424): n = a,t,c or g
ggaccctaacctcctgttccaggtctttctcccaatactgacctattcaaagccctgtgctccaggcagtctggaggtgcctgggccttgggggtgctgctgccttcgctcaggggccctcacaccctgcctatctctgcttcttgtctccaggatcctcccctccccaacaagggactcccattgcaggcaaccttgcctctccctcccacatcctcaacactcgagccccatgagtaaaggactcttactcttcatgagtaaaggaggtcttccgtcctatggagcacctagcaatgtgactgctataggacagcctcttaagaaattcagccaggacgattttactttgcaaagtacagtanggtgatgattatcatcgngatggctnctggaggcatanccatcaggtctttttcntact

SEQ ID NO: 28637 - DNA, 444 bp, Homo sapiens
  misc_feature (1)...(444): n = a,t,c or g
gagcagggcagctttgcccctgggtggttgaagcgccaggctggaatgagtaaggtctccacaagaccctgctgcctgcctcccatactcccatcagattggatggatggtcgtggtccagaccttcatcttcccaccagaagtgtgcacagtcagaagctctctgccagactgaccctttttggtcccgtttagctcatacaggacctgggatatcatcagaaagatatcacagtggggatgttctgaggccactagaggccaagtttagacttgattcagtttccagctttgctgaggcactctgttcctgggttagggcagttctatgttgaataatggtttttaataatctgggcatgctttctccgngactttgaggcagttagcctnagaaagcctanatcacattggagttttgccctgctnttggtaangcaactg

SEQ ID NO: 28638 - DNA, 426 bp, Homo sapiens
  misc_feature (1)...(426): n = a,t,c or g
ggttttatataaaacatgacaaagcagctggagtggggcagagacatggaagcattctcatgtccttccatttctcaggggtgctgcagttcactgaggagcagagtgtggaagttacagcatatctgagctatggggtgtgtgggttgtgttatacccaggttctcagggcctgcttttctaaaacgctgggtaactgcaggtgtttgntgtttgctaactgtgtgtagatatcatctgtgtatgcctggcaagaaaggagttaataaatnnnnnnnnnnnnnnnnnnnnnnnnnnnnnnnnnnnnnnnnnnnnnnnnnnnnnnnnnnnnnnnnnnnnnnnnnnnnnnnnnnnntaaggagaccctgnctctatttaaaaaaaaaaaaatttacttggnatggngggncatgccnnagtccatta

SEQ ID NO: 28639 - DNA, 416 bp, Homo sapiens
  misc_feature (1)...(416): n = a,t,c or g
ggcgcacagcacaagaggtggaaacatacagaagaagcaaggaaattacagttagaggtcacaactgcccgaagccagttctaaatttttatgaagccaatttccctgcaaatgtcatggatgttattgcaagacagaatttcactgaacccactgctattcaagctcagggatggccagttgctctaagtggattggatatggttggagtggcacagactggatctgggaaaacattgtcttatttgcttcctgccattgtccacatcaatcatcagccattcctagagagaggcgatgggcctatttgtttggngctggcaccaactcgggaactggcccaacaggtgcagcaagtagctgctgaatattgtagagcatgtcgcttgaagtctacttgtatctacgggggggct

SEQ ID NO: 28640 - DNA, 416 bp, Homo sapiens
  misc_feature (1)...(416): n = a,t,c or g
gaccatnnnnnnnnnnnnnnnnnnnnnnnnnnnnnnnnnnnnnnnnnnnnnnnnnnnnnnnnnnnnnnnnnnnnnnnnnnnnnnnnnnnnnnnnnnnnnnnnnnnnnnnnnnnnnnnnnnnnnnnnnnnnnnnnnnnnnnnnnnnnnnnnnnnnnnnnnnnnnnnnnnnnnnnnnnnnnnnnnnnnnnnnnncagnaacaaaaaagaagtaaaggtaaagagtcaaaagtantttaacatagttaananctttgactctgaacaacaaaagcacaanggccctggaaaaataaaatgcaatctctcgctataatgaaatattattcaaccataaaaaggaatgacatactagcccagttgcggtggctcatgcctgcatcccagcactctgggaagcanaggcngcagantgcttg

SEQ ID NO: 28641 - DNA, 422 bp, Homo sapiens
  misc_feature (1)...(422): n = a,t,c or g
gctgtccacagggctggttgggtctgaggcagttgtggggaacctggcctctcctccactctcgtggggtttgcaggccgtttttgctgttccttggctggtggaggcagtgcctcaatctttgcccgaatcttcacatggtattctccctgcgagctgtgtccaaatttcccgtctttataaggacacagtcacacaggatcaggggcccacactcccgggatgactcaccctaacttgatggatcnnnnnnnnnnnnnnnnnnnnnnnnnnnnnnnnnnnnnnnnnnnnnnnnnnnnnnnnnnnnnnnnnnnnnnnnnnncgaggggacacaattcgacccgtaacagcttctgtctccccacacatccgatgtgcttctccctctgcacgcttangctggggtctntaccaggccctca

SEQ ID NO: 28642 - DNA, 431 bp, Homo sapiens
  misc_feature (1)...(431): n = a,t,c or g
gctggaaaggagtacagggtaccatttggatagcaaaaccccagggccgaggtttgatatcaatgatactatcagggcagtggtgttagagttccagagtacctacctcttcacactggcttatgaaaagatgcatcagttttataaagaggtggactcgtggatatccagtgagctgagttcggcccctgaaggcctcagcaatggttggtttgtcagcaatctggagttctatgacctccaggatagcctctccgatggcaccctcattgccatggggctgtcagttgctgttgcatttagcgtgatgctgctgacaacttggaacatcatcataagcctttatgccatcatttcaattgctggaacgatatttgtcactgttggttctcttgtcctgctgggctnggagctcaatgtgttggaatctg

SEQ ID NO: 28643 - DNA, 93 bp, Homo sapiens
ggaagggacggcgcttatgtaaaaaaagcgaggagtctgtttgagacctactgagttacaccctctgagattgtggcgctttttttttttttt

SEQ ID NO: 28644 - DNA, 443 bp, Homo sapiens
  misc_feature (1)...(443): n = a,t,c or g
gaataaatattaaaatgttttaaattaagaaataaagagtgggtttaacttttggtagtttttgtttcaatacaaaaagccagtttttaacactagctctgaatttagtagtatcttgtacatcttgctgataagaagttactattgtttaaaaaataaagttctctggtctgtttttattcaccacacattagatgtgacttattggtgctttttgtttgtgttaatcattcatttatactgttgaacaatttcatatgaaattaccatttttgccaaaaaggatcaaatatcagcaattttatacggtttagccttgtaagtctttgaaagcccagagttacccttttcactggaaactgacctaaatatttgagttgaagaatcaaagtggtttctctggaaattttgnttagaatcttaggttcacaaaacacaatttg

SEQ ID NO: 28645 - DNA, 443 bp, Homo sapiens
  misc_feature (1)...(443): n = a,t,c or g
ggagagaaatatttgagagtcatcagcacatggatggaacagtgctggctgagctcccctggggaaatagtacagatgaaaaagaatgaaggccgtgagcctccatgcctggcctaannnnnnnnnnnnnnnnnnnnnnnnnnnnnnnnnnnnnnnnnnnnnnnnnnnnnnnnnnnnnnnnnnnnnnnnnnnnnnnnnnnnnnnnnnnnnnnnnnnnnnnnnnnnnnnnnnnnnnnnnnnnnnnnnnnnnnnngtgttgtaaaatttccatatccatcaagttgccaaatggtggaggactttgctgtatcctctccctttccccactgtggtatgcttggctcagtgggaggaggggctggagttgggtgggaaagtacatgaggcactggaatcagataactctgggtctgattccgcacatgccacctgtgagtggctga

SEQ ID NO: 28646 - DNA, 532 bp, Homo sapiens
  misc_feature (1)...(532): n = a,t,c or g
gggtcggcgtggtgctagggtggatatttccaactctggtattacgctttcttttccttgggggtggggggaatccaagcaaatggtggattacctcgaaccacctcttccacagactctgtggtggtggtggtggtggtggcaatgctggtggttctctctgtggcttcttcgtagggttcctcagcctcttcctctacctcatcaccatcctcatcgtcctcgtcatcatcggcttcttcttcttccacctcagccacttcttcctcctctgctacttctactactttgtcttcactgtgaaggcaaacacaaataacagaaaaagtcaattaaacacatttcagggaaggaaaagaaaagtcgtccatatggaattttggcaatttgagaagaaacacacccaaaacttcaattcagcaggtctaagtataaatcccagctcagtgggctgcaaaaatttttatccttggggacagtcttaaattctgcagtgctaaaaggggatgccatgagtctaaccncaggacat

SEQ ID NO: 28647 - DNA, 535 bp, Homo sapiens
  misc_feature (1)...(535): n = a,t,c or g
ggcacagttccgtggcattgggaacctgcacgtggctgtgccactgtcgccaccatgcagctccagcaccttttcatcgcgcgaaactggagctccgtcctgactaatcactcactcccatcggcctctgtcactggccctgctgactaccattctgccatcttcctcttgaatctgactcctctgggggccttccatctgtggggtcacagcattggtcctattgtgactggctggcttcactcggcacgaggctgtgaaggttggtggcngttgctgcatgcgtcagagcacactccttttccaggctccgtaagaccccgatgtgtttgtctaccccatttcagatcccctcacctgctgggttgnttccacctttgggctattgtgactgcacggctgtgagcatgggtgtctgagtccattctgtgtagccataaaaagaacctctgtgatggggnaattcatcaagctcaaattctgctgctganaagtcaatggcatggncctggcttctgctggaagaagcaaaagg

SEQ ID NO: 28648 - DNA, 540 bp, Homo sapiens
  misc_feature (1)...(540): n = a,t,c or g
gcccatcttcatctgccttcagaccatgagagaaagattgagctgattcggtttctcgtgtctggctatgtgaatgtgcatatgttggacacattttctgagcacgccagtgtgcttgcatcctccgctattgccaccttccaggatgaggctgacccattgccgccttttctctttctgccagttcccagctgccagagcgagagggtacccaaacgagatggttagtagctgaattagctccaccttagatgtagaaccatcctcaggcgcttgtcctgaagcctggctctctgcatatgaaacactgacatttccctttgcaacttgagctgaatgtagagctcagcacattttcaaggntgtatcacattttcttcctagagatttgggaagcagcttctctacatgtgcctctttcacatcaccatcgcagtgggggaggcctttgcatttggttttatggattctttgcaataatatttttaattttgaagaatttactagtagtggttggtaaaaacttctgggttgcttctg

SEQ ID NO: 28649 - DNA, 532 bp, Homo sapiens
  misc_feature (1)...(532): n = a,t,c or g
gaaggtaaaatttgtatgaccagatgaagaatctccttttttctttttccttgatatgtttagtcagtagctttccccctcatttttttgtaaatctgtatttcacattgagttgcttaaaatgagaggtctcataataggtaagtggtaaatgtaggggaattatacacttttgataatagaatgatgactaggaattgtttgtttcagtatttttgctaaagctccaaagctgaaaccaaagggtaataagtaaccctgctttctaaagagggatgtggggcttagtaaaagagaatagacttggttcaccctcaacacctgtttcccgcatataggagaaattagaagagagattaaaagtgtcattccgatggagctgttaatctagtggggagttagttttgtgacatttccctgtttctccccaaatggaccttttttttccagcccaggatttggatttgctgcanaagtgtaaattgatatgtagtttgnctggatgnttaatgagctgcagaatcttggttcc

SEQ ID NO: 28650 - DNA, 542 bp, Homo sapiens
  misc_feature (1)...(542): n = a,t,c or g
gcaaagcagagctgcaataagggcagaaagggaagtggtgagagaagaggatgagggaggacaaacaagttctgctggtgggtgagggctggcagggagagtgtggatcagggagggcttcacagaataagtagcaggtgggcgtccgcttgagtcctgaaagctgcaggtccaccatcccttagatcccaaaatctaaaaagctcggacagctgaaagttctttcatactaacaggagactatttaaggcttttatttctcccatttaatgtgactttcctaagttttgctgcagatgtaacacttttaaaacaggctgctgcccagacactgcanagggtgatgtgtggaatctaccacgtgcgccatgctgctttctaaaggccaaacagttttaaaatctagcctgaaggtttcagatcagggatttcggcctgnatatcaagaattagagttgcccnnnnnnnnnnnnnnnnnnnnnnnnnnnnnnnnnnnnnnnnnnnnnnccgggcagattgttgacctcangagttgagaacaa

SEQ ID NO: 28651 - DNA, 434 bp, Homo sapiens
  misc_feature (1)...(434): n = a,t,c or g
gcctcagtcctgtggggagtaggttgtcttcagagaccagcatcaggtctggctcctgttctggccaggccctgcacctccccagtctctgtaaggatggtaaggatgggtagggtggcatgtgtgagggtactttgtaaactgtgatgtacaaaactgactctggggagcatgactcaggtcaaggttctgtgtggccagttgtctccaggacatagcccaggccacatccaaactcacctttttcttgaccccacctctatccccactggaatcactccctcctccctctggggattcagagacctcaagtaccaggttttccttcacccatacagggttcatcttcctgggaggtgggatctttcctgatcatgttcttttatggcctgtccaccactccctncaaccccaagcacagggtgggcactcaa

SEQ ID NO: 28652 - DNA, 429 bp, Homo sapiens
  misc_feature (1)...(429): n = a,t,c or g
gagcgggttgaccgaaggttagtgtacaaatttggaaaaaatgcacacgggtggcaggaagacaagctatgatctgctccaggcatcaagctcattttatggatttctgtcttttaaaacaatcagattgcaatagacattcgaaaggcttcattttcttctctttttttttaacctgcaaacatgctgataaaatttctccacatctcagcttacatttggattcagagttgttgtctatggagggtgagagcagaaactcttaagaaatcctttcttctccctaaggggatgaggggatgatcttttgtggtgtcttgatcaaactttattttcctagagttgtggaatgacaacagcccatgccattgatgctgatcagagaaaaactattcaattctgccattagagacacatncaatgctccca

SEQ ID NO: 28653 - DNA, 429 bp, Homo sapiens
  misc_feature (1)...(429): n = a,t,c or g
gggaaggagacctgagggggtctgactgttttattcagagtttgaaacagttctcctgttctcagcccctgcctctcaactcttgtctgcagtggttcctggtgcctcccacttccctgcgtgctccgggcttttgaagcactggcttgctttttgtggcttttccctctgcagccataaacttcaactttccttctttgctgagtcagttacttcttaccttcctgctcaacctggtctttcagatttctgttgacatccctcatctactgcctttttccttccccttactctttgcctttatgcatgtacactttnactgntcccttatagtcattctagtgaaccctcaggaagatgcaaagaagtatatgttcattttgccatgtttatccacaacccccanntccattaaacanaaaaaaaaaa

SEQ ID NO: 28654 - DNA, 431 bp, Homo sapiens
  misc_feature (1)...(431): n = a,t,c or g
nnnnnnnnnnnnnnnnnnnnnnnnnnnnnnnnnnnnnnnnnnnnnnnnnnnnnnnnnnnnnnnnnnnnnnnnnnnnnnnnnnnnnnnnnnnnnnnnnnnnnnnnnnnnnnnnnnnnnnnnnnnnnnnnnnnnnnnnnnnnnnnnnnnnnnnnnnnnnnnnnnnnnnnnnnnnnnnnnnnnnnnnnnnnnnnnnnnncagattagggggccgtgggtggnanaggactanaaacctagcagtatgctaggngattctggaacatttctgngttgcaaagcagtctatcgtttaccctttctctgtttctctgctccactctgaacttttcatctcctcataaagggtntganaaaattctnttgagtanaatccagccntcactctctgncactaatgntccctccctaatcatgccatcataccaatcatt

SEQ ID NO: 28655 - DNA, 415 bp, Homo sapiens
ggtcatgcgtcttcaggatgagctggtcaccttgcgtctagagtgtacaaacctgtaccggaagggtcatttcacttcacttgaattggttccaccctctactttaaccaccactcatctgaaagcagaacccttaaccaaggcaacccattcttcttctacctcctggttccgaaagcctatgactcgggctgaacttgtggccatcagctcctctgaagatgaaggcaatctccgatttgtgtatgaactactgtcttgggtagaagagatgcagatgaaactggagcgagcagagtggggcaatgacctgcctagtgtggagttgcagctagaaacacagcagcacatccatacgagtgtagaagagctgggctcaagtgtcaaggagccaggttgtatgagggaaagatgt

SEQ ID NO: 28656 - DNA, 398 bp, Homo sapiens
  misc_feature (1)...(398): n = a,t,c or g
gctttgatggagaggactggaaacagaggatggagccccagggggccacgacagtggcagagcctagagcctagagtgggcagctgctgtgtcctggggatcttacccagttcctccatcatgtcaggacgtgaaatttggagttgtctgggataaaagatggaagccaggaggtgataactaaatcccttttcatttataaattcattgctggagggacccacaggaggtctagttctgctgtgtaccagcaggatagaaagatgtagaatggcagaaaacctggaccagcattccagggccctgactcccagtactgttacttcagtggacacaaaataaaagcccaggaacttttccttacnnggaaaaagancngactttatttaaattttgcc

SEQ ID NO: 28657 - DNA, 478 bp, Homo sapiens
  misc_feature (1)...(478): n = a,t,c or g
gaatccnctngnaanccctttgnnnnnnnnnnnnnnnnnnnnnnnnnnnnnnnnnnnnnnnnnnnnnnnnnnnnnngcacgagctagcaccatgagcttcaataccctgttttggtttaaaataataattggactttattaaacttagcaccaagtttaatttggggactcaaagaattttagaatagttaagaggccttaaagcacatctctgccttttttcgcttcccccaagacacaaacacattatctcttttcttcaacagattcaggcagaaatctacttgagaagccctctttaagtagagactgggtatagaacttcaataatccatctcaacatttattcagatatttactggattttatgcaggatcagatgaagacttagagggagagctggagctgtcctatacagcatctttgtgtcagagagccactctggaaaggngctcctggganagaataagggctcttt

SEQ ID NO: 28658 - DNA, 395 bp, Homo sapiens
  misc_feature (1)...(395): n = a,t,c or g
gcgtgcccaccttctaccccagctccctggcagccatccaaaatttgcctccaagagcatgtctcacagacaaaggtctgtgttttatggaactgtgctgacgggctctgcacacatctcactgggctactctccctggtcccagcctgcccagatcaggcgcaaagtaacatgtgagtcataagaggttctggaggaagttggagaaggctccagaagtggcctcatggaatgcggccccatctatgccgcatatgttttactgcaagctcatctccagccaagacttggctccttctctgatgcaggaaacctatcgccagtgcaggtgcctttaatgnttctctgaaaaaggaggaaatgctggcttgtgcttgtcgataaagtccccaagg

SEQ ID NO: 28659 - DNA, 387 bp, Homo sapiens
  misc_feature (1)...(387): n = a,t,c or g
gnnnnnnnnnnnnnnnnnnnnnnnnnnnnnnnnnnnnnnnnnnnnnnnnnnnnnnnnnnnnnnnnnnnnnnnnnnnnnnnnnnnnnnnnnnnnnnnnnnnnnnnnnnnnnnnnnnnnnncctcagcctgaactgttgtataattaagaatctggttggtctttgtccctggttcagggagggagcctctaaacccttgacacttcctgacaggagcatctttattattcatgatgaaccccttggacagtttcaggatagggattagtgaaagaccaactatgtgagtaaagtttgggctttgaaccacatgatctcagccccacctccaaggaggggagggggctgcaattcaaattcaatcatgtgccnatggcttacttcatta

SEQ ID NO: 28660 - DNA, 407 bp, Homo sapiens
  misc_feature (1)...(407): n = a,t,c or g
gtgtttcttggcctgccatgcttaaaatattaactgnntggccctttaagaaaaaaacgtgctgacccctgctctagatcaaagaaaacaaacctcaaaaatactttcctccctctaccccacttgacccttgtcccggggcagtaggcatctccgtcaaaactcttgtccctggtctgtggtaactttctcagctccccaacccatgtccctcaaagtcccctccctatagggcaagaacccagcaacttcgctctgccccgactctaggcgggatgtagctcattttgggatacnagtgtccatcgtggagcctggcttcttccgaacccctgtgaccaacctggagagtctggagaaaaccctgcaggcctnctgggcaccggtgcttntggcaaaaaaggccc

SEQ ID NO: 28661 - DNA, 409 bp, Homo sapiens
  misc_feature (1)...(409): n = a,t,c or g
gtttattcaacaaatagtgttgagtatcatgtctcaggcgntgtatattatagatatagcaataaacgggaaactggtttttccttaaagaagcttaagaactatcaggaagataatgtggagacagcctctaaaccatgggggtatgactttttttggggggnnnnnnnnnnnnnnnnnnnnnnnnnnnnnnnnnnnnnnnnnnnnnnnnnnnnnnnnnnnnnnnnnnnnnnnnnnnnnnnnnnnnnnnnnnnnnnnnnnnnnnnnnntcccccagcagctgggactgcaggcgtgagccaccgcgcctgccctggcggtatcacttctaatagaagcatttattggccaatgaaacaggatacttctttcattgnacaattttataaantggtccncnccggctata

SEQ ID NO: 28662 - DNA, 404 bp, Homo sapiens
  misc_feature (1)...(404): n = a,t,c or g
gaaaagacagaatttatttaggaaaacgatggaattaagctctggacaaaacatgcatcagtgatgcataacatttttgttaattgggtcttaacaggtttctgactcatatggtaatcattgtagaagtccacnccagtggcaaatngcgaanctgtaanaactnttacctncctgtgngtgtgcacctgagtgtgngggggggcgtacagtttctgtaccttaatttaggntccacatacacttcagnggttaaacctgngctanactcaaatagtttgntnccattaanaaaatgaatnttttatgtggaccaaggncangttagttaattctgntngcttttattgnnataacttttcccattccnattcatcacttaattntaagtgggctactaaaat

SEQ ID NO: 28663 - DNA, 402 bp, Homo sapiens
  misc_feature (1)...(402): n = a,t,c or g
gaatnnnnnnnnnnnnnnnnnnnnnnnnnnnnnnnnnnnnnnnnnnnnnnnnnnnnnnnnnnnnnnnnnnnnnnnnnnnnnnnnnnnnnnnnnnnnnnnnnnnnnnnnnnnnnnnnnnnnnnnnnnnnnnnnnnnnnnnnnntcaggagaaattccatttcattaattcgtactcccggtggtctttgaaatgagtcgtgcaacatcactgtcacctgctgtccatttagtgagttactctgggttttttatttaggggagctgaaacacagatttttaaaaaaagnttattttcataaatcgcaataatgncataaaagctgagtgtgcgtctggggctctttagtccagtagctactttggtatatataatgatggcaaggttgacgtgttttggttttg

SEQ ID NO: 28664 - DNA, 452 bp, Homo sapiens
  misc_feature (1)...(452): n = a,t,c or g
ggaagataaacatttttttttcctgttaaaacaaacataggggagnnnnnnnnnnnnnnnnnnnnnnnnnnnnnnnnnnnnnnnnnnnnnnnnnnnnnnnnnnnnnnnnnnnnnnnnnnnnnnnnnnnnnnnnnnnnnnnnnnnnnnnnnnnnnnnnnnnnnnnnnnnnnnnnnnnnnnnnnnnnnnnnnnnnnnnnnnnnnnnnnnnnnnnnnnnnnnnnnnnnnnnnnnnnnnnnnnnnnnnnnnnnnnnnnnnnnnnnnnnnnnnnnnnnnnnnnnnnnnnnnnnnnnnnnnnnnnnnnnnnnnnnnnnnnngtaaacaaacatacataggtgcagtgtagtataaaatagaatacnaatatgaatgaattctaaaaataaatttcttatggtgtgttactgtaggtggctnccctaggttgctcataccttgatttatggcactgccc

SEQ ID NO: 28665 - DNA, 441 bp, Homo sapiens
  misc_feature (1)...(441): n = a,t,c or g
gcggcacgaggatctaggagcagagtgagaagaagattgagagtcttaatactcaaaatgatactttcatttaatctcaatatttagtatcaatacaggacctctgccttcagctattcctgttgtctgcaagtctagaaacttttccctttcctaataacaagcttgtagtagagtgccagggttggggttgcttagctgctgcaagtcagggaggacaactaggagatctcacagctccttacgcagactggcgatgaatctttctcttttaggcctgccttcacccctgcttccagggatatcttgtgcttgccagttcttgtgcctgctgtaaatcagtttgcttctctgctttcctagttctgcagtgaaaattattattctttaattttctttccagagtctaaaggnactgntttttatttcatcttcttgatt

SEQ ID NO: 28666 - DNA, 430 bp, Homo sapiens
  misc_feature (1)...(430): n = a,t,c or g
gcagaagttctactagagagttctagtctagagcttggtttatgcacatgtttacatttttcaaaattgtaattaatatgcattgtatgccagtaatacctgcccccaaaccctataaatcattaatagaatttttattactctattatctactaattagcccatgttttccataatatttttgttcaaccctggggagaaaggataaatagtaaaattcttggcaaattttcaaatatgtaattgtgacatacaatagatagcattgattttccgctccaaaaaatgagttctgntgctttataattttgaatgcatctagaaacaagaaatttcttttgagggcttaaagtgaactctagatgaatacncaaaaaaattttttctattggaatcnagtatcttaaacgtggcgatcatacaccctttt

SEQ ID NO: 28667 - DNA, 428 bp, Homo sapiens
  misc_feature (1)...(428): n = a,t,c or g
gagttttaaaaagtaagaaggcaaacagntaatcatanngcgatatagaaagaaatatcataatagcaacatgaacagagtcagagagaagttgattaattattacctagcacagtggtccccaaacttttgacgctagggactggttttgtggaagacagtttttctgctacctgaggtggggacatgggatnnnnnnnnnnnnnnnnnnnnnnnnnnnnnnnnnnnnnnnnnnnnnnnnnnnnnnnnnnnnnnnnnnnnnnnnnnnnnnnnnnnnnnnnnnnnnnnnnnnnnnnnnnnnnnnnnnnnnnnnnnnnnnnnnnnnnnnnnnnnnnnnnnnnnnnnnnnnnnnnggggtaatggttctcaacttccattctcctcntgtctgtgacctgttcctaanaggcctggacctgtccggctcc

SEQ ID NO: 28668 - DNA, 428 bp, Homo sapiens
  misc_feature (1)...(428): n = a,t,c or g
gggagaagtacaagcttctggtggaaggtggnaacctggggncagtcatggccacacacggtgtgaagggcacccgaaccacctccaataacacctatgaggtggagaaaactctgggcatcgaggccgcccggacaacgatcatcaatgaaatccagtacaccatggtgaaccacggcatgagcatcgacaggaggcacgtgatgctgctctccgacctcatgacctacaagggtgaagtcctgggcatcactaggtttggcctggccaagatgaaggagagtgtgctgatgctggcctcctttgagaagacggntgaccatctctttgacgctgcctacttcgggcanaaggactctgtgtgtggggtgtctgagtgcatcatcatgggaatcccaatgaacattggaaccgggctcttnaagctt

SEQ ID NO: 28669 - DNA, 430 bp, Homo sapiens
  misc_feature (1)...(430): n = a,t,c or g
gctggtaaaaatatatgtgaaaaccagtattactgaatnctagctagatgctgtgttacctgccaaggctgagactgagggctgaccttgctttgttaaagagattatcaagtctagagaagtataaaagacacattagcagcaaccagagactgagtccttggcataatcaggattgaaagagaattaaaagggaaggttacttaatcctatgtccatgtatccacctagcatcatttttgggattgcaaatccacgcttggtgacatgctacggtaagacagggagtggtttgctgcccattttgcaggcaggaaggtagtagagctacagaaagcattacaaagatagtttggaattggaactcaaggcttctgcctggntcacccatcattgncnaggatgcctcctggncatctgtccnggagga

SEQ ID NO: 28670 - DNA, 425 bp, Homo sapiens
gaaatctcggcaagtatgatcaaaactacgacatcagagaccgtacaagatttattaggcagcttattgttccgaatgaaaagagtggagctttaagtaaatatgccaaaaaaatattcctagcacaaaagcctgcaccactgcttgagtctccttttaaagatagagatcatttccagcttggcaccttatctcatactctcaacattaaagctactgggtacctggaattatctaattggccagaggtggcgcccgacccatcagttcgaaatgtagaagtaatagagttggcaaaagaatggaccccagcaggaaaagcaaagcaagagaattctgccaagaagttttattctgaatctgaggaagaggaggactcttctgatagtagcagtgacagtgagagtgaatctggaaagtgaaag

SEQ ID NO: 28671 - DNA, 474 bp, Homo sapiens
gcggcacgagtgggaaggcaactgggacactgaaggagaagtaggaaaattagaggatgatttgtgcctgtgtaatatttatgctctgctgctccatcactttctaaccagaggaacattgaagtggaatgagggaagtggaaaaaaagataacgaggaagatacagtagctattttctgatgtgaaaagacaatcctgagggcttttcttccattcttccctgatttaagtctttccatcttgttactgaaagtgttctggaattggctgcacattggagcaaaatagttagtggaggactggccagaaaggactggagcccttggagctcggagtcccacctgacttaatctcatgcatcaattttctccctcttttctagttacgagattattgccattatttagtaaaattaattgagtcattataatagaactctatttagaaattacctcaatgcgactgggcggggg

SEQ ID NO: 28672 - DNA, 213 bp, Homo sapiens
  misc_feature (1)...(213): n = a,t,c or g
gaactggaagggaggaaatccagaaatttctggcaaacaactctaatggctacaaacaattcctcctccttatgcagtggaggtctccttgcttgggccatttgggcagccacatttccttccactcccaggaagagcatggccagagcagaggagacagcagaatgttgaaggggttgggggaggaggagtngctcttggatgnngancagg

SEQ ID NO: 28673 - DNA, 467 bp, Homo sapiens
  misc_feature (1)...(467): n = a,t,c or g
gctgggtcgtatgaaaaaagctggaatggtatatagacttttcttcttttaccctgatagcatttgctgaatggggacaaacaaaatcaagtttatagagccttgtggggaaacaaaaatagaacatagaatcaccctctgttcatgcaaagaagactaacaagagacctacaaagggctaactactcattgggataacagagtaccagaagtaaacctaccctaattctttttaccttcacaggtctgcaaggaaagctaggttagcaccgagcaaatacggcttaaaaaaaaatccttgaatgccgtaaccacaaaccagtcccagtatgaattcattcacatcattttagtgatacaaaaaacttcaagctttcaatttaatgtagtccaaggccatcagtgccatctccccagatatangcagacacacagaaatcctctctagagaaacctactccttttag

SEQ ID NO: 28674 - DNA, 473 bp, Homo sapiens
  misc_feature (1)...(473): n = a,t,c or g
gtgtggctccagtgagaacaaggctttgaaactgaacaagataacttctagaaatgaactgtactaatccctttccccagattgtatcatgagtagaatcaggttcacgtggtgcttcaaagccctgagaagaatatttctttggaccccaggcactaggggccacctgcctgggagtctccctgcctcactcctctaggcaggggagtgatgcttnggacgtgacaggctgtactaacatgtncctacctgagggctanttgaaggatccnggagtanngtcttcttgngngnnncctgaacanannngaangccgtaganaccaaccnataccaagtntgctcatntggggcctttggcttttaaacgaacttcancttnnnnantgaatgtacctttggncnntctnnccatcatcnangatnttcggtatacncntcngnattcnccntattgaaanctcnngtctttt

SEQ ID NO: 28675 - DNA, 463 bp, Homo sapiens
ggatgaattgctcatgatttaaaaaagagaagaggaccaatgcattctgttggcatcatttccagctcttcatgcagtctgaaattagttaagataactctgagagctcggtgaataaccctgatgatacaacactagtttggttcttgctggcagcacatctcagacccagggaaagccagtgctggtttcacctgtgataaacaagtgacattatttcttgaaaattctcaggctgggaagtgccttgcatatgactcctggctgggtggctggattcaggcaatggcctaggatttctgaatggggatttgagctcctgggcagtaatgactcacaggtctcttgggagagagacagagaatgcccagtgatcgtgagagagaggtggccacaggcagcgaagcccagatcttccatttgcttgaactgctgccagctgactcaaaagtgcaggtgacac

SEQ ID NO: 28676 - DNA, 473 bp, Homo sapiens
  misc_feature (1)...(473): n = a,t,c or g
gcttgtatggctttgaaccaagagagggttatgagcctactggattgaggttaaaatccaagaaccaacatttacagctttgtgcttttctctcattccatcactttgtaatgatgatacttaacatgagcagggtgaatgacaggtactgacgaagtncancacaaaggtntnatacnncctgnngnnncaagccnnggagncntngnnccatgagaaananatangaancngtagntantaaggncnttgaggnnctntaaaaanannnccgngagctggtatngaataccntncnngcctcagancctagtcaggggagccagncnngacccantggctttgcctgaggccctcgctttagaangccaaantgccnggangcttgaganaaaantgnccacacgcngctngcccaanctttccnttnctnnatcnggatgccaagntgacncaaaagntgncnggggaca

SEQ ID NO: 28677 - DNA, 435 bp, Homo sapiens
gccggaagtgactgcggacgaatcggcgtttgccgaggctggcatagatttggctgtctccgctcatagctgcttttggcgcgaaagatgccgggtctggttgactcaaaccctgccccgcctgagtctcaggagaagaagccgctgaagccctgctgcgcttgcccggagaccaagaaggcgcgcgatgcgtgtatcatcgagaaaggagaagaacactgtggacatctaattgaggcccacaaggaatgcatgagagccctaggatttaaaatatgaaatggtggtctgctgtgtgaataaataattcctgaagaatgaagaagattaattttgggagttctttgacgaactttgatatgtggaaaaagtatttataatttattgtaagaagaaagtaaaatattactagtggaagatcttcaaaaaaaaaaa

SEQ ID NO: 28678 - DNA, 432 bp, Homo sapiens
  misc_feature (1)...(432): n = a,t,c or g
gcctcatcaccctctgtaggtgctcctgtagtagaaggtgtagtacaaggaacagaggccgtaccaccaaagagctctaggttccactcctgctgcctctattgcttattagttgcgggactctgagcatgttacctcacatcccttaaacttttattctcatatgtgcacaatgggtatggtaatgtttaccatgcaataatatggggattacacaagacagtaatgaatgtaggacccttattcacagttagcgctcaatatatagtctctgtttttgtaattacatctcatctcaccctaccctccactgtttgaaatttctgaaagccttttagttttttttttttctctaaagggattctnacctctagttntcatgaaaccatgggntaggtttttaactanacatgaggtgctggacaagtaatt

SEQ ID NO: 28679 - DNA, 444 bp, Homo sapiens
  misc_feature (1)...(444): n = a,t,c or g
gggaggaagaggaagaaggaggtgtgcccgctggcgccgccccctgagcttcacccccctgcccctgcccccagtaccattcctcgactgcctcagctgccccggcagaaatgcctggtggctgcaggtgcctggggagctggggactcttgccgacagggagcgtggaccctggtctccaacccattctgcccagagcccagtccccctcaggatccatttctgcccagtgcaccggcccccgtggcatgggctcatggccgccgacagggcctggggcctattcactcccgcaccaacctgatggacacagaactcatggatgcagactcggacttctgagcctgcagagcaggacctgggacaggaaagagaggaaccaataccttcaaggctcttcttcctcaccgagcatgcttcctaggatcctgtcttcananaacc

SEQ ID NO: 28680 - DNA, 415 bp, Homo sapiens
  misc_feature (1)...(415): n = a,t,c or g
ggatgaacagtttcaggtagtaggatgataatgttgtatctcatttttgtggccttcctcactgttttaataatcatgttagtgaccatttattgagtctcagcacagtgctaaatgctctccatatgtggtatcattcaatcctttcactttttatggatgagaagactgaggtttagagacctaccacattggtaggttaatgatacattcatcaaaagtaacaaccttgttaggaggagttgtttacagaggatatactagtactctttcagttttaactaaagcttccatttactgatagctcaattttgtgccattgccagtaaaaacaannnnnnnnnnnnnnnnnnnnnnnnnnnnnnnnnnnnnnnnnnnnnnnnnnnnnnnnnnnnnnnnnnnnnnaccaacttgg

SEQ ID NO: 28681 - DNA, 391 bp, Homo sapiens
  misc_feature (1)...(391): n = a,t,c or g
nnnnnnnnnnnnnnnnnnnnnnnnnnnnnnnnnnnnnnnnnnnnnnnnnnnnnnnnnnnnnnnnnnnnnnnnnnnnnnnnnnnnnnnnnnnnnnnnnnncttaagttgtgnnnnnnnnnnnnnnnnnnnnnnnnnnnnnnnnnnnntatagacctcacctgcattttcaaatgatgtctttgctgagtatggaatgtggggctgacagtttgtctttcagtatattaaagatgccactccattgagttctggcttgcccacttctgactcaaaacacacgcctcctcttctgccatatagtgccggggtgtgagtccatctagtcagggtcaagctgggtttgcgttttgngattgctgnggntaccgttcantgnacttggggcttcagg

SEQ ID NO: 28682 - DNA, 402 bp, Homo sapiens
  misc_feature (1)...(402): n = a,t,c or g
ggtagggcacaggaaaagatggtaccattcttatagcttttggatccaaagctaaagaacagtattagcattggtaagattggtgatctcattaaaaagttattaactgtattaagttttacaagttgttaacagcattgtatatagaaaataatggaggtattaaaggtccaaatgatgcaaattaacagaatgtaatgagtagcttgtatatgaagctgtatttagttcatagcttatacagatacagtgtagcacaccatcttctattntaatatttatttattgatcattttggcanatatttattggatatctatgngccgggcactgttctaaatgccnagaatatgccaattagtnnaattggccaaattcnatncccnangnggtttncttttg

SEQ ID NO: 28683 - DNA, 397 bp, Homo sapiens
  misc_feature (1)...(397): n = a,t,c or g
ggcacctacaagcaggagtgtttcattcagtctaatctttagggtctggggtctggaaagtctctaaagccttggaaaattttctttaatcttaagtggccttgatacaaggtatatgtgtaagaatgccttcgatcatatgttagggtctgataaagtccaggcgaggtcttaatgtatttggtttcacattccaggccttgtctcaggcaccatgtttctccagcttgaatgtttaacttatgcattcatcaaaattacaggaaagggatagtggaaactggctgnnctgnatgctgatgacaacctgttgccanaccctggngctgggcattganggaaccactacaagagaaaagaattctggagggttntngnccnaaaaattctnaaaggg

SEQ ID NO: 28684 - DNA, 391 bp, Homo sapiens
  misc_feature (1)...(391): n = a,t,c or g
gcggcacgagtgaattaattgcttaggcgataggtgtaggggcagaggcacattaaggttgatcttgacccccctcactgcttgtgtgacctttctggacataggttccctatctataatatggagataactgctcttcaagtggatgggtggattaaataagaacacatgcaaagcttctagtacagtgcttttcagttcccctccccttgtccagccttagaccacagagtcctcgtctttgacatggggagctagctgccatctccacccctagagaattataggaaaggtgaggctttatttagataaagtaaggtgttagtaatttgagcccagaccctcgggcagtataagagtcaccgtatccctanttgncttttntgactca

SEQ ID NO: 28685 - DNA, 436 bp, Homo sapiens
  misc_feature (1)...(436): n = a,t,c or g
gagacgggacagccctgtcccactcactctttcccctggcgctcctgccggcagctccaaccatgggaggccgcgtctttctcgcattctgtgtctggctgactctgccgggagctgaaacccaggactccaggggctgtgcccggtggtgccctcagaactcctcgtgtgtcaatgccaccgcctgtcgctgcaatccagggttcagctctttttctgagatcatcaccaccccgacggagacttgtgacgacatcaacgagtgtgcaacaccgtcgaaagtgtcatgcggaaaattctcggactgctggaacacagaggggagctacgactgcgtgtgcagcccgggatatgagcctgtttctggggcaaaaacattcaagaatgagacgagaacaccttgtcaaggtaagaaccaccccacgttctntgactt

SEQ ID NO: 28686 - DNA, 421 bp, Homo sapiens
  misc_feature (1)...(421): n = a,t,c or g
gggctgcctaagcctgataactttgtggctttttgaactggaggctctggcaagtcactgctcttctcagagcagtttccttttctgtaaaatggggtggtgataggggcgatgaagtgatttgagtctatgagagaagcgacctttggacattttctgaccttctcccttcagtcataaattctgctaggtctgggtttctgaaagagctaccagacagtgtgccttcctgtccggggggctttgtagggggtgctcattaaatgcttgaatggatgaataaattaacacctaccttcatccaaggccagtgcctgagcctgcccacccaggggagctggtttgaacttcctcctctttcttcacaagcagagcaaaggtcagggcctctgcanagcctggaagatcactgggtcaaagt

SEQ ID NO: 28687 - DNA, 431 bp, Homo sapiens
  misc_feature (1)...(431): n = a,t,c or g
gaagacagcttcacattctcttcagctgtcaggattgagagtggcggattcgggaggagaaaaatgagtcagtggcaactcgttgtgtgtgactgtgcagtttatctgagtccgcgggagccatagtcgtaggctgaaaatgacccttatttaagagaggctgagtgcgtggttgtggctgcccaggcgctttgctggactaggcagcctgggaacactaactgagaagtggacggggacaggagccagcctgcggtcctcagtgtcttacagtttcctggagaagtggatgtttcggcaggaanatggtgggtaaacacctggaacgatccattctgctcacttttctacttccctgtaccagtgccatggaatgagaggcagctccattaactcgtttaagatcctcataaagggagtaatatcctgta

SEQ ID NO: 28688 - DNA, 438 bp, Homo sapiens
  misc_feature (1)...(438): n = a,t,c or g
gctggggatgctgctgcagacagtggaggcacagacagtttctagaaagggaagtggcagaataacatgaaatcccccagcagtaggtgcagaatgcaaggtggggtgggggtgatgaggaaccagttaggaggctatgacaactgtccatgccatggacaaataggtcttaaacttgaccatgggcagcgtggcagaatgtggctgggtggagggcaagatggaaagcgggggtgtgtaaagacccctgggttttgcccagtatgcagctagaaaggtctgcagctaataaatataaccacgaatgtcacagaaattggctgcgaatagtaacatcctaagatctccaaggaggatcacttgagcccagnnnnnnnnnnnnnnnnnnnnnnnnnnnnnnnnnnnnnnnnncctgggtgacacagtgagaccctgtct

SEQ ID NO: 28689 - DNA, 485 bp, Homo sapiens
  misc_feature (1)...(485): n = a,t,c or g
gccattctagcagtgtcatattaggttaataaggctgcngtgttttaaagggcatttttatttgggttttggtgaaattctttaatttgttgattatattcacataaaatcagcattcattgacacatagctctaatgacatatgtatgaaaaaccatacactggatgacctagtcgattatttaagcataaaataaattgtgttaaactcttcacctatctgtgctctacagtctccttgtgttttctggcaaaaggtagttgtctaatcccttgtcatatgagtcctggccaatccaccccattggtcctctttgtgcctctgtggcactgaagagataatctctaacattcatatgtgccctgcaagctcccagcttataaattctgngcattcatgggggagcccaagaattaaagattaaattggccaggaagcttttgccacatttggtcangccttttttgaaaagngaaaaaatgga

SEQ ID NO: 28690 - DNA, 468 bp, Homo sapiens
  misc_feature (1)...(468): n = a,t,c or g
gaaattcatgcatagttttttcatcatatgcattttccatagctttgaacacccccatgtaactctcctcttccacaaaccaaacaatgaaaaagcacctttgtgatggaagtttattttgcaataggaactcacagtgatctaagccctgctattcatgaatataattcattactggagtccaagttgctttttggtttttgaagttctcttcttcccttgcaggtatagaacaagatgcagtgaatacttttaccaaatatatatctccagatgctgctaaaccaataccaattacagaagcaatgagaaatgacatcataggtaagcagtgcttgaaactatggcaaaaaaaaaatgacaaaaaatgcncagaactgacaattttcgttattgactaananaattttttcttaacatggaatttacnagcccttccaaattgggttctgggganttttaanacgg

SEQ ID NO: 28691 - DNA, 483 bp, Homo sapiens
  misc_feature (1)...(483): n = a,t,c or g
gcgatctcacaaaataataaagtagtgaggaaatactgaagaattttaagcaaggcttcagtggagaaaatgtttaagtctggatgctggtagatcatttattttaatttgggttcaagatgatagtgtcctggaacagaagctgattacacgttctgaccgtcatttctcatagtgtctataacataggcaaaataatagctccagtgtccacaggcacgcctatggaaagaagggcatctggaccatgtcacacactccttcctctccagtacccagcctgcttcctagtccacagctcttccagtagtggttgtgccggggagcattgagaagatctggggagcacaagtggggcaggtcaaatactattggagtgcattgccctntagaaaaggagccctgaaatccccaagtaaaaangcaggcangncanntnagaccccccangctttntcccccttnaanccttgggggnggggg

SEQ ID NO: 28692 - DNA, 475 bp, Homo sapiens
  misc_feature (1)...(475): n = a,t,c or g
gcaaaggaagtccgacaggaaaaccgagaaaaaatgaacagaagaaatttgataaaaaagtaaaagaattgcggcgagcagtaagaagcagcgtgtggaaaagggagacgattgttcatcaacatgagtatggaccagaagaaaacctagaagatgacatgtaccgtaagacttgtactatgtgtggccatgaactgacatatgaaaaaatgtgattttttagttcagtgacctgttttatagaattttatatttaaataaaggaaatttagattggtccttttcaaaattcaaaaaaaaaagcancatnttcatagatgaatgaaacccttgtataagtaatacttcagtaataattatgaatgttatggcttaaaagcaagtttcagtgaaggtacctgcctggttgtgtgcaaaaggcatgctgggaatgcctttttacacnaaaatnggaacttantnctnaaatngggcc

SEQ ID NO: 28693 - DNA, 477 bp, Homo sapiens
  misc_feature (1)...(477): n = a,t,c or g
gaattataataatggtgtctttcaccctctttctgatcatttttcgattattttggctctgtttcttttagagcaatgatcttcaacttaggctgcacattagaatcacctggggagctttaaaacctgtcagtgcccagctgcaccctagactacttcaattggaaactccagcaggacccagaaatcagtatttggtaaaacttcccaggtgattctattgccaccaaatccattgttttaaaggaatagatggtaagcttttcttttctttttttttnctttncnnnnnnnnnnnnnnnnnnnnnnnnnnnnnnnnnnnnnnnnnnnnnnnnnnnnnnnnnnnnnnnnnnnnnnnnnnnnnnnnnnnnnnnnnnnnnnnnnnnnnnnnnnnnnnnnnnnnnnnnnnnnnnnnnnnnggngnaccacccnaactggttactttttggaatttttgnaaaaanccggntttaccct

SEQ ID NO: 28694 - DNA, 462 bp, Homo sapiens
  misc_feature (1)...(462): n = a,t,c or g
ggannnnnnnnnnnnnnnnnnnnnnnnnnnnnnnnnnnnnnnnnnnnnnnnnnnnnnnnnnnnnnnnnnnnnnnnnnnnnnnnnnnnnnnnnnnnnnnnnnnnnnnnnnnnnnnnnnnnnnnnnnnnnnnnnnnnnnnnnnnnnnaaacaaaaaaggtggttgcctntttgtgacagtgaaggctggaanattanactaaaacaacagtcttttcctatgctaaacttttcatttgaagttagaccncagaaaatataaaacaaaagggttttaagcttattgnatatgatttaaaatatatatatatatataancagtagatgaaaaggccgtntttgatagatctganatgttccaggagtanaattcctgctgctnngtgaaaaggaaccgggtactccatntttgaaacattttttngaaacggggnaaaaaccccggggaacctggtnttgggggaa

SEQ ID NO: 28695 - DNA, 454 bp, Homo sapiens
  misc_feature (1)...(454): n = a,t,c or g
gcaaatttagcaatttaatttcccaaagctctttgaagaagcaagagagtctctcttcttaatgcagtgttctcccaagaggaactgtaattttgcttggtacttatgctgggagatatgcaaaatgtgtttttcaatgtttgctaaaatataatgtttcctcttcagtgtctgtttcatcctggaactcatggcttaggagggacttcttggagccggtagacatcatgcgaatttcatcttcatactcatcatgatgctgcctgagccgatgaaagccatccttgngctattagacttgattgagcagatgcaccaaataatgcaagctgttaggatcaatgccgacatagtagcacctgatacagttaccacaagctcccttggcaaaccaaatatccggttatctgtgcaaagactatcaccacagaactagctgcatcatgatgcacaa

SEQ ID NO: 28696 - DNA, 480 bp, Homo sapiens
gcttaaagtacaacctttgttgtactcatcacaggcagaaatattcttcctactcatcacaggcagaaatattcttcatttgaattatattttaatttgggattcttttgggttcttttccaggggttggatgcccctaccccttaaagatgcttgtcttctgatcatcagtgaattgaggactagcagaggctgtacggtgtttaagttaatcttcaaatgcaagcctgtatgctacattatgttaggcacaaaacttgaaccttaagtccaaatacatagttattttgtactttggtctaacagggctgacagagagtggtgggaagggagacaacggatttgacttctagaaaaaatgtcaacctctctgggcagcattttcttggcacctttctcccaaacttgatgatcactacctgttcgtggtgacaagccttgcttattcaatcctataaatatagtatcatgggggtaaaa

SEQ ID NO: 28697 - DNA, 490 bp, Homo sapiens
  misc_feature (1)...(490): n = a,t,c or g
gggggctgtgactaatgggaccaatggggaaatgcatgggcctcactatttagtatacatttctgctcttgcgtgctccagtgattcaatgcatatactgaggtgggtgggggagggacacccacccagcgacactttggaaaggggatggcagttgtgtgggtttcactaacattttggaaggaaggctgcagggatgcagagctggggagtgacagctatggtgatttggtttttcctataaatggtttaaaaaaatcctagattagattttactgtgggagagagaacaaaactgcaagcacccaaggaaaatgaagtttggggtctgtgcccacactgggaaaaacttgactcaaaattaaggtaagtgatctaaagaatcactttaaactagttcagctcttacagtgtagaataanaatgagctggtaaaaanaaaagttntacnagaaaatcccaaannnccagatgttcccttaggctaaag

SEQ ID NO: 28698 - DNA, 488 bp, Homo sapiens
  misc_feature (1)...(488): n = a,t,c or g
gnnnnnnnnnnnnnnnnnnnnnnnnnnnnnnnnnnnnnnnnnnnnnnnnnnnnnnnnnnnnnnnnnnnnnnnnnnnnnnnnnnnnnnnnnnnnnnnnnnnnnnnnnnnnnnnnnnnnnnnnnntggtgcctcattgctggatcttccaaaagggatgaacgtatgttctcgaatgacagaaaagacagaagggcagaaagtgtccaaactcactccatcaatcccttttataaggtgctaatcactccctaaacannnnnnnnnnnnnnnnnnnnnnnnnnnnnnnnnnnnnnnnnnnnnnnnnnnnnnnnnatacagacattcaaaccacagcattgtgcacactcctttttctatggaatggccaaggtgcagctatttgcagaggctctgacagagctccgctgtggagctggggtgccacatgcctgtatggaanaactttcatggcaccggagcctggtggnaananaantgggctgggctaa

SEQ ID NO: 28699 - DNA, 443 bp, Homo sapiens
gctgagctttcacactggagatgttttgaaggtaggtgacctggggccccaggggagcagtagggagtttcagttactcagtaatctgacagtccctgcctttgtctcttaagaactgcatgtggttccttttaaaaagagaagttcaccttgattccctttgtgcacccttataccagacaccaaccaggccgggtgatggaaatacagtcggcataagccaccatccttgtcctgggaggttcgtagtctggagaggggaacacatccacccaaagggctgttacagatgttcttggctaagttctcagggagcacaggtgagggaacaagtgattccatcttgaaagatgggggttgtaggagtgtgtgcaatgtgaacgtcaggaatgcactgaaagtgacttgggcttttagctaaagctcacagatgtgcaagccca

SEQ ID NO: 28700 - DNA, 496 bp, Homo sapiens
  misc_feature (1)...(496): n = a,t,c or g
gagaatccactcccttttcaggctcaccttgaagtaacctgtggattatggtcctaaaagcccagctgtantaaaatacaannnnnnnnnnnnnnnnnnnnnnnnnnnnnnnnnnnnnnnnnnnnnnnnnnnnnnnnnnnnnnnnnnnnnnnnnnnnnnnnnnnnnnnnnnnnnnnnnnnnnnnnnnnnnnnnnnnnnnnnnnnnnnnnnnnnnnnnnnnnnnnnnnnnnnnnnnnnnnnnnnnnnnnnnnnnnnnnnnnnnnnnnnnnnnnnnnnnnnnnnnnnnnnnnnnnnnnnnnnnnnnnnnnnnnnnnnnnnnnnnnnnnnnnnnnnnnnnnnnnnnnnnnnnnnnnnnnnnnnnnnnnnnnnnnnnnnncaaaaacagaagaaacaacttccttaaactcttttcagagtaagacagttgaacctttcttggatcactaaaganctagaaatttggtgcgagtgctaaccttgggccctgagcttggca

SEQ ID NO: 28701 - DNA, 500 bp, Homo sapiens
  misc_feature (1)...(500): n = a,t,c or g
ggatgccaccttcagatgttggcgggctgccatgggaaggggtcaggtgggggctggcactaggcctgtgggtagaagtaccngtgggcgactttggctcagcacagaacacgttctaacatctggggctgcgtaaccatggagtctgcaccagccagtggctaacagtctcagtgcaaagtctgggggcccggaggtgttgctgcaggaggcggcaggcggtatggcctcttgcagccttgcagagccgagggtctcaagtgctctgagtgtttcctcctcttcctcttctctgccggtcaccgagtctggttttctttctctgaaccccccagaccttccgatctctgttcccggtctagctcgcccctcactgtgtctaagggagcttcttaatctagagcagttgtgcctgccggtggcgaagcggtacacccacgcacaccatggagatacctccctttagaanggttttaatgaaattactattgnccataaat

SEQ ID NO: 28702 - DNA, 504 bp, Homo sapiens
  misc_feature (1)...(504): n = a,t,c or g
gaagagccaccttcatagcttacatgtgattcctctgcttatacaacccaatactggatttacttactttgacccttcgcgttacagtcgggtgaaagaacatggtgttgggaaaagaaagagcagttacacatttgaacagttggaacaggtgtttggtcagggaggatgggatgctcagccctgccagcctgtacttattaacagtagtggcttgtaccaggagctggagtcagatggcagcactatggaggactattcacaggaggactggggaaaccacagtcaggatctccatggctatccaacagatcaggaattggatgaaatacctgtcacaaagagaacattaaaaataaaacaagagtcttctgaagaagcacagaagagagacatcatgcagaatattgtcagattttggaatcggtacagttgaaatgggaactttttnagagctggacagactttttaangnttcatctttntaataactggcctttttgg

SEQ ID NO: 28703 - DNA, 497 bp, Homo sapiens
ggtttttgaaaattattgtgttttcaaggtactagggtaatttggcatctaaaggaataccaatgaattgaaatgaataattatttccctaatatatcttttgagtaactcctgcttttcctgatttgggtttgtttgaagcaaggcacgtctatcatatgacagattcacacacacatattttctctgctgttagtggccacagcacatactgagaagcaaagcctgtgctttcaacctctgcttccctggaagcacttccatgatttcctgatacttaagaatcagcatgagatcacaagcatgcatgtcagagctagacagcctggcttgaatcccatctcctctatgcatttgttgtgtgacttacagcacactgttggacctttccgtgcctttgtttcttcatctgtaaaatggggatgtatgagggttaatgagttaatagatgaactaatatatatcaaatactcggaccagtgcctgttgacaggaaa

SEQ ID NO: 28704 - DNA, 504 bp, Homo sapiens
  misc_feature (1)...(504): n = a,t,c or g
gcccagtttacattgctgaggggaaccatacatcagagttacgttctgaaaaattggagactggtaaggtcatctcagttttatatttcagtattgtctgtagtatgttctttctttttaaaagaggcactcaaaactggggtttttttagccagttactttttttaatgttttaatttgcaagtttttttaaaaatgaaatactgtcactatggggagattgatatattggaagattttgtgattttgatgtctttcacagtttgcatgcagataagtaggagctgaaaaggaaatctctggagaaaagtagcagtagatctgctggttttctttgttatgaccagtaacatatgtatttacctttattttgatttttatatatacacacaaagtgcagtgaatactacataatgcttattgatcaatatactgnttttcgggacagaaaactagattgnatgacttggcctaagaaaaatnttattgnaaaaagtttaagaa

SEQ ID NO: 28705 - DNA, 487 bp, Homo sapiens
  misc_feature (1)...(487): n = a,t,c or g
gggaacttgatccagttctgtcctcagatggaacacttttttccccattcctgaatccaggaatacggtgatgattccagggattcagtaactatttctgacacctgtgtcaggctgtgttttaggtgtgggggttacagcttcacacaatggaaaggaatcaccggtgccctcttggagcctccttttaaagagaaaaggctgacgacagacaagataaatccatcagatatgcacagtggtatttcagatggtgatatatgctgtagataaaaataaaactcgctggggataggaagcagagaagtgcagttctaaataaggcggagtggtcgacctctttgacaagaaggcatttgagtaaagacgcagcccgggtgagggagtgaggcacagggctgcatggggaanaatgagattaaaggagcagnaagcccaaagcttcaagggggcaagcattcctggcaggaaaagcttgangccaaaa

SEQ ID NO: 28706 - DNA, 480 bp, Homo sapiens
  misc_feature (1)...(480): n = a,t,c or g
gcggcacgagagctgtcaacatgtgttactaatagttaaaggtttccagaaaattttcagtatctccctgccaatcaataaagatagcatcacactcatcaccatagctttagttgtcagaaatggtgtatttattgactaaatgcagcactttgaaaaggcaaaaaggagagttaactttgaggaagtagtgattacggaatttcagtagcagtaatttcctctcactctgaataatattacagttatggatatttccctattcttaggactaaatacttatttagtagttatataactttggaaatacagcacaatactttattagttcctatcattaaaaggtccatgaatagaaaatggcttacttgcatttggaccagcccaccaaaaaatcaacattggccaaatgcagatgaaaggttgattctggagtttaaatgcngagtttattaagtaacatgnttaataaattataac

SEQ ID NO: 28707 - DNA, 486 bp, Homo sapiens
  misc_feature (1)...(486): n = a,t,c or g
gtgacttttggcggatggtgttccaagaaaactcccgagtgattgtcatgacaacgaaagaagtggagagaggaaagagtaaatgtgtcaaatactggcctgatgagtatgctctaaaagaatatggcgtcatgcgtgttaggaacgtcaaagaaagcgccgctcatgactatacgctaagagaacttaaactttcaaaggttggacaagctctactccaggggaatacggagagaacggtctggcaataccactttcggacctggccggaccacggcgtgcccagcgaccctgggggcgtgctggacttcctggaggaggtgcaccataagcaggagagcatcatggatgcagggccggtcgtggtgcactgcagtgctggaattggccggacagggacngttcattgtgattgatattcttattgacatcatcagagagaaaggtgttgactgcgatattgacgttcccaaaccnttcngaagg

SEQ ID NO: 28708 - DNA, 499 bp, Homo sapiens
  misc_feature (1)...(499): n = a,t,c or g
gagagtgttgcttcggtcactagcccaggagacatttccccacccatagacctagtcaagaaagagccttatgggctttcaggactgaaaagagcttctgcttcttctctcagatccatctctgcagctgaaggaaacaagagctacagtggatctattcaaagcttaacttctgtaggttccaaggagacacccaaagcttcaccaaacccagacctgcctccgaaaatgtgcaggagattaagactagacactgcctcaagcaatggctatcagcggcctggctcagtagtggcagcaaaagctcaactgtttgaaaatgttggttcacctaaaccagtttcttctgggcgccaagccaaagccatgtactcctgtaaagcagagcacagtcatgagctttccttccacaaggagcaatattttctaatgngnacccatcagtggaaccaggaagggtaaangccacttatgaagggaaaccggnttnttcccaaaa

SEQ ID NO: 28709 - DNA, 399 bp, Homo sapiens
  misc_feature (1)...(399): n = a,t,c or g
gactggattaaaataaaaattatagttactttatatatgtacttattataagaatcaggcacagggctgagtactttacattatttcacttaatccttaaaataaccttaccaggtggaactagaattattcttcttctgcagatatgaaaaatgaggcgcagagagggtaatggctcaagatcaaaaatctactgtgttgcagattccaggccctgtgctcttaacctcgacattggactgcctcatttaagaaagaagccatctggatctgcacaagataaagataactagtcaaagggcaaaatagtntaagtctctctgnnnctggcctctttctccttccctccctctctcctcccttgcctaagngagngtgngnntttnagcnnnttcatat

SEQ ID NO: 28710 - DNA, 469 bp, Homo sapiens
  misc_feature (1)...(469): n = a,t,c or g
gatcttttttgagaatttaaaagattactttttccaactcctttcatactggtaaagaattaaaagtattaaccaaagtaccaaattaatatcagataaaacctgacttcatgattttcattaagtattaaaagagtcagtgtaaaaatggtaaatttgatgttatgttcatctaaacaactttggccaaaatgcaaattttccatgctttgaggaaattgtctcttgaatttgaaaaaagttgggcataacatcttggctcttctaattcctctctcctcttcccaaagagaatggttagttctagtacttctagcccaatggttctcgtgtagtcccanatnnnnnnnnnnnnnnnnnnnnnnnnnnnnnnnnnnnnnnnnnnnnncaagccccatccaagacatactgaatgggaanccatgagggntgggaacancanctgtgttttgcagccctccagntgagt

SEQ ID NO: 28711 - DNA, 465 bp, Homo sapiens
  misc_feature (1)...(465): n = a,t,c or g
gagtgagatggctcttgagaaacccctgtcctccctgttggtcaaatgctaagaaaccaaacttaaggcaaagaagcatagaatctcacctcttcaccagacagggccacggtgttgagccaatagtaacaaagaatgccaatgattgatattttcaaaaagatgtttctaaacagaagagacaacatttatgattaccttcaatggcagtctttcattctgtctgcaaatagctcctttggggcacatggtaagatagaaattcctggcccctgtggttggaggggggcacatggctagttccagtgaatgaattgtgaacagaagcaatgtgtgtaacttcnnnnnnnnnnnnnnnnnnnnnnnnnnnnnnnnnnnnnnnnnnnnnnnnnnnnnnnnnnnnnnnnnnnnnnnnnctgnaananccgctccaggttcacgcattctcctgctagnttcccgaaa

SEQ ID NO: 28712 - DNA, 468 bp, Homo sapiens
  misc_feature (1)...(468): n = a,t,c or g
gccctagccactgctgggaccttgtgttccccaagagtatctgattcctctgctgtccctgccaggagctgaagggtgggaacaacaaaggcaatggtgaaaagagattaggaaccccccagcctgtttccattctctgcccagcagtctcttaccttccctgatctttgcagggtggtccgtgtaaatagtataaattctccaaattatcctctaattataaatgtaagcttatttccttagatcattatccagagactgccagaaggtgggtaggatgacctggggtttcaattgacttctgttccttgcttttagttttgatagaagggaagacctgcagtgcacggtttcttccaggctgaggtacctggatcttgggttcttcactgcagggacccagacaagtggatctgcttgccanagtcctttttgcccttctgccacctcccgggttccaagcagctt

SEQ ID NO: 28713 - DNA, 415 bp, Homo sapiens
  misc_feature (1)...(415): n = a,t,c or g
gcggcacgagctgggatcttcctgcagtcctctcggccatctgccttcatggtggggggcagtgtgcactggctctccaacttcaccgtgggcttgatcttcccgttcatccaggagggcctcggcccgtacagcttcattgtcttcgccgtgatctgcctcctcaccaccatctacatcttcttgattgtcccggagaccaaggccaagacgttcatagagatcaaccagattttcaccaagatgaataaggtgtctgaagtgtacccggaaaaggaggaactgaaagagcttccacctgtcacttcggaacagtgactctggagaggaagccagtggagctggtctgccaggggcttcccactttgcttatttttctgacttctagctgctgngaatatccagaaataaaaca

SEQ ID NO: 28714 - DNA, 416 bp, Homo sapiens
  misc_feature (1)...(416): n = a,t,c or g
gctaacaggagccagggttaggattcaaaccccatccaacnggtcccagagctggagcttcttgcactgccctacactacctaccatctccatcctctgggcacctttttataagaaccaaaacattacagagcattgctttgtcaactcagctgggaacatttcccagtgcaactcacatttttcactgctctgtgcctgtccgtataagctcaatgagtattgatttaggggctttggagaactttgaatgctaccccccaagtaaccattgttggcaacctggtacctctacttttagccatttctccttctctataaataagtgcagaagtaacccacttggtaacaggcatccttgccaagccttcaccactaggcaagtgnaagaattaaagaaagaggaaggaacccca

SEQ ID NO: 28715 - DNA, 429 bp, Homo sapiens
  misc_feature (1)...(429): n = a,t,c or g
gaagagtttttcctatgttgtcagagaaaggaacagatcactgcaaagaagagatttgaagttcatgttttgatctctgtcctattatatcaaagatgaaaggaaagaaaaattatggaacaaatgtgctagggagaggaaaattcttttcctcttgtttgtaatgctcagtacagaggacaaatccatcactccctccctcagtaactaccctattgtcactgtctctgaagatggagcctcttaggcagctgagggtattcaggctagtctagtttctgataccttctccagggccacttagcccttgacttgcatgccaaggtggccaggtaaggagactttgaagaaccttttgacaataccatgtanccttttgttttgtctttgatagaactggacattttaagcttattttntgagtaatgg

SEQ ID NO: 28716 - DNA, 422 bp, Homo sapiens
  misc_feature (1)...(422): n = a,t,c or g
gctactactggcctgccgcagcatggactgttacctggccattgtccatgccacacgcacactgacccagcagcgccacttggtcaagttcatatgtctgggtttgtggaacctgttcctgttactgtccctacgcatcttgcttttccgaaggaccttctacccatccaatgttagcccagtctgctatgaggacatgggcaacaatacagcaaactggtggatgctgttacggatcctgccccagtcctttggcttcatcgtgccgctgcgatcatgctgttctgctacagattcaccctgcatacgctgtttaaggcccatatggggcagaagcactggaccatgtgggtcatctttgctgttgcctcattttcctgtctgntggctgcctacaacctggnctgctggcaaacaccctt

SEQ ID NO: 28717 - DNA, 440 bp, Homo sapiens
  misc_feature (1)...(440): n = a,t,c or g
gcctatgtgtatttctgtggcctagaatacgttaagcaacctgagaattatgtcttaaaaagtgttagtaaccctgtgccttagtggtagcattttatatttccagtttcttctgaagataccgttttcagggtcttctctctcttgcttcttgggttacttttgaccattacattttgctaagagatcgttaattttgtattgctatgtaatttttaaagatatttggaatttatggaaagatcaccaaaaaggcactttgggtgtgatacgactgaaatgtgttttacagtctgactggagaactcagctgccatgcatcacagggcagtgctgagtcttatgccttctggcttttaattgaaaatactgccaagtgctgaggtcatggcccggaccatttntccctcataggaagtagggctncttggagaangtgg

SEQ ID NO: 28718 - DNA, 428 bp, Homo sapiens
  misc_feature (1)...(428): n = a,t,c or g
gaccagcaaacagccaattactacatgtgcagaataatggtggcaattgtcacttcgctgtcccctgcgaagcaactctttagttctgtctcctctctcagaaatgaattgctccttctcctcctctagctcttccccttcttctccctattgctcaggctgggaactcaggactcatttttagatgctctctcttccttgcccctcacattgaatccatcatcaaatcctgagtggtctaccttcatgacacacttggaagcaatctgcagctctccccatgtagaggttagaagtaccgtaatccatgtgagtggcgccccctagagctcatgagtacatggcgtcatggccactgcaaacaccctacttcaggccatnatttctgccctgaccccactatgggcttctgctgctctcacagcttc

SEQ ID NO: 28719 - DNA, 412 bp, Homo sapiens
  misc_feature (1)...(412): n = a,t,c or g
gacaacagcaaaaaaaagnnnnnnnnnnnnnnnnnnnnnnnnnnnnnnnnnnnnnnnnnnnnnnnnnnnnnnnnnnnnnnnnnnnnnnnnnnnnnnnnnnnnnnnnnnnnnnnnnnnnnnnnnnnnnnnnnnnnnnnnnnntgnnnnnnnnnnnnnnnnnnnnnnnnnnnnnnnnnnnnnnnnnnnnnnnnnnnnnnnnnnnnnnnnnnnnnnnnnnnnnnnnnnnnnnnnnnnnnnnnnnnnnnnnnnnnnnnnnnnnnnnnnnnnnnnnnnnnnnnnnnnnnnnnnnnnnnnnnnnnnctaagaagagacctnccatatgattcngnantccnactactgggtattnatcccgccgnngcattacgcannctaaggnacccctgnncaaatncnncantttgntnnctta

SEQ ID NO: 28720 - DNA, 427 bp, Homo sapiens
  misc_feature (1)...(427): n = a,t,c or g
gacaacagcaaaannnnnnnnnnnnnnnnnnnnnnnnnnnnnnnnnnnnnnnnnnnnnnnnnnnnnnnnnnnnnnnnnnnnnnnnnnnnnnnnnnnnnnnnnnnnnnnnnnnnnnnnnnnnnnnnnnnnnnnnnnnnnnnntgnnnnnnnnnnnnnnnnnnnnnnnnnnnnnnnnnnnnnnnnnnnnnnnnnnnnnnnnnnnnnnnnnnnnnnnnnnnnnnnnnnnnnnnnnnnnnnnnnnnnnnnnnnnnnnnnnnnnnnnnnnnnnnnnnnnnnnnnnnnnnnnnnnnnnnnnnnnnnnnnnnnnnnnnnnnnnnnnnnnnnnnnnnnnnnnnnnnnnnnnnnnnnnnnnnnnnnnnnnnnnnnnatatcaaaggaacacctgcacaatagccnaaatatagaatcaacctaagcattcatcaac

SEQ ID NO: 28721 - DNA, 432 bp, Homo sapiens
  misc_feature (1)...(432): n = a,t,c or g
gatccacaaggagagtctaatagctgcctttagagttcttctttgctgatcccagcatctcatcttcctgaggttggtccttgtggatctctcctctggattctgagtgacattttgctatttttttagtacatgtagtaatttcaaaatgtattctggacattgtaaatgttgtgttatagagactttgagtccggttacattnttaantgtcattgtatcangcnnnntatttctgnntttnttgngtggcagtagcnananacctctgttcagctcatcctgcnntngactgngatnaatgnctganncancttctngcgncngnnnntatggnantnccccngtnnntanttntggannntncttttnngtgnnttntntnntngannnnataanctntnntatcncaggncantgntnctttnacac

SEQ ID NO: 28722 - DNA, 442 bp, Homo sapiens
  misc_feature (1)...(442): n = a,t,c or g
ggagggaagcacatgtggaggtgctgtggtgaaaacacaacaatggtgcaactagagcttctgtttgaaggtgggaatagggggagaggctattgcaggcagaccagggaggcccctttgagccgtgataactctagactgatgcccgggaggtggacgagatcagcacagaaaacactgtccacaagatagacacttacctgtgtattctgggaaatagctaattagatgagagtacatgattttctcttccaaaagatccttcttgttcaagaataaaatcacagacgaattcagaaaccaggggtaggtgatgatggttttaaataaggctttgctctcttccatgcgattctaagtgaaaaacatgggacttgggatgaagtnnaaaggaaatattttggaaaccacaatggcgcatttgccaggncatncttttttc

SEQ ID NO: 28723 - DNA, 412 bp, Homo sapiens
  misc_feature (1)...(412): n = a,t,c or g
ggagactgcatagggctcnnnnnnnnnnnnnnnnnnnnnnnnnnnnnnnnnnnnnnnnnnnnnnnnnnnnnnnnnnnnnnnnnnnnnnnnnnnnnnnnnnnnnnnnnnnnnnnnnnnnnnnnnnnnnnnnnnnnnnnnnnnnnnnnnnnnnnnnnnnnnnnnnnnnnnnnnnnnnnnnnnnnnnnnnnnnnnnnnnnnnnnnnnnnnnnnnnnnnnnnnnnnnnnnnnnnnnnnnnnnnnnnnnnnnnnnnnnnnnnnnnnnnnnnnnnnnnnnnnnnnnnnnnnnnnnnnnnnnnnnnnnnnnnnnnnnnnnnnnnnnnnnnnnnnnnnnnnnnnnnnnnnnnnnnnnnnnnnnnnnnnnncatattttggatagcagtcctttatcagataggtctttgcaattactttt

SEQ ID NO: 28724 - DNA, 188 bp, Homo sapiens
  misc_feature (1)...(188): n = a,t,c or g
gcacaaaggaaaacaaaaattccttgtagatgagcaggcatggtggcttgccccctgttagctgcgnnnnnnnnnnnnnnnnnnnnnnnnnnnnnnnnnnnnnnnnnnnnnnnnnnnnnnnnnnnnnnnnnnnnnnnnnnnnnnnnnnnnnnnnnnnnnnnnnnnnnnnnnnnnnnnnnnnnnnnnnn

SEQ ID NO: 28725 - DNA, 403 bp, Homo sapiens
  misc_feature (1)...(403): n = a,t,c or g
nnnnnnnnnnnnnnnnnnnnnnnnnnnnnnnnnnnnnnnnnnnnnnnnnnnnnnnnnnnnnnnnnnnnnnnnnnnnnnnnnnnnnnnnnnnnnnnnnnnnnnnnnnnnnnnnnnnnnnnnnnnnnnnnnnnnnnnnnnnnnnnnnnnnnnnnnnnnnnnnnnnnnnnnnnnnnnnnnnnnnnnnnnnnnnnnnnnnnnnnnnnnnnnnnnnnnnnnnnnnnnnnnnnnnnnnnnnnnnnnnnnnnnnnnnnnnnnnnnnnnnnnnnnnnnntctgcctctgtcttcttttctagactgtaagctccaaggcaggggctgggnctgcccttgtcatnnnnnnnnnnnnnnnnnnnnnnnnnnnnnnnnnnnnnnnnnnnnnnnnnnnnnnnnnnnnnnnnnnnn

SEQ ID NO: 28726 - DNA, 426 bp, Homo sapiens
  misc_feature (1)...(426): n = a,t,c or g
ggcacatttgccgcagtggatgtgtactgagggggctggaggcgaagggggggagcatagcataggaacgctgcatagaccatggaggcctttgcgcagagagcagagaggatgacttgcggccaccaagtttctgtctccgcgggagtcccgtgcaagccatcagaatgttgaaatgagggtgaagagctcagatccctctctttggaaagtttagcctggaagcagttggccacactgtgtggagggcacctctctgtcccttccgtgtctcactgtctctggaagcttcagcccatgtgtgtcctggtgttcccagccccaccagagccccgtgccggaanctgacagctttnacgcttaaggacnttngancntgggttggccaancnccnttggacccctggccaatttgnntnggttggg

SEQ ID NO: 28727 - DNA, 429 bp, Homo sapiens
  misc_feature (1)...(429): n = a,t,c or g
gcggcacgagaggaaactgtttaaccggatcccattgtacccagagtgcagagccgcctttccagcatgcaggggctgctcagcgtttagtcacatcaagaaatagaacagaattcagccatggccccaagaaagagaggtggacgaggtatttcattcatcttttgctgtttccgaaataatgatcacccagaaatcacgtatcggctgcgaaatgatagcaactttgcgcttcagaccatggaaccagcattgcccatgccccctgtggaggagctggatgtcatgttcagtgaactggtggatgaactggacctcacagacnaacacagagaagccatgtttgcacttccagctgagaaaaaatggcaaatatactgtagcaagaaaaaggaccaggangaaaacaagggagctacaagttggcct

SEQ ID NO: 28728 - DNA, 446 bp, Homo sapiens
  misc_feature (1)...(446): n = a,t,c or g
gggaaacatgatcggagctgttggctcagccaggaaagtttaaacgagctgtgaattttgaccatgaccttagccactgcagtcacttagcatctggggaaaagtgtaagttcgctttccctgcttttgatttcgatggatgtctgtatgtccttttcagcgtaatggaaatgacagaaaaccatgctggtttttcggnnnnnnnnnnnnnnnnnnnnnnnnnnnnnnnnnnnnnnnnnnnnnnngaagttgtttaaaatgcctaaaagcatcgtttttgtatttttcttccccaagctgagcagggggaagggcaaaacagtatcaggatcgatcgtgtttgcatggagtgagtgtttttggaaaagttgagaaatgattatttttatccagcttaatgactgactcactgaagttcattttaacttcctggcaacttctttact

SEQ ID NO: 28729 - DNA, 458 bp, Homo sapiens
  misc_feature (1)...(458): n = a,t,c or g
gctgggaacttcaccttgccctgagatccagactatggaannnnnnnnnnnnnnnnnnnnnnnnnnnnnnnnnnnnnnnnnnnnnnnnnnnnnnnnnnnnnnnnnnnnnnnnnnnnnnnnnnnnnnnnnnnnnnnnnnnnnnnnnnnnnnnnnnnnnnnnnnnnnnnnnnnnnnnnnnnnnnnnnnnnnnnnnnnnnnnnnnnnnnnnnnnnnnnnnnnnctggccactgnnnnnnnnnnnnnnnnnnnnnnnnnnnnnnnnnnnnnnnnnnnnnnnnnnnnnnnnnnnnnnnnnnnnnnnnnnnnnnnnnnnnnnnnnnnnnnnnnnnnnnnnnnnnnnnnnnnnnnnnnnaaatgtgaaaaagctcatttagtggttgcttcatgagctgagtgaaaatttaaaaaacggctttttgaaatgttgcttatcttattctacacaacaacaaggaaga

SEQ ID NO: 28730 - DNA, 411 bp, Homo sapiens
  misc_feature (1)...(411): n = a,t,c or g
gtgggtgcactagacatcataagcaggctgcgtccacagtatgttgacattgtgatgtcctcctggcctcttccagatacacatgcatcctgccatattctgacagagatgatggacctcaggatcaactaaaaatgtcagtggacttcaggtctagaaggacgggctcctgtttccccagaacagttgggggcatatgggagtctgtggctggggaggggctggcagaaccctggatctcatacatcttaggattcccatgagagggctgaggtctgggggcttcctctgcaggaggaaattagttagtgagagttatggataggatccaagtccccntggangtgaaagggaggctggggctcanagccatccccaccacagtcccatcccagctctgcccgctccttc

SEQ ID NO: 28731 - DNA, 523 bp, Homo sapiens
  misc_feature (1)...(523): n = a,t,c or g
gaagatcttcactaacagatcaaagataaagaattggccttgctgtgcagacagcctcagtctgtagggagccgtaaaactttaacaacagtgatggagtctgtattggtccatttcttctctctcttttcagctaatttccaagcaactttttactctccaaaaaataccttatctgtacttgacaaattctcaaaaagaggaacccccccacactatataaactaaacttcatataaacttgctactggttattttttttaatggaggcagaaagaggctttttatcacccctgagacttctcaacatcattaaanaaaaancaaaantcacnacatgtttcatcatttggcatgcttcaactttccttttcattcttcanatngggggnttcatctagganngnttggcacnttttncaaanaaaaaaatatttnccncntttttgcgnnantggccgantttaacnntngtttnanaaggnggnaaanttttttnctttttttttccnaaaanncggag

SEQ ID NO: 28732 - DNA, 524 bp, Homo sapiens
  misc_feature (1)...(524): n = a,t,c or g
ggtgggaaaaggtagataaatacgctgctcttgttaggaaccaaattttgcccagggagagaaaacagaggaatagaaattaaggcagaagccccacgatgaggctgaaagagctcacaggctccctctggcggccattcagagaatgacccgtggaagggcaggggcggaagcaaggagaccaggccagctgctgctgtccaggagatgtcagtgggcaaggggggctgccctggcttcctgagccatgactctgttgcctctcagtcccctggaactgtgggatcaggctgactgaagccccttgctgcccctgtcacctgcanacagccagctaaaggtgtggatnagcaaatacnngctggagtgccgacnagtcgggcanaatctttatntgtagccnanaanaagagcnttaaccccaagancnntttggagaaaaatggnttttacngngngngggnnccccncggncttgggtttgggggnaaggggnggcccntnaggggggnccggagggggcc

SEQ ID NO: 28733 - DNA, 511 bp, Homo sapiens
  misc_feature (1)...(511): n = a,t,c or g
gcatggatggcaaacaagggggcatggatgggagcaagcccgcggggccaagggactttcctggcatcaggcttctttcaaacccattgatgggcgatgctgtgtctgattggtctcctatgcatgaagctgcaatccacggacatcagctgtctctgaggaacctcatcagccaggggtgggctgtgaacatcatcacggcagatcatgtttccccactccatgaagcctgtcttggaggtcatctctcttgtgtgaagattttattaaagcatggagctcaggtgaatggtgtgacagcagactggcacactccactgnttaaatgcttgggcaaccggcaactgggaatgggggaaattgcttnttgancaccgnaccnnngttaaacctgaaagtgatnggcatcccccatcctgaacttgttagaaaggnccccgtgaaggggnaccttttnaanntaaggggggcnaattgcccnaaaaaaaccccctggggccnnntttttttt

SEQ ID NO: 28734 - DNA, 495 bp, Homo sapiens
  misc_feature (1)...(495): n = a,t,c or g
tgaanatcgtttgacnnnnnnnnnnnnnnnnnnnnnnnnnnnnnnnnnnnnnnnnnnnnnnnnnnnnnnnnnnggaacgagctcagcttccacccctggatctggcctgaacccaccaagaatgaagtctgccagcagggaatagtgaagccatgcagagctccgacatgctgggccttcctattcacttcaccttgaagcctcgcatcagtctcacttcccagatgagtcagggaggttgagtaatgaagccatactgcaccatcaaggcaggaagtgaacacatgcctacctcactcaaagcccatgctccttctgcagccctaagtgaaaatgccaaccttccccacccagatgccaagtctctgagcagtacccatgggagcaaacatgggcccagtctctggaccagacgcccccaggtgccttagtcctgtggggccaaactccacttgcacatgggaattcaaaatgcagggttcctgctgataagtg

SEQ ID NO: 28735 - DNA, 446 bp, Homo sapiens
gatcagcagatataatggggagcctgagcatattgagagaaatgacgcacctcataaaaatacacaggaaaaattcaatttgtcacaagaaagcagttacatagcaacacagtatagccttcgtccaagaagagaagaagtcaaattaaaagaaatagattctaaggaagaaaaatacgttgcaaaagaactggcagtgagaacctttgaagtgacccccatccgggcaaaggacttggagtttggaggagtacctggtgtgtttctcatcatgtttggcctgcctgtgttcctcttcctgttgctgttgatgtgtaaacagaaagatcccagtcttctgaatttccctcctcctttgccagctttgtatgagttatgggaaaccagagtatttggggtctacctcctgtggtttttgattcaagtcctgtcctacctactgccaa

SEQ ID NO: 28736 - DNA, 444 bp, Homo sapiens
  misc_feature (1)...(444): n = a,t,c or g
ggaaaatggaataactattaatagaatcacttggggaaggnatagggaaaggtatggagaggaagagtgatttggnggtgnccttatattaaattcaggttgaaagngaattactcgaggaaatcaagggctgaagatacagggaanccaaaagtgcagcaggcctanagcaccttgctgaacgatggtcattgcagaggaccaacaccaccaaaaggttttctgtaanacagagattcttatctgctgtataaggaaaacataatgttcatagccattctcagcagctttcacgttgactgaagctgtgtgcccaattactgccttagaacaaacaggtctgaggatttacagtgatagcttttgttttcattctgtantctactttgccccantccattttcaccctncttttttgatgangccantgggttttattctcta

SEQ ID NO: 28737 - DNA, 416 bp, Homo sapiens
  misc_feature (1)...(416): n = a,t,c or g
nnnnnnnnnnnnnnnnnnnnnnnnnnnnnnnnnnnnnnnnnnnnnnnnnnnnnnnnnnnnnnnnnnnnnnnnnnnnnnnnnnnnnnnnnnnnnnnnnnnnnnnnnnnnnnnnnnnnnnnnnnnnnnnnnnnnnnnnnnnnnnnnnnnnnnnnnnnnnaaaactgtgcttggnaaggcagccacatggccagcccctgnggttctcctggctcagcatctcgtggnaanagtgacccctttccttaggngtgctgttgctccccaactccacgtggggttctgttagggctgccactcacaggcacccntcagccccacctccntgccactggccctgtctgggccaatcagagcttccctctggatcataactggctggaatgcaatgccaagncaatgggnggcccgtgnttttc

SEQ ID NO: 28738 - DNA, 495 bp, Homo sapiens
  misc_feature (1)...(495): n = a,t,c or g
gggggagataagtctaaagtctctacgggtcttccagcgcctattactatagcctcgggacctagttagggacttagtctaccccctactctcactccacgtgaggggataggatggagcaagatgaaggctgagtatgacgggcccacaagtcctgttcttggcccgtgttctctaatcataattacagccactgcctgttaagcacttactatgcacagcattctgttctaagcctttaatacgctgcattaactcattcaatccttacaatctcatgagggaaatattatctttgttttgcaggagtttagggagctgaacagacttgaccaaagtcacaaagctgggaagnggcgagctgggatttgaacttaggttcaactccaaagcccagacctaactaanagtgggagcctccaccccacgggtactgaggtgcccacattgctcagcccttactgtggaactgttgaccctgctggancaaagttt

SEQ ID NO: 28739 - DNA, 500 bp, Homo sapiens
  misc_feature (1)...(500): n = a,t,c or g
gcgcgaccacaagccctcaggtccggcgcgttccctgcaagactgagcggcggggagtggctcccggccgccggccccggctgcgagaaagatggcggacctggccgagagcaacatcaaagtgatgtgtcgcttcagacctctcaacgagtctgaagtgaaccgcggcgacaagtacatcgccaagtttcagggagaagacacggtcgtgatcgcgtccaagccttatgcatttgatcgggtgttccagtcaagcacatctcaagagcaagtgtataatgactgtgcaaagaagattgttaaagatgtacttgaaggatataatggaacaatatttgcatatggacaaacatcctctgggaagacacacacaatggagggtaaacttcatgatccanaaggcatgggaattattccagaatagtgcagatatttttaattatatttactccatggatgaaaattggaattcatataagggttcatatttgaaatatatt

SEQ ID NO: 28740 - DNA, 496 bp, Homo sapiens
  misc_feature (1)...(496): n = a,t,c or g
gattttaagcctaccattgagacctactgctgagnnnnnnnnnnnnnnnnnnnnnnnnnnnnnnnnnnnnnnnnnnnnnnnnnnnnnnnnnnnnnnnnnnnnnnnnnnnnnnnnnnnnnnnnnnnnnnnnnnnnnnnnnnnnnnnnnnnnnnnnnnnnnnnnnnnnnnnnnnnnnnnnnnnnnnnnnnnnnnnnnnnnnnnnnnnnnnnnnnnnnnnnnnnnnnnnnnnnnnnnnnnnnnnnnnnnnnnnnnnnnnnnnnnnnnnnnnnnnnnnnnnnnnnnnnnnnnnnnnnnnnnnnnnnnnnnnnnnnnnnnnnnnnnnnnnnnnnnnnnnnnnnnnnnnnnnnnnnatcaataggaatttggaanaanttgatcccagtcctcatggatacttgcaggggttcaagacttcagtanaggggacnggatgcannggttatgcctgaatnccgcaatttggaggccaaccgggtgganacctgnggtcaggagt

SEQ ID NO: 28741 - DNA, 507 bp, Homo sapiens
  misc_feature (1)...(507): n = a,t,c or g
ggaaattacaatgctatgaatcataatctttgtttaaatattttcatagtgtgattttaaccaccaaagagcctcgatttgtatagcaatattcagactactaaaacttgactttagagccatttttctacaaagttaattataacctctctcagtttcccatcttggtcctttcaccttacaccatagggtgaggaccaacagggtaaacaaatctttcccatgctatttttatttagtttcataattgttatgattggggaaggagggtggtttaaaaatagcttgtaaagaagcgttaatttttaccaactaatagcttaagttgcctactcaaggatatagtgaaagggaaatctgcacatcccttgaaggatgccttcccctcaaggaatttaaagggtttctttttgctatagtgntgtgatatatatatatgncttaggctttcaaaggttcagggnctactttaatatctggntntttctttttttccttanaaaattt

SEQ ID NO: 28742 - DNA, 511 bp, Homo sapiens
  misc_feature (1)...(511): n = a,t,c or g
gagataaaggtaatctgcagaaataaaatcaagcttcttttgctctgtgactgcatcacatgaaaatggctaggtagattttcactcgattggagtttgtttagggtggtctgatttaaaatgtaggctcttgtgatgtgcataattttagatggtcttgattgcccagagcagctgttactgctgtgcagaaacaagtgttcagtgtcccttttggagaaatgtgccgtgtgcatacagatgccatagacagagaaaacaaatggtggtgtcaacatgagccccacctcaggtaaccaggacaagctggattccagaggcagggttgtgtggggacaactccgtgaagtccacacagcanagaggagctacagggaggtgtttatttcacaatggttcgggatttttttgccaatgctggatgggngctaagatatagtatcaaaaacccnttactataaatnggggaaatttaaaaagcccntggncccncantttatacatgggggga

SEQ ID NO: 28743 - DNA, 495 bp, Homo sapiens
  misc_feature (1)...(495): n = a,t,c or g
gcggcacgagtgtcaataccctgtgttgcttcctgtaggagccacctctatgattcctacagagtattctttttaatctagcatttacctagttaacaactttatacctaattaatctttatattaaattttctctgttcaagtaactagatggattctgtctcttgactagacttctgaaaaataaataatccatatacnnnnnnnnnnnnnnnnnnnnnnnnnnnnnnnnnnnnnnnnnnnnnccttctcaaaaaaaaagggaagggaaaggaaaagaaagaaagattgtctcctttacttcaatcntccagttttganganctaaattttgagttntttganctgaatcaaaattgatanaatcgnatntttnaccttcatagntatagcaacctggnanacagnaggcagttgaacnccgaaaataaagngggtgaatgaatgcctaatgaaagccgtgnttttgggcttgtaaaaaaccnctggntttta

SEQ ID NO: 28744 - DNA, 491 bp, Homo sapiens
  misc_feature (1)...(491): n = a,t,c or g
gattgcttgaacttggttataaacacagtccccacgttgtatgtgtctgctacatttttaatgtgtcttttaatatataggttccctatccttccttttaattcttgcaattaaaatcttgcagtccttacaaatgaaaccagatttttatactcagtagaattttccacactctcaatttgctgatttcatcctcttggtgctgtctagcctgttcctctgggccctgtgttttctgtttactggtaggtaattcagtgtacaggcttgtgcagattgaggtactggttttaggcaggatgacattgcaggtggtcctcgttcttctcttgtgccatgtcaatagttctgtgacctctgattgncttgttttgtgatgacaggttgaccactgagtttggggcactctgancttccattanaaaaagtctgcctgagacttccccccagggtcaanggccattaacaattagngctaaaaatgggctttc

SEQ ID NO: 28745 - DNA, 507 bp, Homo sapiens
  misc_feature (1)...(507): n = a,t,c or g
gaggcttttccaactcttagatcatttttttttctttgcggagatttttctagatcttaaagtttttttaataattgaatcttactttcagctgaaatttatcctagtgcaaagcatgaggaacattttgatgttaatacgaggagacaaatcttaaggaatttgtttaaggttacaaagtttgcacatggtaaagctaatagtcaaacccaggactcttgcatcccaaaggactcttgaatcatatgcaggactctctgaatcccaaactcatgcttctgtgataggaactaccggacattatgccttgtaggattattgtgagcattaatgagcaaagttagaaagtgggttngtgtgtgctgggcatagggatacacggatgttttcttcagaccctggcctccttactgacagtactgatacttggctgaatatcattatcgtgtggactgagcccaaggtttgctanaattttccagcccatttncntaaaacnttttcttt

SEQ ID NO: 28746 - DNA, 509 bp, Homo sapiens
  misc_feature (1)...(509): n = a,t,c or g
ggccatctcagcatgccagtttgggtcacaaatggacatcttatgggggcaagacagctgtagacatcacatcagagtatgacaacttctagtctcctccttgggtctcctcttaggagcaagagactttcctggaacccgttagtggacttcctctctgcttctctgtttaaatcattcactggcagaatagcagtaccctggatagctagggcagtcaggagccatcccctgaggggcagtcagagctgggcttccattagtcgcgggtcaagcaaacagcccctgggaagagaggagatacacaggagagattcttctagaaaggaanaacaagaccanaaatggattactgcagcctgtttccttagttgtaaggtggagataatantagcacttaataagattattgtgagaaccggatgagttaatcatataaagcatgcaagacagtgccngcacataataatctttcngnaaanaaccggtttttaatttaatttaatttt

SEQ ID NO: 28747 - DNA, 497 bp, Homo sapiens
  misc_feature (1)...(497): n = a,t,c or g
ggtgactgatggtgtactgagtgatgtgactgatggtgtactgactgatgtgactgatggtgtactgagtgatgtgactgatggtgtactgagtgatgtgactgatgatgtactgagtgatgggactgatggtgaactgactgatggtgtactgagtgacgtgactgatggtgtactgagtgacgtgactgatggtgtactgactgatgtgactgatggtgtactgactgatgtgactgatggtgtactgactgatgtgactgatggtgtactgactgacggtgtaccgactgatgtgactgatggtatactgactgatgtgactgatggtgtactgagtgatgagactgatggtctactgantgatgtgactgatggtgtactgactgatggtgacngactgatgtgactgatgatgaattactgacccatcttttttacangggncntgtggncccangcttgggncaatgggncaancagnttcttnnacttaa

SEQ ID NO: 28748 - DNA, 512 bp, Homo sapiens
  misc_feature (1)...(512): n = a,t,c or g
gcactagtgatgtggagtaaattaggcgtatgtagaaacattgattaaatagcgctgtgacagctctatgtgtgggtataataaggctattttgttgttaattcttgaatgataactcctttgggtataaatcctgtaaggggggttagtcccagtagggaaaattgataagaattgtggaagtagtagtggtaacttatttcatatataatgtagtgataatgttatagtacttgtacttagattaaataatataaatactgtaattgttagggttatgtaaatccatagatttaggattgtgatagaagggttgtaggctaaaattgtgattattcagcctataggagcaactgatgagtaggccaagatatttcggagttgtgtttggttaagtcggcctcagccctcttcgggacaganagtgctgcaattgccngtancataattanggctattaagggnanaccttgnanatnaanggacatggggctaanttttttaattaaggg

SEQ ID NO: 28749 - DNA, 506 bp, Homo sapiens
  misc_feature (1)...(506): n = a,t,c or g
gccagttattgaaagaagaccaaaacttcaaagacaaaagagaattttttcaaagcaacaaggcaaaacatttctcagagctcctcaaatgaatattaatattgccacttggggaaggctagtaagaagagctattcctacagtaaatcattctggcaccttcagccctcaagctcctgtgcctactacagtgccagtggttgatgtacgcatccctcaactagcacctccagctagcgattctacagtaaccaaattggactttgatcttgagcctgaacctcctccagccccaccacgagcttcttctcttggagaaatagatgaatcttctgaattaagagttttggatataccaggacaggattcanagactgtttttgatattcanaatgaccnaaatagtatctttcaaaatcttaatctgaatccagcctgaacttctcagtcaggcctanaananaangggantcagaacntnngggcccnanaattccccaagggtt

SEQ ID NO: 28750 - DNA, 489 bp, Homo sapiens
  misc_feature (1)...(489): n = a,t,c or g
gggaattcagaagagggaaaaataaggactggcttcctaaagaaagtggcaatttttttagaatattgaagctgttactctgaggcatgagtgacacaagccagcagaagccagagatttgaagtcttgctcaagatttgctggtttccacttggggaaagacaccattaggctgggtacatctggagagatgagtgcaagaagccagttaagcaggagagaagtggacttgattgtggaggcactgtgtttcaaactcaaattaggcagctcttgggtgggtggcttgatccattgttgtgttttcagctgattaatctggtagcagtgtgctcgtttaggagaaattcaacaggagatcagtcaaagagaatggcctctggtttgggaatgaaataatcagggcctgtcctggagtggggcaatgatgaataattggaaggaaatgagaaantgagaanacttnnncggcntgggactcantgctgg

SEQ ID NO: 28751 - DNA, 407 bp, Homo sapiens
  misc_feature (1)...(407): n = a,t,c or g
gctttttttaaggttacaagggagctgccgctgttacccaggatttaccctgaatctcaaacactactggaaaaatgctgtgcctaggacggcccagcaggtatcctgcatgtgttgagaattgaagtgcagtgggttccgctgcgttgttacagtaaagtggaacagggcagaatttctgagtgctgctcctctcaggagactgagggctcctttactccttttcccacccgacatcaggaggaaaactcctttattcctgtgcagngtagaaaaaaggtccgttnttaagtaaattcttagctctttgtaaaagaagtccaaaggcagnggttttanagtttaaagatagnatttctttatatttgngtagttacaaggctttgagtatgatcaaaacgtttaac

SEQ ID NO: 28752 - DNA, 437 bp, Homo sapiens
ggagctctaggccctctgggatgctggggtggagaggagaggatggaaatggggagcaagggactagtaattatttaactcgccaagcggagttggtggtgagaaagtgcctctcgtagcctgctgcttttgtgtggtttgttctgatggtggggtgtctgctcaggtgatgtgtgactctcttggggctgtgtttggctttacctcagcctcgtttgtgagcagcctgtgcaaaggacagcagtgtccccctttggaattgctgggtgttcatgccccatcaggcttcaactcctccttctagtgagtgtcctggtgcttgcccatcagctgcctggcagcccaagggctcctgcccctctgacctcaacactccttcaaaggaactgtgtgaagttactgcagtcctgctctcttgtccaggggttgtaagggaa

SEQ ID NO: 28753 - DNA, 440 bp, Homo sapiens
  misc_feature (1)...(440): n = a,t,c or g
gcggcacgannnnnnnnnnnnnnnnnnnnnnnnnnnnnnnnnnnnnnnnnnnnnnnnnnnnnnnnnnnnnnnnnnnnnnnnnnnnnnnnnnnnnnnnnnnnnnnnnnnnnnnnnnnnnnnnnnnnnnnnnnnnnnnnnnatgttctngnaaggcagangcatcgangcaaggaggattgcttaaacccaaagaggcagaccttgtatgcagtactnggtnnangntnttnngnngcatgaaattatnntacnngggncttaatanncgaancccgnctgncttattncctgacctanntgattaagcnnnccccatnnttannnatgancngnatctccanttngctgtcctacncttcccaaggtgcacctntagtnccaaatgtnccgacnctgaggctcanaaatnggatacnccngngggggatttgcananccat

SEQ ID NO: 28754 - DNA, 437 bp, Homo sapiens
  misc_feature (1)...(437): n = a,t,c or g
ggagggctggnnnnnnnnnnnnnnnnnnnnnnnnnnnnnnnnnnnnnnnnnnnnnnnnnnnnnnnnnnnnnnnnnnnnnnnnnnnnnnnnnnttaggtannnnnnnnnnnnnnnnnnnnnnnnnnnnnnnnnnnnnnnnnnnnnnnnnnnnnnnnnnnnnnnnnnnnnnnnnnnnnnnnnnnnnnnnnnnnnnnnnnnnnnnnnnnnnnnnnnnnnnnnnnnnnnnnnnnnnnnnnnnnnnnnnnnnnnnaaagaaaatgaagagtcgataaaatgtaaagataaaagtatttcanaaagatcaatctggttacaggcacaagatggacttgattctgggaaaaaatatgttgcaataacctggctagaaaaggatgggatcagttaatagggttgacaaagaaaaaagagaaaaaaatgggagacttaactgcaat

SEQ ID NO: 28755 - DNA, 451 bp, Homo sapiens
  misc_feature (1)...(451): n = a,t,c or g
gcttctaccccttgcccctacacatcacagccttccccaccttcaacatcctgcaccagggtggcacatttgttacagctgaacctacacttacacatcatctcctaaagtcatggtttaccttggagttcactgcacgnnnnnnnnnnnnnnnnnnnnnnnnnnnnnnnnnnnnnnnnnnnnnnnnnnnnnnnnnnnnnnnnnnnnnnnnnnnnnnnnnnnnntctccccacaacccctgatctttttactgttgccatcactttgtcttttccagaatgtatcattggaatgatccggtatggagccttctcaccttggcttcttagtaatgtgcgtttaaggcctccatgtcttccatggccttgnttctttttaatcagaagtaactgttttcaggcctgctctgaatctccttttctcccttcaggctataatagatgaaattgag

SEQ ID NO: 28756 - DNA, 433 bp, Homo sapiens
  misc_feature (1)...(433): n = a,t,c or g
ggcgcgctcttgaatacctgcgttctgtagcgctagttctcttcaagatttgcttagtgtcatttcatttcggtttcttttctcgccatgtttttctgtcggaattacggttcgttatggttctatgtactctctaaaatgttatcgtttttcatttgtctactaattttcgtgcatttgttactactgagtttcttaatatctgactggcctccgcccacgggctctgcagagcataaatactcaggctgatggtagtgcagagactctccctccttgatcancgcaaacgttggtctgaggcttgagggatggagcaacattttcttggctgagtgaagcgggcttgggattccgcagaggtggcgccagagccccagcctccacctattgngagttcagaagatcgtggccgtggcctcttnctttgtat

SEQ ID NO: 28757 - DNA, 425 bp, Homo sapiens
  misc_feature (1)...(425): n = a,t,c or g
gatggttagagctgcttaaattctacacactggattttgctttggaggaatatgtcatatgtgtacggatacaagatattttaacaagagaaaataaaaactggcctaaaaggcgaatagccattgaaggtgagatgatatgttgtatttcatttggagaatattttttatgtgctactcattatctaattcagtgttaataatcctttggctttgtggcactatatatatatgtcactagattgtcattctttannnnnnnnnnnnnnnnnnnnnnnnnnnnnnnnnnnnnnnnnnnnnnnnnnnnnnnnnnnnnnnnnnnnnnnnnnnnnnnnntannctcatgggttcaagggatnnnnnnnnnnnnnnnnnnnnnnnnnnnnnnnnnnnnnnnnnnnnnnnnnnnnnnnnnnnnnnnnnnn

SEQ ID NO: 28758 - DNA, 410 bp, Homo sapiens
  misc_feature (1)...(410): n = a,t,c or g
ggtgaagtgttcctttatttacttannnnnnnnnnnnnnnnnnnnnnnnnnnnnnnnnnnnnnnnnnnnnnnnnnnnnnnnnnnnnnnnnnnnnnnnnnnnnnnnnnnnnnnnnnnnnnnnnnnnnnnnnnnnnnnnnnnnnnnnnnnnnnnnnnnnnnnnnnnnnnnnnnnnnnnnnnnnnnnnnnnnnnnnnnnnnnnnnnnnnnnnnnnnnnnnnnnngctnnnnnnnnnnnnnnnnnnnnnnnnnnnnnnnnnnnnnnnnnnnnnnnnnnnnnnnnnnnnnnnnnnnnnnnnnnnnnnnnnnnnnnnatgctttttntttttttttnaaaatnnggngtttgatnnttnngtgaaaaaggnnccttntaaaannanctttaanggngctgacangggggataaaat

SEQ ID NO: 28759 - DNA, 424 bp, Homo sapiens
  misc_feature (1)...(424): n = a,t,c or g
gcatttgtcctcgggaggtggaaaacagaccaaaatattatggaagagagtttcatgggatcatctctcgggagcaggcggatgagcttcttggaggcgtggagggtgcctacatccttagagaaagccagcggcaaccaggatgctacacgctggctctcaggtttggaaaccagaccttaaactacaggctcttccacgacgggaaacactttgtgggtgagaagaggtttgagtcgattcatgatctggtgacagatggcttgataacactgtacatagaaacaaaagctgccgagtacatttcaaaaatgacaactaaccccatctatgaacacattggatatgccaccctactcagagaanaagtatccanaaggctgancangtctaaaaatgaccnggaaancanacgttcacatga

SEQ ID NO: 28760 - DNA, 502 bp, Homo sapiens
  misc_feature (1)...(502): n = a,t,c or g
gtggacttttgaggacctgggtagtagttagttgacatgctatttatcttttccttcttttagtttacaacccccaaacctttctggtgcttctgagtgctgggcctgcctcagagcggggagaaggtggaggcaggtgctctgggtgacacccgggtctggtgcctcaggttgcacagtgggtctgtggggtggatgaaggtgccacctgaccccaggcatgagctcaggctctgagacccctccctgctgggctttagaaagtgcctgttgcgtctggctaagggtttcgggtgggtgctgcagggttaggcatgcggcagtgagaatcagtgaatgaagccaacttctagttcaagatgacggnggatctgtgatggcagatggatcgctgggacacctgcatctctcgctagacgagtgagcttgtttttgtgactcagtgcangctggtcnacccagcctgccaaaggttgngtccantgctgaaagaatctgtaag

SEQ ID NO: 28761 - DNA, 502 bp, Homo sapiens
gtcatgccaaagagaggactcgacgtgtcctcctgcgagatcttccgcttctacaagctgatcacaaccaaaagcctcatcgagcccatctccatgattgtgccccggcggtcagaatcctaccaagaggacatataccctccaacagcaggggcccagccctccctgacggcccaggagtggctcagcgggatgaatcgagacccaatcctggtgtcccttaggcctggctctgagctgctgagaccccacccactgcctgcagagagacctatcttcaattccatggccccagcctcaccccggctcttgaatcagacagaaaagctggctgcagaagatggctggaggtcttcctccctgttggaggagaagatgccaaggtgggcaagcagaacacaggctggaggagaagaaaacctggctgacaaatggctttgacgttttcgaatgccccccaccaaagacagagaatgagttgctgcaaatgtctaccggcaca

SEQ ID NO: 28762 - DNA, 504 bp, Homo sapiens
gtgtgctcattgccattgagttatacctttaccttattgactggtttctactgttctattcagagacccctggcacaagatccctgccctggacccagagaagctcaatgtcttccggacagtacgggagatcacaggttacctgaacatccagtcctggccgccccacatgcacaacttcagtgttttttccaatttgacaaccattggaggcagaagcctctacaaccggggcttctcattgttgatcatgaagaacttgaatgtcacatctctgggcttccgatccctgaaggaaattagtgctgggcgtatctatataagtgccaataggcagctctgctaccaccactctttgaactggaccaaggtgcttcgggggcctacggaagagcgactagacatcaagcataatcggcggcagagactgcgtggcagagggcaaagtgtgtgacccactgtgctcctctgggggatgctggggcccaagccctggtcagtgct

SEQ ID NO: 28763 - DNA, 502 bp, Homo sapiens
gaaaaagtcaaaagataagcagcagtccaagggtgagtaatgattacaaactgtacccttatggtcacaaaatgaccactgcagctccagccatcaggcctttaagaaggaaggatggaagaagaggtaacagttttccagaaaaccctagcaggtttctgcttacctctaattggctagaactatatcatgtgaccactagtagtaaagcaagctatgaaatgttcagttttacctaggcacatcgctaccctaaacaaaatatggattacattattttccatgtgttttaaaaattataattcctaaaaagtgagcatatagcaagcattcatttaactcatttgtgagggaaccagctggattggaaaactggttcaaggagcattggaggaaatgagtacaggtgctgaaaaaacagtgttagaataagattgctagatttgggtacaaaactggtgaatgccttgtgagaatgtaggaataactgacacagttctcc

SEQ ID NO: 28764 - DNA, 507 bp, Homo sapiens
  misc_feature (1)...(507): n = a,t,c or g
gaggaaaagtgggcagccatcagctggagtgcagttcctgagcagcctttggatgttactgccaatggctttccacagggaacaacaaagaaaacaattggaagccttcaggcaagatcccaaatcagcaaagtggaactcttcagatcattccagaagctgctaagcagaattgcaagggacaagtggccacactccctcagggtgcagaagctggatacctaccaggagtacaaggaggctgcgtcctcttaccaggaagcctggagcacactccggaagcaggtgtttggatcctggatcagaaacccaccggattatcaccagttcaagtgagaaggaaatgtttgctctggtagcaggacccttcatcctgaactgccttcctccacgcaggacaagtcttacttttttggtagttaaatcagggaacattctttctgagctttgcatctctggtgngtaatacagatggaatctggacttaaaacaagctatacttgattg

SEQ ID NO: 28765 - DNA, 482 bp, Homo sapiens
  misc_feature (1)...(482): n = a,t,c or g
gctggagactccctctcgaaaaaaaaaagtgatgtgcgcttgggactgggagggcgaggcccgaggtacctgggtgcccgatgcccaggagggcatgagtgtcatgttggataacctgctctccaagtaatagggttttgagaatgtttgatttttttttttctttaattnnnnnnnnnnnnnnnnnnnnnnnnnnnnnnnnnnnnnnnnnnnnnnnnnnnnnnnnnnnnnnnnnnnnnnnnnnnnnnnnnnnnnnnnnnnnnnnnnnnnnnnnnnnnnnnnnnnnnnnnnnnnnnnnnnnnnnnnnnnnnnnnnnnnnnnnnnnnnnnnnnnnnnnnnnnnnnnnnnnnnnnnnnnnnnnnnnnnnnnnnnnnnnnnnnnnnnnnnnnnnnnnnnnnnnnnnnnnnnnnnnnnnnnnnnnnnnnnnnngagtgtgtagcttttgtaaaagttttggaaatggcctcaaaaatttcagaggg

SEQ ID NO: 28766 - DNA, 488 bp, Homo sapiens
  misc_feature (1)...(488): n = a,t,c or g
ggaaatgtggtcgcggtatggagtggctgggccttcgggcccctctgggcgggcgccagggcttcacctccaaggcggatccttagggcagtggccggatcacggctgcggtgatcgagcacctggagcgtctagcgcttgaggacttcggcagccgcgaggcagtggcgcgactggagaaagctatcgccttcgccgaccggctacgcgccgtggacacagacggggtggagcccatggaatcggtcctggaggannnnnnnnnnnnnnnnnnnnnnnnnnnnnnnnnnnnnnnnnnnnnnnnnnnnnnnnnnnnnnnnnnnnnnnnnnnnnnnnnnnnnnnnnnnnnnnnnnnnnatgtctatacctgagatccgacaatgtggtataaggnaacttgtctgatnaattactacnaaactcccatcgcgtcgtngaggagtactttgtggccccccaggtaatatctctttgncaagctggatgac

SEQ ID NO: 28767 - DNA, 508 bp, Homo sapiens
  misc_feature (1)...(508): n = a,t,c or g
gcggcacgagcggcacgagcggcacgagattgctgttgagtacctgtgactatgagatgggtctcaggtccgggagactggattaactctaaacgcaaccagatggtgggaacaagatgctgtgtatgttgatatgattcctgtcttagcctattagggagatgagggaagaaaatgctaggtccagctgggaaaagcagagacaagaagtctggagttaaccaagttaaggaaaaaatgttggcacctgttatgaaacagaagggcataaactatttgtgaaatgtaagatgaagtatgaaaattaaaaggctcagcttctaaagactcagtctggcccacagctgctcaatgaaagacataaagcaggctccagctgacacaatcatcaagctagtgccctttgctggttctctttagttgcaatctgacccactgttctccagggatgggtggtcatattttgaaaataangtaaataatactgctcatgatgaaacattttctg

SEQ ID NO: 28768 - DNA, 425 bp, Homo sapiens
  misc_feature (1)...(425): n = a,t,c or g
ggttagtcaacacactattggaaaacatgctttaagtcataggattgacttttaattaggacatcaggtttcgctaaataaatgtctatttataaataactggaaggtagtttattctctattctaccagcctttcctttacagtattggcttatatttgcagactgcgaggcaaattctttatcatgttatagaatgttagatatcacgcccttgccagttattgcaaatatcaaagtaaatgaggtgaggtgagggtgggaagaaggtaggaaaggtctgcagggagaggatnttttccttattaattatagaggaagcatgantnaaccatggaatatanaatatacttactccanacaacttcacagagattgctggtataggatccttttctcacttcatttctaaatgccagtccttta

SEQ ID NO: 28769 - DNA, 499 bp, Homo sapiens
  misc_feature (1)...(499): n = a,t,c or g
gcaaaggggaagctgacatgtcttacatggtcagagcaggaggaaggggtttggaggaggtgctacatgcttttagataactagatcttgcaataacccactcactgtcacaagaacagcagcaaagggcannnnnnnnnnnnnnnnnnnnnnnnnnnnnnnnnnnnnnnnnnnnnnnnnnnnnnnnnnnnnnnnnnnnnnnnnnnnnnnnnnnnnnnnnnnnnnnnnnnnnnnctagaaaacaaaggcctttctgaaataaagggagagtaaccaaacctgtacctcttgctctctaagcaaggcagcttagcgcttctttttatgtcctccaagctgttattctcagagatttcagtcagttccagggttgcaaagacaatcaaaagttattgtaatgggaggccaaggcaggcggatcacctgaggcaggagtttgaggccacctggccacatggnaaaacctgttttactaaaaaatnnaaataaccnngcctgg

SEQ ID NO: 28770 - DNA, 449 bp, Homo sapiens
  misc_feature (1)...(449): n = a,t,c or g
gaattaagctccaaatattctgagccaaactgaatgctctggaattctttaaaggaaaaaaatgctcgggtaacctagagtacccgatatactgtcatcctggaattctctttaatagctaacacaagaccaaacagaacctcttaaccaaaggccaatcctctgggtctactctgaaggtttaagagatccctgagccaacctcaagcttgcggacagactagcactccccagcctccccctaaaattcggactgaatggcgggccaaggatactgaaggggttctctaacatccttatgatggtggcttctggaatacactgcactagaaagtcaggcttccttaagaataagctggtcatactcaggcaacgttcccagggataaattanattagatgaanattacaccataattagggnacttaattctagaaattcaataggaa

SEQ ID NO: 28771 - DNA, 444 bp, Homo sapiens
gattgatgatgtatctctctcataaaggagccagttcagcaagcaacatgctggccccgcatcattttagcagtcaaagcagtactacccccagagttggccctgacgttaccctgggaggcagggatttgggcctcagaatcatccgaactgtcaggcttgatgattatttctgtacgacttccagcctctatttgccaggtagatttttatggagagggtagtgatcttctggcagcatgcagcgagggaggtacagatctaagagagccttctctgtatgttcgacgggaagagccagagggtccggcagagtgcggtttcacggttgccccgacattcccacgctgtgtgcgggccatttttaaaattaagtttaaaaaaatcaaatgatttaaagtaaacagaaaaagtatttacattttgaaatttctattttaaaag

SEQ ID NO: 28772 - DNA, 446 bp, Homo sapiens
gcggcacgagtgcactttggaagggagttggtgtgctatttttgaagcagatgtggtgatactgagattgtctgttcagtttccccatttgtttgtgcttcaaatgatccttcctactttgcttctctccacccatgacctttttcactgtggccatcaggactttccctgacagctgtgtactcttaggctaagagatgtgactacagcctgcccctgactgtgttgtcccagggctgatgctgtacaggtacaggctggagattttcacataggttagattctcattcacgggactagttagctttaagcaccctagaggactagggtaatctgacttctcacttcctaagttcccttctatatcctcaaggtagaaatgctatgttttctactccaattcataaatctattcataagtctttggtacaagttacatgataaaa

SEQ ID NO: 28773 - DNA, 306 bp, Homo sapiens
  misc_feature (1)...(306): n = a,t,c or g
ggggnnnnnnnnnnnnnnnnnnnnnnnnnnnnnnnnnnnnnnnnnnnnnnnnnnnnnnnnnnnnnnnnnnnnnnnnnnnnnnnnnnnnnnnnnnnnnnnnnnnnnnnnnnnnnnnnnnnnnnnnnnnnnnnnnnnnnnnnnnnnnnnnnnnnnnnnnnnnnnnnnnnnnnnnnnnnnnnnnnnnnnnnnnnnnnnnnnnnnnnngctgtgcactgatttgataagctactgctncanaatgagactaccctacatggcaggaaaanccanncaggaagccctacnnaanaagcnnatnttcctgaa

SEQ ID NO: 28774 - DNA, 422 bp, Homo sapiens
  misc_feature (1)...(422): n = a,t,c or g
gaggtttctgcggtgactccaaatactatgaaaagagctaacctgtgctaaaaacccaggatgaatcccagtgctcagaggaatgaatgtgctacctttaagagtatgcaagcagcctgggcaacctagtgagaccccatctcttcagaaaacaattttagccagacatggtgacatgtgnnnnnnnnnnnnnnnnnnnnnnnnnnnnnnnnnnnnnnnnnnnnnnnnnnnnnnnnnnnnnnnnnnnnnnnnnnnctccactgcatttgagcctgggcgacagagtgagatcctatctggggggaaaaaaacttactcatggaggttaatgggctgaattgtagcccccaaaattcatttgctaactcctaaccccagcacctcanaatgtgactgtatttggacaggtattaaggtaaagg

SEQ ID NO: 28775 - DNA, 446 bp, Homo sapiens
  misc_feature (1)...(446): n = a,t,c or g
gaacagccttttaaagatttccaaataacctttgattccctcagtcagtaactgggtcattctaaagcctcatgaagtggacccacccctgctgttggcccttctctgagggtgggcaggggccaggttattggccggcaggaagcagaggaagatacctccaaactaataaagcagggtttggcccagctctgcgtaaccaggcaagggaggagcagtgtcaagaacagctcttgatgagtttctattacttactccctggtttttatgaaaaaatttcagtgatgctttgtcatcatttcccaaactaagttagtgatgtcttataatcgttttattaaaggccagtgagtcagatattgaagaaatttgctcaagaaaaagatggaatttacatcagtaagggttaatatttcccttctgactatggnttgctcctaggaccc

SEQ ID NO: 28776 - DNA, 110 bp, Homo sapiens
gtgagcttcaataccctgccttgatgctaaaaagacatgaaatggcctaaagcagcagttctcaaacctggccacacatccaaattgttaaggaactttttttttttttt

SEQ ID NO: 28777 - DNA, 486 bp, Homo sapiens
  misc_feature (1)...(486): n = a,t,c or g
gcaggaggtggtcacaggaggctgcatggcctctgctgaactccacctcttctcgtatgagccgtagttaactgctttggtaaccaaggaccaagctcttgattgacttgactcactgagtgtcctgttgcatagttgtttgaggctacaatgaaatacaatttcatcacttgccatggatgttataatctattaaggaagcagatagctaggcagtttactaaggcaagtcgtattctgcatgagagggagaaactgaatgctatgagccactgtatgaaagtgctttatttgtgctgttgataagagcacatgagctcatttcacgtagacaccttctcctggttggtcatttcntttgatagtgccccaccaaggcctggtctactaagctcagtggttcatgaccaggaaaagatgcaccctgagttgagtgaatatgctgtgccaataccctaagtccctaaaacagaatgtagacaggaa

SEQ ID NO: 28778 - DNA, 488 bp, Homo sapiens
  misc_feature (1)...(488): n = a,t,c or g
gagactgtaaaaacagaatgttgctgattgaaggcattgtcccgttcctgtctcgaaggagattcattctcgttgaggcctggcaatatatgtactcatttgaaaaggaaccttttgatctagagaggtcctgcagccttccttcttttctgagaaggaaaattttgttgtggatatcctttgagctggatagacctgtccctccctacagcttctttgctaatataattgcctccagttcactcctaaaagaatgcttagggtattaaacttctctgtagtaagcaattagtctgtatattgtttcctaaacttaagaaggcttttgttcactccatgccagttgaaaaaggctttcagccttccttggtgctatggtttgaatgaaggtattcctccaaaattcatatgttggaacttaaaccccaaggtggngatattaanaggtggggccttttgggaagtgatttanctgtgaggctttgctt

SEQ ID NO: 28779 - DNA, 494 bp, Homo sapiens
  misc_feature (1)...(494): n = a,t,c or g
gaaaaatannnnnnnnnnnnnnnnnnnnnnnnnnnnnnnnnnnnnnnnnnnnnnnnnnnnnnnnnnnnnnnnnnnnnnnnnnnnnnnnnnnnnnnnntgctaatgttcattggacatacttgatctgtatttagatttcatacaacttacagttgaaaacagattctcatatcaagtagctaagacaaaagtttttttcaagaattgaaataagtatcagtttaaaaatttatattaaatttattaaaattaaaatccagttccttgttgcatgggacacagtgcaaatgcttgataagnnnnnnnnnnnnnnnnnnnnnnnnnnnnnnnnnatgggccacctgtttctaacttgagcatcagtcctagctatgcctgaattatttgaccagctgtcaaagagaaacaaggaaatgatagctttgntaatctagcctctttctttgcccacatatacattctacccctttgaataaaaaagttcaatgacgccg

SEQ ID NO: 28780 - DNA, 409 bp, Homo sapiens
ggcatgtaaaaaatatcagaacgactcccctgaccataacataccagacacacacacacacctgtctacaccgtggtgctgacccctagctctgcatcaggtgcaaagcagagatctgcatgcattctggtcacgttccagcaggcactgagtctgtccttcccacctccaggacgggaggtaccgctcctagggatttaaatctgtcagtgtgaatcatcgcagagacagcaaagccgcagcatcgggcagcattcagggatgaggcacggtcatgcacatagatacaggaaatgatcccagaggatctggggacgtccagcaccccagtattgagaaggaggctgcaccgtgatgccttccgtgaagcatagagctgcaggtccatgctacgtctatgcaatagata

SEQ ID NO: 28781 - DNA, 405 bp, Homo sapiens
gggctgactttggagatgctgttcagctcaacacgacctactacatccaccagttactggggaaccctgaattcgcagcccctgaaatcatcctcgggaaccctgtctccctgacctcggatacgtggagtgttggagtgctcacatacgtacttcttagtggcgtgtcccccttcctggatgacagtgtggaagagacctgcctgaacatttgccgcttagactttagcttcccagatgactactttaaaggagtgagccagaaggccaaggagttcgtgtgcttcctcctgcaggaggaccccgccaagcgtccctcggctgcgctggccctccaggagcagtggctgcaggccggcaacggcagaagcacgggcgtcctcgacacgtccagactgacttctt

SEQ ID NO: 28782 - DNA, 397 bp, Homo sapiens
  misc_feature (1)...(397): n = a,t,c or g
ggtcatgtcctctcataatgaggtgggggtggggaacaaggagatggagggatgtgttgggtgcttttgtgttaccacattgcaccctcatcacagtcaggtgagatggtgccatacccactttatagatgaggaaacagacccaggtaagctgagagatttgcccagcataagcataccaaaaggcaaagcaaaattcatacgcaggttttgagtctccacagcagcaggcagagacctactttctagaaagagtttattagggtccagtgaaacagataancaggacacgacagtgcacaatctangcacaggctcttgaaagcagctctctggaggctggaactattttgctanaggngtttggatgctgctgnctaacccgagacatggagtt

SEQ ID NO: 28783 - DNA, 395 bp, Homo sapiens
  misc_feature (1)...(395): n = a,t,c or g
gacggcttaacttgttccactattccccttgttgcctatatactgataattagatctaagcttgattcacttttttttttatncttnatagtnggggttgggnnccacctgnaagtcannntttngcancttnngtngaaaatcattatttngcaanccntanggaagnganananccaggcncctgacnttaagggggggnaaanccnttagtcnggcaatncctaactctcngttaaatttnancctcnntaaaagngaancanccaggtntaanatgcctngnattgnaacacacaatatggggcannatgcttttttgacttcaaantagatcagggancttttgctttngaanagagaaattccttggcctggggacaanaacagtaaat

SEQ ID NO: 28784 - DNA, 411 bp, Homo sapiens
ggctgcggtgagtccgccagccccagctgctcctcctcaagcccccaaggcccttcggcgggcccctgctgaaagaccggcatgccctattctgtgggcttccgcgaagttcttctctggatcaataactcttaaccttctaagaactctggaaatttaaagaagatcttcctacctttaacgcacctttgactcaggccaacagaaagtatggaataggaaacagtaaatcacacagtctcttgttctcaggaagtgggaaatgctgcattcgaacaataccatggaggctgaaacagggaagagtgaacgctctggccaggaaagcaagagagtgtgccagggaagctttgcagaggaagagaactttgaatgggccttgaagaatctgtagaatttcacaaaacagag

SEQ ID NO: 28785 - DNA, 481 bp, Homo sapiens
  misc_feature (1)...(481): n = a,t,c or g
gcagcatcaatagggtgtcctgggagtgggggactaacaggttgcctgaggaggggtgaactggtccaggttggcaacagagcaggttaaaactcccatgctgatcagtagtgggatagccattgcactccggcctggacaacattaaggtgaccctgtttcttattaaaagcaagagggtaggggaatttttttannnnnnnnnnnnnnnnnnnnnnnnnnnnnnnnnnnnnnnnnnnnnnnnnnnnnnnnnnnnnnnnnnnnnnnnnnnnnnnnnnnnnnnnnnnnnnnnnnnnnnnnnnnnnnnnnnnnnnnnnnnnnnnnnnnnnnnnnnnnnnnnnnnnnnnnnnnnnnnnnnnnnnnnnnnnnnnnnnnnnnnnnnnnnnnnnnnnnnnnnnnnnnnnnnnnnnnnnnnnnnnnnnnnnnnnnnnnnnnnnctganctcatatgatcacctgccttgactccaaaggctgggaat

SEQ ID NO: 28786 - DNA, 479 bp, Homo sapiens
  misc_feature (1)...(479): n = a,t,c or g
ggctttttaaaacatgagtcataaattgggtgcagtagtnnnnnnnnnnnnnnnnnnnnnnnnnnnnnnnnnnnnnnnnnnnnnnnnnnnnnnnnnnnnnnnnnnnnnnnnnnnnnnnnnnnnnnnnnnnnnnnnnnnnnnnnnnnnnnnnnnnnnnnnnnnnnnnnnnnnnnnnnnnnnnnnnnnnnnnnnnnnnnnnnnnnnnnnnnnnnnnnnnnnnnnnnnnnnnnnnnnnnnnnnnnnnnnnnnnnnnnnnnnnnnnnnnnnnnnnnnnnnnnnnnnnnnnnnnnnnnnnnnnnnnnnnnnnnnnnnnnnnnnnnnnnnnnnnnnnnnnnnnnacaaaacaaactactgttggaggtaggaactggcccaggggctgtattcccagaacacgattcccttttccccactgnaaacaaagatagtctacagcagcctnacaacttaatggctcacacaggactattctactggta

SEQ ID NO: 28787 - DNA, 482 bp, Homo sapiens
  misc_feature (1)...(482): n = a,t,c or g
gatcaaattggcttttattcatgatccatgaatggggcagtctccattctacaatatggaatgagaacttctgctgggtagtggcagaacactgggttttgtgagatggggacgaggaaacaacaacaaaaaaagctgactggttaatgtcaggttacttttttgtaaggattaaagcagaggggaattccttattatgttgactcagtcagactgttacctgtttttagggaaagctggtctgctggtctgctttaactgtctgcttccttgaacttttagtttgattatgtggcatttagcatgggtggcttcattttgtcttggtctggtcttttggggcctagtgcaggagcttagtccaaaaacaatggcttcccataagtttttttttaacaaaggctactgaaagaggttaaattatatgtctatnnnnnnnnnnnnnnnnnnnnnnnnnnnnnnnnnnnnnnnnnnnnnnngcc

SEQ ID NO: 28788 - DNA, 473 bp, Homo sapiens
  misc_feature (1)...(473): n = a,t,c or g
gcattagccaccacacccggcggtaaatgaatagtttttcttaaagtggagtcaggccgatggttcatagtggccaccaggtggcgctgtcgacacagagcagccttgttgcaggcccccgcccggctgtggtcagaggctgagctgaaggtcagtggtgtcctcacaggtccacaaatggatttttgaggggtccgtgccctccggaaatcagatgtaaaacgtgtacattcatattgaatcttacaggggagaaggccaactgtgtgctaggggtctcgcaaccccacatcaacgaaccatgggcatcagggttctccctgcaagagctgtgtgcacgctgatgtgcatgtgtggattaaacacacgtgtgtgctcacgtgcatccatatatatgcncatgtgtgtgatgaangagtgagcngacacagtggggaagttaagctggctnacgtctgaatcccanactttgg

SEQ ID NO: 28789 - DNA, 385 bp, Homo sapiens
  misc_feature (1)...(385): n = a,t,c or g
gctacatacttaagcatctcaggtgattcttctcattagggagatttgggaaatttctagatgagtgcttctctagagttaatgtgcataggaatcacctgggatcttgtttataatgcagtctnnnnnnnnnnnnnnnnnnnnnnnnnnnnnnnnnnnnnnnnnnnnnnnnnnnnnnnnnnnnnnnnnnnnnnnnnnnnnnnnnnnnnnnnnnnnnnnnnnnnnnnnnnnnnnnnnnnnnnnnnnnnnnnnnnnnnnnnnnnnnnnnnnnnnnnnnnnnnnnnnnnnnnnnnnnnnnnnnnnnnnnnnnnnnnnnnnnnnnnnnnnnnnnnnnnnnnnnnnnnnnnnnnnnnnnnnnnctccagcctggcngntananngaaca

SEQ ID NO: 28790 - DNA, 485 bp, Homo sapiens
  misc_feature (1)...(485): n = a,t,c or g
gtgagactgcatagggctcggcgtggtggtgggtnnnnnnnnnnnnnnnnnnnnnnnnnnnnnnnnnnnnnnnnnnnnnnnnnnnnnnnnnnnnnnnnnnnnnnnnnnnnnnnnnnnnnnnnnnnnnnnnnnnnnnnnnnnnnnnnnnnnnnnnnnnnnnnnnnnnnnnnnnnnnnnnnnnnnccctagacagtccttattcaaagttctttgtcacctgggaccctaaactgtcctggaaatgcagccaagtctatttttatttggtgcacttagcagtcacagggaagtgccattcccagacagccaagacaacgttagtttcctcaacatggtttgcgtgctgcttccctcagccctgaagggtggggacaagggtggaatggaaggtgcctgtcatagcagccagctgccaccagaacacagtaatgacccagcacccctgcacgttacccaatcatntgggacaggggagcaaaaacggg

SEQ ID NO: 28791 - DNA, 531 bp, Homo sapiens
  misc_feature (1)...(531): n = a,t,c or g
ggaagtacttaaaactctgtgtctttgtacttgctgttctcttggcctccaattccttttcatcttttccattcggtaaagtttgtttatcccacaggccccatcttggaagcctccagcaacttctccagacagaggtgttagcagtgtaggatcagatttctcaaccacgtcactcccatgtctgggtagatatctctgcccaagtgttctcatagcacttgagcagtactctctaagcgcccaggatctaccatgttgcttttttaaaatttgattaatttatttttttatactgctccttgtggagcaggagtgttcccagagtagcccaccatgttatattgaaatggatctgtgtgcataatgcagctgccatctacatcgtataattttggctcctcaagggtagggaccacatgagccttaatcttggggctttgaactctacatgagcnnacttacctttaatactggaanccagnnttgnatgangggnnaaatcccaaaggaaagggaaccnnggttgga

SEQ ID NO: 28792 - DNA, 416 bp, Homo sapiens
  misc_feature (1)...(416): n = a,t,c or g
gacttggagtcagattgctgagagctaatttgttaaaaagttgtgtttgagagcagtccattaggacattaatgaaaagtaggtttagatgatttaaatgtcttaccagttatcatttttgagcaaaaggtcatatgaaagaattttctattttaagattatattttatcaaatataaagttgaatgtttctgcgtcttttgtctttccctagtattatacttgtttctctttttaatttacaaaatttattttctagagatatcagcacagaaagatatacttgttncttagggtgttnggtgctttttaaatggttatttcagtttangtaggaaagatctcatttaaaatctangtgctttgagggggctgggtgcagtggctcatgcctgtggcccagnactttgggaggcc

SEQ ID NO: 28793 - DNA, 412 bp, Homo sapiens
  misc_feature (1)...(412): n = a,t,c or g
gaggatctaggttaggcaaatggtcaggtgtggcagggatggacagcagctggagggggcggggatgggcttgaactgcgcatgcccacagggttcccagtgcccttaggctatggccctagcgcctcacccttctaacgtagggtccttctaacgtagtccccattcacctcactcgctcacctcttaccactcagatgcctttgaatgtcagcctctcccccggccccacctcgccctggctacgtgttgggtggagtgggagaggccgcatctccctgctgccttacagacctgggagaatccgcagacacaggatggattgcgaacaggctctgtcctatgacatgagctggctgtgatttatttttgagggataggaacgggacacaacggngcttctggcttctgg

SEQ ID NO: 28794 - DNA, 416 bp, Homo sapiens
  misc_feature (1)...(416): n = a,t,c or g
gtggaagtgacaggtttcatcctaaaagtttaaaattcagagccagattgagccaagagttctggttctgataatggggagttagggtgcattggactaacccttggctgataataatcatgaactctggataaaatattttttaaaactgcttgagggcactggagaacagctgacgcaatcagcaataaaacaagcacaacccctgacaccgagaagcctgcaggtaagacgcgcatttaaccacagacggcgcaccttcctgcactgcaggggctggggtcccggcctgccagagcaaccagaatgtgagggaaagcccgctgagaaagaaaccacagagggaaaaccacgaaatatgcggacggactacccgcaatctacagctgaatctaaactgaagcccctgaanagcc

SEQ ID NO: 28795 - DNA, 416 bp, Homo sapiens
  misc_feature (1)...(416): n = a,t,c or g
gccgagttctgtaacaggttctttctaacaccattttactgagatgccccacagcccctgacagtgtgttcacccttggtgcaatgagtagcaaacacgacttgtttagctacagatgtattcttggtgctcactgactgaggggcattgacaatgctgtgggcatagagacgcatgatttaatggatttttgccttttanaatgtaacttttaacagtaaaatagaaaccacaaaaactatttgtaggggtattcggaaagaagcaaaatgtaagcaattgaaacctaatgtatggaattgacaaggggacacagaaggaaagtaaagagaataggttagtggattagtattcctgtgcttaatggaggacagattactacaaatgaccctggaagggcagatggggtggaggat

SEQ ID NO: 28796 - DNA, 415 bp, Homo sapiens
  misc_feature (1)...(415): n = a,t,c or g
gcgctgactggcccggctgggcagnnnnnnnnnnnnnnnnnnnnnnnnnnnnnnnnnnnnnnnnnnnnnnnnnnnnnnnnnnnnnnnnnnnnnnnnnnnnnnnnnnnnnnnnnnnnnnnnnnnnnnnnnnnnnnnnnnnnnnnnnnnnnnnnnnnnnnnnnnnnnnnnnnnnnnnnnnnnnnnnnnnnnnnnnnnnnnnnnnnnnnnnnnnnnnnnnnnnnnnnnnnnnnnnnnnnnnnnnnnnnnnnnnnnnnnnnnnnnnnnnnnnnnnnnnnnnnnnnnnnnnnnnnnnnnnnnnnnnnnnnnnnnnnnnnnnnnnnnnnnnnnnnnnnnnnnnnnnnncacagagatatgaatcaggtcttgatgcctatgaaaataagaaccattttatctgtcacgggccggggcccct

SEQ ID NO: 28797 - DNA, 543 bp, Homo sapiens
  misc_feature (1)...(543): n = a,t,c or g
gcaaagaaccaaagattatctacatgcctgttaatggtagaatggaaaatatagattgtggattactatgggttatttgaatgatggaatattacacagcaatgacaacgaatgaactagagtcatgcaccaacatgggtgattctcataagaaaatgttgatagaaaagcacaaaccacaaaagaatactcaaagtgtgatttcaattatataacattcaaaactgaggcaaaattgagcaatattagtaatattatgttacaggtacattaacatcaggcaaatatataaagaatagcaaggaatgatgaacacacaagttggagtgaaagataggaggatgtgattacagagagtcatctagggactttgagaacattgccagcaaaatatattgcagctttgattttaaaaacacatgcagaggaaactagaaagaattataccaaaacgttaacagttgnatttggagagtactttcagcacaatttctgctctgtggatttgagtaaagtgaagttccaaaagccgaatcntccttt

SEQ ID NO: 28798 - DNA, 548 bp, Homo sapiens
  misc_feature (1)...(548): n = a,t,c or g
ggctggggcatggctgtcaggagggcttcctgggaggtgtctctgggggtggggtgaggttggggcgatggcctttggagattgcgtgtggtgttcaggactgttccttggtgtttgagggaaactttagtgggattgcagtggaatgtaaggtcagggcacgtgggtgctctctcggggtggggtgactgggagacctagagggaaagcctgctatgcagggggagagcacaggactggccctgctctgcggcctcctttgtcccataacctgaagttaagtcacatcccctgtcgggacctccgtgcactcatctgtcaagtgggggcgcttcccttcagcatcacctgcagcagacggctctcgggagtcgtgggttccaggcagctgtgtggacccagggacagacattcaaagggacgccagccatccttggtgacagggccccaacttacatccttccttccgtaggaaggagatgaccggaagcaacccttnacaacacgagcacatcggcaaacctatgaaagnggaatttntaacaaaa

SEQ ID NO: 28799 - DNA, 422 bp, Homo sapiens
  misc_feature (1)...(422): n = a,t,c or g
ggctaggcaggtgtgtggaggccctgaggaacttgcttcacagttccacttctcatccccaaggtgacatcatcatcccctctattttgcaccacaaaattagttcaacaatgatggaaaaggaaatgttaatgtcctgctcacaaaggttcatgttgccaaaagttgtagaacacatactattctctaaacgtttccctgttgacataaaactcacaggtaaggtgttttgttacatggagaaccccaggagagttgaaataggggatagggggaccaaagctgtgtgcccaaagcaaatgtgtaacaatgaaacagcaaaagaactaacaaaactaactccatttgttgaaggggcctctacccattcctgcaaagtaggctaggataattttagaacactgagataatatgcnaaaacc

SEQ ID NO: 28800 - DNA, 421 bp, Homo sapiens
  misc_feature (1)...(421): n = a,t,c or g
gcggaactcgaattcatttctcccgctgccccatctcttagctcgcggttgtttcattccgcagtttcttcccatgcacctgccgcgtaccgggcactttgtgccgtacttacgtcatctttttcctaaatcgaggtggcatttacacacagcgccagtgcacacagcaagtgcacaggaagatgagttttggcccctaaccgctccgtgatgcctaccaagtcacagacccttttcatcgtcccagaaacgtttcatcacgtctcttcccagtcgattcccgaccccacctttattttgatctccataaccattttgcctgttggagaacttcatatagaatggaatcaggctgggcgctgtggctcacgcctnnnnnnnnnnnnnnnnnnnnnnnnnnnnnnnnnnnnnnnnnnnnnnn

SEQ ID NO: 28801 - DNA, 449 bp, Homo sapiens
ggtggtgtcagatggttcacaaggagctgatgaatgctaggccttgcggataggagtgtataggagcattctgaggcaggagctggggatgtggccgtggctggctggttaatgagtgcactggaccggtcagacatcctgggttcaagtccttctaccactagacctgttaatttaagatgaggttcttccctattaactcccatgtcacattaaagttatgaatagtaaataaaatgtttatagaaaagtaaaaaagctttctaaattgcaaaatcctatagagatttgaattgttactctcaaattaccagtcttagaaatcaaaattttaaaaatttgtgtacaatttaaaactgaagagcgtctgaagagatgctgatcttacccatttttaaggatatgaaatgacagcagatcattttaggatgaaaaattcatttcccctt

SEQ ID NO: 28802 - DNA, 396 bp, Homo sapiens
  misc_feature (1)...(396): n = a,t,c or g
ggtcagacaaagtcttgctctgtcnnnnnnnnnnnnnnnnnnnnnnnnnnnnnnnnnnnnnnnnnnnnnnnnnnnnnnnnnnnnnnnnnnnnnnnnnnnnnnnnnnnnnnnnnnnnnnnnnnnnnnnnnnnnnnnnnnnnnnnnnnnnnnnnnnnnnnnnnnnnnnnnnnnnnnnnnnnnnnnnnnnnnnnnnnnnnnnnnnnnnnnnnnnnnnnnnnnnnnnnnnnnnnnnnnnnnnnnnnnnnnnnnnnnnnnnnnnnnnnnnnnnnnnnnnnnnnnnnnnnnnnnnnnnctgcattttagaatgcccctgaattcaaggaaggccagagattacaacatggatgcatgaataaaaactcatcattacttctggaaatttaattcagnatcatc

SEQ ID NO: 28803 - DNA, 403 bp, Homo sapiens
ggggatgtgctaatgccttaacttcacctcccaaggtcattagaacttttttgtataccaatcgccaaacttgtcaggactggctaacgcggattcgactctccatcatgagggtaggattgttggcaggccagcctgcagtgacagtgagacatggctttgacttgcttacagagatgaaaacaaccagcctatctcaggggaatgaattggaagtaagcattatgatggtggtagaagcactatgtgaacttcattgtcctgaagctatacagggaattgctgtctggtcatcatctattgttggaaaacatcttctgtggattaactcagtggctcaacaggctgaagggaggtttgaaaaggcctctgtggagtaccaggaacacctgtgtgccatgac

SEQ ID NO: 28804 - DNA, 469 bp, Homo sapiens
  misc_feature (1)...(469): n = a,t,c or g
ggaagtcttgaaggcctctacagttatcttacttcctgtaaacccataatgagttaacacattaaggaatatgctttgactgtgtacagtgacacacaccttagtcccagccactgggacaacacagcgaaaccttgtctctttaaaaaaaataaaataggagtactactttgagaacagtactccctaatttaaatgctgtctcaggactcgaagtcttggtctcatttcttgagtctgtgttaagaactagtccatattctgcattataaggtagtgtacctagtttttactttagccaaaattttgataaatacatcttcccaaatagtggtagacacttacttcacttgtcaatcaatcagtcattgattggtaactcccaagtgattgaaaactgcttcccttgttagactaaactgcctttttccngagaactcagcagagccaaaaagntggnggggaaaac

SEQ ID NO: 28805 - DNA, 400 bp, Homo sapiens
  misc_feature (1)...(400): n = a,t,c or g
gctggaagacaaagtttaattgtgttgtaacatctgataaagttaaaaacctgttctcaatactgagctttaatagaaaagaaagcacctcactcactaattctaattctccttacatgtaagatgttaagagtgccaagaagtttcaaaaagctcttaatgtatgactttggttaatattgattcattgttagtgataaaccatttttatttgggtgtgtgaatgttactttttcagtaaagttaaattcaaaaggaaatcctgtattttgagttgctaagccttcgggcttcatagcaagctctaaagactggagaaaatcggcttcacatactgcttcagggcccgaggccaccatttcctcttccttgngagactgaactcaattnccatgacgcc

SEQ ID NO: 28806 - DNA, 410 bp, Homo sapiens
  misc_feature (1)...(410): n = a,t,c or g
gcgnnnnnnnnnnnnnnnnnnnnnnnnnnnnnnnnnnnnnnnnnnnnnnnnnnnnnnnnnnnnnnnnnactgcgcttttccannnnnnnnnnnnnnnnnnnnnnnnnnnnnnnnnnnnnnnnnnnnnnnnnnnnnnnnnnnnnnnnnnnnnnnnnnnnnnnnnnnnnnnnnnnnnnnnnnnnnnnnnnnnnnnnnnnnnnnnnnnnnnnnnnnnnnnnnnnnnnnnnnnnnnnnnnnnnnnnnnnnnnnnnnnnnnnnnnnnnnnnnnnnnnnnnnnnnnnnnnnnnnnnnnnnnnnnnnnnnnnnnnnnnnnnnnnnnnnnnnnnnnnnnnnnnnnnnnnnnnnacctctgggggcaaggcatagctgaacgaaaggnancaaaaacttttgcaacttaaatgggcctg

SEQ ID NO: 28807 - DNA, 407 bp, Homo sapiens
  misc_feature (1)...(407): n = a,t,c or g
gcaaaaaagaaatattctagatgaggccaggagaagccatctagagtggcactgaagctccaaagagttccacaaagagtgaatcaattgcatttatgtgctttggaaaaaacaaaaagcccaaacttgggatttcctgttagcccagagcagcgcggctctatccctaggactcagtggctcccagtgcaaaagccggttccctatgtgagttatgtcctgcgtttgaccatctgatccgcattttcccgtggattaataatttgaccactctggaagtcttgctgtgtgtactgaaaccgtctgttaactctcctgtggactgctgggtttggtatttaatcttcaacaggaatttcagaaggcaaagtcccatctgagaagagtgccatgcnagtaatgaaacc

SEQ ID NO: 28808 - DNA, 431 bp, Homo sapiens
  misc_feature (1)...(431): n = a,t,c or g
gagcggcnnnnnnnnnnnnnnnnnnnnnnnnnnnnnnnnnnnnnnnnnnnnnnnnnnnnnnnnnnnnnnnnnnnnnnnnnnnnnnnnnnnnnnnnnnnnnnnnnnnnnnnnnnnnnnnnnnnnnnnnnnnnnnnnnnnnnnnnnnnnnnnnnnnnnnnnnnnnnnnnnnnnnnnnnnnnnnnnnnnnnnnnnnnnnnnnnnnnnnnnnnnnnnnnnnnnnnnnnnnnnnnnnnnnnnnnnnnnnnnnnnnnnnnnnnnnnnnnnnnnnnnnnnnnnnnnnnnnnnnnnnnnnnnnnnnnnnnnnnnnnnnnnnnnnnnnnnnnnnnnnnnnnnnnnnnnnnnggctagctcaaggnttgtaaagacaccatcacaccctgnatctagctcanggtttgnaaatgcnccatcagtgcttgngggacttggaa

SEQ ID NO: 28809 - DNA, 421 bp, Homo sapiens
gtaaaatcacatcattcttaatacatgctaaaacgttgagacgggttgttgttcctttccagtgttaaaaggctatttgctttttagtgtaccaaaactgatttcagttatagtaaattatgactaataaggtaatctgtccttgttaacaagcctgtatttgttatacctgtacttaaagtaaaattcaaactccttaccctgtcctacaaggctctacctgatctgggccctacctcatctctaacatcatcttatgctattttctttcttgttcaccagagccacaccagctacctttctgtccctccttgttagacttatttctgctttagagcacccttgctgctgccaccacctgaaatgcttctcttctggtattttattttggtgagaacacctggcatgagatctaccctct

SEQ ID NO: 28810 - DNA, 421 bp, Homo sapiens
  misc_feature (1)...(421): n = a,t,c or g
gaaaagatttgtttaggctctaaggatgtactgctacacttgattaaacttctgtcatattttcagacatcaaagtgtgtctgtgaaagaaagtggcttttgtcggattttctgatctatttgtgatgagtggctattttatgttttatcattacttacttaacagtaataacctgtcacttggcctgtcatatagtagacaatccatcattggtttaacgagagctacaggttttatttacataataacaagttctggtatgtatagcagaaagtttcctatttgtgtatttttacaattatttatcaaacagagccccccaaaaatgccctgaaattagacaaaagctaacctatgttaggcaacttagctatatcatactaacattgaaacagggctgnttttctaccactaatgatg

SEQ ID NO: 28811 - DNA, 425 bp, Homo sapiens
gaaagtttgaaagcttgagttacgtagtaacaactactgtacatttaataacttatcaacctcctttaggatttttttggccatatatttatttcgttcattcaattgaaaatcatgagcccagaagtctaccttgtaaaccttagtctgggtctcaactagctcttgagaccttgggaaattcagtaataatctacatcatctttttgttcctcatctgtagagatggggttaaattatgttatctctaaattttcttcaaacccaaatatgctatgtgcctagatatttgttcattactatactgtgttgtagcaaaatgatatagcatacaggccctgctttcaagactggtacattaaacaataaaaagggcaatgggcaatattctttcatttaacaaatattaagtgagtacttcttat

SEQ ID NO: 28812 - DNA, 424 bp, Homo sapiens
gaagtgctaactgatatacaacatcagtagtaggatggcctcattaaatggtttccaaaaagcccatgctacaaactctcactccagtgccattggaggctgacagggactaagagactggcaacctgtaaagttcacctctattctaaagggagcaggccagtttgctccctgcaggaatgggctgaggttcgccagattttctcattcgtctaccaaatccaaaaatgcaagtatgtgtgagaattctttatcattatcatctaatttgacattaagttaaccatgtgggcaaattatcgcccttggtgaactgccacttgcaacctctggtctactcatttcttcctttatatgcatataaacctgtgtggctttaataggacattagtaacaggtcacctaagcctttcttcgggcttct

SEQ ID NO: 28813 - DNA, 442 bp, Homo sapiens
  misc_feature (1)...(442): n = a,t,c or g
gnnnnnnnnnnnnnnnnnnnnnnnnnnnnnnnnnnnnnnnnntagtgtcttgaaaagcatgctttataaggaggcagaaagtgtttctcttttgacagatgacctccttgaccccttgactttccatttttgatggtttcttttgaggtctacgtcatctggtaattttattggtgtgatttatgcccccagtaaggatcaacttgtatagattctacattctcatggaagtctatgtactgtctctactgtgtaataattagctccaactctacaaacaaggttagaaatgaaatcaccagcattacaagtgagacatancaaatggaagattcccttctctgagtttctctcataccgntaattntatttgagctggcattgactcattctatatgnctcttctgctaaaatttgaactctggaggactggtctcatatc

SEQ ID NO: 28814 - DNA, 451 bp, Homo sapiens
  misc_feature (1)...(451): n = a,t,c or g
gggacattgacttcaagtaccactttgacttctttagtgtgaacttcaatgaagaactggtggctttgtatggtggaagtcttcagaagcagaccaagtttgtacatgaatgtattaaaacaattctcaaactctataagggtcaagaatttgctccaaaaagtgtggcaataattggtcattctatgggtggccttgttgcaagagcattgcttacactgaaaaattttaagcatgatctgataaatcttcttattacacaagccacacctcatgttgctcctgtgatgccattagatcgtttcattacagggtcaactggatggctgaaggaccatgggtaggagagaaccttttcaatggatatccttttgaatcttgaattcaaaaacntattaaaaatcattttaaagcatgtcatgngnaaagttataagaangnangtaagggc

SEQ ID NO: 28815 - DNA, 440 bp, Homo sapiens
  misc_feature (1)...(440): n = a,t,c or g
gaactattcctgactctcctgagactgtcccgcctgctcactggtaggtaactcaacctctatctcgggtggtggtttctcacatgcatgcacctgtcagtactcagctgaagattccagaggacacctccgtaaacctctagcttggttctgggtgcggctctcctctccatggggctctcttgtatcctgccttgcaattctagctgcctttatttctcaaattctcaaagacccctcaactgaggtagggcatgggctctgtgtgggctccctctccgcaggctgtggcctatctccagcagtcacctcgggcaagcatcaggctcactgcgttcaacttcttgctctctggactcactgtctatgctgcttgctnataccaatggctcatatagttgntcaaagantttgccaatttttaaggggnttaaaggata

SEQ ID NO: 28816 - DNA, 447 bp, Homo sapiens
  misc_feature (1)...(447): n = a,t,c or g
ggagggagaggcgcacaccagcagggatgagaagagaaacattggtgcagggttaactgacacgtgacagacaagagactcttctctggtccccagcagtcaggcctctctggaggggtgtgggtgccccttgctatggtgggagggatgcagggtcaccaccgtgccggatgccttggctgtgtccaagtggcagaggctggcacgtctccctcagagacctccatgttgctgtggggatggcttcccgcctcccagatgcagggttgagtcggccctgcccgcggtccagtgccatggagatgtggcctctgcggtgcttagtcagggctgggggccgctgcaagaacaatgngattctgctgttgtgaatagcccagtttaaaacaagtccccgagctgtgcattcgcgtggtcccttgacaagaacctggaggctgtncaagc

SEQ ID NO: 28817 - DNA, 430 bp, Homo sapiens
  misc_feature (1)...(430): n = a,t,c or g
gcatgagccaaggcccaagctcaaaaggaactctgagcatggcagaaacggagaaaggctggtgtgctggaggcagagaatgctggagaacaggtgaggacagtgaggccggcagggccaggccatggtgggcttgggtgctgtgaaggaggttatgctccttcctgagggtgggggaacacagaaggcatttgatcgtagagggacagggtcaagtccggcccctcggctggaagcctgtgtcttcctgttcgcccaaagcagaagtcctgctttggaggtctggctttgttcttggnnnnnnnnnnnnnnnnnnnnnnnnnnnnnnnnnnnnnnnnnnngacctgcactgctgcagtggctgtgggttttggtggagacagccgtgggttcaaagtcttcccttcaagctgtgagacctttgggcggg

SEQ ID NO: 28818 - DNA, 430 bp, Homo sapiens
  misc_feature (1)...(430): n = a,t,c or g
ggtgtgtgtgtgtgtgtgtgtatctgtgacatgcatttttttcccaaaagtgaggagatgcagtatttctgtgtttaaattattttttatcatttagcgtggtctgaaggtttgtgtacccccaatttcataggttgaaatcctaagccccaaggtaatgatactgatttggtcatgagcgtggtgccctcatgaatggggttggtgcccttatgaaagcggccctagagagctgctttgctctttgcaccaggtgagaacacagctagaaggcagcgtctgagtcagaaagccggcctccaccagacactgaatctgccttnnnnnnnnnnnnnnnnnnnnnnnnnnnnnnnnnnnnnnnnnnnnnnnnnnnnnnnnnnnnnnnnnnnnnnnnnnnnnnnnnnnnnnnnnnnnnnnnnnnnntatcacc

SEQ ID NO: 28819 - DNA, 434 bp, Homo sapiens
gtccagatacctggtcttttatcttactgtttgaagatgcgtctattaatatatgcttgggaaagcaggtggcagaggtaacatcttctgaaagctttggcagctaagcagtattctcgctctatcatgtggcatgttgattgtctgctccctgactcccatacacagtttcctctgcctaggcaccatctccccacttttgctccctccctccccaatatgcctattcctgtttgtcctcaaccacttttctcctgtccagccctaccctatgttaatctgatttagatgcttttgactctgctctttagaactctgtaattacctctatcatggcttttacaatactctaggatctttatggttacttaactgctccctgtactaagcttgaaatttcctggaatgcgaggatcaggtccaagtggactcta

SEQ ID NO: 28820 - DNA, 397 bp, Homo sapiens
gatggcatctttgccacagcctctttatgccatttaaataagatcgctgtgttcaatatcttgctagaacccacttgttcatgtaattcactggcttagaattgacatgttttctactgcctgtgaatcaggtttaaattgttgggcatagttttcaaagtcctctacaagagtgtgccctataaagtatgtcctcttatccctcagtgcactggtcacaccttgcatgtcttcccctgactccgtacctttccaaaatgtcctttgtttctactacactatttccttccttcctcacattctagatcagaagcatctagaaaacttccctagttgttatcgtccagctgcctcactctgcagtcttttttgagactccgctcaaaaaaaaaaaaaa

SEQ ID NO: 28821 - DNA, 417 bp, Homo sapiens
  misc_feature (1)...(417): n = a,t,c or g
ggatatttataagaaattgtaacctaaagatttgaaaaataaagttaaatgtcagtgtcaaggctacagatttaattttgcaaatgattgacaggtgtttgttaaaaccatcaccacagatgccacctgcaaagaatagggtgactatatatcaaagtttgtttgggatagtcttggtttacacctgctatcccagaatagtaattatttgtcctttttcactcttgaagacatcacattaggatcataaaaattatatggtcctattacctaaggtgggtacatatggaaagagaacatggncaaaggtgaaactgggtttaacataagcatttcagaggcaccagaggagaaaaagccaaggaagagcttantttngttgnnaccccagagactgtctgagccaagcagagaaaa

SEQ ID NO: 28822 - DNA, 436 bp, Homo sapiens
  misc_feature (1)...(436): n = a,t,c or g
gcaggaatgtgggcagggcctgaagctgaaaaaggacacttcccgcccctacgaatgttctgagtgtgagatcaccttccgctataagcagcagctggccacacatctgcgcagccactctgggtgggggtcttgtacacctgaggagccagaggagagccttaggcccaggccacggctgaaaccacagaccaaaaaggccaagctgcatcagtgtgatgtgtgcctgaggagcttcagctgcaaggtgagcctggtgacccatcagcgttgccacctgcaggaggggcccagtgccggccagcatgtccaagagaggttctcacccaacagcctggttgccctgcctggccacatcccttggaggaaaagccggagttccctcatctgngggtactgnggcaagaactttagtcacccntttactttgngcggg

SEQ ID NO: 28823 - DNA, 434 bp, Homo sapiens
  misc_feature (1)...(434): n = a,t,c or g
gaaataagtgagataccattatttgtagtagtactgtgtgattaaaagcttaattgtgtcttaccttctattacactttttataggatctaatcgtgtatacacatgcatataaatttacttaccaggtcccttaagattttttttaaatgctataacctgataaaatgttatgaaatgaatttcaaatggagtgagacatataggtaatttagaatcggtaatatgaagtgtggtagaagacaagaaaaggcctgggaattgtggagttaaagagaatttggtgggaaatttaggaagatacaagaaggagcgacagagagctgactcataacctgcatgtaccttatatgaagggcaaccagatgtttgaggagggcttggtggacaaaggtgcattcatgctccctatatgcnaactggcccaaggagagg

SEQ ID NO: 28824 - DNA, 442 bp, Homo sapiens
  misc_feature (1)...(442): n = a,t,c or g
gcttgaaataccgtgtgaagaccatttgaaaacacttggaatgctcagctcatagggagaaacaggaagcatcctggttccctctaaatatgtgaaggctgttacatggaaagaaggatcagattgttttatgtgaccctacacgacatagctaggagccatggggaggttacagggagacagattccaactcaataccaatggctgagtaaccctcagagtggtggagattgcagggcctgtcatagtggttggactctggttcttggccctccacacaagtcttgggtagcttggtctgngaataatgagctnttantgctggaaatggccaancaggggttggttgaacatgtgttgagggggaaaagggattcatgaatgnaatgggggttggggncaggccagctgaacaatatgtgcctttttgactcttcaaagc

SEQ ID NO: 28825 - DNA, 401 bp, Homo sapiens
  misc_feature (1)...(401): n = a,t,c or g
gagagtttttcccaataacttgaattgttgaacaagaaaatataatctaaaatcatatttgacttctgatgacagaatgtgaaagtttcagttcatgttcttgtgattgtcgccttatttttgttgtaaccaaaagaagatgaataagtgaaagttttcacagtttgggaatcaggctttttataggagagtatctgttaggtatctttgaggagacttgtagaagcctcaggcatagtggataacctttttgagaaaccgaacaggtagatgctggttgtcccattaccggttttcttactgcccaagcagcggttactacatagggcttctctatttggggggggggggtggncngcnnttccctngganacnncacttganactgnangttntacccc

SEQ ID NO: 28826 - DNA, 432 bp, Homo sapiens
  misc_feature (1)...(432): n = a,t,c or g
ggaagtggaaagtgccgacctggagaggtcaccgttgtttcatttctctgtatccagaaaggaccgtctcttaaatccaccaggggaggaaacagcctcctgtggaaaatgctgtcttctcaggagcattgtatctagaaaggacaaacagaacacatgcctctagaagggtttcaagtaatggctggcatttagtaataaagccaaacatactaaaaagaatttttttttgcctgtttctanaatgtggaacaggaaacattcaagttagaaatctctanactgtaatccacatcaagtttcagtattagccttgccaactgactaaaattgtgtgggtaagctcttgagcctttgtaatgaagtaaggatgctgataacagccatttcactgggaagaacaaatgcaaagtgctcaacaatttgtagaaa

SEQ ID NO: 28827 - DNA, 437 bp, Homo sapiens
gatttcattggaagatccatactatatccatagattcatggtgccttagaaatctgacattagagtctttggtagtgcttttactgggaaatacaagcatattaagacagagtctcctaccccatataaatttcaggtgaaagggagaaatttctttcacagttattaataaaatgtgtttatttccaatagggtagtagaaaaaaactaacattttcaaagtactgtctttttctgagttttagatttctgaagagagtaactactctgtagtgcttattaccagttacagtgtgtaggtttctgcttcctgggaggtctgttataaacaaaggtcattagggacctagccaggtaatcttcattaatgggaaaacatcaacaaacaaattcatttctgtgaagtctccaggggttaaaaccatttgtgactcttt

SEQ ID NO: 28828 - DNA, 433 bp, Homo sapiens
ggttttaaagaacaggtgtgaaagtctaagagtttaatccagactctgcacaagaagttaatctgccaaaccctaggattctccttctgaaagctcagaatatttcttccccttccctatacacacagggctcgaagggttagagaagaaaggcagacaacagcttctgagctttggactaatcacagcctctgttctcagcaggagccccaacactgagaccagaaaagatggtgctatgctttcctcttcttttactgctgctggttctatggggaccagtgtgtccacttcatgcttggcctaagcgtctcaccaaggctcactggtttgaaattcagcatatacagccaagtcctctccaatgcaacagggcaatgagtggcatcaacaattatacccagcactgtaagcatcaaaatacctttctgca

SEQ ID NO: 28829 - DNA, 427 bp, Homo sapiens
  misc_feature (1)...(427): n = a,t,c or g
gggtttcatttatgcaaaattctagaaatgaaaaggagtctatagtgacaggaagcagatcagtgggtgcctaaaaatggagagtggaggtaagggaggtggattacaaaggaggcagaaacttttaggggagatgaatatttgtgttattctgattgtggcaatgatttcacagttatatacatatgtcaaagcttattaaatagttcactttaagtatgtgcatgttactatatgacaattatacctgaataaagctgtggggaaaaaaaccaatcagcgcttatccatatttactgaaggtgttaagtaagatgctagtaaatgacagaatttcagctgagccaagtctgactcttgaaaactacatttcctctttagtgcagaaaatatttatgagaatgggagccntanaaaaaatgaaatc

SEQ ID NO: 28830 - DNA, 427 bp, Homo sapiens
  misc_feature (1)...(427): n = a,t,c or g
gtcggtgcatagggtttatgtgcgtcctcctccttccctctgagctggtcccccgtggggaactgctgcccagactgacctgcgtccttccgcacgtgcaggaaaatgtccacgtgcacttgtcagggtgggggccacacgggcaccaccactgatcatctgtgggatcgagttactgcccatgcagatcccacgtgcagggcccagtcgcttttggtgagagagtggacgctgtggtgactccacggtctgtggctgtgctcaggaggacagagaggggacatcctgagatggtttgggcagcccgtggatcctgtgcatgtccccagagcgtccactttctccatggagcagtggagtggcgttgctgagacagaaagtcaagttctncactccccatgcagccccactcccctgtcttcggcca

SEQ ID NO: 28831 - DNA, 426 bp, Homo sapiens
  misc_feature (1)...(426): n = a,t,c or g
gatggaggaaaaaatgttttttgagtaggttattaggtatgataatgagagggggcactctgattcaatcttttaatttccagatctggactnnnnnnnnnnnnnnnnnnnnnnnnnnnnnnnnnnnnnnnnnnnnnnnnnnnnnnnnnnnnnnnnnnnnnnnnnnnnnnnnnnnnnnnnnnnnnnnnnnnnnnnnnnnnnnnnnnnnnnnnnnnnnnnnnnnnnnnnnnnnnnnnnnnnnnnnnnnnnnnnnnnnnnnnnnnnnnnnnnnnnnnnnnnnnnnnnnnnnnnnnnnnnnnnnnnnnnnnnnnnnnnnnnnnnnnnnnnnnnnnnnnnnnnnnnnnnnnnnnnnnnnnnnnnnnnnnnnnnnnnnnnnnnnnnnnnnnnnnnnntcccaaatttgggnctggggncaaggggcatttt

SEQ ID NO: 28832 - DNA, 433 bp, Homo sapiens
  misc_feature (1)...(433): n = a,t,c or g
ggtgagaatccagaatttgagagaaatgtggagaatacatcttgtttcatggtccctggtgttcttcctgatactttgaacacagtcagaataagagtcaaaacaaataagttatgctatgaggatgacaaactctggagtaattggagccaagaaatgagtataggtaagaagcgcaattccacactctacataaccatgttactcattgttccagtcatcgtcgcaggtgcaatcatagtactcctgctttacctaaaaaggctcaagattattatattccctccaattcctgatcctggcaagatttttaaagaaatgtttggagaccagaatgatgatactctnnnnnnnnnnnnnnnnnnnnnnnnnnnnnnnnnnnnnnnnnnnnnnnnnnnnnnnnnnnnnnnnnnnnnnnnnnnnaaccngattc

SEQ ID NO: 28833 - DNA, 423 bp, Homo sapiens
  misc_feature (1)...(423): n = a,t,c or g
gaagagtagcaccatgagcttcaataccctgtgtcggaagctggctaatgctgtcacatggtatttgacttttaccactattttaaaagtgaaagaggttaacaatctccttatcacacacttgataaaaagtggaccaaaggtgctaatttgaggcaatttgcgatcagcttcctagtctttttggtattaaaggaagacaaattttgccatatagtgtttaaaaacaaacaaacaaacaaagacaagaatgcccacaagccagggagctacttaatgtcaggcatcgaactgagtagatgggagtggttatttttcattatgacacggnnaaaccgatcggggtggttacnacccctctncactaagggactggcagangaatcagagcnganggggcccttcaacncnnggcccctggtg

SEQ ID NO: 28834 - DNA, 422 bp, Homo sapiens
  misc_feature (1)...(422): n = a,t,c or g
gcccctgctcagatttgctaattgttgccagatgggaaggctgtcccattggccaaacttcagaaagaaaatgctgcatttatgtgaaatcaacttttggcagttaaatcacattccaagacacagtgaggcaccaaatgggctacccaagggaaatgtgtctgcaggctggatttgtcccgtagacgatgagctggagacctcttccctggattatggaacagcagtcgcagtctgagaaggaggcatccccctcgtgtgactggtagaaaactaggggcccaagagggaaaggggactcctcctcaagcagacagctcttctccatccctgtccgccctgtccgatagtagagcgaggggctcatggtggcttctgaaagtggcctanccttggctagggctaatggggcaacttggtga

SEQ ID NO: 28835 - DNA, 420 bp, Homo sapiens
  misc_feature (1)...(420): n = a,t,c or g
gcccagaaacatgaaaagatgttcagtcgtgctagttcaatcgggaactgaaaataaaaacaaccgtaggatgcctttttttacccatcagcttggcaagcattgaaagtgctaatgaagtccagtgccgaaggagggcggtgggaaacgagccctcctccattgctgtggcaggcacagcgtacagcctgctgaaaagggaacttgcttatcagcacctgccatgctccatgtcccatgtgtgcaagtaaaacatgggtcctgtcttcaaaaagctcataataaagggaacatagtgtgaatttaaaaggatactgcctccagtgctgtagtggagggatgtacaagaagcggaagtgagtggcctgtatgggggcagtggggcggnggtgggtttcaggagagccttnccaggaacat

SEQ ID NO: 28836 - DNA, 508 bp, Homo sapiens
  misc_feature (1)...(508): n = a,t,c or g
ggactatttgaaagaggaaagagaagacatggtttagaagctgcagtgaggagcaaggaacacataccttctgcttttcaagtacagggggtacaagaagttaaaacaacaacaacaaaaaaccttgagaaggccgtaagaggaagagtatgatgagggaacagccaggtacctgggaagacaagcaggtgaagagaattttcagagaagcagttgcagttacaggtgagtatgatcacagttccagagagcatcctgaaaggatttganagggagaagaggtaggggattaggtcttactgggagacgtacacatcgttgataattgataacctancagtcttgtgattttggctggcactcagatttcaaggctgggagatgtggngggtttaacngccctgtcanctcttatganaggtgnatattcagttaccttagtttgttgatggccttgngtagtggtaagaaattattaggaacttcgggggcttttttctacttgcta

SEQ ID NO: 28837 - DNA, 457 bp, Homo sapiens
gtgtgattggtgtgaatctcatcaggtcgaaggtcgaagaccctgccgtgatcatgagagggactcctcagatccaaagagtgatgactatgatgatcagagaccatgaagtcctcttccccaagtccaaggatatacccctgtcaccccctgcccagaaaaatgaccccaagaaagctccagtggcccgaagctctgtaggctgggatgccactgaagacctccgaatttctaggacagacagcttcagtagcatgacaagcgactctgatacaaccagccccaccggacagcagccgagcgatgcgtttccggaggacagcagcaaagtacccagggaaaagccaggagactggaaaatgcaatctcgtaaaaggactcaaacactccctaaccggaaatgtttcttgacatcagcttttcagggtgccaacagcagcaaaatggagatctttaa

SEQ ID NO: 28838 - DNA, 452 bp, Homo sapiens
  misc_feature (1)...(452): n = a,t,c or g
gctggtnatttgtaatcagccaaacttgcttctctgaaaaggctgctacnggacgttgcanagctcatgtnccttcccagtatcagaaaggaaaaaaatcaagntacatttatagctaattttatacatttacgctctcttctagcaattctatctctttccacaatgcaaaggctgaactattacttctcaaaacttctattaaattatcctcctttagttcagggtagttttacagttgagtttggttttcataatctatgtagctaatgaaaataatctcatttccattaaaattaaagacagtctatgtaaaacagacgctaaattatactcacatgcattaagatcagaccaatatttttatgtttaataatttcctacaaataatattgtatagttgtgtgtgcttancttggtcatattttnaaaaggacccattcttgaccttg

SEQ ID NO: 28839 - DNA, 442 bp, Homo sapiens
gtgtgggttgtgtttttgcaaataaatgattctaaaacgatgtgctaagtgcttgtaataatggttttaagaaataactacctctatacttattttgggctgttgttccccttgcaccttgacttttgcccattggtggtctttacagttcctagaatgctgtttcaagacctttgcacgtgctgttcttctgcctgggaagctttctaacaagtttttgcctgctcagcttttgctcatctttcaattcctgcttaaatgtcttttcaagggaaataattctccttgatcctctgagattaggttaggcttccgtttatacataaaagacaacaccctgaatcttttattgcacttatcacaattgtaattaaacattatttaggtaattatggggtacactgtatccctgctggatatagttgaagaaaggagaccttgt

SEQ ID NO: 28840 - DNA, 509 bp, Homo sapiens
gtcacactcaccatttaggtaaggtagtaagtggatacagagtaagaaatggacagtggacactgattggacggcagagccctcagctgccacaggctttctaccctgtggggcatccagttgatgtaagttttggtgacctactggctgcaagatgtgtattcactggtgaaggaaggacagaagccacacacattggtggcacgtctagtgatgaaatgtgcaacttatacattatgtattacatggaagccaagcatgcagtttctttcatgacctgtacccagaatgtagctccagatatgttcagaaccataccaccagaggccaacattccaattcccgtgaagtctgatatggttatgatgcatgaacatcataaagaaacagaatataaagataagattcctttactacagcagccaaaacgagaagaagaagaagtgttagaccagggtgattctattcctactttcaagctgtaggaaaagggaagatgtgtcatgtcc

SEQ ID NO: 28841 - DNA, 461 bp, Homo sapiens
  misc_feature (1)...(461): n = a,t,c or g
gctttccctgaagtcagcaagaaccctgtgagaatcaggattggtctagaaatttagcatttacctaatcaatgattctctagacatgtcagtacctccaagtgattcatatgcatgtttggtgggcgtcgagcatgtggcagtttggagaaggaagtggagaatgcagcagcagcaggagaaatgtttgatgttgctaaacatcaaccccacagcaagcctagaactcggggaatgggaggcatggtgcgggtagctgctgacacacagctctagagatagctgcctgcaaagctggatgggactccaggcaataggcttcagggcctaactgctctttcaaggtcactgattgttacaggagccatggtctgcagcattgagcatggaattattattactattaagcatgatcctcaccgtgatgctcttggggtggaacanangacccananagaatt

SEQ ID NO: 28842 - DNA, 422 bp, Homo sapiens
  misc_feature (1)...(422): n = a,t,c or g
gannnnnnnnnnnnnnnnnnnnnnnnnnnnnnnnnnnnnnnnnnnnnnnnnnnnnnnnnnnnnnnnnnnnggtcatcttgctgtgcatgcacaaccctggtgtctgtgtgtccagatttcctttcttataaggatagcactcaaaatggatcaggccccaccctaaacccttgttttaacttcattgcccctttaaagactctgtctctaaatacagtaaacatgaggtacggggggttggggcttcaatatatgaattnggggggacacagttcagcctataacaagcagattgggccatagtctccactgtacttcccctgtccccaggcttccatccatctgtccccggagcaccgtccagatagcagatcccatcttaagtacgaggatttctatttggctttttatcctcagtaccc

SEQ ID NO: 28843 - DNA, 417 bp, Homo sapiens
  misc_feature (1)...(417): n = a,t,c or g
gggaagagaaggagagggagcgtctggccaaaggagagtctgggattttggggaaagacggacttaaagcagggatcgaagctggaaatattaatataacctctggagaagtgtttgaaattgaagagcatatcagcgagcgacaggcagaagtattggctgagtttgagagaaggaagcgagcccggcagatcaatgtttccacagatgactcagaggtcaaagcttgccttaaagccttgggggaacccatcacactttttggagagggtcctgctgaaagaagagaaaggttaagaaatatcctctcagttgtcggtactgatgccttgaaaaagaccanaaaggatgatgagaagnctaagaagtncanagaagagtatnagcatcctggtatcatgaaggaccnatngcttt

SEQ ID NO: 28844 - DNA, 424 bp, Homo sapiens
  misc_feature (1)...(424): n = a,t,c or g
gcaggaacacacctgtgcttaaacaagttgagttcattattaatagttcttgcagtgaggaagcaggtgttgtggaggaccattgggacagcttggtgagggtgagagaacctattatagaatttgggcgatttgcggaagggctcaagaaagccaggcttcaccctggattggatgctgtcagaaagcagggacatttctgtgactaggtatctgaataagtattgtctataagatggacagactagagtgaggataaagctatacctagtaaagaagcagcagtcactcatattagcagaaaaggacgtttggtatttcatggcttgnacagtgaccttgctctcttgtctctgcttagacacaattttgaaatggccttgttgttgngcccttttttataagtctgactgaccttgtctca

SEQ ID NO: 28845 - DNA, 428 bp, Homo sapiens
  misc_feature (1)...(428): n = a,t,c or g
gaattactgtttcaataaaacttgatttttgcccagagggcatctctgctctgaattgtaaagaaaattttannnnnnnnnnnnnnnnnnnnnnnnnnnnnnnnnnnnnnnnnnnnnnnnnnnnnnnnnnnnnnnnnnnnnnnnnnnnnnnnnnnnnnnnnnnnnnnnnnnnnnnnnnnnnnnnnnnnnnnnnnnnnnnnnnnnnnnnnnnnnnnnnnnnnnnnnnnnnnnnnnnnnnnnnnnnnnnnnnnnnnnnnnnnnnnnnnnnnnnnnnnnnnnnnnnnnnnnnnnnnnnnnnnnnnnnnnnnnnnnnnnnnnnnnnnnnnnnnnnnnnnnnnnnnnnnnnnnnnnnnnnnnnnnnnnnnnntttataacagccttgtgagantgatgggtaaattgattctgttagatganaagnatttgcc

SEQ ID NO: 28846 - DNA, 429 bp, Homo sapiens
  misc_feature (1)...(429): n = a,t,c or g
ggtcatattgttttctatagtggctgcaccaccaaaattttgaatggagagaatgtcagcatcctgtttaataaattattttaaaaatcagctctgagcaaatgaatttagaatttggaatatttgaccaaaaatcagttttacacgtacatagtatgttactgataaaggaatgactagagtagtacacctacagttcttgctggccagagccaggagggggtgtaaaggaatttcctgggtttaaaaaagcaggcagcattgatgaatcatgaagttccccctacctcctttaatggttttgtaacaaagagatgcattcaggtgaaagtttcaagtctttttgtaactatagaataactggtctttttgnaattgnagaattctttaacttttttttaggctgaagtngagaacatgaatcatttg

SEQ ID NO: 28847 - DNA, 429 bp, Homo sapiens
  misc_feature (1)...(429): n = a,t,c or g
gannnnnnnnnnnnnnnnnnnnnnnnnnnnnnnnnnnnnnnnnnnnnnnnnnnnnnnnnnnnnnnnnnnnnnnnnnnnnnnnnnnnnnnnnnnnnnnnnnnngtatcttatgtaccccataaatatatgcacctatgtacccacaaaattttttttaaaaattggttttaccaaaaaaggttgaataagcaagtttttataaaaatatttaccaatatttattaatttaataactatgaacattcnnnnnnnnnnnnnnnnnnnnnnnnnnnnnnnnnnnnnnnnnnnnnnnnnctgatgctaatnnnnnnnnnnnnnnnnnnnnnnnnnnnnnnnnnnnnnnnnnnnnnnnnnnnnnnnnnnnnnnnnnnnnnnnnnnnnnnnnnnnnnnnnnnnnnnnnnnnnnnnnnantanaaacnggggttccc

SEQ ID NO: 28848 - DNA, 423 bp, Homo sapiens
  misc_feature (1)...(423): n = a,t,c or g
gacacaggcacgtctacctgaaacaaagtcactggccgtaccatgtgcaaggcacattcttatgttttctaatctgttgtgtttctttttaaaaatatgctggtggttatcctcaaaattggttgacaactcattaatgtatggtggtcagcagtttgaaaaccactgattttttttttgaattncannnnnnnnnnnnnnnnnnnnnnnnnnnnnnnnnnnnnnnnnnnnnnnnnnnnnnnnnnnnnnnnnnnnnnnnnnnnnnnnnnnnnnnnnnnnnnnnnnnnnnnnnnnnnnnnnnnnnnnnnnnnnnnnnnnnnnnnnnnnnnnnnnnnnnnnnnnnnnnnnnnnnnnnnnnnnnnnnnnnnnnnnnnnnnnnnnnnnnctgtgtggccatgtggtgncactgttcagctcctactt

SEQ ID NO: 28849 - DNA, 424 bp, Homo sapiens
  misc_feature (1)...(424): n = a,t,c or g
gctatgataaatcagagttattgtaagaattaaacaaaataatatacagaataatagttcccaataagttctgttaaatcaaaatatgccacgatttgaagcagccttcttgaaaataaagattacaggcgtgagccactgagcccggccagatctcatatacttttgaccacacatcagtaaaaatcaaaaaaaccttaggagaaaaaaaggtaacaccatttacattanactgatttttgaagtgaatctgctttagtgcctactgtgctatgtccatttaaaaaatttttacatgttctgaaattttgtattcttgcaagtttatctacctccccctaaattttaaaatattntattgntgntatttttatttttagccctttctcctacgcatattattctccaccctgttcagtatggg

SEQ ID NO: 28850 - DNA, 468 bp, Homo sapiens
  misc_feature (1)...(468): n = a,t,c or g
gggccnatnggccctngaggcctnnaattcggcacgaggggtaacccgnnnnnnnnnnnnnnnnnnnnnnnnnnnnnnnnnnnnnnnnnnnnnnnnnnnnnnnnnnnnnnnnnnnnnnnnnnnnnnnnnnnnnnnnnnnnnnnnnnnnnnnnnnnnnnnnnnnntaaagaagccggnnnnnnnnnnnnnnnnnnnnnnnnnnnnnnnnnnnnnnnnnnnnnnnnnnnnnnnnnnnnnnnnnnnnnnnnnnnnnnnnnnnnnnnnnnnnnnnnnnnnnnnnnnnnnnnnnnnnnnnnnnnnnnnnnnnnnnnnnnnnnnnnnnnnnnnnnnnnnnnnnnnnnnnnnnnnnnnnnnnnnnnnnnnnnnnnnnnnnnnnnnnnnnnnnnnnnnnnnnnnnnnnnttttagtcctttactttcttcataangctacttttacatcgcactgtggacttgccctgaattattt

SEQ ID NO: 28851 - DNA, 389 bp, Homo sapiens
  misc_feature (1)...(389): n = a,t,c or g
gcatttatctgtttttttgttttttttttnggncactnangctttnggnntnataataanaaaccattgnnatatccaaggncnnnaaggttaacncctgngtttttttgttaaagncctgtantttnanctntgacattnanttctntgatanatnttcggnnaatttttgtncacagnnnnaggnaggctncnancttnattttttnncntgnggntnttnagtngtcntaccccattngntgaaaanaccattntttcntnnctgaagngtcttgncncccttgttgaaaancaccngnctataaaccnnggggttnatttttaaaagctnnatcctattccnttgaccaannngnccaatctttgggcnnttaccanaaagggct

SEQ ID NO: 28852 - DNA, 358 bp, Homo sapiens
  misc_feature (1)...(358): n = a,t,c or g
gcagcannnnnnnnnnnnnnnnnnnnnnnnnnnnnnnnnnnnnnnnnnnnnnnnnnnnnnnnnnnnnnnnnnnnnnnnnnnnnnnnnnnnnnnnnnnnnnnnnnnngttantnggnaggntgaggcagnaggatnantcnaccccaggnnanggttgcaggganccntnntnacnccantgcnntccattttnaaaaaaaaagtnnggaaaggcggttgcntttttttgcntttttgcaacagcaaangttaaattnggccccaaanccnntgtagnaactttggggggactntcaaatttgggggtgacttggttgncctaaaacntggaggggnnccnaggcntngttngngccca

SEQ ID NO: 28853 - DNA, 515 bp, Homo sapiens
  misc_feature (1)...(515): n = a,t,c or g
tctgaaatccctttgcctaatgcntgagacgggtnncccnnncnnnannngnnggggncnnnnggncntngnggccnncaattcggcacgagctgaaatgatgtacgcttgaatttttgccaagagtgactgtgtgctaataagcttttctctccaacaaaatggtttctgtcctttggtcacttgtggacaacccttgctttatgtgtaagtgaatgagaaggaggcaatgggtcagtctgatggggcagaaaacaacaaataaaaccgtgggttggtgtccgtattatgaagacttatgtcatctgagtggaatgagattgagataagttctttggaaatcatctcaagatataagaataaaaagttctttcttatgaactataaatttcatttttattcttgatgtagtttgctgcacttcttgcagctttagctgtaaagtagaaaatgnctatgctttgcttctggtcttaaagctctttancaattctgccctgnggcaaaaaggccaa

SEQ ID NO: 28854 - DNA, 444 bp, Homo sapiens
  misc_feature (1)...(444): n = a,t,c or g
gctcaagccagtaacctccaggaacccgtaatgtgtagtacgtaacctctacgtactacgtaatttctacgtagtagaaattaactagaagatcctggctaagggagacattcagccacgggcacaaaactcaacggagtttttgtattttactcactttaacaaaatagaaaggagatgagaaagcaaacggaaaatgattattttctgtctgattttgcttcagggtaatgtccattcagatgcctgcctataagtcacagggctacaaattatcttgccctgagcctgtctcctctgaggtgccatggaaggagcttgcagcatcattagggaggtgcttgtgtttcaggctgatttgacattattcttatgaatgtcagtttggacagaatgataaagactaataaatatggtatcctgnggtatggagaaaaaatttgt

SEQ ID NO: 28855 - DNA, 449 bp, Homo sapiens
gcccaggcctgcccagagtcagtcctcgccctagtcacgccctcatgcagtgattcattaggcgaagaaactggccttggaaggcaatgagctcatgaatatgcacagcgggtcctcataaattatgcattccatacggaggcttctggggagaggctgaggagcaccgagtcgctcagccctgcaacagaaggcttgctcacaaggactttctgtaaagtgcatattcctgccctcctgccctgtccatcacaatgaacttgtgggcagcactctagttctgataaaacatcggactctgggtttgcaaagaaattggagtttacttagctgtgactttgctgatggccatgctggcaggtctagaggggctgtcagggtcagagtgggcctgcacatgacttgcttcacgcccatagatgtgcaaagccgtctgaccttacggaggc

SEQ ID NO: 28856 - DNA, 434 bp, Homo sapiens
ggagaacagtaggcatagttcaggttaagggcatcatactggaaaacagggagaattaaataaaaatctgcatgttgatctgagagttattcccagtctctttttccctcccagttctgagaatactggctgacaagttcttgccccatctagctgtgagattaaaagattcatcctgtgacagcaaactgctgagatcaggaaaaatatctaactgataacagatgtggcccagattgataatcctacagtatgtctactcattaagacagaatccctaggcaacttttaagtgcctcaatcttaaatatgagattaaggatcaccaaacatttgaggataaccttaatatgaaagagaagagggaaatggaaatacttcaagaagaagacaagtttttgtaaaaagttaactgatttcttcagaagtaaagg

SEQ ID NO: 28857 - DNA, 442 bp, Homo sapiens
  misc_feature (1)...(442): n = a,t,c or g
gccatagaaaactactaaaagcagctatgggtccccaaacttctctggaacagctttggatatggcatttttagtttttaataacagggacaaagcggaggtagcggaaagaggaagaaggacctcccacaagttgcaggtcttggttgcaaccttaagctaacctcccacatggggttgccctcctgggtcttgggttgaacaagggaagctgaaaggtgggaagcctaaacctgggtgtccgagtcactgtgccttgggcataaatcaggttgcacactgtaagaaaactgaccactggaagagggtttgtccagngttctgaagagagccatcagcacgtgaactaatgatgggtaaaacagccaggcaagcacccaagagtgacggggactgagaccttcaccacggtttccatcagacaactagccatatttctggg

SEQ ID NO: 28858 - DNA, 463 bp, Homo sapiens
  misc_feature (1)...(463): n = a,t,c or g
gattaggctagctagtttctttctatttaatatttaaatcttatcatgaaatgcagtgatgaactgtaaaaataaatatgaaataagatcagaaaatcattagtaggttcaaagcctttattattgctattatgtataagcctagaaatggtcacttcccaacagaaaatacatcccttgttatacttaggacaagttgtaaaccccctttgctttgacccagggaatcatttatttccggtgaaccccagacacnataagcagtgtggtctttaaattttattagntggngtcaccatcgcactaatagacnntctccattttccacagaataaaactgtaatgactttaggtcattttccagctcgatnctctgccggcttctaanttagaacgacgtgnggaaggatgtgatnatacanatccnntntgcntgctacacatacttttgcccnccccgtcc

SEQ ID NO: 28859 - DNA, 443 bp, Homo sapiens
  misc_feature (1)...(443): n = a,t,c or g
ggagagccaggcaaatgtcatacaggtccaattctttaagaatgacttcaaaggttggccgattatgtcatttttatcagtttgcactgtaacagctatttaagtgggttaacagctggggcccagagaacttctcaattacaaggatatttctactgtgataggtacatacctcaacaggactcaacatagggtcacacttcctttctacttgaggtctcagaaggaaagattggctctganatgcctgcacacatctctgtaagtagaagcctggccctggtccgtcatcacatccttgtctcttgtatgtgtcaaagtaataacaggcccaccagagcactgcctctctcactgaggagtgttttgtggcattaagtatttaggagatgataacctagttcagtaatacagtcagcccactgtatctgtgagctccacac

SEQ ID NO: 28860 - DNA, 242 bp, Homo sapiens
gaaaatggacagtctaaagactctggagctggataactaaaaataaaaatatatgccaaagattttcttggaaattagaagagcaaaatccaaattcaaagaaacagggcgtggggcgcacttttaaaagagaaagcgagacaggcccgtggacagtgattcccagacgggcagcggcaccatcctcacacctctgcattctgatagaagtctgaacagttgtttgtgtttttttttttttt

SEQ ID NO: 28861 - DNA, 417 bp, Homo sapiens
  misc_feature (1)...(417): n = a,t,c or g
gagcgtcccctagtgcacggtgccctctttggccaaggacaaagtagtggggaggggctactataggccgagaccctggaaatggaccaaagaaatggggatgagatcagtgcagctcttgcttccccagggcagcacaggccagggcagggaggctgaggaaaagcggaatgatactgctagaacctcttttctctcctaaggattagcacagggtgggctgtgaggaagcattataggcaaggtctgttcacgcaaagaatcatgagccaacgaagtcaagaacaggagccggcctcttttcaggccaggactcagggctttcttggtgctcctgtgtaggttggggttttaggattgccaggcctcttacctaatggacttgtggattggancaaggctggatggcngantccc

SEQ ID NO: 28862 - DNA, 431 bp, Homo sapiens
gatcctttattttagcctagaaacatttttctgacatcggtttgaagtttcatgcctgtgtgaaatagttgtaatacaaacatattttttttctaatgtaaataatgactggactagttagtggtctaacaactctgatgtgaccatcttggaatactctttggatcttgatgagcttttcagtagaaccaaatttagttgaagccagagcctttgctaatggtgttgtctctcaggtggaggtaagatcgagggatattatgtataatttttgctgttaaattatttcttattgcaggctcacagcagattacattttgtaaaatgtcattaaatagacaacattgaaaagtgggaagactattaaactagaatcaggagacctagattgagcctctgctattttttgactctgtgatgttaggcagcac

SEQ ID NO: 28863 - DNA, 445 bp, Homo sapiens
  misc_feature (1)...(445): n = a,t,c or g
ggtcaggtggtgcggggcttcggccgcgnctccaaccagctgggcatccccacagctaattttcctgagcaagtggtagatactcttccagctgatatatccactggtatttactatggtggggccagtgttgagaagtggagatgtccataagatggtggtgagcatatggatggaacccatattacaagaatacgaagaagtctatggaaacacatatcatgcntaccttcaaagaggacttctatggggaaatcctnaatgnggncattggtggctnnctgagaccagaaannaactttgattntttanagtnncttatttcngcacttcagggngatattgantaagctnaganacgactngagnaccagaacatttnagaatctgagangacacttttttccaggtttctnnaaacanaacaatgaatgngccctgttga

SEQ ID NO: 28864 - DNA, 438 bp, Homo sapiens
  misc_feature (1)...(438): n = a,t,c or g
gacatgaaaaattttataacaactataaaatattcattggtatatacctattgaaaatatttcttttgtataattaaccataaaagaaacattttgtactaattattaaagttggataaatatattaataacttaagccaatatgagtttttgaatagattattataattttaaaatatctaaaaatttaaatcccaatctctctcttgattatcctgattcaaatatttaattctaaagtgaaagcacaaaatcttttctgagaaaatatttaaaatctactgtgggcatcagcaaactttttctaataaagaaacagctgctaaaaaattttaggcttgcagccatatagtctccgcatcatgattgcactctgccattgcagtgtgagagcacctatagacaatacataacttaatgggcatggctgnattccag

SEQ ID NO: 28865 - DNA, 463 bp, Homo sapiens
  misc_feature (1)...(463): n = a,t,c or g
gttcattttgggtgtagccctatcatcattattttaaaagctctccagatgactgttgtgtagccaaggatgagaatcactttggatttttggtctctaagcctggtgtttggtgtgatgagtaaaagtgcacaccaggttgcagataaaacgtaactacagtagttgggtaatacataggccagatagcttgtctttctgcttgctactcttctagacttacccaggtgttctgagcactggtttgcagtcctttgcaaaggtttttatttctttaaagcacttcctttctcattccttctgccattattttggggggtgtggtagaaagtagggctaaggtatcatcagctactagtaattctagcgaaagattataattcctagcctaagttaataaaattagctctcnnnnnnnnnnnnnnnnnnnnnnnnnnnnnnnnnnnnnnnnnnnnnnnnncag

SEQ ID NO: 28866 - DNA, 408 bp, Homo sapiens
  misc_feature (1)...(408): n = a,t,c or g
gggaagagaccctgaggccattcctgtctttggtcttgatggtttttggtggtggcaccgcagctcttggaaccaagatgggtatactggctgagttcttaatagctcatctgctctgtctcgtgcctgtaaccatgtctgctcaggcccttgtgaatgatgtttatttttcaggcagagtaatttttctgtaagacactggttttcagactctgtctccagtattgggggcccctttttaatgagtctgattcaagacaatgccagaccatgtttccttggcanaggaatttgacctgcanagggaanaataaggcccagggtgtcnggactagcattaaggagcacctctgattntctggaggaatngtgctaaaactgcccaaacccacttcggccgatgntaac

SEQ ID NO: 28867 - DNA, 448 bp, Homo sapiens
  misc_feature (1)...(448): n = a,t,c or g
nnnnnnnnnnnnnnnnnnnnnnnnnnnnnnnnnnnnnnnnnnnnnnnnnnnnnnnnnnnnnnnnnnnnnnnnnnnnnnnnnnnnnnnnnnnnnnnnnnnnnnnnnnnngnnnnnnnnnnnnnnnnnnnnnnnnnnnnnnnnnnnnnnnnnnnnnnnnnnnnnnnnnnnnnnnnnnnnnnnnnnnnnnnnnnnnnnnnnnnnnnnnnnnnnnnnnnnnnnnnnnnattaattttttttaatggggctttagttgcctaaataatatgtgtattatataaagtcttgctaatagagcaagagaaccctctggaaaaaaaactgcctaaggaatgagataagaactgaagtctgcttgggttttcaagcatcccttgagatggaaaagtcttaccccgcatccgtggcctcaagaaccataaaggcaacattaggaaactttctcgattag

SEQ ID NO: 28868 - DNA, 500 bp, Homo sapiens
  misc_feature (1)...(500): n = a,t,c or g
ggtggcagccacaaaagtacacaacctctagggtattcctctgagaacctgctgcccagctgcagggaacagagttaactgacagccttcaactgtagagccatcagcatctgcatggcattcacgctggaccacattcttcttcctaggcaacccccagccaatgactgagcaaggaagatatacnnnnnnnnnnnnnnnnnnnnnnnnnnnnnnnnnnnnnnnnnnnnnnnnnnnnnnnnnnnnnnnnnnnnnnnnnnnnnnnnnnaagcatgactggggaggctcaggaaacttacaatcatggcaaaagggtaaggggaaancagcccaccttnttcacaaggnngcaggaaggagaaatgacccaggagaactaccaaacctttccaaatcatcagctntcgngagaactcctntcaggagaccagcatggganaaaccccccatgatcaattttntccnctgggcttttccttgcttgggggatattggggaat

SEQ ID NO: 28869 - DNA, 479 bp, Homo sapiens
  misc_feature (1)...(479): n = a,t,c or g
gtcagagagttattttggcaacatatttgggaaaatgatagttagatgctgcgttagccagcctctgcatgattttttacgcagaacaaacagttccaaatatcagtgctttcagcaactcatatatttctcacttatggtgcatgtcgctgatggttggctgctgctctgatctcactccagtatcagcttcagtcaaggaacgtattgttgtcaaggaaaggaaaaagaacagtggtgagaccaaaggatcttaaagtttctactttggaaggggcgtggcattgcttctctcattccattggctgaagcaaatcatgtttacaagccagaagccaatgggctataggaagggtancaagaacagaacagccntccagcctancccacaatggggtcaagaagattcaataggcttggctgaaactaaaacttntnagccagttggatcctggnngccctggatatcctttaggatt

SEQ ID NO: 28870 - DNA, 480 bp, Homo sapiens
  misc_feature (1)...(480): n = a,t,c or g
ggagagctagcctaaagacttttattactttcctccataaattaactggctctgactctgtgttgttcattatgggacagtgaggtatgatgtaatggaagggcatcaggctagaaaactacatggtcttaaggtcattggataatctcttggggcattgttttccttggtgtgtgatgaagctaatataatgaggtacttgtccagnnnnnnnnnnnnnnnnnnnnnnnnnnnnnnnnnnnnnnnnngatatgaaactggcttggaaaaaaaagaaaagcattatacacatgcaaggttaccacctttttattttcactgttgcctcatgggcacttatgttcatggctctaaaaattttagagtccttgcatattagaaatgnaaaaatggcctgcccagcaaaggtttcaanaattcatcttgcctacaggctgaccacagacagacattataatcctccgtctttcttattggcct

SEQ ID NO: 28871 - DNA, 428 bp, Homo sapiens
  misc_feature (1)...(428): n = a,t,c or g
gcnnnnnnnnnnnnnnnnnnnnnnnnnnnnnnnnnnnnnnnnnnnnnnnnnnnnnnnnnnnnnnnnnnnnnnnnnnnnnnnnnnnnnnnnnnnnnnnnnnnnnnnnnnnnnnnnnnnnnnnnnnnnnnnnnnnnnnnnnnnnnnnnnnnnnnnnnnnnnnnnnnnnnnnnnnnnnnnnnnnnnnnnnnnnnnnnnnnnnnnnnnnnnnnnnnnnnnnnnnnnnnnnnnnnnnnnnnnnnnnnnnnnnnnnnnnnnnnnnnnnnnnnnnnnnnnnnnnnnnnnnnnnnnnnnnnnnnnnnnnnnnnnnnnnnnnnnnnnnnnnnnnnnnnnnnnnnnnnnnnnnnagcagacattntattagggggataacgagggcaagggtaaaagcttatggaacctgantggtanngnactttngnaattttggg

SEQ ID NO: 28872 - DNA, 423 bp, Homo sapiens
  misc_feature (1)...(423): n = a,t,c or g
gcaagtttttgaaaacattttggttctacatattagactttaactcttgaatgctagccctgcctagtaataaaacatgttttttttccagtgccacttaatggcaagtctcttcaagtttctcaacagtcaactgctgnaaatgtacctgaggtacattctcattttctagagggggaacaggaaaaattccactgccaccatccacccctgtcatccaaaagcaagtttattagtgaacttcaagtcagcattctaaccctactatctggctctcttttttacttttttatccttttgggtttatcaagnccttattttaagattaacatgaagaatacttaatgntgtaaaggctcntggatggtttgacatcagagtggcnaaatntgtttaaaaggataccatntcngagggctggtt

SEQ ID NO: 28873 - DNA, 424 bp, Homo sapiens
  misc_feature (1)...(424): n = a,t,c or g
gtgatttctgggattgtctgaggatatttaaggggccagagggctccctgcaccatcgatgctggccctggatctcctgccccgtctgccattggacttgccctgaatgcgtgaacaaatgaatgagcagacatttgctggacagctgctgccctccaggcactggtgtgctggtgttccacagcccgggggccgagagccactcaaagcattcatattgggaagttggcagggatggtctggtcaacagcatgggcgttggcattggagtcagatgaacctggctttgtcagaccctaaatagggtggccttggacagacctgcctgacctgtttcctcaactgcaaaatgtgaataaagatagcacagtgtggtcgtgaagactgagcaaggaatggctctacacttggnatacccagttgg

SEQ ID NO: 28874 - DNA, 400 bp, Homo sapiens
  misc_feature (1)...(400): n = a,t,c or g
gtaaaaaataaaaagactttttgaaatgttgaaataataagactagaaacttttttttttgactntgtcaccaggatggagngnnnnnnnnnnnnnnnnnnnnnnnnnnnnnnnnnnnnnnnnnnnnnnnnnnnnnnnnnnnnnnnnnnnnnnnnnnnnnnnnnnnnnnnnnnnnnnnnnnnnnnnnnnnnnnnnnnnnnnnnnnnnnnnnnnnnnnnnnnnnnnnnnnnnnnnnnnnnnnnnnnnnnnnnnnnnnnnnnnnnnnnnnnnnnnnnnnnnnnnnnnnnnnnnnnnnnnnnnnnnnnnnnnnnnnnnnnnnnnnnnnnnnnnactattttaatagaagcaaataatgccttgaaaggngggccgtntgttancgaaatngtgaactggcaaa

SEQ ID NO: 28875 - DNA, 412 bp, Homo sapiens
  misc_feature (1)...(412): n = a,t,c or g
gacattttttgtttataaacaaaagggggttcttcagatgattaataactgattataaataaaaataatacacttatctatatctccccataataactcatatgtcactgtcagtgaaatggataagaacatttgtctccatttctgaaacctgtaatagtatgtaattgtttgtacatatcacttgtccaaatcagtgattctcaaacttttttatttcacagtctccctaaaagttcccctaaaatcctcccccaattctgatttccctgcctataagattccctttttgntttgttttgttttgtgagacggagtttcgctctttgntgcccaggctggagtgcaatgcatgactcagctcactgnaacctccgcttctngactcaagcaattctcttgcctagcctcc

SEQ ID NO: 28876 - DNA, 451 bp, Homo sapiens
  misc_feature (1)...(451): n = a,t,c or g
gcggcacgagcagctgggcctgaaccgggcctctgaacacactgaatgtgttcctcagcagctgccacgtctctagaaacagagatgagactatttttgcacccacctcttcatggggtgatgtatcgtaccaccagctgttttgccctcaaggtctgtccacccgagggcctgcccctgtcttgggccggagcccgtcttgagaccttggcagttgttcccccctaagcccacaggagggcgcccgaaatcatgaagctcagataccacgcggcatctgcagctcacgactcctctgcccagggcctgcggaactcaaccctgggcaaacctcctcctagggtcaggtaagtcctggcagcctggaagccaagctagtcctccatcccctgnaggtcccaggaacctgcagngctgnctcatnttncttgccctntaccttnggnccttt

SEQ ID NO: 28877 - DNA, 411 bp, Homo sapiens
gggtagagagccaggactgtgggctgtgtgtttgtgggtagcatgggtgcctcaaggacagtcgttacgttcctggggaccaagaggtctttgtgcggagagggagggacaggacggcctttccagcatgtgcacgggcgtgccgccatctgaagcgtgtttctgtgggtgatgtgatctgctgggagaaaccattgctcagggcacttgcttgtgaatttacacatgaaatcagcagttttcaaaagactgaactctagcgtgtgtttcacttgtttcgcctctgaagttgggtgctcttgtcttccctgctctgagtgtgaacagccctgagtgctgtgtgaaatatttgatgaggtcctctgtttgccttttctagacgccgggaggctctgatccgccaggtggtgg

SEQ ID NO: 28878 - DNA, 444 bp, Homo sapiens
  misc_feature (1)...(444): n = a,t,c or g
gaaacagagagatggtggtttggagataccccttttaaaactgagcctcgttaatttaaaacaagcacaatgatacaactgtacttgacttgaaggagggcatattgttctgcaggcgtcctaattttacttctggtcagagggacactggaagattttcagccagaactgcagtgagagatgaatttttattatatgctgagatgctcagatgcctggaaacagaaaagagctaattttactgttgaaaagtagttaataggctacctgtttccaaatatgcacctgccatcccccaccactaccatcccaagtagatgcagactagagcattcatagtggncgttcattccgatgtggctccgcatagatttttattaagtcaggcatggttgngtaaccctcccgctcctggaactgatcaccatggtttttgntaccaaa

SEQ ID NO: 28879 - DNA, 442 bp, Homo sapiens
  misc_feature (1)...(442): n = a,t,c or g
gatttggtttgttaattttatatcactgtttttcactgtttttgtggacaaataatggttgctttgctgaagtgttcttcctcaatcttgattgccctgtacctacccaaaagctgtagtcacacgtcctaaaggccaagcaaacccaccgggatggtggggggtcttggagccaagctcttaggttcctcttatttggggcagtaccagtccataccagctgcgatttgtgagtggacctgtggtaagaagaatagaaaaggctctcagagataaggttttttacatgtgtaacaatcccaagatttcctagattaaaatcttaattgattttgaaattggatttttatttagaatcaaaattaggacaagaacagataacttcttcagatcatttgngtaactttacagaaaggcatcaagcttttgggcctttggggca

SEQ ID NO: 28880 - DNA, 437 bp, Homo sapiens
  misc_feature (1)...(437): n = a,t,c or g
gactgggacgatgatgaccaggaagaatgcttaagaatgaccacatcactgtctatggtgttcaacttggccttcccaagatgctctggcaatggcacgtgcttcttggaggaaaaaatattttcctggcttgggggatgggggtagggtagagtgaaagacagaaaggaagagctgtcctaaaccaaccccagggttttttgggtttttttgttttcttttttgcagggggacgggggcggggggnnnnnnnnnnnnnnnnnnnnnnnnnnnnnnnnnnnnnnnnnnnnnnnnnnnnnnnnnnnnnnnnnnnnnnnnnnnnnnnnnnnnnnnnnnnnnnnntcacctccgagtagccgggaccacaggcgcacgccaccatgcccaagccaatttttgcatttttagcagaaacagaagtttnccatgtcgnccaa

SEQ ID NO: 28881 - DNA, 424 bp, Homo sapiens
gaattgcaagctactttcatcaatataatgcatttgtctcactccttaaaggactcctgtcacagtggattggcaatgaactggtcagacacaagaggcagtggagtattagtaaaatacacgtggatttggagtcagacctacctaggtttaaatgctggttttatcgcatactagttgtatgccttcattggggtttcccaagaatcagaccctgagacaagactccaagagtaagtcatctatgtgggaggtaaatgaaacatgacacaggaaatgaaataggtcagggaggcagccagtaaagggcatattataaaacaagttaccacttgggacaataactggagcttaaacttgctggaaaactctaggatacactgtagaacatctctagcaatgtgctggtagatgtttaacaacc

SEQ ID NO: 28882 - DNA, 416 bp, Homo sapiens
  misc_feature (1)...(416): n = a,t,c or g
gggataaaagtgnnnnnnnnnnnnnnnnnnnnnnnnnnnnnnnnnnnnnnnnnnnnnnnnnnnnnnnnnnnnnnnnnnnnnnnnnnnnnnnnnnnnnnnnnnnnnnnnnnnnnnnnnnnnnnnnnnnnnnnnnnnnnnnnnnnnnnnnnnnnnnnnnnnnnnnnnnnnnnnnnnnnnnnnnnnnnnnnnnnnnnnnnnnnnnnnnnnnnnnnnnnnnnnnnnnnnnnnnnnnnnnnnnnnnnnnnnnnnnnnnnnnnnnnnnnnnnnnnnnnnnnnnnnnnnnnnnnnnnnnnnnnnnnnnnnnnnnnnnnnntaggcagaagtttcaaaatggggataggccaggagcagcaagaaggcagtcagcaccaagcagctgccagccaacactttcgctacactccatcattgctctg

SEQ ID NO: 28883 - DNA, 425 bp, Homo sapiens
  misc_feature (1)...(425): n = a,t,c or g
gggagcagagagtgtaaaggaagtgacttctagatcacctgaggtgagtgctgataccatctcaaatggatcagacactgaaccagtgaaagagaggaaatcagaaaagaggactacccagaagggcctctggtatatgttctgggaaagacagttcctacagcttgaaggtctttacatatctccaagtctccaagtggttcactgagctaacattaatctaatttaattctcaaccagatttgaaaaagggagattaattggataaaaatgtagcccattttccttcatttactcctatttgttttcaatgtctctttccttttctgtctcctcctatccatttttctctccctgttactcttaantagtgnctcctttccccatccaccccatctctagccatcttccattctatttncgct

SEQ ID NO: 28884 - DNA, 426 bp, Homo sapiens
gccgctctgtttcctggacttcggagtgatagcaaagttttgtattccctgatcagctgtgtatctctgagcagcaagttgatctctctgtataagggtgactgtgcccatggaggatggcatgcaattgcctaaagatttcagtctgagaatctgagaaacgatactgaatggagatgacaggcttagtgcctgcttccaggagccatgcctcctcctggcctggaatgaatacctaaacacctgaggctctgagttccggcagtgtgctgaaactgctgttggtctggcccactgacccggaaacccagccacctgaggttgtgactttagggcttctagttttgtatttagctttaattccatctgtgaggcagtggagactgttcattttattttacatcaaaggcttttggagggtgaaaa

SEQ ID NO: 28885 - DNA, 414 bp, Homo sapiens
gggcagatgtacagagtcagctcaggcacatagaagcagcatttgaccaggaggctgcggcagtgttgatggcacggcttggggtgttccgagcggagtcagaggaggggcccgatgtgctccggtggctggaccgacaactcatccgactgtgtcaaaagtttggacagtataacaaagaagaccccacttcttttaggttatcagattccttttctctatatcctcagtttatgttccatctgagaagatctccatttcttcaagtgtttaacaacagtcctgatgagtcgtcatattacagacatcattttgcccggcaggacctgacccagtccctcatcatgatccagcccattctctactcttactcctttcatgggccaccagagccagtactcttggatagcagca

SEQ ID NO: 28886 - DNA, 413 bp, Homo sapiens
gccgcagtggaggctagagccggagcggcggcggcggcggcaccccggggagtttaagatggcggcgggggggacagggggcctgcgggaggagcagcgctatgggctgtcgtgcggacggctggggcaggacaacatcaccgtactgcatgtgaagctcaccgagacggcgatccgggcgctcgagacttaccagagccacaagaatttaattccttttcgaccttcaatccagttccaaggactccacgggcttgtcaaaattcccaaaaatgatcccctcaatgaagttcataactttaacttttatttgtcaaatgtgggcaaagacaaccctcagggcagctttgactgcatccagcaaacattctccagctctggagcctcccagctcaattgcctgggatttatac

SEQ ID NO: 28887 - DNA, 412 bp, Homo sapiens
  misc_feature (1)...(412): n = a,t,c or g
gctggagaagcgttaatttcttccaaatttcatcttttaggggcttgaagtaatggcatgatacatgatttttatggagatgtgctggatgacttgacataatatctcctagggaggagactgtctgaaactgaatagctatctggtttccacctgttaattatgtattttcagtagctgttctatttaggacattacagacccaaagtatgtttaatattgccctatgtctggggataaaaaaatttcaaaagacgtcattttacacttttttcactatttcatttcatcttcacaactactatcagaggagagtagggcaggtatcattagctctattttacagatgangagaaactcagtcacttaggtcatatatttggtaagtgatcaagctggaatcaaaacccgt

SEQ ID NO: 28888 - DNA, 418 bp, Homo sapiens
ggaggtgtggaattatctttatttttgcatgttgtcttttgatactcaagaagcaatccgagattcaccagttcattgatacttttctcttgatggaattttcaagtttcattctaagtgcttactctgcatatcaagcatgtgaatgagtgaataagctatttattttctttaaaagttagctaaaataaacttgtttttctggtaccaatctcgttgtccatgttcttctgctaaacattacattagttgatatttaagtgggatggtcattgcagaaagttgggaagaaagtctcatcacctcactgttagattttacatatgtttatgtaattttgtgaattaccagtcttctgacttcaacacaaatagcaaattgcaaagtgttacttggggttcttgggatgggttgggaa

SEQ ID NO: 28889 - DNA, 420 bp, Homo sapiens
ggttcaactagattttctgaattaacttggaagttctcattgctctctccatatcccggaagttaggaaccatgaacctgtgttctgtctcagtgtcaattgtcatccccaggtcggccagcctcgataacatacccagaatgagaaggcaccctcggctgacataacaccactagtcggagtggatgtggacttacacatgaagggggaaggattaaggaaagggaaagcctccagcgggcacaatggatgaaacagcaagcgcacagaatgggccaatgccttattcttcttgtattcatccttctctgtggcttcagagccttttttctgacacacatgcacacagcacctccagtgcttgccgtctctccccctcatgagagaaacaaaatgaaatgcaaacatgctttgaaagag

SEQ ID NO: 28890 - DNA, 436 bp, Homo sapiens
  misc_feature (1)...(436): n = a,t,c or g
ggaagtgtttgacatttaacccagccaaaagaatatctgcctacagagccctgtctcacccatacttccaggacctggaaaggtgcaaagaaaacctggattcccacctgccgcccagccagaacacctcggagctgaatacagcctgaggcctcagcagccgccttaagctgatcctgcggagaacacccttggaggcttatgggtccccctcagcaagccctacagagctgaggaggattgctatctggaggccttccagctgctgtcttctggacaggctctgcttctccaaggaaaccgcctagtttactgttttgaaatcaatgcaagagtgattgcagctttatgttcatttgaaagnaaggnaggctgtntgtttcaagaacctggaaaaatttcngaanaanagaactgntgccaaatgtctgccttt

SEQ ID NO: 28891 - DNA, 437 bp, Homo sapiens
  misc_feature (1)...(437): n = a,t,c or g
gnnnnnnnnnnnnnnnnnnnnnnnnnnnnnnnnnnnnnnnnnnnnnnnnnnnnnnnnnnnnnnnnnnnnnnnnnnnnnnnnnnnnnnnnnnnnnnnnnnnnnnnnnnnnnnnnnnnnnnnnnnnnnnnnnnnnnnnnnnnnnnnnnnnnnnnnnnnnnnnnnnnnntttnnnnnnnnnnnnnnnnnnnnnnnnnnnnnnnnnnnnnttacaagaaggcctggaccaatgataaccttnnnnnnnnnnnnnnnnnnnnnnnnnnnnnnnnnnnnnnnnnnnnnnnnnnnnnnnnnnnnnnnnnnnnnnnnnnnnnnnnnnnnnnnnnnnnnnnnnnnnnnnnnnnnnnnnnnnnnnnnnnnnnnnnnnnnnnnnctacttgcccccagacatgtctctaattcaggctctanancgggggtataaaggcctttaaggc

SEQ ID NO: 28892 - DNA, 429 bp, Homo sapiens
  misc_feature (1)...(429): n = a,t,c or g
ggcaatttgatgactattttttgaatgtgtgttttgaagtaattacaaaagattcattgaattcatcccgccctatctccaaaccagcggaaaccccgactcaaatacaggaaatgtttgatgaagtttcctataacaagggagcttgtattttgaatatgctcaaggattttctgggtgaggagaaattccagaaaggaataattcagtacttaaagaagttcagctatagaaatgctaagaatgatgacttgaggagcagtctgtcaaatagttgtttagaaagtgattttacatctggaggagtttgtcattcggatcccaagatgacaagtaacatgctcgcctttctgggggaaaatgcanaggtcaaagagatgatgactacatggactctncagaaaggaatccccctgctggnggttaaac

SEQ ID NO: 28893 - DNA, 426 bp, Homo sapiens
  misc_feature (1)...(426): n = a,t,c or g
gnnnnnnnnnnnnnnnnnnnnnnnnnnnnnnnnnnnnnnnnnnnnnnnnnnnnnnnnnnnnnnnnnnnnnnnnnnnnnnnnnnnnnnnnnnnnnnnnnnnnnnnnnnnnnnnnnnnnnnnnnnnnnnnnnnnnnnnnnnnnnnnnnnnnnnnnnnnnnnnnnnnnnnnnnnnnnnnnnnnnnnnnnnnnccnnnnnnnnnnnnnnnnnnnnnnnnnnnnnnnnnnnnnnnnnnnnnnnnnnnnnnnnnnnnnnnnnnnnnnnnnnnnnnnnnnnnnnnnnnnnnnnnnnnnnnnnnnnnnnnnnnnnnnnnnnnnnnnnnnnnnnnnnnnnnntcccccccattaatttttctttaaccctgggcttatttanacttgaanggatctcatgactatttnggtcaatggcancgaatgacagtatta

SEQ ID NO: 28894 - DNA, 449 bp, Homo sapiens
  misc_feature (1)...(449): n = a,t,c or g
gataatctcctgatgcgccatttcctaagcctgtgcannnnnnnnnnnnnnnnnnnnnnnnnnnnnnnnnnnnnnnnnnnnnnnnnnnnnnnnnnnnnnnnnnnnnnnnnnnnnnnnnnnnnnnnnnnnnnnnnnnnnnnnnnnnnnnnnnnnnnnnnnnnnnnnnnnnnnnnnnnnnnnnnnnnnnnnnccnnnnnnnnnnnnnnnnnnnnnnnnnnnnnnnnnnnnnnnnnnnnnnnnnnnnnnnnnnnnnnnnnnnnnnnnnnnnnnnnnnnnnnnnnnnnnnnnnnnnnnnnnnnnnnnnnnnnnnnnnnnnnnnnnnnnnnnnnnnnnntcccccccattaatttttctttaaccctgggcttatttanacttgaaagggatctcaagactatgttgntcaatgtcatcgatgaccggtttacanggggaaaaacntggggctt

SEQ ID NO: 28895 - DNA, 482 bp, Homo sapiens
  misc_feature (1)...(482): n = a,t,c or g
gcccgggggtatgtggcgggggatgcgggaaccacgcagaagcttgtttggtggcatcgtgtgcgcggccgacatttacgcaggatctggctgcgttcccaaaagaagcgtgaatcgtgttttcgggattgagcccagtcagcaaggggagggcttactgggcgccccaggtgagggcttgctctggagtgcacaggtgcgtgggattgttgctagagcccgtgctgtgcccgtggtgagagtttgccctgtgttcccttggtgccttggtgagtagggtgttcattagggcttggacagtacccgcggtaagggttgcagtgcgtctgctgtgccccatgggctgggctgcctgggctgggctgggcgagcaggggcctgccaggtgttgctgggagcgtgctgtgcccaagtgcctgtgtgccggagttcactgtggcaagaaactcactgtttgctttgatggancgagcccgactttt

SEQ ID NO: 28896 - DNA, 484 bp, Homo sapiens
  misc_feature (1)...(484): n = a,t,c or g
gactttaataccccactgtcaatattaggccattnnnnnnnnnnnnnnnnnnnnnnnnnnnnnnnnnnnnnnnnnnnnnnnnnnnnnnnnnnnnnnnnnnnnnnnnnnnnnnnnnnnnnnnnnnnnnnnnnnnnnnnnnnnnnnncttggagccacgtggcacttactttaaaatcaatnnnnnnnnnnnnnnnnnnnnnnnnnnnnnnnnnnnnnnnnnnnnnnnnnnnnnnnnnnnnnnnnnnnnnnnnnntggctcaaattttccaaatattttttatccacaattggttgaattcacagatacagaacccatgaatacaggagccagctgtattttcttctccagcattttattatgaacatttggaaacatatagaaaactagaatgaattttatactgaatgcatatagacccagcacctaggttctatagttacattntactatactggctattatcacatgttatccctctccccg

SEQ ID NO: 28897 - DNA, 488 bp, Homo sapiens
  misc_feature (1)...(488): n = a,t,c or g
gcactggcttgtccaaggccacaaagctgaagaatgagagagccaagatttgcccaggttatcctgtttctggtctagtgtgtttttccaccatatcaacctaactgtgatgccagaatcattcccagcagggcctttaggaaaagaagagatcagtcgcatgggctgcatcccacagtcccaggtcccagcaaggtcgaatggtgacgtgtcactgtgctcctggcctctgtgatgggcaaagacagcagtgctgcgtcaggaggacagaatggactctacagcttaggaaggtccagacaatgttttttatgctgggccaacaatcttttccagcaaccttctacttccccagcccctgcctcgctccatagcataaaccagggaggccaaatatttgtgaaggaaatnnnnnnnnnnnnnnnnnnnnnnnnnnnnnnnnnnnnnnnnnnnnacaaattactattttttttcatacgaacttaaaa

SEQ ID NO: 28898 - DNA, 432 bp, Homo sapiens
  misc_feature (1)...(432): n = a,t,c or g
ggtggattggagcctctttgatggatttgcagatgggttaggagtggctgaagccatttcctatgtggaccctcagttcctcacctacatggcacttgaagaacgcctggcccaggcaatggaaactgcccttgcgcacttggagtctctcgcagtggatgtagaggtggccaatccaccagcaagcaagggagagcattgacgctcttcccgagatcctggtcactgaagatcatggcgcagttggtcaggaaatgtgctgccccatctgctgtaccgaatatgtgaagggggaggtggcaactgagctgccgtgccaccactatttccacaagccgngtgtgtccatctggtttcaaaagtcaggcccttgccccggttncgttgcatgtcccttccccattttaanaccaaggccggttanctcngggt

SEQ ID NO: 28899 - DNA, 435 bp, Homo sapiens
  misc_feature (1)...(435): n = a,t,c or g
gaggggaccaggcgggtggagtgtcccacagcctcagtgcctgacccgtgctcgtcctggctgtgatagtacagtaggaggcagtgataggaagcagaatcggagcgtgagggaaaacgcagggtcaggtcgatgactgaaagctcagttactagcgcggtagagatggagggaagcggaggcggccatgagaaaaagaggaatataaaaaaagggaaggtggcggcgacgggcacctcaaacctgtaactggccgagacagagcccaggcgggcgtgcagtnnnnnnnnnnnnnnnnnnnnnnnnnnnnnnnnnnnnnnnnnnnnnnnnnnnnnnnnnnnnnnnnnnnntcaagcaaatcctactgtggtggggcaaaagacctttggaaattgaagntcttggaaaanacncntntttaacctnagggattag

SEQ ID NO: 28900 - DNA, 426 bp, Homo sapiens
gctgccctgcagcccttgttcaggtgtacagacccttattctggcctctagtgtccttgtctgtcatgacacacccttccgcccaaatacctctgaccccaaggctggaatggggctggtaggagataagtttgcttactcatagtcatgtcctttctcttggcacctgcttccctgcggtgtcctcaaatggatttctgtgtggcagtggagtgattgcatgaatttttctgtaacacattaactttgtattattattaagggagtttgagaaagctttgcttataatgtcaaggcaaggaggtaaaaactggagcccaaagaaattcccttagggcaagattatgttataatagaaaattgaatttcctgaggcagtggctgcaccccttttcagatgtttagtcctgcaatagcatctttctt

SEQ ID NO: 28901 - DNA, 425 bp, Homo sapiens
  misc_feature (1)...(425): n = a,t,c or g
gcttgaactcctgacctcaggtgatctgcctcccgaagttctggcctnnnnnnnnnnnnnnnnnnnnnnnnnnnnnnnnnnnnnnnnnttctattgtctgggaactagacttgagcgtgagaaccactgctctgaggcgctcttctgataccagctgatttatctacgttttttgactagatagcaaaggttaattatggaactaaacttatgtcaaattgatacagattggtaagaacattacagagtgttgtgttgaggggttttgattttaaatccatagagatagagacctggctaacgttagggtacttgagacatgcagtacatggagtttcactggttaaaatcataccgtttgcaaggtatttgtactgntaaattgttagtcacctgttttttcacctggtagataggaatctgcc

SEQ ID NO: 28902 - DNA, 414 bp, Homo sapiens
  misc_feature (1)...(414): n = a,t,c or g
gattctgctttaaaaagaagacaagaaaagaagtggtttatcaaaatcacgttataatcagattttgaccaagcattttgtaagattgccaagtatgcccacggacatggaacacacaggacattacctacatcttgcctttctgatgacaacagttttttctttgtctcctggaacaaaagcaaactatacccgtctgtgggctaacagtacttcttcctgggattcagttattcaaaacaagacaggcagaaaccaaaatgaaaacattaacacaaaccctataactcctgaagtagattataaaggtaattctacaaacatgcctgaaacatctcacatcgtagctttaacttctaaatctgaacaggagctttatataccttctgncgcagcaacagtccttnaacagta

SEQ ID NO: 28903 - DNA, 412 bp, Homo sapiens
  misc_feature (1)...(412): n = a,t,c or g
gccctagagcagctgtgtagtacaggaggagtgcgtctagtcaatgggtttttgtcctgtgaatctgtgggtttctttccttattgagcccctgatcctcttaaatgacttctgagagccccacgcactaagagatagtctgatccattgtcaaacttctggccccctttctggctagtcgagactcagcactcaccgaggctcagagacagggattattctctcctcctgacagttctcttccactgccaccttgagaccactctttttcttcccctgatatcctgaacgatgaccaccaggcccgctgctgctgtctgggtagaggtataatgaaatctccaggaacttaatagctaatattccattaaatggttgncaagtgaattcctaacncangaacaggaataaa

SEQ ID NO: 28904 - DNA, 426 bp, Homo sapiens
  misc_feature (1)...(426): n = a,t,c or g
gttcagcatactattaaaaataaacctgcaacaatgaattaaaaaattcaatatacagaaatccatgctagtgatgtggacggtaatagtccatgctgtgcatataatcctaagctgcagctactgaattcttaagcgagaaatttgactacattaagaattaaaactttgtacacataaaaatatcataaccaaggttaaagagtaacaaagggaatatttgtagcatcatgaaaatgattatttgtagaacaagatgaaaagataatcaaatgaaaaaattaaatgattcaaactgtggaaacataaaaagttagacgctgcactgtgcaggtgaagacaagggacagcagtcacttttcatacattgacatgatctccttggagggcaatttggaaatattcattaaaattcanatgcncata

SEQ ID NO: 28905 - DNA, 436 bp, Homo sapiens
  misc_feature (1)...(436): n = a,t,c or g
gcggcacgagggattatttatcatttaaactaaggtacttggtattgaaagaggccgttacgcttgaatgaccttgtttctatactagccatcttggcaagcataactttgggctttattcattgaccttcttgttgttttctgcagtttgagaatcactggtttttaaattcaaaggtagatagggtttttcccccctctctgtcaaagggactcagttttactctcatatttccctagtaatgttaaatctagaaagtcctggatgaaagtattagatttatcctaatatctggtcactaagggatgaaaaatttataaatagctnatgntaacctanatctaaagcttcctattctgaaatccnaacntgaagactaaagaaaaatntgtccntttnaaaccaaacngaataattgaacttcaccatgnaaaa

SEQ ID NO: 28906 - DNA, 426 bp, Homo sapiens
gtggcccctgtgctcctcgaatagtcggaaacattgatggctgttgtctgggttttggcaggcagccaggggtttgaagtgccttgtacatcgtcatcccaggataagtgctttttagttggaattgattacctttctttgggttttgcttaatagcaaaactgcatttggagagggcttcaggtgaaaaatggacatattagccattgagagcatccgaactcctagtcaatttttaggcttcccttgtttccgtctaatttctgtttaatgatacagtgtttgataatatttaagatatctcaccgcatttgccgctgagcacacatgttgagcgtcgaggacaggttcaattatgtggccactgtgttcaggttcccggattgatcccgggggaggctctaagctttgaggagatctggcggg

SEQ ID NO: 28907 - DNA, 424 bp, Homo sapiens
  misc_feature (1)...(424): n = a,t,c or g
gtaattttttttcatcttcctctcattaatttaccacttttatctgactaagataccttaagtttctttattccttggattggtagtatagtgaaatgattagggcagggctttgaagccagagagtcctgggttcaaatcctggtgtggactctatctttttggggtaagaacctttaaattctctgactttctagtgtcttttaaatgggtgaaataacccttactttatggaatgttgcaaagatgagagaggatgtatgtaaaatgttaacctattacagagcttgatatggagtagacgaattctaaaattacattgagccattttgcctatagtggtgttagaatanaaaagtatactcatcattaaaattgngccctagagctaagtgattncagccctgtggaacccgtcaatgcc

SEQ ID NO: 28908 - DNA, 431 bp, Homo sapiens
  misc_feature (1)...(431): n = a,t,c or g
gtcatggctctctgcaacctcaaactcctggactcgtgnnnnnnnnnnnnnnnnnnnnnnnnnnnnnnnnnnnnnnnnnnnnnnnnnnnnnnnnnnnnnnnnnnnnnnnnnnnnnnnnnnnnnnnnnnnnnnnnnnnnnnnnnnnnnnnnnnnnnnnnnnnnnnnnnnnnnnnnnnnnnnnnnnnnnnnnnnnnnnnnnnnnnnnnnnnnnnnnnnnnnnnnnnnnnnnnnnnnnnnnnagactttatttcttaaagattgccgtcttactcagcatcttggagaactcacaaataaatgtccctgagtttcgagacaagccagccattaaaatcttttagggggatccagagaagatgagttaaattggaatggacttgaaaacactgatttaagttggatttatggatcacaggcntnaaaangnaaag

SEQ ID NO: 28909 - DNA, 441 bp, Homo sapiens
  misc_feature (1)...(441): n = a,t,c or g
gatctggcataactcctcccttttctgagccctctccttggctgcagcaaccgctcatcattcccctaggctgccccctggctcctcctctgtgggcaaggctctcagctgatgtgatctatcataaggagttaggcaagtattacctgtcccctcccaggggaaccctcatttcagaagagcagctggagagagaccctaggggcccctttgagagggtactgaccaggaatgcaataaaacgggcattcttctgaggctcccaaactctatcatgtcaacagccactgattctacccatggggagagctggccttgaatacctccataagctgcaaagcacatctccccctgattattcgctggggccccagctgctgggagacagggagttccacagaaaacacgccggtgcagctaatcgggcctctgananatgga

SEQ ID NO: 28910 - DNA, 537 bp, Homo sapiens
  misc_feature (1)...(537): n = a,t,c or g
gcaactctttccaggtggcctcgaaatctgtgctggctgcgctctacagctctgagggctccgtcatggagaggcaccactttgctcaggccatcgccatcctcaacacccacggctgcaacatctttgatcatttctcccggaaggactatcagcgcatgctggatctgatgcgggacatcatcttggccacagacctggcccaccatctccgcatcttcaaggacctccagaagatggctgaggtgggctacgaccgaaacaacaagcagcaccacagacttctcctctgcctcctcatgacctcctgtgacctctctgaccagaccaagggctggaagactacgagaaagatcgcggagctgatctacaaagaattcttctcccagggagacctggagaagccatggcaacaggccgatggagatgatggaccgggagaaggcctatatcctgactgcaaatcaacttcatggagcacattgcaatgccatctacaagctggtgcangacctggtccccaaacggcaaactgtc

SEQ ID NO: 28911 - DNA, 534 bp, Homo sapiens
  misc_feature (1)...(534): n = a,t,c or g
nnnnnnnnnnnnnnnnnnnnnnnnnnnnnnnnnnnnnnnnnnnnnnnnnnnnnnnnnnnnnnnnnnnnnnnnnnnnnnnnnnnnnnnnnnnnnnnnnnnttcnnnnnnnnnnnnnnnnnnnnnnnnnnnnnnnnnnnnnnnnnnnnnnnnnnnnnnnnnnnnnnnnnnnnnnnnnnnnnnnnnnnnnnnnnnnnnnnnnnnnnnnnnnnnnnnnnnnnnnnnnnnnnnnnnnnnnnnnnnnnnnnnnnnnnnnnnnnnnnnnnnnnnnnnnnnnnnnnnnnnacatttacataactgattacaatacattggtatagannnnnnnnnnnnnnnnnnnnnnnnnnnnnnnnnnnnnnnnnnnnnnnnnnnnnnnnnnnnnnnagnnnatatgtgtacganaanaacntantatatacanggntnggnatttntnagnttcanntaccccgagacngcatatatatgatattttgaaaagacaacaggnatttcntacnttctttttttaacagactcctctggtgggaggctgag

SEQ ID NO: 28912 - DNA, 422 bp, Homo sapiens
ggaaacccctggccttctgtctctgttttcatctgtctctggttctctctgaccctctgtctcttttttctttgctctctgctgataccaaaagtttttatgctttctaaagggtcacagactgtatctgatagagtgtatttggctggaggcaataggaaacctgaccctctgtggcttaaacaaatagaggtgtaacaaacagtcccctaacatgaagtccagagaaggcagagccaggctagtgctgtggcttgtggagagcctcaaggattggcactctgtgtctccctgctcggcatctttaccatgctggctcatgtctcacttgccttgagatggagctgtgctgcctggtgagtggcagttggggacagagaagaggggaaagttggaagcctctgagcacctttcccttccta

SEQ ID NO: 28913 - DNA, 403 bp, Homo sapiens
gcggcacgagaacccagtttcactggttcagtgagtggatccgactcccttcgcaggtctggcatttgaccagaataaaggcctatgtacaaaccccagaaggctaggtatcaatttgcacagagaaataaaactgtcaagcagaactgaatttctgcatcaatagatcaaggcagtttgggctaccccttgggaagcccagttaccagaaagttagctcagtgagtctggaacccccaagaggggaaagggtatgaggagtctctcagtcaagtaaccttaaaaccttgcttcctgtcatggggcagccttcattctaaagacagttcgtcctagcatctctaagacagaatatacgttttccccacgtgcttttaggacccccccttccctgtgatctatc

SEQ ID NO: 28914 - DNA, 509 bp, Homo sapiens
  misc_feature (1)...(509): n = a,t,c or g
gcggcacgagctctttttttctttgtatttgttcatttgaaaagcctttcaaaaaggagttgcagcctgcatgtgattatagctatcagtagcacttaacctaactgctgagatgaaacttttctttttggaacctgctaattttacatatcaatagaaaaaaaatttcttgtactgttaaaaggcccgactttactaattggtagctactctttggattgagctagaatccttagggacagaatttgatagaataatttttgacattttaatttgacaagaaacaattcagggaaacgattttagtcttgggcctgaagtggagtcttctcttgctgtttgtgatacttagtgtggggaatgcctttgaaacagcactttataaaccctgngatccatttaatgggataagttcaagctgcttgctggttttttcataggagcctccctaaaatagctaacacagtggaaaaanttttctggattttanagggnaatgcagtaaaatc

SEQ ID NO: 28915 - DNA, 493 bp, Homo sapiens
  misc_feature (1)...(493): n = a,t,c or g
gtgtgattatatatatacacacacacatatatacataaataattatacaatgtaatatatattatatataatcacacacacgnnnnnnnnnnnnnnnnnnnnnnnnnnnnnnnnnnnnnnnnnnnnnnnnnnnnnnnnnnnnnnnnnnnnnnnnnnnnnnnnnnnnnnnnnnnnnnnnnnatacaatattccattgtatatatannnnnnnnnnnnnnnnnnnnnnnnnnnnnnnnnnnnnnnnnnnnnnnnnnnnnnnnnnnnnnnnnnnnnnnnnnnnnnnnnnnnnnnnnnnnnnnnnnnnnnnnnnnnnnttanaaatgtngnatacaaatnngncttaaaantgtattttanngttggntngntnntatttgctcgncgantttnnnnngctctcattgntnganttcgntntgnnnnccctnggtttttcgtnntngntcntatngntncannncnnnganncntnnttctgattttnnttnncaat

SEQ ID NO: 28916 - DNA, 391 bp, Homo sapiens
  misc_feature (1)...(391): n = a,t,c or g
gggagcgtgtgttcacagctttagacaggacaacccactgcaaatccaaagcagaaaacatggtccaactccatctctgtggcaccttcatagatggtgcccacctgccttggcagtgatgaccgacactgcgaacgctgtgctggcagtgtgtttaagggctttaactgaatcatctcgatggagctgaaatccagccccattttacagaagagaaaactgaggcttatagagatcaggtgtcaagttctatgccaagcacagggaagcaaaaacaggacacactcaacataaggtggccccaggaatcagtggccaggacacgggaggtgtgctgagcgcanatgggcanatgcaanctgangtggcctgttggagggtctggccttca

SEQ ID NO: 28917 - DNA, 449 bp, Homo sapiens
  misc_feature (1)...(449): n = a,t,c or g
gaaacgaggcagcgagcgaaggacgggagccggaccctgggccccgtggaactccagcctgcgccaccacgtcacgcacacgctcggcgctgcgatccgcgcatataacgatatttggatttgacctgcattttggaatttatctacacttaaaatgccaccagcagttggaggtccagttggatacacccccccagatggaggctggggctgggcagtggtaattggagctttcatttccatcggcttctcttatgcatttcccaaatcaattactgtcttcttcaaagagattgaaggtatattccatgccaccaccagcgaagtgtcatggatatcctccataatgttggctgtcatgtatggtggaggtcctatcagcagtatcctgntgaataaatatggaagtcgtatagtcatgantgatggtggctgcttgcaggctgtgg

SEQ ID NO: 28918 - DNA, 453 bp, Homo sapiens
ggcacgttctggaaacatagtagcaggcatagcaaatgaatctaaaaagttatatggagcacagttccaccctgaagttggccttacagaaaatggaaaagtaatactgaagaatttcctttatgatatagctggatgcagtggaaccttcaccgtgcagaacagagaacttgagtgtattcgagagatcaaagagagagtaggcacgtcaaaagttttggttttactcagtggtggagtagactcaacagtttgtacagctttgctaaatcgtgctttgaaccaagaacaagtcattgctgtgcacattgataatggctttatgagaaaacgagaaagccagtctgttgaagaggccctcaaaaagcttggaattcaggtcaaagtgataaatgctgctcattctttctacaatggaacaacaaccctccaatatcagatgaagatagaacc

SEQ ID NO: 28919 - DNA, 422 bp, Homo sapiens
  misc_feature (1)...(422): n = a,t,c or g
gggcaccatgagcttcaatctggttgcatatatttctttttctttcatattttttagagaagggtgtccangctggactcaacctcttgggctccagngatcctctnnnnnnnnnnnnnnnnnnnnnnnnnnnnnnnnnnctacactgcacccagctttgtncatatntcttactgccnaaatatgtcaggtntgnattctttgaananaatcatcnttttnattacnacccncatattcccaagannacatgtctanaagccnaccaatgnnatantcnttttttganacggnntctcgntntgtcgaccangctggaatcgcngnggnncaatnaatctnatnnttctnttggaggctngagangaggatnnctgnacccnnaaggttnaagtncagnctgnncannatnnccaggtccc

SEQ ID NO: 28920 - DNA, 416 bp, Homo sapiens
  misc_feature (1)...(416): n = a,t,c or g
ggcaagaactaactttcagcagctctttgcaagaaatggagtattgatactttaaaataatactgccttcaaatgatgcctgtctctttaaaatcttttgacatagttcttccagggacagatatggctgtatttatttcatagatggagaaactgagcacagagctgtaatgaagacagaattgagatataagggcaaaagctaattaaacgcatcctcacaggtagcctttctttcagtgaacctgtagactagtccagtaatacttattaaaattagttgttaaannnnnnnnnnnnnnnnnnnnnnnnnnnnnnnnnnnnnnnnnnnnnnnnnnnnnnnnnnnnnnnnnnnnnnnnnnnnnnnnnnnnnnnnnnnnnnnnnnnnnnnnnnnnnnnnnnnnnnnnnnnnnnca

SEQ ID NO: 28921 - DNA, 469 bp, Homo sapiens
  misc_feature (1)...(469): n = a,t,c or g
ggcaccctgaagctctcacgtaatggttctgctgtgccgggttgtgacccagctgtccttggtaggctctcctgtttaatgagcaactgctatatgccaggccctgttctagaaacagatgaggcccctgttcccatggaacttagatctgagtatgtggacagagtgagtaggttgccagataatgtcagaggtaagaaaaaagccaggcagaggaagcagtgctggtttagacaagggttggcaaggcctccctgataagggacgtatttgcgcatacacgntagnanantgatggaangcttgccctgtagggacctgggatgnnaactnaacctggnagggctcttgcttgctncanatgnagnanggtcgnttaganggcanaatggnctcnntctgntncananntggnnnnngcnnancgnnntaaccnggangnctgnnnannantngaggtctttattga

SEQ ID NO: 28922 - DNA, 442 bp, Homo sapiens
  misc_feature (1)...(442): n = a,t,c or g
ggatggccagagagatgacgatcttaggatcggctgttttgactctcctgttggccggctatttggcacaacagtatttaccattgcctactcctaaagtgattggtattgatcttggcaccacctattgttctgttggggtgttttttcctggcacaggaaaagtaaaggtgattccagatgaaaatgggcatatcagcatacccagcatggtgtcttttactgacaatgatgtatatgtgggatatgaaagcgtacagctggcagattcaaatcctcaaaacacaatatatgatgccaaaagattcataggcaagatttttaccnnagaaganttgnaggctnaaattggcanatncccatttaaggttttaaacaaaaatggaanggttgagttttctgtgacaagtaatnanaccatccagtgncccaaaatatggtg

SEQ ID NO: 28923 - DNA, 415 bp, Homo sapiens
  misc_feature (1)...(415): n = a,t,c or g
nnnnnnnnnnnnnnnnnnnnnnnnnnnnnnnnnnnnnnnnnnnnnnnnnnnnnnnnnnnnnnnnnnnnnnnnnnnnnnnnnnnnnnnnnnnnnnnnnnnnnnnnnnnnnnnnnnnnnnnnnnnnnnnnnnnnnnnnnnnnnnnnnnnnnnnnnnnnnnnnnnnnnnnnnnnnnnntatncnnanatnatnaataaaaacnggaacnttaaatntgcaaaatacntgctgnagggaacaactcattttatncaacttaaanannanctttttatnnggataagaattatncntaaannggaatngttgcnngnntcntaaaaaaaacnnnacngcacctgaannacttnctcgntttttanaaanatgcncnattngaaattntancctaatggaaagntttactacacattttgg

SEQ ID NO: 28924 - DNA, 368 bp, Homo sapiens
  misc_feature (1)...(368): n = a,t,c or g
gcggcacgagctggaagaannnnnnnnnnnnnnnnnnnnnnnnnnnnnnnnnnnnnnnnnnnnnnnnnnnnnnnnnnnnnnnnnnnnnnnnnnnnnnnnnnnnnnnngcnancatatgttgactntatgaacttnnatggaanttaattcatngtntcactanatctntatntggaatgancaggtaanngnnnncnggctncttnanctcnnannacaangntatgagcncattnaataaanggtgaaaccggtgcgccgaacanccantggctngccggttccacngcttgaaggntgtgaaccaganntggcacaggccctgtgctncangtgcacngctntgaacccccgacttttannttttc

SEQ ID NO: 28925 - DNA, 428 bp, Homo sapiens
  misc_feature (1)...(428): n = a,t,c or g
gaactggctgattgtttacttctcttcccctcccccaccacttagacgatgaggttcttgacagtaagaacagcttcttatatgtctttgccacagtgactggcacatgagagactaggataattgactaatttaccaaacatgggacacaggacaagagatttttgagagggaaaggaaagctaatatagggtctgaaacatttccaggaaacagaagagggaaaagtagttgaaaataagctcaaagaaaagtctggcctgaacatatagatttaatagttaaaatgatggagannnnnnnnnnnnnnnnnnnnnnnnnnnnnnnnnnnnnnnnnnnnnnnnnnnnnnnnnnnnnnnnnnnnnnnnnnnnnnnnnnnnnnnnnnnnncacatgggaaaaccccgtcttactaaaaatncaaaatta

SEQ ID NO: 28926 - DNA, 435 bp, Homo sapiens
  misc_feature (1)...(435): n = a,t,c or g
nnnnnnnnnnnnnnnnnnnnnnnnnnnnnnnnnnnnnnnnnnnnnnnnnnnnnnnnnnnnnnnnnnnnnnnnnnnnnnnnnnnnnnnnnnnnnnnnnnnnnnnnnnnnnnnnnnnnnnnnnnnnnnnnnnnnnnnnnnnnnnnnnnnnnnnnnnnnnnnnnnnnnnnnnnnnnnnnnnnnnnnnnnnnnnnnnnnnnnnnnnnnnnnnnnnnnnnnnnnnnnnnnnnnnnnnnnnnnnnnnnnnnnnnnnnnnnnnnnnnnnnnnnnnnnnnnnnnnnnntcatattgattgtaatgactcttttagtgcacagcactatgcttggcttatagaatttctcaagtaaacatttgttgaatcaatttaagaactcagcagaatagaaaattaaaactagaagaaatactgaaaaaccatttantaaaggnaatgag

SEQ ID NO: 28927 - DNA, 425 bp, Homo sapiens
  misc_feature (1)...(425): n = a,t,c or g
gcttctcaaccttatcaaggattttcatgttgatgactcgaaactgacagtattaagggtaggatgttgcttttgaatcactgttgagttttgattgtgtcgaagaagggttatcctttcattaggcaaagtacaaaattgcctataatacttgcaactaaggacaaattagcatgcaagcttggtcaaactttttccagcaaaatggaaccaaagacaaaagaaacttaccaattgatgttttacgtgcaaacaacctgaatctttttttatataaatatatatttttcaaatacattttgattcatctcattatgaaaaacatcccaaactttaaaatgcganattattggttggtgtgaanaaagccagacacttctggntcttctcttggtgaaatantaaaaagcnaaatgaatcattgg

SEQ ID NO: 28928 - DNA, 424 bp, Homo sapiens
  misc_feature (1)...(424): n = a,t,c or g
gccgagctctgactcatttttaagatttttaggaaattagatttggattaaactggcttcactgtttcttggctgtttgttcaaacaaccctttattcaacaactaacattggcctgatggggacagctgctctgtgggtgctggaggtagaattgtaaatagtctctgtgtactggggactacagactaagcaggtgatggtgataaaatgtgatctgctctgagtcagggcccacagaaggttgtaaagaggtggcagttcttcaacaggaccttgaaggagagactccagactggcttccatgcatctgtcttgctctgtacccanaatacagccaatcatggcatttcctagnttaaacccttttgtgcctnctgttggtgangggataaaaatcagactcctggctgggcacggnggtt

SEQ ID NO: 28929 - DNA, 427 bp, Homo sapiens
  misc_feature (1)...(427): n = a,t,c or g
gcaccagctcactgtggcctttgtgtctcacataaattttgtcttctgtgtctgaaactcttactgacttctgcttccttgttccctgggtctacactgttccttctcttcctggaactgacccttcgatctctgggcttcctaccttgagtaatttgtcaaaatcctgttcttgcaattggtggcttctcaatttttttcctctgggtttttttcccacagtctttccactatatcacagggcatacactcctgcttcatgactgttcatgacatattgaattcccctcttgtaccccacagtctctgcactgagtgtgtgctcattgggaaaggttagctcacattatacctatccaaaaaagganaggtggcaggtggcctgtggagaanaggtatccaggcacatatgcatgggaaaaagttc

SEQ ID NO: 28930 - DNA, 476 bp, Homo sapiens
  misc_feature (1)...(476): n = a,t,c or g
gcggcacgaggagagctaccctgcttttaggaagcctaacgtgaaaataaaggaattttgcctttttttccttcagaaggaaaattaggaattattcattttatcaaaaggacaccttgactttacagtgtcttaaaatagtattcagcgnnnnnnnnnnnnnnnnnnnnnnnnnnnnnnnnnnnnnnnnnnnnnnnnnnnnnnnnnnnnnnnnnnnnnnnnnnnnnnnnnnnnnnnnnnnnnnnnnnnnnnnnnnnnnnnnnnnnnnnnnnnnnnnnnnnnnnnnnnnnnnnnnncatgcctatagcccagctactttgngggctnaagcangaggatctcttgaatctgggaggtcaagcttccntaaactgagatatgccactnactgncttcattctgggtgccaantgagacctgttnaaaaccaaaaacngctaccaaaccancnaaaaacccncaggctnttggaatag

SEQ ID NO: 28931 - DNA, 422 bp, Homo sapiens
  misc_feature (1)...(422): n = a,t,c or g
ggttggtagagcttttgttagggatttccttgcgagcctatcttcacatcctaccctttaaacatgcttttttaaatgtaacagcagagcacctaaaaaacctatttttccaagttgtgacttctctctttcctacatacttttattcttctagtcatccaagtaactatcttactagtagcagtctgtgagtctgtctatgcattcatgcatccgtctaaccagctgtctacctacttatccatattttttaagcaataaaaatttcattttgtagcctcttttactagtgcacttgcccagaacagacagtctcccactcagaagaccagttctttgagtcccagataaagttcatatatgatataagggatagncacatcttcgtatactancatttactataatcngncaatgccttt

SEQ ID NO: 28932 - DNA, 428 bp, Homo sapiens
gattgggccctggcttccggattacaaatgtacttttggaaaaacaagattttgaatagtgtgggtgtctatgtaattactaaacaaggacattttttagcttttggctcaagtgacaaagattttcctttcaaaagcattttgccagattgaaatctaaacataaacgtatgacaacattgctaccggtagctaattcagtgattcaacatgtctgtttatcaaacacttgagagcactttcaaagagccctggtttgggtatgaggtagagttttgtgaggcttcttttaaagcctctctgtctgagaaggaatatgctacttttcataccaccttgccagaaaggaaggcccagaacagaaagaacacaaaagaggtataaggggttaagggaacctggaaaacctttgaaagtaaattatcagt

SEQ ID NO: 28933 - DNA, 417 bp, Homo sapiens
  misc_feature (1)...(417): n = a,t,c or g
gttgagaagatttaattctgctactgagaaagaaatactctaccattctggcatataaaccaccagacgtggtacacatttttccttgctgtggttaagatgatactgtttgctacattccaactgtcctataccaaaaaaaaaaagnnnnnnnnttttttngcatcatgacgnatnggccaacatttcatgaanctntngacatctatancancangctatattctttaatcttcanggncgnatattcctccactgattncctgngggnggttctnaagncctnggnattaattcttttcnatatgtctnaccttttccagttaatccattctaaancatcaatgggtnatcttcgactganggcttattaagacttcattcaccagatatcgngtatgagtacctactatgggc

SEQ ID NO: 28934 - DNA, 421 bp, Homo sapiens
  misc_feature (1)...(421): n = a,t,c or g
gatcaaagcaatacttgcagagatgaaaacatcaaataacagtgaaaaaaactaaacataaaatatttttagctgtctctttcatcccttctgcacacctcagtcctgcttgaagaagtgatcgtaattatttattttggcagtttcttcttgtgtttacctttacatatccaaacactacactttatcccattatgatagataatattttttagctttctgttttggtagatgtagatttaggccaatattgactatactcactctctttcctccgttttgctagnntagggtacttctgatagtttagngaactcactntctgcgggatancnataggcccatcagtgcagcatattngtantgnnggtanangaacaatttgannatcnnntttnagaattgncnccnatntnngccc

SEQ ID NO: 28935 - DNA, 425 bp, Homo sapiens
gctctgttaacagcttacatagggtttcccctttactataactctagcatccccatcccatttgacactgggggcaagggttcttcttgcatgtggggtttatacccctcccctgatgaatacagagtggtagctaggggttggttatcatcagaaggtggtctcccctcaggcctgggggataaggacgtgggcccagccacatgccaactcatgtccaatactgctttgcctggtgtggggaaggattgggtcttgtcccccaacacagcttctgtggctgactgtaatactgtacaactgtttctgaccattaaatgctgttgtactctgtgtggcctctgctgtgtttcctggggaggaagcagcactaggatatagatattcattcgtcataacaggcaatctaagccactctatactac

SEQ ID NO: 28936 - DNA, 412 bp, Homo sapiens
  misc_feature (1)...(412): n = a,t,c or g
gnnnnnnnnnnnnnnnnnnnnnnnnnnnnnnnnnnnnnnnnnnnnnnnnnnnnnnnnnnnnnnnnnnnnnnnnnnnnnnnnnnnnnnnnnnnnnnnnnnnnnnnnnnnnnnnnnnnnnnnnnnnnnnnnnnnnnnnnnnnnnnnnnnnnnnnnnnnnnnnnnnnnnnnnnnnnnnnnnnnnnnnnnnnnnnnnnnnnnnnnnnnnnnnnnnnnnnnnnnnnnnnnnnnnnnnnnnnnnnnnnnnnnnnnnnnnnnnnnnnnnnnnnnnnnnnnnnnnnnnnnnnnnnnnnnnnnnnnnnnnnnnngttgagcacttactccttgtagacctgcacttggacaacctgcactaaatctgcaccctcctcaggtcaggcaagacgctccactgacctggctggccatgtggctg

SEQ ID NO: 28937 - DNA, 409 bp, Homo sapiens
gatggaattgtcagtgagaactcgcttatcaaacacaaaatcatgttacccccacgaaacagaggaactgtaacttacattgctccacctgggaattatgatacctctgatgttgtcttggagcttgaatttgaaggtgtaaaggagaagttcaccatggtgcaagtatggcctgtacgtcaagttcgacctgtcactgagaagctgccagccaatcatcctctgttgactggccagagagtccttgatgccctttttccgtgtgtccagggaggaactactgctatccctggagcctttggctgtggaaagacagtgatatcacagtctctatccaagtattctaacagtgatgtaatcatctatgtaggatgtggtgaaagaggaaatgagatgtcttgaagtcctc

SEQ ID NO: 28938 - DNA, 408 bp, Homo sapiens
gcagtggaagaagctggttcctgtggaacgaaatgctgagcctgatgaacaggactttgagaagagcaattcccgaaagcgccctcgggatgccctgcagaaggaggaggagatggagggggactaccaagaaacctggaaagccacggggagccgatcctatagccctgaccacaggcagaagaaacataggaaactctcggagctcgagagacctcacaaagtgtctcacggtcatgagaggagagatgagagaaagaggtgtcacagaatgtcaccaacttactcttcagaccctgagtcttctgattatggccatgttcaatcccctccatcttgtaccagtcctcatcagatgtacgtcgaccactacagatccctggaggaggaccaggagcccattgtttc

SEQ ID NO: 28939 - DNA, 400 bp, Homo sapiens
gcaaatgaattaccatctgctgatgggctgtcatggcctcgaaaaaaatgctgagggagcctggaggagggtgggactatctctgcttggaggagtgggaagggcttcagaggtgataacatttgagctgccttgaagggggttaatagggagaataaagcaatcgcagagtcttgaaaaggaggcttctgggaacacagtggggattccatgaggttgctgcttggtcgcttgtatggagtggtgggggaagcaaggctaatttaacaagtttcctgtgaaagtttgttcctgaagtttccagttcctttaatctcttctcctctgtaattttaactttttaaaacctacgatgattgtattttggtatagctttcaagtatataattgtgaatgacag

SEQ ID NO: 28940 - DNA, 419 bp, Homo sapiens
  misc_feature (1)...(419): n = a,t,c or g
gtctcaacattttatacccaattattttaattttcataacagtcatataaagtaaatgctaatattgtcctcatttcacaaataaggaaactgaggcagaggggaaacttgcctaagatcacacagctagcagatgtctggtgccagaatgtgtgcccctaaacaagacacaaacacaaataaatttattccttaaaggaaaacactgataaataggaccacattggcaaaaaaaaatctttggttatctacttaactataaattgaaaagataagccactgatagaacagtttgctacacatttaaatcccccttcccctgaaaaagccttcaacagaagatgngantaaactctttatggaggaagaantttcaaangggtaattaancttaaaagatattttaccttaantaaagg

SEQ ID NO: 28941 - DNA, 407 bp, Homo sapiens
  misc_feature (1)...(407): n = a,t,c or g
nnnnnnnnnnnnnnnnnnnnnnnnnnnnnnnnnnnnnnnnnnnnnnnntttggagatgtatttatcacccgcacatgtgaagacataaaaatcatcagcctccaaatgggccgaacagatgtggtgaactaggaggacatcccagggacactcttgaaattacttttaacccttaggagccgcagagttggttggtagcaggagcggtggagaggcaggcatgctcagccgcatcccttaaagcagtgtcaaatgtgggctgattgtatgcagccagcttgagagcccagcaccagtgcctttcagggggttcatatgtttctaccgagaaatgctgttctacccacactgtgcatagcacgatgggtgactctgtaaggaagaagctagaccggccaaatctgaat

SEQ ID NO: 28942 - DNA, 400 bp, Homo sapiens
  misc_feature (1)...(400): n = a,t,c or g
gggnnnnnnnnnnnnnnnnnnnnnnnnnnnnnnnnnnnnnnnnnnnnnnnnnnnnnnnnnnnnnnnnnnngannnnnnnnnnnnnnnnnnnnnnnnnnnnnnnnnnnnnnnnnnnnnnnnnnnnnnnnnnnnnnnnnnnnnnnnnnnnnnnnnnnnnnnnnnnnnnnnnnnnnnnnnnnnnnnnnnnnnnnnnnnnnnnnnnnnnnnnnnnnnnnnnnnnnnnnnnnnnnnnnnnnnnnnnnnnnnnnnnnnnnnnnnnnnnnnnnnnnnnnnnnnnnnncctgtgggacagaaacttccaaaggtactgagtgtgagatgcagccagccacgacacagagctcatcgggagaattccacgggagacccgagtacacatggcctgccagtgggaggtgct

SEQ ID NO: 28943 - DNA, 398 bp, Homo sapiens
  misc_feature (1)...(398): n = a,t,c or g
gacagggcccccttcagaaggtctttctttgtcttgccaggaggatatgattcatatttccatagaacaaatcatacatggaaacttctggatgaagccagtcagatatatttgatgacctctacacccaccagaaagtggcaatccttccttcccgcaggctgacactagtgcaggnccagttcgcaagnncagggaaaancagtggcccaatttttttnaancncaagnantagtnaaaggggntggataanttggtnggctnaccnanngntngcnttaaantngtnaaagncnttcaaaagttanaagttaccaagatnaatttngcttttaannnactttgaancaacnatgactttctgcggntttccttnttttcggnattttgggttccc

SEQ ID NO: 28944 - DNA, 405 bp, Homo sapiens
gctcggcgtggataagaagcagtcgggcatccaggcatcactggagcggagcccagcctccgtgggcaccagggtgtgcatggcgggctgcagtgcggtcagtcctgtggacggtggggcaggaggcggtggctggacagtgcggtcagggtcgacccaagggctgacagcggccggagctcaggcgtgcttaggaagccctggactcccagggtggggaggcgagtttcagccccttaaaaaagatggacagctcaagccatccaaacagggactgaattgtctgtgagccaatgcgttccccatcactggaggtgtgcctggctcaggcacagctgaccggggagccctcaaagacccccacgctcaggttctgctctgcccgattccggtgtgtaaggccag

SEQ ID NO: 28945 - DNA, 408 bp, Homo sapiens
ggcacttgttaataaacttctgcttctttttcttttattattgtgacttttgtttttaggagagtgtctcaactaagaacataaaaatgcaaagaaataaattatgttttctcccttccatagtcgttaccatactgactaatacagaactgaagctgaaaagccatgatgtagagagaggggccaagattatctatttccttcttgaaagtttttccctgaactttccagaagtacaaataagagtaaaaacatatccctggacacaggagctggcgacctaactggcttgttttgagtttaaatttcttcttaatgccctgaatggaaatatttgacttcctctctgtaatatattcatgtttgcttcaatataaaaatactatttataaagatttagccctcaag

SEQ ID NO: 28946 - DNA, 406 bp, Homo sapiens
gggcacggagtgaggctagagctgtcactggtaaagcagccgcagcctctttgagcctcattgagaaagggctcagtgtagacattactccccctggaaggcctctcagatgctccttttctgatgggatgaaagactccccctgtctctgtctagagaattctgtgcatgactcttttctagcactttgctaccccatgtgtggtctgtggatcacttgagaacttgttagaaatgcaggctctcagggccccctcagcctctgaatcagaacctgcatttgactgggcttcaggtgattcacgtgaacaaagtctgagaaactctgctctcgcatttctcctgctgaattataatcgtctgtgttcccgttaaactgtgcactcactgagggcaggaactggtt

SEQ ID NO: 28947 - DNA, 439 bp, Homo sapiens
  misc_feature (1)...(439): n = a,t,c or g
gctaaaatcttttaacctttgaatatgagataactttttgtctgggcaaaattacatgaagccaattatagtcataatttttagaggaaggcttagattaaaatgtaaagatgtggtagacttctaaatatgcaaagaatcacatggagtatgattgtgaattacaggtttaattacagtttttttcttttaaaggaagtatctaacttcttagtataatacactattatataaactgtctcatttaatacagagagtattgaggtatatgttgatannnnnnnnnnnnnnnnnnnnnnnnnnnnnnnnnnnnnnnnnnnnnnnnnnnnnnnnnnnnnnnnnnnnnnnnnnnnnnnnnnnnnnnnnnnnnnnnnnnnnnnnnnnnnnnnnnnnnnnnnnnnnnnnnnnnnnnnnnnnnnnnnnnnnnnnnnncattcct

SEQ ID NO: 28948 - DNA, 435 bp, Homo sapiens
  misc_feature (1)...(435): n = a,t,c or g
ggtgggttccacatctatggattcaaccaacctaggatcataaatgtccagaaaaaatatttagtctgtactgaacatgaacagactttttttttgttattccctaaaaaatatnnnnnnnnnnnnnnnnnnnnnnnnnnnnnnnnnnnnnnnnnnnnnnnnnnnnnnnnnnnnnnnnnnnnnnnnnnnnnnnnnnnnnnnnnnnnnnnnnnnnnnnnnnnnnnnnnnnnnnnnnnnnnnnnnnnnnnnnnnnnnnnnnnnnnnnnnnnnnnnnnnnnnnnnnnnnnnnnnnnnaaaggacaactgtatatttttcctagttgtagaaagagagtagtaggaaataatattgtaaagataatttgtgtccccattgtggagagcttttaatgctagggtaaataattaaaactcttccataaatagtagggagta

SEQ ID NO: 28949 - DNA, 439 bp, Homo sapiens
  misc_feature (1)...(439): n = a,t,c or g
ggacatcttcttgtactttgcataagaagtcagatgtgagccacctcacccagccacaaacnnnnnnnnnnnnnnnnnnnnnnnnnnnnnnnnnnnnnnnnnnnnnnnnnnnnnnnnnnnnnnnnnnnnnnnatccctctttctggttcgtagatggacgtcttgtcctgtcctcacatggctgaagagaaacaatcatctctgttgtgtctcttctaacaaagactctaatcccaccatgagggcttcaccctaatcaccnnnnnnnnnnnnnnnnnnnnnnnnnnnnnnnnnnnnnnnnnnnnnnnnnnnnnnnnnnnnnnnnnagagagacacagcattcagtctataacaaggaataaccaaacgagttggaaatcgaggctactggtgtgtaggggcagagaacagactgagttttgagtcctcaattcacccg

SEQ ID NO: 28950 - DNA, 430 bp, Homo sapiens
  misc_feature (1)...(430): n = a,t,c or g
nnnnnnnnnnnnnnnnnnnnnnnnnnnnnnnnnnnnnnnnnnnnnnnnnnnnnnnnnnnnnnnnnnnnnnnnnnnnnnnnnnnnnnnnnnnnnnnnnnnnnnnnnnnnnnnnnnnnnnnnnnnnnnnnnnnnnnnnnnnnnnnnnnnnnnnnnnnnnnnnnnnnnnnnnnnnnnnnnnnnnnnnnnnnnnnnnnnnnnnnnnnnnnnnnnnnnnnnnnnnnnnnnnnnnnnnnnnnnnagaggccctttccatactgtgattcctttcacaaccccacacccatggttttattcctggggagtctgctgcgttcttggttaacagatggttctacatgatgtgttggcacctgtcagactaagagctgactctgntagaaacggncagttgctcctaatactatttttttctcctttaaaaataaaactc

SEQ ID NO: 28951 - DNA, 425 bp, Homo sapiens
gatttttaatgcgttctcaagaatttgaacacgaagagagtgtcaccctcccaggttatgcccccgggagttcatgcacttgccacctggtcgctgctcagggggcccagggagtttgctgcagtgccggaggactcctgggtcccggctgtgcctccccgcagccgcctgctcccttgggacactcattcatttgctgtggccactgccgcccacagtccttgcctcgtagactccactgcagctctggttacaaagagcgagtggtcagggactcctgacctgccatgcagggccccgtgggcttgtggtggctttggtgccgtccgctgcgtctgcctcttagagcatggagttctccttctcaggagggctgagctgctggagctctagtcctgccgcagagcacccccaagtgcggcgtt

SEQ ID NO: 28952 - DNA, 434 bp, Homo sapiens
  misc_feature (1)...(434): n = a,t,c or g
gacaaaatgacactcttctaaaactaaatgggcacaagagaattttcctgggaaagttcacatcaaaaagagtgaatgtggtatatttctaaatgatatggaaaatagagacagatttgtcctttacagaaattactgagtgtgaataaaaacttcagatccaagaaatatataatgagagatataatttttgttaataagacaaaggtaatatattggatacaaagacacaaatgtattgtgtgttcaattattttgttgtcttgagatttaatattctttccaagagcttttaatgaagcagagagctagtacttcattttcactggatacattttcagcatcatgagttgtcacagcctctgagcccctgatctgaagccagaagggctgagtgtattgnaaacttattcttgcatgttgctgnctgggaa

SEQ ID NO: 28953 - DNA, 417 bp, Homo sapiens
  misc_feature (1)...(417): n = a,t,c or g
gcaatcaacagatgtttgctgggcgtctctgaggtgggatacagagtccagtcttcgagccttccccacttttgtcgtgtttttttccgagggtgacataatccttgcagnnnnnnnnnnnnnnnnnnnnnnnnnnnnnnnnnnnnnnnnnnnnnnnnnnnnnnnnnnnnnnnnnnnnnnnnnnnnnnnnnnnnnnnnnnnnnnnnnnnnnnnnnnnnnnnnnnnnnnnnnnnnnnnnnnnnnnnnnnnnnnnnnnnnnnnnnnnnnnnnnnnnnnnnnnnnnnnnnnnnnnnnnnnnnnnnnnnnnnnnnnnnnnnnnnnnnnnnnnnnnnnnnnnnnnnnnnnnnnnnnnnnnnnnnnnnnnnnnnnnnnnnnnnnnnnnnnnnnnnnnnnnnnnnngtccttggcagattttgg

SEQ ID NO: 28954 - DNA, 410 bp, Homo sapiens
  misc_feature (1)...(410): n = a,t,c or g
gttgtaatctataatagagtatagatgttaannnnnnnnnnnnnnnnnnnnnnnnnnnnnnnnnnnnnnnnnnnnnnnnnnnnnnnnnnnnnnnnnnnnnnnnnnnnnnnnnnnnnnnnnnnnnnnnnnnnnnnnnnnnnnnnnnnnnnnnnnnnnnnnnnnntgcaccaccacannnnnnnnnnnnnnnnnnnnnnnnnnnnnnnnnnnnnnnnnnnnnnnnnnnnnnnnnnnnnnnnnnnnnagannnnnnnnnnnnnnnnnnnnnnnnnnnnnnnnnnnnnnnnnnnnnnnnnnnnnnnnnnnnnntgccaggccaatattaaatattttaattagagtcagtgctaaatcattgcattctactctaggactatgccaggtaatagtggattctctttacatttcag

SEQ ID NO: 28955 - DNA, 379 bp, Homo sapiens
  misc_feature (1)...(379): n = a,t,c or g
gaactggatggctaacaggtaaatgaaaatgattgttgccaagacactgggtggctagagcaggcctgatgacatgatggttcttgctgaataagaaagggcagcagcaccagctgaggaaagctatgcatgttatgatgaccatttttgccatcacctgtgtcctgaaagtgcctggggtgagcaaagaccatggaggcaggtggaattggttttaaattctggctctgccacttacactatttgcaaaacttgagcaagtcattgtcaaagcatcacaagnnnnnnnnnnnnnnnnnnnnnnnnnnnnnnnnnnnnnnnnnnnnnnnnnnnnnnnnnnnnnnnnnnnnnnnnnnnnnnnnnnnnnnnnnnnnnnnnn

SEQ ID NO: 28956 - DNA, 473 bp, Homo sapiens
  misc_feature (1)...(473): n = a,t,c or g
ggtcaaaagatggggagtctcatgattcaagtttttcagatatttagttgccaaggcagataaatactactcagatgcttctcttctaaaagtcactaatgaaattaattatggtaacttctattgaactcccatgattttgctgattcaaagtctgactgttcatggtactaaagcatttctgtctgagaaaaacattcctgcatttaatttgttggtggcagtgtccttatatgacaaaaccagtctcacaattcattataaacaataacctcnnnnnnnnnnnnnnnnnnnnnnnnnnnnnnnnnnnnnnnnnnnnnnnnnnnnnnnnnnnnnnnnnnnnnnnnnnnnnnnnnnnnnncctggnttacatgggggaaccccttctttctaaaaaaaanananaaaaaattttttttnccngcgcangcntttccctttgggangggnaattttaanttggcctncccccc

SEQ ID NO: 28957 - DNA, 476 bp, Homo sapiens
  misc_feature (1)...(476): n = a,t,c or g
gaagacatggaggaagagagtgacttggaagataaacagagcccaacgggcagtgactctgggtcagtacaagaagactcgggctcagagccaaagagagctctgcctttcagaaaaggtcccaattttactatggaaaagttcctagacccttctcgcccttacaagtgtaccgtctgcagggaatctttcactcaaaagaatatcctgctagtacactacaattctgtctcccacctgcataagctaaagagagcccttcatgaatcagcaaccggtntccanaacccaccagcagcccagacaacanaccttttaagtgtaacacttgnaatgnggcctacanccagagnttcactctggagatncatatgaggnctgggtcacatnaaaccaaaggcctngnagacaaacttgaagctgaagtggnacnaccantggnatgggaacntcngnggaattccttggcccntcca

SEQ ID NO: 28958 - DNA, 437 bp, Homo sapiens
  misc_feature (1)...(437): n = a,t,c or g
ggggatacagagccacagccaagagcaggtgctggacaggaggtggacagatatggattctgccactctctgctgtgtgaccttcagcaagttacccaccctctccaagtcttagtgcagttaactggaaaatgaaggtgaaataatgtatgtataacacctggcacagttcctggctttcaataaatggttgtctcnnnnnnnnnnnnnnnnnnnnnnnnnnnnnnnnnnnnnnnnnnnnnnnnnnnnnnnnnnnnnnnnnnnnnnnnnnnnnnnnnnnnnnnnnnnnnnnnnnnnnnnnnnnnnnnnnnnnnnnnnnnnnnnnnnnnnnnnnnnnnnnnnnnnnnnnnnnnnnnnnnnnnnnnnnnnnnnnnnnnnnnnnnnnnnnnnnnnnnnnnnnnnnnnnnnnnnnnnnnnnnnnnnnnnnnnnnnnnnnn

SEQ ID NO: 28959 - DNA, 428 bp, Homo sapiens
  misc_feature (1)...(428): n = a,t,c or g
gccacgcctggccttttttttccctttttctatctgcatttttcctcattgggtgtgtggtggggactgtttgggctgcaagtgacagaaacctaattctaacaggcttaagcaaagaggggaatttattgtaaggactggagggtctctgagcccaagggcaagaacttagctgggcctgaggagctgtggaagccagggtgggctctcccagtcctttcagtcatgtttcttctcaggctgctttctgtttctgtgtctttctcattcagctttttccatgtggcagaaaacacattcacagagctctctgaagttttatttccnnnnnnnnnnnnnnnnnnnnnnnnnnnnnnnnnnnnnnnnnnnnnnnnnnnnnnnnnnnnnnnnnnnnnnnnnnnnnnnnnnnngtgtacctcctgcaaact

SEQ ID NO: 28960 - DNA, 433 bp, Homo sapiens
  misc_feature (1)...(433): n = a,t,c or g
ggaaatacagttgatttctatatattgctcttatatcctgnnnnnnnnnnnnnnnnnnnnnnnnnnnnnnnnnnnnnnnnnnnnnnnnnnnnnnnnnnnnnnnnnnnnnnnnnnnnnnnnnnnnnnnnnnnnnnnnnnnnnnnnnnnnnnnngnnnnnnnnnnnnnnnnnnnnnnnnnnnnnnnnnnnnnnnnnnnnnnnnnnnnnnnnnnnnnnnnnnnnntgataacttatcttcacagtttcaggacaaaggagagaactcnnnnnnnnnnnnnnnnnnnnnnnnnnnnnnnnnnnnnnnnnnnnnnnnnnnnnnnnnnnnnnnnnnnnnnnnnnnnnnnnnnnnnnnnnnnnttaaggcacaagtgattattcctctacccacctntgacatgcaaattgnatattcagtgaaanggtggtcaaagact

SEQ ID NO: 28961 - DNA, 431 bp, Homo sapiens
  misc_feature (1)...(431): n = a,t,c or g
nnnnnnnnnnnnnnnnnnnnnnnnnnnnnnnnnnnnnnnnnnnnnnnnnnnnnnnnnnnnnnnnnnnnnnnnnnnnnnnnnnnnnnnnnnnnnnnnnnnnnnnnnnnnnnnnnnnnnnnnnnnnnnnnnnnnnnnnnnnnnnnnnnnnnnnnnnnnnnnnnnnnnnnnnnnnnnnnnnnnnnnnnnnnnnnnnnnnnnnnnnnnnnnnnnnnnnnnnnnnnnnnnnnnnnnnnnnnnnnnnnnnnnnnnnnnnnnnnnnnnnnnnnnnnnnnnnnnnnnnnnnnnnnnnnnnnnnnnnnnnnnnnnnnnnnnnnnnnnnnnnnnnnnnnnnnnnnnnnnnnnnnnnnnnnnnnnnnnnnnnnnnnnngtgatgtattgcatgactcttggctgnngatttttttaagtantantatcatcattgccnttta

SEQ ID NO: 28962 - DNA, 440 bp, Homo sapiens
  misc_feature (1)...(440): n = a,t,c or g
gannnnnnnnnnnnnnnnnnnnnnnnnnnnnnnnnnnnnnnnnnnnnnnnnnnnnnagttggaggcactaggcaacatagagggacctaatctctaaaaattaaatgatattttaaaaaaatgtccttatcactgttttcctcagatgaattatacactattttaggtgaaggaaagagaaaaatatgttaaggtgaaggaaagagaaaaatgtgttaaaggtgctttatgactagagagatatttgttacattaccatcagttgnnnnnnnnnnnnnnnnnnnnnnnnnnnnnnnnnnnnnnnnnnnnnnnnnnnnnnnnnnnnnnnnnnnnnnnnnnnnnnnnnnnnnnnnnnnnnnnnnnnnnnnnnnnnnnnnnnnnnnnnnnnnnnnnnnnnnnnnnnnnnnnnnnnnnnnnngggtttttggtaanacggggtt

SEQ ID NO: 28963 - DNA, 430 bp, Homo sapiens
  misc_feature (1)...(430): n = a,t,c or g
gggaagaattaataacaaccaagacaatgcccagatttcatctccgctcacagcccctcctgtgtgctgtatgatcaggttcttgggggtggctccagatacagcaaacagtcaggattaatccacaagagtgagctgtcagcatgaggttcccctacagtggagcttgccaaggtccgtgcctcccagggcacccgttccagggctaacagatgaagcatggaaatgctgtgtggagtgagctaagcagccgttctcaggagaaaacagacaaatcctcctgcatcctggcaaaccagctttgtggcctgttttatgtcatctttgctgagctccaccgggtcacccctcctgctggctttgtgatactgacatttcaggcactggcacagatccttggncttnctgcttgggatttcacggacggagt

SEQ ID NO: 28964 - DNA, 431 bp, Homo sapiens
gctggaagggaacttagacgtcatctagtcctactctgtcttttcacagaaagaagaagaaattgatccagagaggtcgtgacttgcctaaagtcacagagcaagttaatggcagagccaaggcaagacccaggactcctgactccagttctacgacatcactgtcctagggccatttcttgatgaaggtgtgacctggtaggaaaagaaaaaaagcagacatagcaagagaaggagaaccaaggtgcctagctagtctcccatttaaatattctaatttaaagagaatattaaattccagaccatttagatttgattggattgtcaaagtcatgtgagcgcttacaaatgaggaaaatatgaatgagccctgttaagtcattttggttcagttactaaagggaaaggaggaatggtaataataccctcac

SEQ ID NO: 28965 - DNA, 432 bp, Homo sapiens
  misc_feature (1)...(432): n = a,t,c or g
gggagacctgagagattatctggaccatccctgctttgcagatgtggctaaaagggtgaaaagtggtttgctgaagagcccacagctggctagtaatggcaaacaggactggaacccaggacttcaggcctccactttctactgtaccaataggaggaagctaacatgtaatggtcattatgtgctaagggctatacatgttacctagcaaatctttcccatttctctacatctctgttaccatctactaccccacttcgggccatcatcatctcttgcctaatttctttctccagcagcctcctaagaacacctgtagtctcactccccaccccaacctttgtggaggatggacttctccacaaagcatccagtgttctctctaaaacataaatgncatcatgtcactgggtcttggttgacctaagatga

SEQ ID NO: 28966 - DNA, 471 bp, Homo sapiens
  misc_feature (1)...(471): n = a,t,c or g
gggtgaaaggggaggctgccttactggagtcactctccgtgttgacaggatattcgcggaggcctcctgttagaactggggagttgactcgagcgtgtttcccagtggatggggcggcgtggtgggcagcgctgcgtggttagccctgtttgtgattagcgtgcttgtgttttatgctgaaaatggataaaagcagcaaatatctacaaatacccactaccacagggactttgaaactcaggaaaataatgaatcgctacgtgtctttagtctccaaatggtgaataagtgtgtttttgaggcctttgggttgtttgtgtatctgctgctgcgtgaggacacatggcctgtcttgactcatgtcacgtgagcgccgccgataacccaccaaggtccctgaaatgccttttgcaggatgctttggaagctgcaatgaaaaatggcctgtgggtcacgctnttntacttgcaa

SEQ ID NO: 28967 - DNA, 450 bp, Homo sapiens
  misc_feature (1)...(450): n = a,t,c or g
gaaagaaaaggtactgaggataagcaggagagaaggcagtctcaggctttaaactctaaactgttctataatctcccccattgcttgtaaggtgtacacatgtatacattttaaaacaatagttatacacattacgatctagagacaagaaatcttaagtaattatgtccatttttggggggcatggggaaggactttagagaactgttgagaccgtcagatacgtgttttaacctaaacccaatcaccaaattgttcttgaagagcagcactttaatttcaaaatcaaacacaaaattttactgtctgctcaagacctgaaaaggtaggaaacatgaccagtgggagatttaannnnnnnnnnnnnnnnnnnnnnnnnnnnnnnnnnnnnnnnnnnnnnnnnnnnnnnnnnnnnnnnnnctatctctactaaaaatacaaaaattacca

SEQ ID NO: 28968 - DNA, 469 bp, Homo sapiens
  misc_feature (1)...(469): n = a,t,c or g
ggctaaaacaagatgtttcagctaatcttgttctttcctgtcccagccctggagccagacagtcgtccaaggagtcctccttgcttttagtggaaatggtatttggaaaccaaatagctctttttctggatctatttatgtattaaacattagagttcacactgatacctctaattccagtccatgacacagaatttattccagtcatacccctttccacatttataccttgcttttccaacagtgagaaatctggttcctgttttcttcagtgtatttgcttttttgctcagtctccccataggttaacactcctagctgtgctaggcaaactcagctgaagacatgctgctgntccctccccacagtttgctgttggggatgctgcctaaagctgaactaagaaatattcccttcccttccccttctggattcactggccaaaacttgggtttgatgaaagggaggg

SEQ ID NO: 28969 - DNA, 454 bp, Homo sapiens
  misc_feature (1)...(454): n = a,t,c or g
ggtagacttatagaaaaggcgacattagtagtactcatagcagtagcatagctatcannnnnnnnnnnnnnnnnnnnnnnnnnnnnnnnnnnnnnnnnnnnnnnnnnnnnnnnnnnnnnnnnnnnnnnnnnnnnnnnnnnnnnnnnnnnnnnnnnnnnnnnnnnnnnnnnnnnnnnnnnnnnnnnnnnnnnnnnnnnnnnnnnnnnnnnnnnnnnnnnnnnnnnnnnnnnnnnnnnnnnnnnnnnnnnnnnnnnnnnnnnnnnnnnnnnnnnnnnnnnnnnnnnnnnnnnnnnnnnnnnnnnncacnactttcagaggncaaggcagnaggatttcttgancccaggagttnagacnagncnntgctgcngggnnnncnnnngtacntctaanttgatnaattnntgccntnnngtncttnttgantnccagatcntgggtgnnngnnnggata

SEQ ID NO: 28970 - DNA, 471 bp, Homo sapiens
  misc_feature (1)...(471): n = a,t,c or g
gagctagacacagagtgtccnnnnnnnnnnnnnnnnnnnnnnnnnnnnnnnnnnnnnnnnnnnnnnnnnnnnnnnnnnnnnnnnnnnnnnnnnnnnnnnnnnnnnnnnnnnnnnnnnnnnnnnnnnnnnnnnnnnnnnnnnnnnnnnnnnnnnnnnnnnnnnnnnnnnnnnnnnnnnnnnnnnnngccccctttgccagaacgtggtgagataggaaggaatagagagagctccagggagaagtccagagtggggtttaatgagaaggaataaagcatgcttgtaagttgcaggaaaagagccctccaaaggggagaggatttagaaggaatgggggaactgattttttttttcagtaggtgaaacaaaaaagggtcgtntggccatacttcggcattttgaacttaatctttaaaaacagacatgcgtcttcaaaatgttgtgcccaaaggngtgnctagtctgngctcc

SEQ ID NO: 28971 - DNA, 463 bp, Homo sapiens
  misc_feature (1)...(463): n = a,t,c or g
ggaacgtgggaaaggatcaagtaatttggaagggaaacaaaaagcagctgattttgaagacctactctctggtcaaggtttcaatgctcacaaagacaaaaaggggcctcggacaatagctgagatgagaaaggaggaaatggccaaggaaatggatcctgagaaattaaagattctggaatggattgaaggcaaagaaagaaatatcagagcccttctttccacgatgcataccgtactatgggctggggagaccaagtggaaaccagttggcatggcagacctggtaacaccagagcaggtgaagaaggtgtacaggaaggctgtcctggtggtgcacccagataaagctactgggcaccctatgaacantacgcaaagatgattttcatgggagctcantgatcctggctgattttggaaacccaggccaaaagccttatattaattnatgagcttttcc

SEQ ID NO: 28972 - DNA, 462 bp, Homo sapiens
ggagaattgggacctcatgttagagacagcttagatagtcaggatccaaagttggatgaattcaaccccttatgcccactctctcttcattaagttgatgtttgaaccatcgtgcagaggctgtctccacgtggagtggcctaacgtggtgtggttgttcattatccttcaggatttccccagcttccctggtgcctttgcagccttttctctcttgaccctttcagttaaaaggtggaggagataagatttgggtttgtagacaaatacaaagttactctcaggctaacattttctttacttctcccactgcacagtgtgtgtcatgagtactttatacaaagttaaggtggtttgcccatctatttcagttggtaattatagaattggagatgcgaagttgaagctgttagccttctaacatacctccatcagtggactctaaggattttacccagaagt

SEQ ID NO: 28973 - DNA, 469 bp, Homo sapiens
  misc_feature (1)...(469): n = a,t,c or g
gcggcacgagtattaacatttttttctgtgacttttaagacaatggtcagctgacaaattttatgggttaaagagtcaagatttgtttagtatcagatcttaccctgatagctgtgtgaccttgggcaatttttaaaaacttttttattgtttaactttgcataataatagtgattaagccaaaattgaccttggactgtgaactcatttactccccacagtaaccacatgacataggtgaggaaatgaaggcatgtagtggttacacaactaatggtaaaggtgagatttgaattcagctagtcctaactcctaagtctgtagtttttgagcactatgctgctgccttctactgcttcataagttgttctgaggtgtatgatttccacagcattttagattttaaaattgngattaagattttatggcctagagattaatttagggaaaattataaatatataattgc

SEQ ID NO: 28974 - DNA, 470 bp, Homo sapiens
gctcaattggacagagcagatatgtgcatttccatcatcacaggaagttctactgcacagcactggtttggagtgcacccctgccctcagatgagagttgtatagttagggagctgctaaggacccacccatctctaaggctgagtgattctgtgactttgtgttgggaagatcatattcctgctctttctttgctgaaaaggtttttggtttccaaaagtactgaggttggtggagaggtacaaaacaactgcagggagttcctgtctgcctgaggagatcatcattcacctcaagaattacagtgagaataagagaagatgaaatgatactgaaaagccgtttaaaaaattgaagagttatgccgtataaagcaagatgattgttaagtgaatgcattagatataaaggccacttgctcctggaccctccttgacttccatcctctaaccaatcaaaatgaagttgga

SEQ ID NO: 28975 - DNA, 423 bp, Homo sapiens
  misc_feature (1)...(423): n = a,t,c or g
ggtcagcagccacaccccagacagctcctctgagcaagagctaaggtagaatgggctgaataggaaaaaacaaagctagtcctgggaatgggcaacttgccatctcaccattcccaaacccctaaccctccacggcccagccaccaggagccagcagccgcgagtcagtgtggaaatggctctctgcagagggaaccagaggctgcagacagcaaaggcgagaggatgctggccttggagagggccgttccccaactgcctccagcccagagcagggtggggaaagccccgagagtctctgggcagaagctggagtgggtggagaggggaagctccggcccctgtgtccaggtagcaaagccctgtctacatttcttacttgcaaccaggacctacatgtgaaatgganacttttnatttaaa

SEQ ID NO: 28976 - DNA, 467 bp, Homo sapiens
  misc_feature (1)...(467): n = a,t,c or g
gtgagaaatggaagtgaaaaacagagagaagagactccattttcagcagtgaggtgtaaagaacctagaatctaccactagcattcttacaagataaagctaaaaaattgagaatcagtgttttgttgttttcttccccccatcagagaactgagattgcagggcaaccactaacctgaaatctggagagaaaagcaaatccagagactcatggccgagatctgcttacttagagccaaagccactggagccataaattggtgggaacatttaaatgatagttttgacaaactgctggaggctgagtgtggactaacatgggagtgtgacacctctgggagcagcagtcttagggaggcccccacactttcatgggttttgcttctatggattttatcaggtacttcatattctgatgaagatcctggaaaaggtccctcgtagttcttgcananagaggnagggta

SEQ ID NO: 28977 - DNA, 443 bp, Homo sapiens
  misc_feature (1)...(443): n = a,t,c or g
gatcggtgtagggctgctcaggagtcaacacacatatacactaaggaggaagagagttcccacaccagccctgagactgggatctgggtgactctgggctctgaggtctttgatgtcacagaatttgtggacctacatccaggggggccttcaaagctgatgctagcagctgggggtcccctagagcccttctgggccctctatgctgttcacaaccagtcccatgtgcgtgagttactggctcagtacaagattggggagctgaatcctgaagacaaggtagcccccaccgtggagacctctgacccttatgctgatgatcctgtacgtcacccagccctgaaggtcaacagccagcggccctttaatgcagagcctcccctgagctgntgacagaaaactncatccacccaacctatcttnttnacccggaacattttgct

SEQ ID NO: 28978 - DNA, 439 bp, Homo sapiens
gttcccatgttaccaaaatacccccaactctttagccaaaagagaaccctgacctcctgagtttccatgctcctttctgtaccaggtttaaatgtagtcttctggagaagtatttttgacattgagctctgggacaggacaccttgggtttgtggactgcagcccactatgatgttattacttctctggccaggcctccagtggaagtgcacaggcactcccaatgttgttaatgctctgtcttccatttgttctggaatcctacgtgttggtctgtggttccatgcattagctgtttgtaaataatgcatttgcatactgaaaaaggaatgccacctgccacagttgatggtgaggaagctcctttgacgtggtgcaattttgatgagatgtctctggggacacgaggatgccctaatgatgctgacttgcatggttg

SEQ ID NO: 28979 - DNA, 449 bp, Homo sapiens
  misc_feature (1)...(449): n = a,t,c or g
gaaggatgggacatcttttggagagtatggcggctggtacaaagcctgcaaagttgatagtccaactgttacaaccactctaaaaaaccttggggcactttacagacgtcaaggcaaatttgaagctgcagaaacgttagaagaagctgctatgaggtctcgtaaacagggtcttgacaatgttcacaaacagagggtggcagaagtgctcaatgaccctgagaacatggagaagcgcaggagccgtgagagcctcaacgtggacgtggtcaaagtacgagagtggccctgacggaggggaggaaggcgtctctggccgagcctctttttgtggaaaacgacagcagcagcagtggcctggaaaacgccacccgctaactgaccccaacctggcccgctccaggatgggactgcccantgtggccccgaacttgcctgggacaaccagg

SEQ ID NO: 28980 - DNA, 450 bp, Homo sapiens
  misc_feature (1)...(450): n = a,t,c or g
gcggcacgagggctaggaaaggtttctcctatttggtaactggagtaactactgtgggtgtcgcatatgctgccaagaatgccgtcacccagttcgtttccagcatgagtgcttctgctgatgtgttggccctggcgaaaatcgaaatcaagttatccgatattccagaaggcaagaacatggctttcaaatggagaggcaaacccctgtttgtgcgtcatagaacccagaaggaaattgagcaggaagctgcagttgaattatcacagttgagggacccacagcatgatctagatcgagtaaagaaacctgaatgggttatcctgataggtgtttgcactcatcttggctgtgtacccattgcaaatgcaggagattttggtgggtattactgccttgccatgggtcacactatgatgcatttggcaggatcanaatgggtcctgctct

SEQ ID NO: 28981 - DNA, 439 bp, Homo sapiens
gtcttggttgacatccccttcctcagccctcccagcctactccccatcccagcttttagaggatctgctccactgtctcctggggcagttgtgggtcactgtcccttccagctgccccagacaggaagcagagtcaccacgcagcagtgtcccttcttgggtctgagttcctattataggtaggggccccaccctctgggcttcccatcagcgacacacacacacttatggcaccagcctggactccagaaaaagggtgtccaggtattgtgtgtatgcatttagttgtgcacacacaaatatgctcctatactggcattaggcgtctcctcatccctaccctgacctttctcctgccttttcttggctggaagaagttggcctctgggagtgtagttttctgtttaaatccccaccctggctgggctcaatggctcac

SEQ ID NO: 28982 - DNA, 453 bp, Homo sapiens
  misc_feature (1)...(453): n = a,t,c or g
gaactggataaggcccaggaggacatactgaaacatcaggctagcattagtgaactcaagcgcaattttatggaatccacacctgagccgcgccctaatgaatgggaaaaacgacgtatcacacctctgtccctacagacacaagggagttcacatgagactctgaatatagtggaggagaagaagcgggcagaggttgggaaagacgaaagagtaatcacagaagaaatgaatggtaaagagatatcacctgggagtggtcctggggagattcgtaaggtggagcctgtgacacaaaaagactccacctccctgtcttctgagagcagcagcagcagcagtganagtgaggaggaagacgtgggagagtccgtcccaccaccgagtgaccganggcaccatnanggaggaacaggagtatgaagaanaagtggaggaagaaccccncccgct

SEQ ID NO: 28983 - DNA, 423 bp, Homo sapiens
  misc_feature (1)...(423): n = a,t,c or g
ggctgaagctgccatggacatctcagagggccgctcagctgccgactccatctctgagtctgtgccagtgggacctaaagtccgggatggtcctggaaagtatcagctctttgccttcattagtcacatgggcacctctaccatgtgtggtcactacgtctgccacatcaagaaagaaggcagatgggtgatctacaatgaccagaaagtgtgtgcctccgagaagccgcccaaggacctgggctacatctacttctaccagagagtggccagctaagagcctgcctcaccccttaccaatgagggcaggggaagaccacctggcatgagggagaggggctgagggatggacttcagcccctctgctctgtaccctttttccttttgtcccggcagcagggaaaanctggaggccgtgggaaa

SEQ ID NO: 28984 - DNA, 424 bp, Homo sapiens
  misc_feature (1)...(424): n = a,t,c or g
ggcactgggggtcaggctgaaggctgagcaacacctctctgccctccctccctttgtcccatctcccagcgacttccaatattcatgtttctgaaaattgtgtccctcttcaggttccctcttggtgcctaacctggattagtaatgtgcattcaggtgaattttcagctgaggctctgaaaactggtactctcagtgtgttctggtcatcttgtggcttagttgtagaagcaggtgtgtctcttgcctctgcttgcctcctactgcacactcagcacccaggactggaatcaccgactactgaatctcctacatgtattgctgctacttcaagctcctccacttgaaaccttatgattttcccaaggggagatgggacagtgtcatctaaatattccnaanggttggccttctgaaaaaaaaa

SEQ ID NO: 28985 - DNA, 419 bp, Homo sapiens
ggtataatataaaaatatgattagcatattgacctgtagtttgatagatgttctgtctaggataaagctaactgtaaaaaaaaatagtgaatcagtttaaagaaaaacataacgtaaaagtgggcacagatccagagaggtagcaaaaatcacaggggtggttccatgaatggctgacacttaggaaactctgaattaggccatcctcgaaactagcccaccattcacctctgttcatcccccgtgggctcataatcgttttcatttcacctttgatttggaaggaagaagtttcttgcccaaatgcctggatgtgtctgcttgactttcagaacttctcacctcagccctaaagagggagcctgtgggttctcagagagatatcacaatttgagtcccaaagaagagcccgatccccc

SEQ ID NO: 28986 - DNA, 306 bp, Homo sapiens
gccttctccgaggggctggagcggggatctgatgaaaaggtcagactgaaacgccttgcacggctgctcggcttgatcacagctccctaggtaggcaccacagagaagaccttctagtgagcctgggccaggagcccacagtgcctgtacaggaaggtgcctggccatgtcacctggctgctaggccagagccatgccaggctgcgtccctccgagcttgggataaagcaaggggaccttggcgctctcagctttccctgccacatccagcttgttgtcccaatgaaatactgagatgctgggctg

SEQ ID NO: 28987 - DNA, 465 bp, Homo sapiens
  misc_feature (1)...(465): n = a,t,c or g
gctgagtcccgtcttttccttacggattttttccggaaccataatttggagttgtcgaagctgctgagccggcttggacagccagtgccctcgtggcttcgggaagaactgcagcattccagtctgggctgatgtcccagcctcccataccagcaaaatgccccctgcttccctaagggtcaggtccagagcagggcccacaagggggattagagtggcctggcccctccccctctacctcagtagcccccaggcctgagatggctgagaagggaagggtatccttttcccacagttctgggacaaataaaggggcttcctttggtaccccacataatagtgctaggtacctttgacccatcatcttgggaggtggggaggaatgagagggtccaggcagggtgtaggggaatgnattagtccaatgagatttccctcttcatccgagcaggnatctattctatc

SEQ ID NO: 28988 - DNA, 401 bp, Homo sapiens
ggcagagacgacatgacctgtgtgaaggaagagatctttgggcctgttatgtccattttatcatttgacactgaagctgaggttctagaaagagccaatgataccacttttggactagcagctggcgtctttaccagggacatccaacgggctcatagagtggtagctgagcttcaggctgggacgtgcttcattaacaactataacgtcagcccagtggagttgccctttggtggatataagaagtcaggatttggcagagagaacggccgtgtgacaatcgaatattattcacagctgaagactgtgtgtgtggagatgggtgatgtggaatctgctttttgaaaacctgcagtgaaacctattgacatggccacgctgtggaatgatgtgaattggcc

SEQ ID NO: 28989 - DNA, 492 bp, Homo sapiens
  misc_feature (1)...(492): n = a,t,c or g
gaacaaaacaaaacaacaacaacaaaatcatcactgtgtagaagccagggcacagaagccagggccggaatgcttttgtgcggcctgtgccccagtcttcatcccacccaagaggaatttgcctggtctttggaaggatctcttgggtctcaggacttgcagaacttcagcagcagctgccctggaaggcagccccctctagcggaggagattcagctctgggccatacagaccatttacaggctgtgtgacctcagcttgggagcacaaccttcctgagctccagaggtgatgagctccccttatctgtgcagtgggaattagagggcctgcctcccagagtgaggatgacataagaacccacttggaaagggcttaaagggtggggctctatgaattctggctcccttctgcccagatgtgtggccanctggttccaggagtgggaccnanaactgcggngcctgggaaaggnnagnggccaaaaaggcg

SEQ ID NO: 28990 - DNA, 488 bp, Homo sapiens
  misc_feature (1)...(488): n = a,t,c or g
gagagaataactcactaaatccagaggtaatgagagaagtccagagtgctctgagcacggccgctgccgatgacagcaagctggtactgctcagcgccgttggcagcgtcttctgttgtggacttgactttatttattttatacgacgtctgacagatgacaggaaaagagaaagcactaaaatggcagaagctatcagaaacttcgtgaatactttcattcaatttaagaagcccattattgtagcagtcaatggcccagccattggtctaggagcatctatattgcctctttgcgatgtggtttgggctaatgaaaaggcttggtttcaaacaccctataccaccttcggacagagnccanatggntgnnctacncgtantgnttccnngatnatgggntggagcntntgcnnactanagctgctnntagnnngaagctgncagncagnagctnttgtgannggncggcctcncagtgcntngtcc

SEQ ID NO: 28991 - DNA, 494 bp, Homo sapiens
  misc_feature (1)...(494): n = a,t,c or g
ggatagcctctgatagcttgataagctctctaggaaaaaggaagccttgatgaatatagatctctttgcaatttgcatttgtaagtgaatattccagtaatgactgaagacagagagtatgaaattggattgattaggtcattttcctgggaaaggcgaggcttttccacccagggtggggcacgttgttcctttcacctggaccttgtgtttcttttcatttaaaatatcttcataaaggctcaggttctggtctttctaattacagtggggacagcctgggaccttccaatgtcatcctgccccattcaggaaacagggttccaggcagtgactgaggtacaagcatcacaaatgtggattctgacataaagnagcanttttgnttgacgtattgggcaatgggctctcatanncatagcccacagtcctcaaggagccccntncccaggncatgagnaacanagngnnagtctnatgncngcctgnncccg

SEQ ID NO: 28992 - DNA, 466 bp, Homo sapiens
  misc_feature (1)...(466): n = a,t,c or g
gnnnnnnnnnnnnnnnnnnnnnnnnnnnnnnnnnnnnnnnnaagtaaagtggtgttacaaggggctaggaattgaagggaaatgggaaattgtttattgagtatagagttttagttatgcaaggtgaagatgaaaggagttctatagattggttgtacaacagtgtgaatatacttaacactgcnnnnnnnnnnnnnnnnnnnnnnnnnnnnnnnnnnnnnnnnnnnnnnnnttaaaataaagtggttctacctggcctgtgtgggtgaaaaagaaaaaatttttgaagactatactttcagggatcatttctgcagtnnnnnnnnnnnnnnnnnnnnnnnnnnnnnnnnnnnnnnnnnnnnnnnnnnnnnnnnnnnnnnnnnnnnnnnnnnnnnnnnnnnnnnnnnnnnnnnnnnnnnnnnnnnnnnnnnnnnnnncttggaaccancccagnggcctntatggg

SEQ ID NO: 28993 - DNA, 302 bp, Homo sapiens
ggaatcatcatgtgcgcttggaatccaagagatcttcctctgatggcgctgcctccatgccatgccctctgccagttctatgtggtgaacagtgagctgtcctgccagctgtaccagagatcgggagacatgggcctcggtgtgcctttcaacatcgccagctacgccctgctcacgtacatgattgcgcacatcacgggcctgaagccaggtgactttatacacactttgggagatgcacatatttacctgaatcacatcgagccactgaaaattcagcttcagcgagaacccagaccttt

SEQ ID NO: 28994 - DNA, 302 bp, Homo sapiens
gctcttagcacagcagaattcactgaaagctcaaaaacagcagcaagaacggatcgctgctactgtcaccggacagatgttcctggaaagccaggaactcctgcgcctgttcggcattccctacatccaggctcccatggaagcaaaggcgcagtgcgccatcctggacctgactgatcagacttccggaaccatcactgatgacagtgatatctggctgtttggagcgcggcatgtctatagaaacttttttaataaaaacaagtttgtagaatattatcaatatgtggactttcacaatc

SEQ ID NO: 28995 - DNA, 464 bp, Homo sapiens
  misc_feature (1)...(464): n = a,t,c or g
ggatttgagcaggtgaaggattacaccaagtggaaggaggcctgcaggagttgctgccggtccccgtcaccactgtgggactgttagacctgcaaggcagacccaccctcgtctggaatgaggtaacaccaagaggtgtggccagtgcacagaaccatagactcaagctttagaaagtggccattgtggccggcccaggagcagtgggcactgagaggtctcagcctctgtgggggtcgagagaggtcgtggtgtgcctgacagccccgtcctgccggaaagcaggggtgctgcctggagatgcggcgggtctcactgatgtcttcatcagagctccgtggagagcccctggttgcaggcaggacagcaaggctgaggggtcacacggggccacatctgctggtgcccgtcgtgctcctntgaacaagcccacctggccattgctggagtcctggagcccacaa

SEQ ID NO: 28996 - DNA, 462 bp, Homo sapiens
  misc_feature (1)...(462): n = a,t,c or g
gctgacgtggagtgtggtgaactcagtgcattgggccaatggttcgacacaggctctgccagccacaaccatcctgctgcttctgacggtttggctgctggtgggctttcccctcactgtcattggaggcatctttgggaagaacaacgccagcccctttgatgcaccctgtcgcaccaagaacatcgcccgggagattccaccccagccctggtacaagtctactgtcatccacatgactgttggaggcttcctgcctttcagtgccatctctgtggagctgtactacatctttgccacagtatggggtcgggagcagtacactttgtacggcatcctcttctttgtcttcgccatcctgctgagtgtgggggcttgcatctccattgcactcacctacttcagttgtctggggaggattaccgctggtggtggcatctgtgctgantggttggctccccg

SEQ ID NO: 28997 - DNA, 463 bp, Homo sapiens
  misc_feature (1)...(463): n = a,t,c or g
gcaagaaactggtggagaacgggggcatgtttgtctgcaagacccgccacctggtgctggctgggggctcaaagccccgtgatgtgaccaacttcaccgtgggtggctttgcgcctatgagtccccggatcagcagccccatgcaccccagtgctggaggtcagcgtggcggctttggtagcccaggtggcggcagtggtggcatgagcaggggccggggccggagggacaacgaactcattggccagaccgtgcgcatctcccaggggccctacaaaggctacatcggtgtggtgaaagatgccacagagtccacggcccgtgtggagctgcacttcacctgccagaccatctctgtggaccgtcagcggtcaccacggtggctcacggngcccggccggcatgacctcgactatgggangacncccatgtatggctccanaccccatgtatggctctggct

SEQ ID NO: 28998 - DNA, 465 bp, Homo sapiens
  misc_feature (1)...(465): n = a,t,c or g
gctgtctgtgcagaggtattcacaacattgtctgtgaccaagcgctctggggcaagcatcctccaggctggctgctgaggttaagccccagtgtggatgctgttgccaagactgcaaaccactggctcgtttccgtgcccaaatccaaggcgaagttttctaaagggttcttgggctcttggcacctgcgtgtcctgtgcttaccaccgcccaaggcccccttggatctcttggataggagttggtgaatagaaggcaggcagcatcacactggggtcactgacagacttgaagctgacatttggcagggcatcgaagggatgcatccatgaagtcaccagtctnaagcccatgtggtaggcggtgatggaacaactgtcaaatcagttttaacatgacctttccttgtggattttcttattctcgntgcaaagtttctaagggtgaatttttttttttttcccc

SEQ ID NO: 28999 - DNA, 464 bp, Homo sapiens
  misc_feature (1)...(464): n = a,t,c or g
gcagaaaccagagcaacaatcgtagaggccgttgttcagccaggttttgggatttgagattgacgcggtgaactctgtccagttttcaaaccacacaggctatgcccactggaagggccaagtgctgaattcagatgagctccaggagttgtacgaaggcctgaggctgaacaacatgaataaatatgactacgtgctcacaggttatacgagggacaagtcgttcctggccatggtggtggacattgtgcaggagctgaagcagcagaaccccaggctggtgtacgtgtgtgatccagtcttgggtgacaagtgggacggcgaaggctcgatgtacgtcccggaggacctccttcccgtctacaaagaaaaagtggtgccgcttgcagacattatcacgcccaaccagtttgaggccgagttactgagtggcccggaagatcacagncaggaggaancttgcg

SEQ ID NO: 29000 - DNA, 467 bp, Homo sapiens
  misc_feature (1)...(467): n = a,t,c or g
gaacaaagcgggctttgccgtcaactttttcaaagaggtggacgagtgctctcggcccaaccgcgggggctgtgagcagcggtgcctcaacaccctgggcagctacaagtgcagctgtgaccccgggtacaagctggccccagacaagcgccgctgtgaggctgcctgtggcggattcctcaccaagctcaacggctccatcaccagcccgggctggcccaaggagtacccccccaacaagaactgcatttggcagctggtggcccccacccagtaccgcatctccctgcagtttgacttctttgagacagagggcaatgatgtgtgcaagtacgacttcgtggaggtgcgcagtggactcacagctgactccaagctgcatggcaagttctgtggttctganaagcccgaggtcataccttccagtacaacaacatgcgcgtggagttcaagtccgaaacanccgg

SEQ ID NO: 29001 - DNA, 432 bp, Homo sapiens
  misc_feature (1)...(432): n = a,t,c or g
ggaggagcggaccaaaggcaagaagaagtccaagaagcagcctccaggcagcgaggaggcagcgggggagccggtgcagaatggcgcgccagaggaggagcagctcccgcctgagtccagctactccctcctcgctgaaaattcctatgttaaaatgacctgtgacatccggggcagtctgcaggaggacagccaggtcactgtggccatcgtgctggagaacaggagcagcagcatcctcaagggcatggagctcagcgtgctggactcactcaatgccaggatggcccggccgcagggctcctctgtccacgatggcgtccccgtgcctttccagctgcccccaggcgtctccaacgaagcccagtatgtgttcaccatccagagcatcgtcatggcgcagaagctcanggggaccctgtccttcattgg

SEQ ID NO: 29002 - DNA, 419 bp, Homo sapiens
  misc_feature (1)...(419): n = a,t,c or g
gccagctgaataccttaaggaggactctggaggctcataatggagttcctggggcacagggattagttatgagcattaaagttcctaagacccagtgacagtactgggagaaaccaaggctgaagagtcaggttgaagcacaggcnnnnnnnnnnnnnnnnnnnnnnnnnnnnnnnnnnnnnnnnnnnnnnnnnnnnnnnnnnnnnnnnnnnnnnnnnnnnnnnnnnnnnnnnnnnnnnnnnnnnnnnnnnnnnnnnnnnnnnnnnnnnnnnnnnnnnnnnnnnnnnnnnnnnnnnnnnnnnnnnnnnnnnnnnnnnnnnnnnnnnnnnnnnnnnnnnnnnnnnnnnnnnnnnnnnnnnnnnnnnnnnnnnnnnnnnnnnnnnnnntcccatgatnttcccgccttancctcccaaagt

SEQ ID NO: 29003 - DNA, 421 bp, Homo sapiens
gcctccgcctgtcctctgggggggccctgagagggaaggggaggtttctcacaccaaggcagatgctcctctggtgggagggtgctggccctggcaagattgaaggatgtgcagggcttcctctcaaagccgcccaaactgccgttgatgtgtggaggggaagcaagatgggtaagggctcaggaagttgctccaagaacagtagctgatgaagctgcccaaaagtgccttggctccagccctgtaccccttggtactgcctctgaacactctggtttccccacccaactgcggctaagtctctttttcccttggatcagccaagcgaaacttggagctttgacaaggaactttcctaagaaaccgctgataaccaggacaaaacacaaccaagggtacacgcaggcatgcacgggtttct

SEQ ID NO: 29004 - DNA, 415 bp, Homo sapiens
  misc_feature (1)...(415): n = a,t,c or g
gcaaatgggtctcctggtgcgggggcgtgagtggccgtgccctgggtgtgctgcctgtctgagcaagcttccctagctgtggaaccccgggccccctgctgcgggctctgccttggtgtcatgcctgctgcacccccgtttccactgacgtgccgtctgtggctatgggggtggtcactggaatgacggtcactccagacgtcagccggcagggatgcagcaggctggccgcgcaccggggctcgggcaccctctggccccacactggcaatgatgccacaccttgccatgtccacgctgttggtcaaacccctctgtcatgcctctttaaagagaaaagaagagaaagatttttttttttttaanggcaaccgaaanggaaancttggancctaaatagganaagnntgacctt

SEQ ID NO: 29005 - DNA, 447 bp, Homo sapiens
  misc_feature (1)...(447): n = a,t,c or g
gnnnnnnnnnnnnnnnnnnnnnnnnnnnnnnnnnnnnnnnnnnnnnnnnnnnnnnnnnnnnnnnnnnnnnnnnnnnnnnnnnnnnnnnnnnnnnnnnnnnnnnnnnnnnnnnnnnnnnnnnnnnnnnnnnnnnnnnnnnnnnnnnnnnnnnnnnnnnnnnnnnnnnnnnnnnnnnnnnnnnnnnnnnnnnnnnnnnnnnnnnnnnnnnnnnnnnnnnnnnnnnnnnnnnnnnnnnnnnnnnnnnnnnnnnnnnnnnnnnnnnnnnnnnnnnnnnnnnnnnnnnnnnnnnnnnnnnnnnnnnnnnnnnnnnnnnnnnnnnnnnnnnnnnnnnnnnnnnnnnnnnnnnnnnnnnnnnnnnnnnnnnnnncatgcacgagccaccaaagtccccttgtanctganaaacctntgaaagacccnnaacagnaatgttggtcantntgaccc

SEQ ID NO: 29006 - DNA, 449 bp, Homo sapiens
  misc_feature (1)...(449): n = a,t,c or g
nnnnnnnnnnnnnnnnnnnnnnnnnnnnnnnnnnnnnnnnnnnnnnnnnnnnnnnnnnnnnnnnnnnnnnnnnnnnnnnnnnnnnnnnnnnnnnnnnnnnnnnnnnnnnnnnnnnnnnnnnnnnnnnnnnnnnnnnnnnnnnnnnnnnnnnnnnnnnnnnnnnnnnnnnnnnnnnnnnnnnnnnnnnnnnnnnnnnnnnnnnnnnnnnnnnnnnnnnnnnnnnnnnnnnnnnnnnnnnnnnnnnnnnnnnnnnnnnnnnnnnnnnnnnnnnnnnnnnnnnnnnnnnnnnnnnnnnnnnnnnnnnnnnnnnnnnnnnnnnnnnnnnnnnnnnnnnnnnnnnnnnnnnnnnnnnnnnnnnnnnnnnnnnnnnnnnnnnnnnnnnnnnnnnnnnnnnnnaggatgtgtctgacaggccacaggcaagaacgttgcttgcttgcangaagcgc

SEQ ID NO: 29007 - DNA, 431 bp, Homo sapiens
  misc_feature (1)...(431): n = a,t,c or g
gnnnnnnnnnnnnnnnnnnnnnnnnnnnnnnnnnnnnnnnnnnnnnnnnnnnnnnnnnnnnnnnnnnnnnnnnnnnnnnnnnnnnnnnnnnnnnnnnnnnnnnnnnnnnnnnnnnnnnnnnnnnnnnnnnnnnnnnnnnnnnnnnnnnnnnnnnnnnnnnnnnnnnnnnnnnnnnnnnnnnnnnnnnnnnnnnnnnnnnnnnnnnnnnnnnnnnnnnnnnnnnnnnnnnnnnnnnnnnnnnnnnnnnnnnnnnnnnnnnnnnnnnnnnnnnnnnnnnnnnnnnnnnnnnnnnnnnnnnnnnnnnnnnnnnnnnnnnnnnnnnnnntcangaggagatgaaagaagtnnnnnnnnnnnnnnnnnnnnnnnnnnnnnnnnnnncctgtgtggnatagtccccaagtttcattgaagngctgattcncaaactt

SEQ ID NO: 29008 - DNA, 411 bp, Homo sapiens
  misc_feature (1)...(411): n = a,t,c or g
gggacccaaacccctggtccgcaccagccgggagccagggaaggacgtcacgacctcagggtactcctccgtcagcaccgcaagtcccacaagctccgtggacggtggcttgggggccctgccccaacctacctcagtgctgnccctggacagtgactttcacacacagccctgccaccatcanttacagngtcatcccccaagtccccagganagnagtnntccccancaacaggtnaagnggataaacntatgnatacacaatgatgannnggacatgaacctggancttgtgaggctgtaanangnntnccncatttgacgcnnntnntgnnnactgaagnnnttcgaagtnatgnttgnnatttnaatagcaactcttnnttaaacattgtcgcttttgtcnaaaac

SEQ ID NO: 29009 - DNA, 408 bp, Homo sapiens
  misc_feature (1)...(408): n = a,t,c or g
gccaacacgtatggctaatttnnnnnnnnnnnnnnnnnnnnnnnnnnnnnnnnnnnnnnnnnnnnnnnnnnnnnnnnnnnnnnnnnnnnnnnnnnnnnnnnnnnnnnnnnnnnnnnnnnnnnnnnnnnnnnnnnnnnnnnnnnnnnnnnnnnnnnnnnnnnaaaccttcaccttctaaaggcactgggatgaacaaaccgatcggcttgagggtggacaaaggggtgtgggctaggttataaggaagtggtaccnttcnaccgtaggattctantagnaggancngaccatcaaactgttaaaagancatggcctgtttnanatgnctatnantcnaccttgnccantgntntatctgngtcatgnntatnccctncantcntnatttttaanannnttcnccttata

SEQ ID NO: 29010 - DNA, 205 bp, Homo sapiens
gctctaattttgtgctgtatttatatatatgtacataaatgtatatatagagaaatgttgagttcttctggattctgaatgtaaataattcttgtaaattgggactctgcccacctgtttctcccttttccctcttcccttcagctctatttattcttttcttgactttcccatatggggcatcttatgactttttttttttttt

SEQ ID NO: 29011 - DNA, 518 bp, Homo sapiens
  misc_feature (1)...(518): n = a,t,c or g
gnnnnnnnnnnnnnnnnnnnnnnnnnnnnnnnnnnnnnnnnnnnnnnnnnnnnnnnnnnnnnnnnnnnnnnnnnnnnnnnnnnnnnnnnnnnnnnnnnnnnnnnnnnnnnnnnnnnnnnnnnnnnnnnnnnnnnnnnnnnnnnnnnnnnnnnnnnnnnnnnnnnnnnnnnnnnnnnnnnnnnnnnnnnnnnnnnnnnnnnnnnnnnnnnnnnnnnnnnnnnnnnnnnnnnnnnnnnnnnnnnnnnnnnnnnnnnnnnnnnnnnnnnnnnnnnnnnnnnnnnnnnnnnnnnnnnnnnnnnnnnnnnnnnnnnnnnnnnnnnnnnnnnnnnnnnnnnnnnnnnnnnnnnnnnnnnnnnnnnnnnnnnnnnnnnnnnnnnnnnnnnnnnnnnnnnnncattactgnaggccactacttatgccctaattggaagcgccccctagcatatcaaccattaaccttcctntancttancatcttacaattctaatctactgnctatctanaaacgtggcgctta

SEQ ID NO: 29012 - DNA, 414 bp, Homo sapiens
gggattccacatgccaaccagagatgaccttcaatcctggtccaactgagcttaccctggatcctgaacaccagccagaggagaccccagctcctagcctggctgagttgaccctggagcctgtgcaccgccgacccgagctcctggatgcttgtgctgacctcatcaatgatcagtggccccgcagccgcacctcccgcctgcactccctgggccagtcctcagatgccttccccctctgcctgatgctgctaagcccccaccccacacttgaagcagcacccgttgtggtgggccatgcccgcctgtcacgggtgctgaaccagccccagagcctcttagtggagacagtggtggtggcccgggccctgaggggccgtggctttggccgccgctcatggagggcctggaggt

SEQ ID NO: 29013 - DNA, 415 bp, Homo sapiens
gcagaaggagagattcctctgccatggagtcctacgatgtgatcgccaaccagcctgtcgtgatcgacaacggatccggtgtgattaaagctggttttgctggtgatcagatccccaaatactgctttccaaactatgtgggccgacccaagcacgttcgtgtcatggcaggagcccttgaaggcgacatcttcattggccccaaagctgaggagcaccgagggctgctttcaatccgctatcccatggagcatggcatcgtcaaggattggaacgacatggaacgcatttggcaatatgtctattctaaggaccagctgcagactttctcagaggagcatcctgtgctcctgactgaggcgcctttaaacccacgaaaaaaccgggaacgagctgccgaagttttcttcgagac

SEQ ID NO: 29014 - DNA, 415 bp, Homo sapiens
gcggcacgagtcattctttactgcactcagatttaagccttacaaagggaaagcctctggccgtcacacgtaggacgcatgaaggtcactcgtggtgaggctgacatgctcacacattacaacagtagagagggaaaatcctaagacagaggaactccagagatgagtgtctggagcgcttcagttcagctttaaaggccaggacgggccacacgtggctggcggcctcgttccagtggcggcacgtccttgggcgtctctaatgtctgcagctcaagggctggcacttttttaaatataaaaatgggtgttatttttatttttttttgtaaagtgatttttggtcttctgttgacattcggggtgatcctgttctgcgctgtgtacaatgtgagatcggtgcgttctcctgatg

SEQ ID NO: 29015 - DNA, 424 bp, Homo sapiens
  misc_feature (1)...(424): n = a,t,c or g
ggagcatgctccttgcaaggactcgctgcttctgacagttaaagctgcattgtaagagttatttcttgtcacctctctctccacatttaactgttactgcccaagttcagagtatgtaagtagactgttaggtgttttcaggaaattggcaatgcttcacggtaacagggaatgatatttgtgagtaaaagtaaatcattacaggcgtgagccactgcgcctggccgtgactgattttttttcatgtagaattgtcaacacgagagatcacagtggagcactttgaaagaccgtcggttgtgtgcacgcacgcacacactcatgcacacgctgacacgcgggtgcctggagncanggncttaggccggnncttntgagtgacangtgcccctgcgtgtgcntggngncccatnacacctgtgac

SEQ ID NO: 29016 - DNA, 474 bp, Homo sapiens
  misc_feature (1)...(474): n = a,t,c or g
ggccggatctggaaaacagattgatagagctacattctcctgatagnnggaacacgttgatcctacgctgcaaagatacagccacagcacactcctggttcgtagctatccacaccaacataatggctctcctcccacaggtgttggctgaactcaacgccatgcttggggcaaccagtacagcaggaggcagtaaagaggtgaagcatattgcctggctggcagaacaggcaaaactagatggtggaagacagcaatggagacctgtcctcatggctgtgactgagaaggatttgctgctctatgactgtatgccgtggacaagagatgcctgggcgtcaccatgccacagctacccacttgttgccaccaggttggttcattctggctccggatgtcgatccccctcccttggatctgaccttacatttgctaccaggacaggctctcgacagggcattgagatgcatctct

SEQ ID NO: 29017 - DNA, 434 bp, Homo sapiens
  misc_feature (1)...(434): n = a,t,c or g
gagtctnnnnnnnnnnnnnnnnnnnnnnnnnnnnnnnnnnnnnnnnnnnnnnnnnnnnnnnnnnnnnnnnnnnnnnnnnnnnnnnnnnnnnnnnnnnnnnnnnnnnnnacannnnnnnnnnnnnnnnnnnnnnnnnnnnnnnnnnnnnnnnnnnnnnnnnnnnnnnnnnnnnnnnnnnnnnnnnnnnnnnnnnnnnnnnnnnnnnnnnnnnnnnnnnnnnnnnnnnnnnnnnnnnnnnnnnnnnnnnnnnnnnnnnnnnnnnnnnnnnnnnnnnnnnnctgnnnnnnnnnnnnnnnnnnnnnnnnnnnnnnnnnnnnnnnnnnnnnnnnnnnnnnnnnnnnnnnnnnnnnnnnnnnnnnnnnnntngcatatgncggctaccggggctggcccgtcacatctttgggcactatttgcntgggaaaanggaaaaa

SEQ ID NO: 29018 - DNA, 425 bp, Homo sapiens
  misc_feature (1)...(425): n = a,t,c or g
gnnnnnnnnnnnnnnnnnnnnnnnnnnnnnnnnnnnnnnnnnnnnnnnnnnnnnnnnnnnnnnnnnnnnnnnnnnnnnnnnnnnnnnnnnnnnnnnnnnnnnnnnnnnnnnnnnnnnnnnnnnnnnnnnnnnnnnnnnnnnnnnnnnnnnnnnnnnnnnnnnnnnnnnnnnnnnnnnnnnnnnnnnnnnnnnnnnnnnnnnnnnnnnnnnnnnnnnnnnnnnnnnnnnnnnnnnnnnnnnnnnnnnnnnnnnnnnnnnnnnnnnnnnnnnnnnnnnnnnnnnnnnnnnnnnnnnnnnnnnnnnnnnnnnnnnnnnnnnnnnnnnnnnnnnnnnnnnnnnnnnnnnnnnnnnnnnnnnnnnnaatctatnaccctattngaaaaactaatggtagnataagttacctgaaaacntttttctccgcc

SEQ ID NO: 29019 - DNA, 438 bp, Homo sapiens
  misc_feature (1)...(438): n = a,t,c or g
ggcagggggagaaatccttgagccagggctgccatataacctgacaggaacatgctactgaagtttattttaccattgactgctgccctcaatctagaacgctacacaagaaatatttgttttactcagcaggtgtgccttaacctccctattcagaaagctccacatcaataaacatgacactctgaagtgaaagtagccacgagaattgtgctacttatactggttcataatctggaggcaaggntcgactgcagccgcccgtcagcctgtgctaggcatggtgtcttcacaggaggcaaatccagagcctggctgtggggaaagtgaccactctgccctgaccccgatcagttaaggagctgtgcaataaccttcctagtacctgagtgagtgtgtaacttattgggttggcgaagcctggtaaagctgttggaa

SEQ ID NO: 29020 - DNA, 438 bp, Homo sapiens
  misc_feature (1)...(438): n = a,t,c or g
gggcggcggcggcgacaggaccgaggggccttagttggtgggcaagtcggggatcccagaaagagaagcgtgacccggaagcggaaacgggtgtccgtcccagctccggcctgccagtgagcttctaccatcatggacctattgttcgggcgccggaagacgccagaggagctactgcggcagaaccagagggccctgaaccgtgccatgcgggagctggaccgcgagcgacagaaactagagacccaggagaagaaaatcattgcagacattaagaagatggccaagcaaggccagatggatgctgttcgcatcatggcaaaagacttggtgcgcacccggngctatgtgcgcaagtttgtattgatgcngccaacatccaggctgtgtccctcaagatncagacactnaagtncacaactcgatggcncaagcctt

SEQ ID NO: 29021 - DNA, 429 bp, Homo sapiens
ggcgggagaacatcaaggccagcaccgaagttggtgagatggcaaagcagtatatagagaaaagtcttttggttccagaccatgtgatcacacgcctaatgatgtccgagttggagaacaggcgtggccagcactggctccttgatggttttcctaggacattaggacaagccgaagccctggacaaaatctgtgaagtggatctagtgatcagtttgaatattccatttgaaacacttaaagatcgtctcagccgccgttggattcaccctcctagcggaagggtatataacctggacttcaatccacctcatgtacatggtattgatgacgtcactggtgaaccgttagtccagcaggaggatgataaacccgaagcagttgctgccaggctaagacagtcaaagacgtggcaaagccagtcattga

SEQ ID NO: 29022 - DNA, 425 bp, Homo sapiens
ggaaagatagatatccaggcttaccaaagtattaagtcaagaatataatatgtgatcagctttcaaagcatttacaagtgctgcaagttagtgaaacagctgtctccgtaaatggaggaaatgtggggaagccttggaatgcccttctggttctggcacattggaaagcacactcagaaggcttcatcaccaagattttgggagagtaaagctaagtatagttgatgtaacattgtagaagcagcataggaacaataagaacaataggtaaagctataattatggcttatatttagaaatgactgcatttgatattttaggatatttttctaggttttttcctttcatttattctcttctagttttgacattttatgatagatttgctctctagaaggaaacgtctttatttaggagggcaaaaa

SEQ ID NO: 29023 - DNA, 427 bp, Homo sapiens
  misc_feature (1)...(427): n = a,t,c or g
ggaaaaatatttgaaagaatggcagcaaaaaggttaagaaagcaagccagatttactgcacaatatgcagtacccagtactactttaaatcccaagagaacagtgtgatgtctaatatatacaggtctatgaaaatactgtggaataagcccaggaaggttagatgtgtttgcaaataagttgcccaaagggtccccctctaagtaaaacaaatattcagaccacaggctttaatgtaaactgtcaaaaagtgggatgtggaggatttttgttaagtcaagtgtcaatcgaagttaaaaagcaaggnnnnnnnnnnnnnnnnnnnnnnnnnnnnnnnnnnnnnnnnnnnnnnnnnnnnnnnnnnnnnnnnnnnnnnnnnnnnnnnnnnnnnnnnnnnnnnnnnnnnnnnnnnnnnnnnnnnnnnnnn

SEQ ID NO: 29024 - DNA, 457 bp, Homo sapiens
  misc_feature (1)...(457): n = a,t,c or g
gggccgaagcggaggaagcccagggtgaagcgcccgcagctcatgcagcaggttcacccgccaaagaccccttcggtgtgaccggcagcctggctgaccgtgagggccagagagagccttcacggacggcgctggtgggtgagccgagctgtggtggcggctggtttaaaagggatccagtttccagctgcaggtttgttagagtctgttctacatgggcctgccctcctgtgatgggcagaggctcctggtacatcgagaagattcctgtggatcccgtcaggagggacttagtggctctgccgccagtgagacttcccgccggcagctgtgcgcaccaaagactcgggagaactggaaaggctgtctggggtcttctgactgcaggggaaggatgtactttccaaacaaatgatacaccctgaccaactaaagaccttgtnaaggcatttttatt

SEQ ID NO: 29025 - DNA, 423 bp, Homo sapiens
  misc_feature (1)...(423): n = a,t,c or g
gggagactgaggccggctgtgcatccccgctggtgcctgggctgcgacgtgtccaggcgtggagagttttgtgtttctcctgttcagtatccgagtctcgtgcagtgctgcgtaggttagcccgcatcgtgcagacaacctcagtcctcttgtctattttctcttgggttgagcctgtgacttggtttctctttgtccttttggaaaaatgacaagcattgcatcccagtcttgtgttccgaagtcagtcggagtactggaagaaggcccacggtcggcacggagttcctgagccctttctgtactgggggaaaggtggctggacctctgttggctgacaagagcatcccttcagcttnccctncccgtagcagccctaaaagattatttaattccanattggaaatgacattttagnntatt

SEQ ID NO: 29026 - DNA, 416 bp, Homo sapiens
gccaacacaggccccagcacccgcagagcagacactgcgatgacaacggacgacacagaagtgcccgctatgactctagcaccgggccacgccgctctggaaactcaaacgctgagcgctgagacctcttctagggcctcaaccccagccggccccattccagaagcagagaccaggggagccaagagaatttcccctgcaagagagaccaggagtttcacaaaaacatctcccaacttcatggtgctgatcgccacctccgtggagacatcagccgccagtggcagccccgagggagctggaatgaccacagttcagaccatcacaggcagtgatcccgaggaagccatctttgacaccctttgcaccgatgacagctctgaagaggcaaagacactcacaatggacatattgca

SEQ ID NO: 29027 - DNA, 442 bp, Homo sapiens
  misc_feature (1)...(442): n = a,t,c or g
gctgaagagagccaggaaaacccgggaattttccaaaaggtcttcacgttaaacttgtcttatctcaggagagagcccgctcttgtctcccagttcctggtagggtctgcctgttggaaagtgtacctggatgcttctgggctccgtttggcaatagcagtcttggctgatgtgcacagtctggctcccagctcaccctttttttttaaagtaagaaaatagttgctaccgatagggactttgccaagtccaattatcttctaggattgaaaggtgcattttccccataaaaaaggcgaggaaaacccatggctgctttgtgtcacctcagtgacttacagtcccccttggcatttagttggtactanagccagtcatccttaacaaatcttttcacattttatttctttccatgtagncatcttcaaaanggaaagaattg

SEQ ID NO: 29028 - DNA, 446 bp, Homo sapiens
gctgtaaagtcagacaacaaggatgacgacatcgatattgatgccatttaaagggatggatgcaacctagcttaacagtataatgctgcaaattttcctccattatcagccagaagtgcaacatgtatgtgcaaaagctaaaatggcttaacatcatgctacactttacactaaaaatctattactgtgagtggtctgttattaagcccaatgagacatctagggagtccatacacatcagtgagcagatgtagtttgcttatttatagcatgtttctttttgaaaaactagtggtggacacatttggatcacatttatacagttataaaaataaaggtttgattttggtcgttcttcagatgtttggctctgaatgacttaagctgaagtaactggctccttactttaaatgttctgcatcatttccctgatgagcattcttggg

SEQ ID NO: 29029 - DNA, 421 bp, Homo sapiens
gaaggaggtggacatctataccgtcaaggtggaagacctgaccttcacctccccgttctgcctgcaagtgaagcggaatgactacgtgcacgccctggtggcctacttcaacatcgagttcacacgctgccacaagaggaccggcttctccaccagccccgagtccccgtacacgcactggaagcagacggtgttctacatggaggactacctgaccgtgaagacgggcgaggagatcttcggcaccatcggcatgcggcccaacgccaagaacaaccgggacctggacttcaccatcgacctggacttcaagggccagctgtgcgagctgtcctgctccaccgactaccggatgcgctgaggcccggctctccgcctgcacgagcccaggggctgagcgtcctaggcggtttcggggctc

SEQ ID NO: 29030 - DNA, 447 bp, Homo sapiens
  misc_feature (1)...(447): n = a,t,c or g
gcctttggccatgatggccggggccatgccttgacccgacgccggagggccaagcgtagccctaagcatcactcacagcgggccaggaagaagaataagaactgccggcgccactcgctctatgtggacttcagcgatgtgggctggaatgactggattgtggccccaccaggctaccaggccttctactgccatggggactgcccctttccactggctgaccacctcaactcaaccaaccatgccattgtgcagaccctggtcaattctgtcaattccagtatccccaaagcctgttgtgtgcccactgaactgagtgccatctccatgctgtacctggatgagtatgataaggtggtactgaaaaattatcaggagatggtagtagagggatgtgggtgccgctgagatcangcagtccttgaggatagacagatatcccaccac

SEQ ID NO: 29031 - DNA, 435 bp, Homo sapiens
  misc_feature (1)...(435): n = a,t,c or g
gtctgaattctctttcctttcaagaagtacgggaatatatgcttaatctgttcaaagctttgaaacgcattcatcagtttggtattgttcaccgtgatgttaagcccagcaattttttatataataggcgcctgaaaaagtatgccttggtagactttggtttggcccaaggaacccatgatacgaaaatagagcttcttaaatttgtccagtctgaagctcagcaggaaaggtgttcacaaaacaaatcccacataatcacaggaaacaagattccactgagtggcccagtacctaaggagctggatcagcagtccaccacaaaaagcttctgttaaanaccctacacaaatgcacaaattcagattaaacaaggaaaagacngaaaggagggatctgaagccttttttccatngctttgttttggaaaaaaaa

SEQ ID NO: 29032 - DNA, 454 bp, Homo sapiens
  misc_feature (1)...(454): n = a,t,c or g
gtgtttctcacttagctgggtgtggtagcatgcactgcagtcccannnnnnnnnnnnnnnnnnnnnnnnnnnnnnnnnnnnnnnnnnntaatcannnnnnnnnnnnnnnnnnnnnnnnnnnnnnnnnnnnnnnnnnnnnnnnnnnnnnnnnnnnnnnnnnnnngtcctagggaaagaaacaaatagtggcttggatggtgagttggtggaaagaacagtgggtgttgggggtgttgaacttgtgtttgtgtgtggtgtacccaagacatatcatgtcagcattaagaatagactattcctgttttctggtcactgagttgtatgttttgacatccttattttggaagatacttccttactaggaatgggatagggagggggtcacctttcccatctgngggtcatattttaaaatatttattggtcaagtttaaagatattaccnaaggtttaa

SEQ ID NO: 29033 - DNA, 456 bp, Homo sapiens
  misc_feature (1)...(456): n = a,t,c or g
gaannnnnnnnnnnnnnnnnnnnnnnnnnngaaattatgcaatcagaaattgaaatcatcaacagctagatcccttcttttgtgaaccatcaccctgtgatgagatggtatccgctctgaacggctaaacgcctgcttgagaccatgtaggctcccggggacaccttgtaaccagatgcccgggacttccccagcgctggccgttccagaacacttcagagccagtgttacaagtcagggtggtgaggccacctccttggctgccaccagaacagcttctccactaggctaagaaataggttttctagcccaagagaccaggagaaatatctccaaatacatcttattccaggcagagtcttagatattttctgcccaagagttgaactgaccagcaagggaggcgtaagctcttcagtgatttgacgtgatcatnagaaacacttggcatgacca

SEQ ID NO: 29034 - DNA, 450 bp, Homo sapiens
  misc_feature (1)...(450): n = a,t,c or g
ggccacttgagttcattgtgagaaggtgactgtatataagcctgnnnnnnnnnnnnnnnnnnnnnnnnnnnnnnnnnnnnnnnnnnnnnnnnnnnnnnnnnnnnnnnnngagaaatggatggcttaaactgtatttctgttgtggcttnnnnnnnnnnnnnnnnnnnnnnnnnnnnnnnnnnnnnnnnnnnntatggtatttattatagtattaaagtattatgatattaaattattatggtatttatttgatggtatttactatggcagctccagtagactaatacagtcacagtttgaaaagaatgagcatgggatatacaaatggatagtaagacaagagaaagaaataggaactcatccatgtaaagtggcatatngaaagtgctcaataataattattattatataagatagatgaataagtcgtatcagactaatggtaatgcc

SEQ ID NO: 29035 - DNA, 447 bp, Homo sapiens
  misc_feature (1)...(447): n = a,t,c or g
gctgctggaaaattcaagtcgattcatttgaatcttagtactcactgcttagttgtctagtaaactaacagttttctctgccgctcagaaaaatacacagccatacatccacaattattttcttttccctttgctagaaattttagattagcatcatggcgtacacaagatgagccttggtgacttcagtgtcagactgacacaggtccatactccaactccaccatttacccgtgcatggacttggcaagcaactttgttgtcctgagcctcagttttgtcttctgttaaacggggtcaaaatcagtttcttctagagataaagaacctacatannnnnnnnnnnnnnnnnnnnnnnnnnnnnnnnnnnnnnnnnnnnnnnnnnnnnnnnnnnnnnnnnnnnnnnnnnnnnnnnnnnnnnnnnnnnnnnnnnnnnnnnnnnnnnnn

SEQ ID NO: 29036 - DNA, 459 bp, Homo sapiens
ggagagaaatctttacagatggtctacataaatgcaggcactgttctagaggctaaatatgaaacatatttaaatgctaatggaagggtctagtaaaaaaggaaaggtggaagaaggatgtaagaaaaaaagaggaaagtaaaaggagaatcttgtgaaggtcagaagagatcttgagcataggtagaggaattagccttaacgtcaagaaaaaggacaatctcttatctgagcaacagaaagaagacaaaggctatgggtgcaaatataagtaaacgtataactaatgaagctattatctccattttacatatgaagccagtactcaaaataaaaaatcaaagtccataatctttcccattctctgggctagataaagattattagcaggaaaattacctagtgcccacacagagtaagtataataagtttgttagggtgggccatgttggtaaggat

SEQ ID NO: 29037 - DNA, 457 bp, Homo sapiens
  misc_feature (1)...(457): n = a,t,c or g
ggtatcttctcagcaaatatttgttgagtgaatttgattgtggtgtttttttccttccccatatttgaataacgttctgcggaataaagttagatagtcatggagtaggataccatatgacaggatgtctgactttaggtaatcattgaatgaatgaatgaatgaatgaatgaatgaatggcaggggtcctacagaacatttaatccctctcttttcttatttcaaagatgagaaaatggagagaggtgtacaaatcatagaaagatgtcttagcttcagtattttgtaaaccctccatagtgctcagcaggtttcacaaaatactcagaagaatgtcacaggtaaggaaatagaatatntaaagactagcttggattcaagaatattttaaggctatcatatagaaagntcctataagaaattggaacggggattctaatgcttccagnatnacat

SEQ ID NO: 29038 - DNA, 448 bp, Homo sapiens
  misc_feature (1)...(448): n = a,t,c or g
gttcaataatcctatcaaatagacattgctattgccattttctggaagaagaactgagactaatgtccacaggcggtaactagtaatctgtctgattccgctttcccaagagtagcaattaccacttctctgatttgcaaccatagtaggcatcactaatccattacagtactcattcccactgaaccaacctcagaattcttggcaacagttttcttggctggacaatatcagttgatatgctagatgtaacctgtttgctcaggggcctcctatgtcactagtagcagtttctatatttggagaaagacatccaacaaggcatgaggctaaagcagttgatcagtaggatcttctgtaagtcaaattcttgaaataatttctcagtttcactagttctttgncgccatttgnctttctctcgaganttatagtcggcctgagactg

SEQ ID NO: 29039 - DNA, 454 bp, Homo sapiens
  misc_feature (1)...(454): n = a,t,c or g
ggttaatttcttggcattcctgggcgttagtgttgggctgttacttctgattggtctacagattagaaattactgatggttctcattgaaggaattgtaacttttcagttcaacccctaccactgtgatgcttactaatgtactgaaacaaaatccgtttgtctgggtgtgtcattgaacagcaagcttcagaaaggatggagtggagtttgaggagaaggagtccaaaactgcattcagaacagtggagtctatctgcttccaactgatatcagggaccagtaggtttgcttctggttagaactctctaagtgatgggcttctagtgttgttgaagggctgtgagaggggaatcagagcaggctttgtggtaactttgaatttcataataggtaggaggaattttgctcaagggaaaatacnttgaagctaccattggccnaacaaaattttt

SEQ ID NO: 29040 - DNA, 460 bp, Homo sapiens
  misc_feature (1)...(460): n = a,t,c or g
gggctgcgacttctctaatgtctgctttggctgcccggctgctgcagcccgcgcacagctgctcccttcgccttcgccctttccacctcgcggcagttcgaaatgaagctgttgtcatttctggaaggaaactggcccagcagatcaagcaggaagtgcggcaggaggtagaagagtgggtggcctcaggcaacaaacggccacacctgagtgtgatcctggttggcgagaatcctgcaagtcactcctatgtcctcaacaaaaccagggcagctgcagttgtgggaatcaacagtgagacaattatgaaaccagcttcaatttcagaggaagaattgttgaatttaatcaataaactgaataatgatgataatgtagatggcctccttgntcaattgcctcttcagagcatattgatganagaaaggatctgcaatgctgnttcttcanacaaagatgt

SEQ ID NO: 29041 - DNA, 441 bp, Homo sapiens
  misc_feature (1)...(441): n = a,t,c or g
gctgagagtgaggtcagtatcaccaagcctcttggatttcttcagtagtctcatggataagtgaatgtttaaagtaactactactttgttggctcttggttgggtggatggattctcagtcctggtgtttttaaaaatctcattccnnnnnnnnnnnnnnnnnnnnnnnnnnnnnnnnnnnnnnnnnnnnnnnnnnnnnnnnnnnnnnnnnnnnnnnnnnnnnnnnnnnnnnnnnnnnnnnnnnnnnnnnnnnnnnnnnnnnnnnnnnnnnnnnnnnnnnnnnnnnnnnnnnnnnnnnnnnnnnnnnnnnnnnnnnnnnnnnnnnnnnnnnnnnnnnnnnnnnnnnnnnnnnnnnnnnnnnnnnnnnnnnnnnnnnnnnnnnnnnnnnnnnnnnnnnnnnnnnnnnnnnnnnnnnnnnnnnnnnnnnnnnnnnnnnnnnnn

SEQ ID NO: 29042 - DNA, 449 bp, Homo sapiens
  misc_feature (1)...(449): n = a,t,c or g
gaagacgtagttccaggggagcatagcgtagcttccaggtggctactgaaatggctgacagttactaaagatggtgaggatagagttaaaagcagcagcactcccattttctgatgatggcaggtgataaccttggaataagaagctccaaactatcatgcctgcttaggcactaacttcctgtaattgtaataaaattgttggcattgctgagacctactgacaccttcagcaaacgttagtaaggggcatattacgtgtccagtcctctgcttggtgatgggatttgacattgaatgggttatctttctcctcactccactcccatctctctggatcttcaccaattcctgcccagatagatgctgtatgtcctgctatccgctcgtccccagccttgctgctctctgcagctcccttnagcccctnagcatccctttattcagggg

SEQ ID NO: 29043 - DNA, 457 bp, Homo sapiens
  misc_feature (1)...(457): n = a,t,c or g
ggaaccaaggggtttaataaataacccttgaaaactggatcggatgaattggctttcattgtgttcctagcatcttctcaaatcaacttcccaggactccagggtgaaggaggaaaagaggcatggcccaggccctggggtgtgggatatggtctccctaggggatgacagttgggatcaatggcctgtgacttctcctctcccttcccccatcctgggacctaactggaaataaaaccttgactgttgcccgggtgtcattttaccagtggatttctgccagggcttgtgtcctaggagaaggtttaagttaaaccagattgcccaggtctccaaacgatttgtcatgctgacctgagatcatcgaagggggcacctgccccggcaaggttgcaggggcaggatggggctgaagggatgaacagggtcccgggccccctgntgatacagcattggc

SEQ ID NO: 29044 - DNA, 449 bp, Homo sapiens
  misc_feature (1)...(449): n = a,t,c or g
gagctagcaccatgacttcaatacctgccccagttgagtttgtgcaagacctagcaacttgccccatagtacccagaagactattcacttagtttattcaaggggtcagccaaaggtctgtgtatgtcactgagttctaaataaagaaaaagcaaatcttaattgctcaaaatcaaaaacatctcctgggtgaaatgtaaatgtagtttcattttcaggacagaatctgtccaggggccacattgtcagcctcctctcatttttctccaggatagtcatgctccattgcccaaccacaaagggtaaagagtaggaaacaccctccaatttccagagagcctagatgaagagtttaatcacatcctcggagctgggagaaaagagaangccgaangagcctntccaaatcaaatgnatatccataaatccgctgnatnccgccccacctt

SEQ ID NO: 29045 - DNA, 438 bp, Homo sapiens
  misc_feature (1)...(438): n = a,t,c or g
gctgattttatccagttgacaactcctggcacaggctctgtgccctacccgcctacctcagccacctgcatttgtttcttcctccctcccttcacccatctatgcattttaggattataattcataagtgagatgatactcacatgggtacatacatatgtgtaagttggaaaaaggcagtgagatttttccccttggcaaagcatcatgtgactggttggaggacagttggcttatccagctaggtaaaaaagtattcattttccacaaaaatgaatgagctaaacctgcagcatcaatgttgtgacaaaaatataactcgagctcatgtacaatgcctgttacattcttcgcagctgttaatanggaagaaaagtagttgccaaattaaaagaggattcataggtttccagagttcaacttgatggtatgaacctc

SEQ ID NO: 29046 - DNA, 434 bp, Homo sapiens
  misc_feature (1)...(434): n = a,t,c or g
gggagacaacctgaatgtcctcaaacctgtgaatggacatctatggatgaatctcacatgnnnnnnnnnnnnnnnnnnnnnnnnnnnnnnnnnnnnnnnnnnnnnnnnnnnnnnnnnnnnnnnnnnnnnnnnnnnnnnnnnnnnnttagggacagtaaataaatcagtggttgccagggactgggatttggggtgtggggaagactaacctcaaaagggcagcatgagggagatttttggagtgaaggatctattttgtatcatgactatggtggtatgtacgcatttttcaaagcccattagactgtcatcagagacaaagagaatgaattttgctctatgacaattaaaaagtaaatttaggaaagaatagaaatgtcttagaacaagtcacttatttgaatttgaaatagaaaaaagccaacctttttctg

SEQ ID NO: 29047 - DNA, 445 bp, Homo sapiens
  misc_feature (1)...(445): n = a,t,c or g
gagcatcttgaaatgaaattaataatgtaatatctacttcttcagaatagtagtttttacattctgaagactgactgactgctctcagccacttctgagttctctattttcaaagaataatttggaattccataaaggaaatctgtaaataagagaaaagagtgaatatcttttaacagagtttttcctgatcttttccaaacatcttcattgcggttctgccctttattttttggttaaatccacaggtttacttctgcctgtatctttccaaactattaatctgttcacaatcactttcccatttaaatccttcagcagccccagtaccttcntaataaggncnccttaacttggtatccagaacacttcaatactgggctttgacccctgttctncttcccctacctctgnttaggtgcttcactgagctgcactgaacagc

SEQ ID NO: 29048 - DNA, 440 bp, Homo sapiens
gaactgggcaccataatattagtaaacttcagcgtctggcacataaatatattcagaagtggtgtcatgaataaatgaagacattcatcgaggattttaaaacaattcaccaactccttccttctcaaaatatcgagaggcaggatttcagagtgaaagaaacagaatacccgctctggactgagctccagagcagctcttcacatagcctgaccattaccaggctacagcaggaagtgtttttaactgcactgccaaatgtcatgttcagtccaactaacagtttcggggtgatgttaagccaggagtttcaatcaatgccaagacacggtccccctagatttaaaccccaacactcttcaagaacactacccctcctttccatacagccctccattctgaaagagagcaagccaagccacttactcctccagctcgta

SEQ ID NO: 29049 - DNA, 436 bp, Homo sapiens
  misc_feature (1)...(436): n = a,t,c or g
gaactggaagaggcatgaggcatttctttcaggaaatgatcattattcagccagaaggcattcattaagtaagtcctgactttgtgcccagctctgtgttataggcccttggcgagactcaggaggggcagaggacgctaggttgtagataacacggaacctcagaggatatatggtccaagaagacccgggggcggtgaaaaccctgtggactaatgctcacgggagcccgaggtcacactttgactttgctaccatgggctgtgtctatgtacgtatatatgctgcgtaattattacagaggcagtccatgtgcattgtggatactcagacaggacagaccagcaaaaactaaaaaataaaaaacatcacagacgcatcagtcagagatcactgacatctttccatttccgtatgnnctttatgtgntggaatt

SEQ ID NO: 29050 - DNA, 445 bp, Homo sapiens
  misc_feature (1)...(445): n = a,t,c or g
ggacacctagaaccagcaagctgtcccactcatgtgacccattatgtattttgtttgtttgtttgtttnnnnnnnnnnnnnnnnnnnnnnnnnnnnnnnnnnnnnnnnnnnnnnnnnnnnnnnnnnnnnnnnnnnnnnnnnnnnnnnnnnnnnnnnnnnnnnnnnnnnnnnnnnnnnnnnnnnnnnnnnnnnnnnnnnnnnnnnnnnnnnnnnnnnnnnnnnnnnnnnnnnnnnnnnnnnnnnnnnnnnnnnnnnnnnnnnnnnnnnnnnnnnnnnnnnnnnnnnnnnnnnnnnnnnagccactgnnnnnnnnnnnnnnnnnnnnnnnnnnnnnnnnnnnnnnnnnnnnnnnnnnnnnnnnnnnnnnnnnnnnnnnnnnnnnnnnnnnnnnnnnnnnnnnnnnnnnnnnnnnnnnnnnnnnnnnnnnnnnnnnnnnnnnnnnnnn

SEQ ID NO: 29051 - DNA, 448 bp, Homo sapiens
  misc_feature (1)...(448): n = a,t,c or g
gcaggcagcaaaattgaaagctgagaagatcagagttgccctagagaaaattaaagaggcacaagtgaaaaagctggtgatcagagtccacatgtctgatgacagttctaaaacaatgatggtggatgaaaggcagacagtaagacaagtactggataacctgatggacaaatcccactgcggttatagtttaaactggtcactggtaaaaaccgtttctgaattacaaatggagagaatctttgaagaccatgaaaacttggttgaaaatcttcttaattggacaagagatagccaaaacaagcttatatttatggagcgtatagaaaaatatgcacttttcaaaaacctacagaattatcttttggggaaaaaggaaacagctgagatggcagatagaaacnnagaagtcctcttggaggaatgtttttgtgaagttctgtaactg

SEQ ID NO: 29052 - DNA, 409 bp, Homo sapiens
  misc_feature (1)...(409): n = a,t,c or g
gcctcagaattgcatttttacacctaacatttaacacctaaggtttttgctgatgctgagtctgagttaccaaaaggtctttaattgtaatactaaactacttttatctttaatatcactttgttcagataagctggtgatgctgggaaaatgggtctcttttataactaataggacctaatctgctcctagcaatgttagcatatgagctagggatttatttaatagtcggcaggaatccatgtgcagcaggcaaacttataatgtttaaattaaacatcaactctgtctccagaaggaaactgctgctacaagccttattaaagggctgtggctttatagggaaggacctctcctctgtcattcttcctgngctcttttgtgaancgctgacccctctttttnccgg

SEQ ID NO: 29053 - DNA, 464 bp, Homo sapiens
  misc_feature (1)...(464): n = a,t,c or g
ggagagctagcaccatgacttcaatacccagaacaaatgctaccagacccttgatgccttttgtaatcctctatgatcaagcataagtctgtcctctctgaaactattaagtaaaggtctttattttaggtttctttttggccccatatctctgtatttggtattttatttatttatgtacatgttgttatcttttttcctagattataaactccttggggaagagcctttatatggccttccagctccctgcacaggacattacatccagtagacagatgttcaatgaagggctattgaattcatgtggatttccatgtgagaatanagctggatattcacttccctttttgctgngcttgctaancagactcatttgcaccggccactaccccagttggtcnccnagaaaaaagggtnttantgagaatctttttccacccccnacnattttttaggnataa

SEQ ID NO: 29054 - DNA, 409 bp, Homo sapiens
ggagttatatatactttgatattgaaatattcccactaagtcacacctaaagctttcttccttttaaaaactaactttatttggcagtgaatactttaaaaagacttcactttaaccaaacaactgatgtttaaaatttgagttttttatgaatgagtgcacgctctttcgaggtgattggtgtacaagaagtctttgttaggtgaggacaaattgatgttggagagtggtaatgtgcagtgactacttaaaagagggaatcaaatggagaaaaagaaggcttaattgggaccttatctaaaatgtgaaaatgaaattaaaattgtaaaataagtttatcatatatgtatgggtgtgtgtgtatctatagcatatatgtgctaaaacttatcatgaagaatttggcccc

SEQ ID NO: 29055 - DNA, 497 bp, Homo sapiens
  misc_feature (1)...(497): n = a,t,c or g
gggagagttatgttcttgacancagatctnaacgnnaantcccttcgaatttngggaaannnnnnnnnnnnnnnnnnnnnnnnnnnnnnnnnnnnnnnnnnnnnnnnnnnnnnnnnnnnnnnnnnnnnnnnnnnnnnnnnnnnnnnnnnnnnnnnnnnnnnnnnnnnnnnnnnnnnnnnnnnnnnnnnnnnnnnnnnnnnnnnnnnnnnnnnnnnnnnnnnnnnnnnnnnnnnnnnnnnnnnnnnnnnnnnnnnnnnnnnnnnnnnnnnnnnnnnnnnnnnnnnnnnnnnnnnnnnnnnnnnnnnnnnnnnnnnnnnnnnnnnnnnnnnnnnnnnnnnnnnnnnnnnnnnnnnnnnnnnnnnnnnnnnnnnnnnnnnnnnnnnnnnnnnnnnnnnnnnnnnnnnnnnnnnnnnnnnnnnnnnnnnnnnnnnnnnnnnnnnnnnnnnnnnnnnnnnnnnnnnnnnnnnnnnngataaccgcnagaaaagaacnatgtg

SEQ ID NO: 29056 - DNA, 478 bp, Homo sapiens
  misc_feature (1)...(478): n = a,t,c or g
gcacatgagcttcaatccctgcctgcatttgaatttctgcctgtgaaatatggggcaaagaaagatagagaacatttttgccattggcacacatggatgagtagtccagttacatgacaaactctggcagctgccaagagatgggagagaaagtaggcattgcacagggtgaaatgaggcaggggagttgggtgcctctcccaagcctggcacagctggggcacacagtctcaactcggggaaagtgtagtttagctaagtgcctaagaagtggttttggtccaaaaatcagatttcttctatttccattctgctttgatctcacttcagctgagttccttagaaaggatttaaggnatcatcgacttggtaatctcaccggctgctttaataatctagaaccttgctgcctttcatgcnnaaatatanttntgaaccagctnccngacncccnggaaaccccaaggtcccccttgtt

SEQ ID NO: 29057 - DNA, 468 bp, Homo sapiens
  misc_feature (1)...(468): n = a,t,c or g
gtggccagaatgaaattttgctgctgggacagcaattcttggggacgggcctggtaaaaaaaaatccccccaaacaaaggacaatcagtaggcaatccacaataatttgaggtatacaagactggacttcatactccatgtgaggtctgcttacattcagccttggtcttttcacccacattgctgtcaagtcatacacctctctcagttttgctgcatctcacatttttccctgttaacttcattttattcagttcagccccttgttttaggtatagccctttaatttagatgctgactcttaagttgtacttataatcttcaaggaccatntacctataagctanaagtagggagaggtctctacctctactcaatagatcacttttccaactgctcagaaatcaccaatatcagtcactctntaaacagtatgcccatgctaatcccctctgaactgcacgtata

SEQ ID NO: 29058 - DNA, 472 bp, Homo sapiens
  misc_feature (1)...(472): n = a,t,c or g
gcgggggccccatccagagtcctgtcagcgggggccatagcctgtggctgcgggcctgggcaggtgggtgacacgaggcaggaccgaccccagggttctaacgcctgctccccactggccttggacaaatcgctgcccttttctgagcttgattcctcacctgtgaagtgggcatcaaggtaatgcctgnnnnnnnnnnnnnnnnnnnnnnnnnnnnnnnnnnnnnnnnnnnnnnnnnnnnnnnnnnnnnnnnnnnnnnnnnnnnnnnnnnnnnnnnnnnnnnnnnnnnnnnnnnnnnnnnnnnnnnnnnnnnnnnnnnnnnnnnnnnnnnnnnnnnnnnnnnnnnnnnnnnnnnnnnnnnnnnnnnnnnnnnnnnnnnnnnnnnnnnnnnnnnnnnnnnnnnnnnnnnnnnnnnnnnnnttngaaagccccctgnctttaacctggggaaangcaaaanttntttttaaaa

SEQ ID NO: 29059 - DNA, 466 bp, Homo sapiens
  misc_feature (1)...(466): n = a,t,c or g
gaaaatgaccccgggacatctgagacaacttcgctcacacacctgccctggagagagggctcacagtttgagaagctacttacagagaaatggaatcactgtttttttagtttttttgtttttttttaaaaaaacactattgcactaaatgtgaacgttgactccctttggggaagaattataatataaacttagcaaacatagtcaatactaagaatataaaagaatttatgacaagtgagtgctctaacaccttgaaaatgaaagggaaaacgtttcaagcaaaatctctgtcttcaaagttctcaactccagggtcctgaataaataaccagtgagaattcaagagcttttcanaananggatgtttatgtagatancaatgtataaaatgctaaggcagacaactntactcggcagatacnaatcaaataccnaaacaaagcagcctctggtttatanattt

SEQ ID NO: 29060 - DNA, 434 bp, Homo sapiens
  misc_feature (1)...(434): n = a,t,c or g
gatgaagggttaatattgacatgtttaattgggtttcctggcatttttttaatgaaattttttgtggcttaaaaatgctgtggtagctgtgttcataaatatctctttaccatagatttctttcaatattaacagaatttctatagtttttaaatagtgacagtccattgggtggtggtggggtggtctgacctaaatcattgataagctgagatgcttttctgtaaagcaataaggaattcagaacttctggtttttattacttgaataaagatctcttataaagaattaaagcagtttggaccaaggagagctgaaaaaaattctgaattaaattggttatggtaatccttttcatagccctagcccttncncctggccnaagggnccngggantgggcttgnnttnnnacntngaanaaaggggaattaac

SEQ ID NO: 29061 - DNA, 453 bp, Homo sapiens
  misc_feature (1)...(453): n = a,t,c or g
gcggcacgagnnnnnnnnnnnnnnnnnnnnnnnnnnnnnnnnnnnnnnnnnnnnnnnnnnnnnnnnnnnnnnnnnnnnnnnnnnnnnnnnnnnnnnnnnnnnnnnnnnnnnnnnnnnnnnnnnnnnnnnnnnnnnnnnnnnnnnnnnnnnnnnnnnnnnnnnnnnnnnnnnnnnnnnnnnnnnnnnnnnnnnnnnnnnnnnnnnnnnnnntataattataaattatcatattggacatcctgaaaaaatatacactacttgcatgtataatgtgcctttgctttgatgttaccctacanaaaactnaatacttatatatatatattaccctcattccttacctactntattgganaagcnttttattggaananatanttttttaaaaaannccttttttaaccctttggnaaaaaagggtagggnttnaaaggggtntttaaaccccggccc

SEQ ID NO: 29062 - DNA, 429 bp, Homo sapiens
  misc_feature (1)...(429): n = a,t,c or g
gcttcccaagtaattgagtcactgtttatataaggactctgaaattaatctttttttttgctcataattgagattcattttcattttttgctttttttaaaaaaactttattgagactttgtgnnnnnnnnnnnnnnnnnnnnnnnnnnnnnnnnnnnnnnnnnnnnnnnnnnnnnnnnnnnnnnnnnnnnnnnnnnnnnnnnnnnnnnnnnnnnnnnnnnnnnnnnnnnnnnnnnnnnnnaatctgtagctggaactacaggcatgctccccatgcctggnnnnnnnnnnnnnnnnnnnnnnnnnnnnnnnnnnnnnnnnttgaggccccactatattgcccaaantngggctnaactccngggnnnaantanncccctggcttaagcnnnctaaagggngtngantntnagggtttaggccctggcc

SEQ ID NO: 29063 - DNA, 434 bp, Homo sapiens
  misc_feature (1)...(434): n = a,t,c or g
gttactctcaccaagccctgttgagaacagattccctatcaggctcagaactctgatcaagaggggcattcttgccactgctggagtttgtgttggacaaaaaaaagcctgaaggaagacccacctttacagttgctcctgaaagccagggctcgcctgcccctcctgggaattctcatgcacgggggatctttctagtacagtgctccgggcgtcagtgtcagcagggacctctgaaaccatcccacccaaccagctcttgtccaggcagaatgtgacttgcccagaggaatcaggctgggctattccaccagctaaagggcaggcaaaggaaaaacagcatgcccacggggttttttctttcanggcatttggagcttggctntaaaaaactnctggggnaaaaaactggntttnnaaaancttggnccttt

SEQ ID NO: 29064 - DNA, 418 bp, Homo sapiens
  misc_feature (1)...(418): n = a,t,c or g
gctcaaggctttccccatctgacctcactcggtcaggtcagccttccttctcatcagtccttcattcagcagtctctgaaccttccccactgaacacacctagtgcgcttctacctccttccagactctacccactagcatgctggcctaacaacattggctttgatgacctgaactccagattcgcctgctgtccacagtttctttctttcttttttttttttaaatngcccaggnngnagnncaggggggcagccnnagntnanngaaacntnaaactcnggggntaaaggnancctccnncntaancntcccaaagggnnattttcncanaggccctcaaatnaaacccaattgcctttttaaaggagggtttaacttaaactttacccgggnatttannnnagggggaaggggg

SEQ ID NO: 29065 - DNA, 440 bp, Homo sapiens
  misc_feature (1)...(440): n = a,t,c or g
ggaaagatgtacatctcccacttggggagatagaacatgaatgaatgaaaattcaataatttgccttaaagacacatttactacatgcctattatgtactagacactgaaatcataaataagattcaggcgcttctcttgagaaacataaaatacaattcaaaatacatagaaacataaaatacaattcaaatacaatacaaaacacatatgagtttatcaggcagggaaatagagataagggtgcccctggaagaaaaagcaacaaatgtgaggacgttcagggcagtgaggacaatttgggggagaactgcaagtgtagcagtggattcaggacatctgcaggttaccatgnanaatgttcgggaangttaaggggnaattngnnnattacntaaatnggnnanatcntgaaaaactntntcccatattnggatttct

SEQ ID NO: 29066 - DNA, 435 bp, Homo sapiens
  misc_feature (1)...(435): n = a,t,c or g
gatgaaaccacataagacagaaaagtagtggggcatgttgcagcaaattgactccacatgggctgtgtacagaggaggaaactaggttggggccagatcctggacacccttgaattacagcatgataaagaaagttgtaccttaattcatactgcctgggaggcttatcagggggtggaatggtagggattgggagggagagccgtgcaagggcatctattgaacagagtgggaagattgaagtggtgctgatatataaactggattctaatgaggggaggctgtgagtagatggatccaggcaattatgttaataacagtctaggaccgtggtctttaaactttattactgcatacctactaaaataattttgaaaactctgtatcatgtattttaaagttgacattcaaaattttctncataaaattccatat

SEQ ID NO: 29067 - DNA, 452 bp, Homo sapiens
  misc_feature (1)...(452): n = a,t,c or g
gggtnaaaaagatgccagtaaattcanaaaaagccacgaagangccggnaggttanaagcatctaaagatgattgctaaggaagcactgtgccttctgcttttatggtgtggttctctcctctctctcttttgctggaccacattcttattccatttcctaacactgcatttaaggtttctgagaatatatagcacaagctgcatgagctgcaatgcagagctgtaattctttgctggagcagtttcctcaactctttatctggncccctcttctggtaaactaatctgaccatgtgtgaccattaggactccttttccttttctccactaagctgtagagccacgtctaagcattattttcaaatctctttcccctaggccctcagtctcacttcacttaacacatctgagctaggctgggcatagtggctcacacctgnaattncagccg

SEQ ID NO: 29068 - DNA, 450 bp, Homo sapiens
gatttagtattttaccattaagtaagtaaaatattaactcagggtgttttgtagatgcttttcattggattggggaaatttgtatttctaggttgagaattttgtcaaatactttttctcactcaaagtcccacttggttgatttgaattgtcctttttatatattgctttatttgctaatattttgtcagcaattttgcgtctgtgtttatgttagatgtgggtctgtaatttccttccttttttcctctcctcctctcctatcctctccccctgcttctccttctcctcttacttccttaagaattgtgattagtacggaatattttctctgcacctattgatattatatatttggtttttctccttccatactttagatggtaaatgataacaatagatgctctaatttaaaaccatccttacatttctgggaagaatccagcgtgg

SEQ ID NO: 29069 - DNA, 453 bp, Homo sapiens
  misc_feature (1)...(453): n = a,t,c or g
gatgatctttttttgatctgcttatataagtggacctgnacgggtcaaacctgtncagttgttcaagggtcaactgtattataaaaattagtttataaaataaaaaattgctggaattattttttttaaaaagtttccctcnnnnnnnnnnnnnnnnnnnnnnnnnnnnnnnnnnnnnnnnnnnnnnnnnnnnnnnnnnnnnnnnnnnnnnnnnnnnnnnnnnnnnnnnnnnnnnnnnnnnnnnnnnnnnnnnnnnnnnnnnnnnnnnnnnnnnnnnnnnnnnnnnnnnnnnnnnnnnnnnnnnnnnnnnnnnnnnnnnnnnnnnnnnnnnnnnnnnnnnnnnnnnnnnnnnnnnnnnnnnnnnnnnnnnnnnnnnnnnnnnnnnnnnnnnnnnnnnnnnnnnnnntancgagattctgctcaaaaaataaattaattaattaattaattaat

SEQ ID NO: 29070 - DNA, 451 bp, Homo sapiens
  misc_feature (1)...(451): n = a,t,c or g
gacagcccctgacttccaagttcagtgagatttgtatttctatactaattctacagagcttgaagacttaactccttaactcagacgagtaaaaaggtttctctctaaggccagtttggatcaattgctaggtggctgcctggagttaaggatttgcaagtgccgctcaagtttgttgagcaagaatgttgtgatcgattggcaatgtccggcgtgggtggagcaggtgtctgccaaaccgctctggacctgaggtttctaatcatcagcctctactcattctgctctcctctgccattctggagtctctcctctgatgagcactgtttgcctgaggctggatttttgcaactttaaggggctttgattatcacctttctgacttggcaggatcatctttgccttcagaaataatgctaaggctttgggaggctgangcgggaggatcgct

SEQ ID NO: 29071 - DNA, 451 bp, Homo sapiens
  misc_feature (1)...(451): n = a,t,c or g
gaggagctaatgtttccaggaaagcctcgtgtcctcagagtgaggagggttgcacgaaaatggaggagaaggactgagggcagagcacagttgtccctaagaaaccaaatggtcctggagtgcaagcaagaatgctgggcttaaagaccacccacccctcaaaagatgcaggctcacctcccgggtgttgaccttgctcctgagtttagcttccaacagggccaggaccatccttcccagcattagcctgttgtgctctccagtaagtgactgaggtcagtggtcaatcacaggggtggacctgctgggcccagggcagccttgagtgcattggtggagagggctgcctgagttgtcctgtgggaggaccacctggagtttcaggaaggaaagaatagttgngacttttctttttcttggttccttgatttttatcaggatggtttgcgaa

SEQ ID NO: 29072 - DNA, 175 bp, Homo sapiens
gcccactcctagggatttccttcctctctctcatgttgatcttttgtttgcagcgtctcttttttggattactgttgttttattgaagtacatgcttcagcagcttcttgagaaagggtttgtgagaggtatgttttttaggctgaatttctgaaaatgtctttttttttttttt

SEQ ID NO: 29073 - DNA, 426 bp, Homo sapiens
  misc_feature (1)...(426): n = a,t,c or g
gctggaagaatggggaccagaaagagaatttgctgaagaggagaaggaaaaaaaaaacaccaaaaaaaaaaaaataaaaaaanccacncccncaaaaaancctgcccgtnaggggggagnaaaancngggccttttaaaanggcanncncaacaanttttgntgccagnatnccnttgntttggntgaaaggatttntgtnggnaagtngcnggattntagngnggagttcccccaccccaggntccnaggggcanancgnggcccccnantgtccgtcntgnnccctggccgccntcccaanggatgtncccaantttnanccaaaaatgggggaggccntcaaaaaccccattttaaacatgctgncttgaaaaaaaaaccccatnttccccaaccggtcccaaggggggggcttttnaaccca

SEQ ID NO: 29074 - DNA, 409 bp, Homo sapiens
  misc_feature (1)...(409): n = a,t,c or g
nnnnnnnnnnnnnnnnnnnnnnnnnnnnnnnnnnnnnnnnnnnnnnnnnnnnnnnnnnnnnnnnnnnnnnnnnnnnnnnnnnnnnnnnnnnnnnnngatctatttctaattggtcaagttatgcaaatttttattcactttcatttccctagctgaaggttttatccttttccaaaacttgtaagtaaaaaaaagaagaagtgtaccgaatttaaaagtatccttacctaaatctatttggtttctgaattcagaccaaattcagagggatctgcattatccaaatctatatttggtttctaaatttcataaaataaataacaaaggtgtgcttggatatccaataattcatatctattagttcctgagtttgaaaagcnagaaaaaaggggtttctttattcctggac

SEQ ID NO: 29075 - DNA, 427 bp, Homo sapiens
  misc_feature (1)...(427): n = a,t,c or g
ggcaatgacttaaaagcaccaagggagttaaccatgtggatatttgggaatgaacattctgttcagaggcaacaaccagtgcaaaggtcccacaccaggaatatggttggtgtggtccaggagtgttaagtgggctagaataaagccagtcctctctaaggactttggctttcacttggaatgagatggatggtgggtctttacatgtgacaaaaagagagagagaaagatgaggagtcattggaggattttgagcagaggagtgacttgatctggcttacagttttaaaggattgcactggttactattttgagaataggctgtagtgagctttgagcagggagaccagttaaaagacagttgtagcaatccagatganagctggtggtggctcaaaataacttctggagggctattgcactggag

SEQ ID NO: 29076 - DNA, 418 bp, Homo sapiens
ggacaggtgttaacagaagaagtagatctttttgttttttgcttatgacctgtattttaatatttgagcttatagattagagattgtgagagaaatctgtttatagtcttattttcccttgtgtattttttcttcctagtacatggaaaaagaggatgcagtgaatatcttacaattctggttggcagcagataacttccagtctcagcttgctgccaaaaagggccaatatgatggacaggaggcacagaatgatgccatgattttatatgacaagtacttctccctccaagccacacatcctcttggatttgatgatgttgtacgattagaaattgaatccaatatctgcagggaaggtgggccactccccaactgtttcacaactccattacgcaggcctggacaaccatggaga

SEQ ID NO: 29077 - DNA, 424 bp, Homo sapiens
  misc_feature (1)...(424): n = a,t,c or g
gggcgtggtcctctctctttccctccctaccagactcaactgcatcttgggggctcagacacaagtggcagagacagggcccttctgcctctgagctcttcctcagggtggtccgtccctctcacgctagggaccctgctccatcctggccagtgatccctacatcagcctcccctgccagtgccccctcctcatgctcacaaccacccccactcctgggcccaccatcatcttccctgagtgcaccagtacggggggctcccaggtgtccagggcagccctgccatggcaggtgccaagggggtccagactcgatggcagagggttacgagggatggaggccctggcctcccccacctccctgtgcaggcccaccccgtgccttcaganggatgcacattctttcangccacacaagtgtcac

SEQ ID NO: 29078 - DNA, 419 bp, Homo sapiens
  misc_feature (1)...(419): n = a,t,c or g
gtgatcagctatatactatttatatacaagtgataatacggatttgtaacattagttttaaaaagggaaagttttgttctgtatattttgttaccttttacagaataaaagaattacatatgaaaaaccctctaaaccatggcacttgatgtgatgtggcaggagggcagtggtggagctggacctgcctgctgcagtcacgtgtaaacaggattattattagtgttttatgcatgtaatggactatgcacacttttaattttgtcagattcacacatgccactatgagctttcagactccagctgtgaagagactctgtttgcttgtgtttgtttgtttgcagtctctctctgccatggccttggcaggctgctggaaggcagcttgtggangccgttggttccgccactcattcctt

SEQ ID NO: 29079 - DNA, 420 bp, Homo sapiens
  misc_feature (1)...(420): n = a,t,c or g
gacatcatcgaactgcattcagttgcttagcctggaaatactgttacggtgttcagccgttccccaacttacatattttgtggatcaaagtcctgtctgatgttttgggagtcctttctcatttccttcctccctgcttgcactgcagccagtctagttcaagtcctcaccatccattctttagcttgtagtagcttcctacccctgactcaggctctgtacccttcctgcctatctgccacactgatgccaagttaagctttctcatcagtccgattatttcattacactgtgaaaatcattaatggttaccactatatgtagaattaaattccgaattctttagtattgaaaccaaggcccttagtacactgntgctaagctgcctatcangatattgnctaaccacttctccatact

SEQ ID NO: 29080 - DNA, 423 bp, Homo sapiens
  misc_feature (1)...(423): n = a,t,c or g
nnnnnnnnnnnnnnnnnnnnnnnnnnnnnnnnnnnnnnnnnnnnnnnnnnnnnnnnnnnnnnnnnnnnnnnnnnnnnnnnnnnnnnggaaacnnnnnnnnnnnnnnnnnnnnnnnnnnnnnnnnnnnnnnnnnnnnnnnnnnnnnnnnnnnnnnnnnnnnnnnnnnnnnnnnnnnnnnnnnnnnnnnnnnnnnnnnnnnnnnnnnnnnnnnnnnattacatattattagcaaataaatcttttatatgtatataaacatgtagttatttggtaatctttgtagggccaagattagcagataaatatacatttatatatacatactttatatattactaattatatattatgtgcaaagaggaagcaaatgaaaatattaaataatcaggccagatgtgatggctcatgcctataatctcaacc

SEQ ID NO: 29081 - DNA, 404 bp, Homo sapiens
  misc_feature (1)...(404): n = a,t,c or g
gggcatgtggcttgctaacacccctctcttgctgtagtagaaggaccccaacccctcctcccaggaatctgaaatacttgtaaacctggggcatgccttagggccgcggacacacacaagctcatgcagacgcaagagcactcactgagtcanaaacagggaaagatatttccacaccaggagatgggtgcctggctctggggctcttcctctctagggagagaaatgcttcaagccctgaggccattccttcatggctctctggggcccaaagacagcatgcaggagatggtctttcccagcagaattcatatccagagcccctttgacgatgggtagagcatctgagtccacacaacagacactttangcccttggnccantgggccaaaattcattcttta

SEQ ID NO: 29082 - DNA, 400 bp, Homo sapiens
  misc_feature (1)...(400): n = a,t,c or g
gctcagcaataaaaaagaatgaactgttatagacggttgaacgtcaagaacatcataaaagatgtcagatacaaaagggtttacactgtatgactgttaatatgaaattcagccaaatatggggtagagatcagaacagttctctccagattgggggcctacagagggtggactgggaaggacacgagaaccttcccgggcaatggagataatacactttctgtctggggtgtanatcgcataggggtacgtaccgatcaaaactcgttgaatttaagagctgtgcctttctcaggaagattttaattcagaagaaaaaaaaattgttgaaggcagtggctgccccagtttggaggggaaggggggacttctggngcttnaaaacncaattaaanttaga

SEQ ID NO: 29083 - DNA, 429 bp, Homo sapiens
  misc_feature (1)...(429): n = a,t,c or g
ggagaatacagcatctcattttaaatcattatgatcaatctctgataaaggcctagaatacaaattatgtcaaaagtgaaaaaatactatctcgaaaatttccttggggataagactactaaaattataatgcttcctctgagaaaatcatctctttgcatgtggtttgtaatggtaacagttctgtttccttcctgtcagaatgaggtgaaattgttcaaatatgtattttttatgaaatttacagtgttacctgtgtattctaagtatttgattaaataagcctttggggaggttgttgaggagagtatggtagggtatctggaactacatagngtttttaaaggatgttttctttcttaaaaaaaaaaaatccctaaattctattgggattacctgnaagttaaaacactngtggntttntttttt

SEQ ID NO: 29084 - DNA, 424 bp, Homo sapiens
  misc_feature (1)...(424): n = a,t,c or g
gaaattacacacataattcaaaggtaatgtaacttgccgggtcggactttagtccattccgttaaatggagaaaaatgactgacgtgaagaatgacttattgattctcggtgggaaaatgacttctgtaatatgggaagtatggtaaaaggaatagcttaattatttagggagcacttttcaaaatgtgcttttacagcagtacaaattgtacgtatacaaatggtatgactaggttctttttttaaaaattctttcataggagaaagttatgagaaggcttatattatttcgttgctaaggcaaagtttaattttgcttaaattcctgtaagactaactaagaaaggtaggaggagtgatgagcagtttcttaccctttaagaaatatgacttggtctaattggcttttcttanttactttat

SEQ ID NO: 29085 - DNA, 402 bp, Homo sapiens
  misc_feature (1)...(402): n = a,t,c or g
gcatatatttactccatgaaatatttctaaagtgacattttcatgggtgctctgaggattcttaagaatattgcctgagaaattgtagggtatcaaagaaggccttgtgagtatggaatcttttactgtagactgcagtcttacccacattttcccacagggccttagtgaatgcctacaagttgcagcctacacctgggattcagaaagttggcattagccttttctttactattgtggattacgtcagcgatgagacgcagcgtcatcccccaacaaggcagttctttacttcatgtattgagatcttgggacaggtaaggctatctgtaccttttgccttgatcagataatgagtctctgcggngnctgncttctttggatataagncagcattgcttt

SEQ ID NO: 29086 - DNA, 409 bp, Homo sapiens
  misc_feature (1)...(409): n = a,t,c or g
gtggatatagtaggagagaaagctgaggatatagatagtagtaagactacaaatgtccttgaagttgtatggattttattctgtaggcaatgagaataactcagatctttttcggaagaagcaaggatccctgacacatattttacaaagtagaagcacactcaaccattcattctctgtattttctttctaaataatattcagtttaaatggaatataatggtattttctggatttacatcataccatctgagaagttataaatatatcacagtcattatgtaggcttgatatcccctcctgagcaccagcctcatttttatatgaaaaattcaggcaagaaaaacatgactcattttgagaagtgggaggagaatccncccngctgncntataaaacccnttngggg

SEQ ID NO: 29087 - DNA, 417 bp, Homo sapiens
  misc_feature (1)...(417): n = a,t,c or g
ggctaactnnnnnnnnnnnnnnnnnnnnnnnnnnnnnnnnnnnnnnnnnnnnnnnnnnngagtcagatcagaagtctcactgcttgtaatgctcctgtggctacatctcacagtaaaagccaaagttatgcagccacggaaaagaaatgaagcatgaattcacactgcaacgtggataaactgaaaacatgatgcnnnnnnnnnnnnnnnnnnnnnnnnnnnnnnnnnnnnnnnnnnnnnnnnnnnnaatgtacactaagaagattggcgactgccaggggctgggggagggaggtcttggaaatgacagctcatggatgcagagttttttcctggggtgatgggaattaagtagtggtgatggctgcataatatcgngaatctactctaaacccncgtgattggncnctttaaaaa

SEQ ID NO: 29088 - DNA, 429 bp, Homo sapiens
  misc_feature (1)...(429): n = a,t,c or g
ggtaattataggcaacaatggacaaatccattatgaccatcaaaatgacggggctagtcaagctttggcaagttgccagagggacttccgcaacaaaccctatcctgtccgagcaaagattacctattaccagaacacactgacagtaatgatcaataatggctttacaccagataaaaatgattatgaattttgtgccaaagtggaaaatatgattatccctgcacaagggcattttggaatatctgctgcaactggaggtcttgcagatgaccatgatgtcctttcttttctgactttccagttgactgaacctggaaaagagccgcccacaccagataaagaaatttcggaaaaggaaaaagaaaagtatcaggaggaatttgagcactttcaacaangaattggataaaaaaaaagaggaattcg

SEQ ID NO: 29089 - DNA, 423 bp, Homo sapiens
  misc_feature (1)...(423): n = a,t,c or g
ggaacagaatggactttttgcctttgggtgagcttctttgaaaagacacagaaacgtgtgtatatgtgtgtgcgtgtgcatctgtgtctgcttgtagaaaatttcttacttccagctgagcgcagtggctcacgcgtgtaatnnnnnnnnnnnnnnnnnnnnnnnnnnnnnnnnnnnnnnnnnnnnnnnnnnnnnnnnnnnnnnnnnnnnnnnnnnnnnnnnnnnnnnnnnnnnnnnnnnnnnnnnnnnnnnnnnnnnnnngttacagtgttagccaccgtgcccgggcctttctttttattgttgtaagagttcttcaggtattctggatacaagtcccttatcagatacataatttgcaaacaattcctcccattccatgagttgtgttttcagtctcttgatggngtccttagatgcacg

SEQ ID NO: 29090 - DNA, 410 bp, Homo sapiens
  misc_feature (1)...(410): n = a,t,c or g
ggtgacagtagtttttgtaagtactctggagatatttgttatcatttaatttttgtatttttacaattatcttgcttaagataggtttttgcactcacgtcaggcaaagaaaggtaagcatgagaaggaacatgagtgtcattaggcccgcaagacactgttggggaatccccagggtgtttagggcagagctgtttgatgagaagcctttggtgagcttgttccctggcagagttggaagtatcagactgatgaaatacatcccaggagtgttctctgctgagatattttccaaagcaatatctgcttgcactactgttagatgaatttggtgggcttctagattcagattcttcatccaagcnaggagaaaggtataggcnntgagtccnctgaaangcnnngtgtcc

SEQ ID NO: 29091 - DNA, 442 bp, Homo sapiens
  misc_feature (1)...(442): n = a,t,c or g
gggaacacactgtggtgtcagcaagggagcgacttgtgccaccttgtgtttttggaaggtctatcttggagttgtgtctaggatggattgggggagggagagggtctgggagagaggaaaggaagctgactggtgaggagatatggaattaaaggatgcttataatttggtaggaaacagccacatagaaactgagtttttagttagttagatacagtacctaaaggaagcactggttatacagagcaggaccaggtatttccttacagtcagcagctcggttctttagtaagaacctgtcccttttatacaggtgctagtgtcatatttcagcagcatgtatgctaacatgcaaagttgtttctgttcaagaaaatgctcacaaacattgagaggcagtgtgnantggttaagaaaatggactggggccaacttgcttgaa

SEQ ID NO: 29092 - DNA, 423 bp, Homo sapiens
  misc_feature (1)...(423): n = a,t,c or g
gnnnnnnnnnnnnnnnnnnnnnnnnnnnnnnnnnnnnnnnnnnnnnnnnnnnnnnnnnnnnnnnnnnnnnnnnnnnnnnnnnnnnnnnnnnnnnnnnnnnnnnnnnnnnnnnnnnnnnnnnnnnnnnnnnnnnnnnnnnnnnnnnnnnnnnnnnnnnnnnnnnnnnnnnnnnnnnnnnnnnnnnnnnnnnnnnnnnnnnnnnnnnnnnnnnnnnnnnnnnnnnnnnnnnnnnnnnnnnncnnnnnnnnnnnnnnnnnnnnnnnnnnnnnnnnnnnnnnnnnnnnnnnnnnnnnnnnnnnnnnnnnnnnnnnnnnnnnnnnnnnnnnnnnnnnggntgctgcctgctggttgaatgggctctggctcctnacctancccccaagggtgcttcgccacatnccaatcttgcctggggcttttggt

SEQ ID NO: 29093 - DNA, 425 bp, Homo sapiens
ggagaaaaccatctgctggaactggagttttacttaatcagaccccaggccagttcaggtgggcagtaggggagtgtggatcttgacaggcccagaatggggagggtgtgggtgggaactacagggcaacgtggcccctgaacgattctcacatgagttgaggtttggctgggcctgtacttgccctgatgtctgggccttgaaactcaagcagccatgtagctgcaggcgtgttcactcaggcagcagaaccatcagaatcaagttaactcagcagtgttcatagactgaaacagacgctgcctccagtagtggagcagctgccatccaaacttgaacaaaagctatggcattggaagctaagatttagcccaacctcactggtctgcttgcccaagggtgccagatcctaaataggtttgctt

SEQ ID NO: 29094 - DNA, 449 bp, Homo sapiens
  misc_feature (1)...(449): n = a,t,c or g
gttgagactgcatagggctcggcgtggtgttactaagggctcttaaagatcttcatgggaagaaattccataatttctcgtgaatccattccaaacagggaaatggctcattgcaaaggaaagaactctgggctggggggtcagaactccttgctttgcctctcatctctgtcagttatgagctgtgtggtctgaggcaaatgacttaacctctctgaacctcttattgaacctctctgtaaaaggtagatacttggcaggggcgggaganagtggtgtgattattcctaaatttaagagtttggaaaagcaaatagcacactggatcctcacagggatcttttgagaataaatgacaccatgcatatgaaaatgctttctagnnnnnnnnnnnnnnnnnnnnnnnnnnnnnnnnnnnnnnnnnnnnnnaaaaccggcnaatcccgagg

SEQ ID NO: 29095 - DNA, 431 bp, Homo sapiens
gaaagaagcaaccaactattttctatctgtgcatctatgcttgctgatagatacatggagtacaggtgtctgtgagttagtggaatctctttattcttccatgagaagcgttggtattttaaagtggaatgaaatctgaaaatgataagaacataaagtaaaaagtgttttataataaacatattttattaaaatctttcaaaagttcatttaaaatttaccaccaaaattcaaaacaatggcacttaaaacactcggaaaagagaacaaagtgtaatatatttttatgtagtataatatcttttcaaatgtagtttattagttttaaatccagtatttcctttctcactaaatcttcccaaaccagtagatagaaatcccacttggttttcttgtaaatcccatttggttcaaaaggagggagcaaagaa

SEQ ID NO: 29096 - DNA, 435 bp, Homo sapiens
  misc_feature (1)...(435): n = a,t,c or g
gggctccccgttcactggccagccctgcagctccagaccattcactacttggattttaaacagatgtcagaaaagcactgacctagcctgtcctccatatataatagtttgttgatggttgcttagtctgggttatgtagataagcaattatttttcataagacttttctaccaacaggtggcactaacaatttgttttactaatgccccagtagtaatccttgtgtcacatttgaatatatcatttgcactttttgggttgaaacatagctgatttttatagatgtttaaggccaganagagagagagagagagaaatccagcatttctgatcaagtctttagcatatagtctttctcctacactactggctcatagccagtaatnaggctcttccttnattcctagactaccccttgantggncctttagaaa

SEQ ID NO: 29097 - DNA, 428 bp, Homo sapiens
  misc_feature (1)...(428): n = a,t,c or g
gaaataaatggttgtcaagtaaatgctagtaaacccctttcattttctaggatatacatatctacagtatccatcataattctatgggggataccttgcgtcttttccaattataaataatagctaaaacatgggcaaggtgcattccatgcactatttttacatcactcttatgaagtagataataacctgcattttgggaatgtaagagatattttctttcgttataaggctatcaaatccctgtcaagaatatcactaacccaagctggactggaggctttatttgaaagcaatctgctggatgatttgaaaagtgtaatgaaaacaaatgacattgttcgatacagggtgtatgaggtaagataaaaagcacactttctcatgcttacaaagcagaatgcagnttggnttatgctgaaaagcaa

SEQ ID NO: 29098 - DNA, 433 bp, Homo sapiens
  misc_feature (1)...(433): n = a,t,c or g
gcagaggtggctgatttcgtggtagcgctccttgatgggaagtggatcctttgctctccttttttggtaggaaaaatcccaaagactttgtttctcaagagattttagatgctgtttctccttcccaccttctttttctgggggccggtcacccacaggtgtgcatttgttcagttttaatggatgcccgcttgccgcttcctcatggattggtcagactccctctgtttctggtggaggaagtggaaagtgcaggtaggattctgttggagtcaggacagagcccagtggagcaggctcgtggtgctgctctttccatttgcccctccagatccatgcttttccgcttcaccctgctcggaactcggtaggctgtgtgaaaggggctcccttccctctcgcttttgtttaaaggnggccttngganaagaac

SEQ ID NO: 29099 - DNA, 429 bp, Homo sapiens
  misc_feature (1)...(429): n = a,t,c or g
gggattgtttaccagtgtgtgtgaatgccattgttaaccattgcagcataccagaaaatgcattatcccaaaacaaagtatgttttaatggggagagggaatgaactttcgaggagaaatgtccaagtaaatatattacatgtgtatcagaaatcatcaagacagccctcaggttgagtaactcgtagggactcactggagtttcagcagatagtcgtactcatggtaagatttattactgtgaagggctaccaagcacaatcagcaaaaggaaaaggcacagggagcaaagtttgggtaagtcccggaacaggctttgaagggtcctcccctagtgggatcacgtgagaggcacttaatgcccttagtaaggagttgtgataatacatgtgagattttggcaaccaattgaagctcattanagactca

SEQ ID NO: 29100 - DNA, 444 bp, Homo sapiens
  misc_feature (1)...(444): n = a,t,c or g
gccacatcgagcagggcggcctggtcaagccagagagagacgacacggagttccagcacccatgcttcctgcgtggccaggagcagctccttgagaacatcaagaggaaagtgaccagtgtgtccaccctgaagagtgaagacataaagatccgccaggacagcgtcaccaagctgctgacggacgtgcagctgatgaaggggaagcaggagtgcatggactccaagctcctggccatgaagcatgagaatgaggctctgtggcggaaggtggccagccttcggcagaagcatgcccagcaacagaaagtcgtcaacaagctcattcagttcctgatctcactggtgcagtcaaaccggatcctgggggtgaagagaaagatccccctgangctgaacgacaagtgggtnaanacatttcatggnccnaaataanccgnggggt

SEQ ID NO: 29101 - DNA, 440 bp, Homo sapiens
  misc_feature (1)...(440): n = a,t,c or g
gggagagaagatgctaagttacattttgcagttgtaaaaaaaaaatctaccagtactggtctaaaccagtaaaactcagctggtctagtctgaaaaaatattttggaggccagaatcatagaatcattgaatatttaaagctggactatgactttagatagagatcagccagcattctgacttcttcatttctcaagtgagaaagctgtggttgaaacagattcagtaacttacgcaagtttatattctctgtcaagtgacccagctgggatttaaacaggccttttgactctaattctagtattcctcccatgtgcagtattttattttatattgcacaatagataaaatataattttggnttctccttttttattctaaaagagtaaaagcngttatctcaatatggnatggtcattntagngnngcnttnctatcat

SEQ ID NO: 29102 - DNA, 436 bp, Homo sapiens
  misc_feature (1)...(436): n = a,t,c or g
gctgtggttgtcggagaagctgcgcgaggtttaccgcaagggacgggtgttcgccaatgccccagactcggcctgcgtgatcggcctgaagaagaaggcggtggccttcagccccgtcactgagctcaagaaagacactgatttcgagcaccgcatgccacgggagcagtggtggctgagcctgcggctcatgctgaagatgctggcacaataccgcatcagtatggccgcctacgtgtcaggggagctggagcacgtgacccgccgcaccctgagcatggacaagggcttctgaggccagccatgcccacgcccctccccagcccccacccatgccagcgcagcgccagggctcaaatggggcctgggctgttgtgtctggagcctgcaagcaggtgggggctgtgncctggtannccatacctgggtnttactg

SEQ ID NO: 29103 - DNA, 438 bp, Homo sapiens
  misc_feature (1)...(438): n = a,t,c or g
gcggcacgaggtaaatacagtggataatttagaaaaaaagttgtgtttactctggcagggggagagagagggagggaatgtaggagccaaggcaaaaaaagagaacaaaaaattttatttataaaaatcatgtatatgaccacatttatgtaaaattagatacagataaataatataaaatacttaaaaaataatacctactccaaaagattgttatgaagattaaatgagatataacannnnnnnnnnnnnnnnnnnnnnnnnnnnnnnnnnnnnnnnnnnnnnnnnnnnnnnnnnnnnnnnnnnnnnnnnnnnnnnnnnnnnnnacaacacgtgaaaagcacagtgcctgcttcagaaggagtagactgtggtaggaaatcnaaaatcttgccttgtacttgntttctggaanccaanttgatagntttaagagaa

SEQ ID NO: 29104 - DNA, 444 bp, Homo sapiens
  misc_feature (1)...(444): n = a,t,c or g
gaattatgtctaggaggaaacggtgagcctggatgggttttttaggggggaggctggcaggggcatggagccaggaaacagccttcgccccccagagcaccaggtaccctgagaaaagtgagaagagagattgcagcccaggtccctgcagaggaggatgggctcctttcccaggaaggactggctgagtggactgtctccagggcacaggacaacgttgagggcctgaggcctccaccttcttgaagagggaccatgtgaatttcctgacagagaacggggatgggtttctgaaagcaccacccagctgagcctgcggaaactgcacagctgtttccaggccaggctggctgcatggaggacgtgagaggaacagccagctgtgtgtgctgggcccctgatcaaggngctcaagaccccgagccctntnaggatgtgcccaag

SEQ ID NO: 29105 - DNA, 444 bp, Homo sapiens
  misc_feature (1)...(444): n = a,t,c or g
gnnnnnnnnnnnnnnnnnnnnnnnnnnnnnnnnnnnnnnnnnnnnnnnnnnnnnnnnnnnnnnnnnnnnnnnnnnnnnnnnnnnnnnnnnnnnnnnnnnnnnnnnnnnnnnnnnnnnnnnnnnnnnnnnnnnnnnnnnnnnnnnnnnnnnnnnnnnnnnnnnnnnnnnnnnnnnnnnnnnnnnnnnnnnnnnnnnnnnnnnnnnnnnnnnnnnnnnnnnnnnnnnnnnnnnnnnnnnnnnnnnnnnnnnnnnnnnnnnnnnnnnnnnnnnnnnnnnnnnnnnnnnnnnnnnnncagccatgtactttcactggagcatccgcatgctgctttgcatatggatgtagccagttanaacttgttgacccaattgaattcnttaaacttgtgaactggattaattccgtcnttggttaaactgggggggttngtttacaatcccaaa

SEQ ID NO: 29106 - DNA, 466 bp, Homo sapiens
  misc_feature (1)...(466): n = a,t,c or g
gtggaaatggaattcagtaaaaggttgagagcgcatgaagtagtgtggttgtaggtggcatcttgaataaagtcagctgttgtgcatgcaccccagcacacactggggaatgcacagacacattcactcacacacaatatctcccttaatcgtctgaagaattctgggaaaagcgactggggtctttatttcagcgatgaggacagagaggctcagagaccacagagcttgccccaaagcccatatgaacattcatggtggagccccaagtcacattctgatgtgtctggctctgaagcccttacttgctctacataaaaaagtattcattaaaatgagaagcaggctctgggtatattggattttcataatggggaaaaagatgcattcattgctcaaaacatgggcgcaggagttctaagaatttttttcttaaaattaatgaaatagtgatgnaaaatatttg

SEQ ID NO: 29107 - DNA, 447 bp, Homo sapiens
  misc_feature (1)...(447): n = a,t,c or g
ggcctaaccgtctgtaacatttacatgggaaatgtttttgccatgggaaatgcattgagtattccaacaaattcatttactgataaacttttgaacctccttccttgttaaagttggtgactaatatttgatgcttttttaggttgagattattttatatatttaattatattttgccatgcaaaacatccaaataaatgtttagattgtgttcttgttcttttggaagctatatttcttcaaaacaaattattaaatagttttggaatgtgggatgttataattgcttattagtgacatcatccatccatggcccagtaaacacaacattctctctctttttttttttccaaatnattgggttcatagcaattctcgtaactttaccaaaaanangcttctnataacccttaccaaaatatactccccaaattcagnctaaagggt

SEQ ID NO: 29108 - DNA, 440 bp, Homo sapiens
  misc_feature (1)...(440): n = a,t,c or g
gctggagaacctgtgcctgcatggagtgaacttaatatagngcacaacacgggccaatgaacacagaattctggtggacctactatgcctgggatttcagtgagactcaaacagtactcctgtctagcctgctgccaatggaccccctgtattcaccatcataaagattcaatattcaagaccacgaagaagaacccagaccagggattgcttcatttggattccacctaccgcagttgttacatctaagtagggacaacgaaaatctcctgctatggtcttgatcctagtcagtaaaagagcaaattccaagcctcctaaggggcattttcatccttccccatctgtccttacagataaggaagagattccaggaatgactcggtcctggacctagaattagtccccctggttctttactatccaanccggcttaggga

SEQ ID NO: 29109 - DNA, 453 bp, Homo sapiens
  misc_feature (1)...(453): n = a,t,c or g
gatataaagtggttttttattaatgaaacatttcattgcattaagggtagaaataaacatgtcaagaaccgcatgaagtgaaccaactgtataagctacatgaagagcattctggtcagtattcttgttaacaggcacaagcaatttagtgataatgtccagagggccaaggatgcggaccaccttttgcagaactcatatctcgagcagtttaaattaaaaattagcctcccttaagttaaaaaccccaataggggttagtcgtgtagtgcttgttccacttgaccattagtgatctttctagaacatgaggaaatcaagtctggttagaaaagcctggagctaaaagtggcaaagcccatttcctgcctgtgctcaactcctaattttccctgagagaagtgagttaagctctctgncttgggttcttcctctctaagttgaggacatggg

SEQ ID NO: 29110 - DNA, 453 bp, Homo sapiens
  misc_feature (1)...(453): n = a,t,c or g
gtttcaaatgatgggtaaaaagatatttcagcattgatccctctttctttcccttttgaatcattggatggctctctcacatggttggaggttggggtatagtgaggatgtcagtacagattacttagcaatgaaatgtatttttagggtgcatcatgagttatatacatgctatagccttagtgaattttttctcactatagagtggtgacaattcaatgtgtgatatctaaggaacatgaacaatgtgagtggttttctctaactagtactgtgatgaccactaagctaacataatttggatttctactcagtacccagcggtgctaagtgctttatatgtgttatctaatttaaatctcaggctgggtgtgnnggttcacacttgncatcccanccctttggaaggctnagccggaaggaattgcttganctcngaaatnnaaactaccc

SEQ ID NO: 29111 - DNA, 433 bp, Homo sapiens
  misc_feature (1)...(433): n = a,t,c or g
gcaaagtgctgggattacatnatcaagttactttagataagtggaaactcagccctcctatatctgaaagtgtcaagatgttactttgtttcattatatactatatatagtacagctatttggcagttttgttatttattgcctgcccagagcctctgtcctattttttcattttatttctgtctggtatacagaggcattcttgttattagtattattgtttccatttaatcataacaggtttttttgtgcctgcttgtgaaattttcataaattacttttaacgctattcttagttatttgtgtacattttcatcaatgtgattctgtgatttaaagtgggaaaaaaaatctccaaaccgcacagcctcttcccattcattaaagcctgactttattgaaaccnaagaagactgcagctgngaccccctgg

SEQ ID NO: 29112 - DNA, 435 bp, Homo sapiens
  misc_feature (1)...(435): n = a,t,c or g
ggcnnnnnnnnnnnnnnnnnnnnnnnnnnnnnnnnnnnnnnnnnnnnnnnnnnnnnnnnnnnnncacacacacaaatatcctgcatgatttcacttatatgcatactaagaaaatgtcaaactcatggtaacagagtaaaatagtgcttaccagggcctgggagttgggggaaaagaaaaaatgtttgtcagaaagtacaaactttcagttannnnnnnnnnnnnnnnnnnnnnnnnnnnnnnnnnnnnnnnnnnnnnnnnnnnnnnnnnnnnnnnnnnnnnnnnnnnnnnnnnnnnnnnnnnnnnnnnnnnnncaccacacaaacacaaataaaaaggtaaccaggtgaggtgatgaatatgttagcttgattgnggtaatcatcacttccaatgnatatgtatatcaaaatacacactggcccttactatatc

SEQ ID NO: 29113 - DNA, 479 bp, Homo sapiens
  misc_feature (1)...(479): n = a,t,c or g
gcggcacgaggttacacctcttctcaggtttctggtgtggccctcaatttttgtggtttagtacatataaggtccaggagcagttataacttatgtgcacagctttgggagttgtggtattctgatagtaagctgttgaactctagtccataagaagaaacaagatgaaaaatgcttggtgggcaacatagaagtactgacttttcttcatgttctgccatcattcaagtagatttctgtttctttaatttaacatttctttttaccttaagaggtgtaaaggagaatgtatattttaccagcattatcctctattattataaagaaaaacagaagcatgtatgtgtttttgtgcagggttagacaggagagaccctgtacaaaagagagagagagagagaatttacgtggaagccaaggaatgtgagaaaaatggacnttcatagngaaaagtttttggatgaatatattatctatac

SEQ ID NO: 29114 - DNA, 474 bp, Homo sapiens
  misc_feature (1)...(474): n = a,t,c or g
gaaaataaaaaaataaaaatctattttaaaggagaggaagtttagaaaactagctgggctagtatcacccaaggagataattttggagatgctggggctagaatcttagttactgactcatcatagcactctggaaacctctgcctttcctcaaaataccttcctttccccaggctactatcagaatcgtctccttaaaactaaatttttttatgagtgtgtggatgagtggattaaaaaaaaaaacctgcatttctttaccttaaatctttgagccctattataccacaggataggtgttatcaaccagtgtaaatgattttcagatattttcttganaaaggagtaattaaaacttttcctttcatgctccctatgggccttgcatgtccttaaagccggggttctnttgaagaaagggccnttgnttatgngccccaccntttggcccatgcctgggtgaaacagtnccaa

SEQ ID NO: 29115 - DNA, 474 bp, Homo sapiens
  misc_feature (1)...(474): n = a,t,c or g
gtttttttttttccactgaacattttatattaaagatcttttttcaaattattggaaaacattatcaggatttcaatggctatatatttttctgttatgaagatataccaaaattttatttcctaactacgggtatctaaatagctcctaccatttggaagtaatctttccaaaaagaatatatgatacccattattaaccaaaggtgtgcatgtaagttctcacttgaccttccttgttaatattgaaacagttttttatcttcttaaaaaaatgaggaatttaattgttgatgtaatttctatataatatacatattttttatatataatncntaaaangngngggggtatatgcncatntgacntggaaaatgctccttttaaaaggattactttactcanacctggtatttcctgggcttntgaaaagaaagaggnctactancaaaatttactacttattcccaatggg

SEQ ID NO: 29116 - DNA, 472 bp, Homo sapiens
  misc_feature (1)...(472): n = a,t,c or g
gagtctattaaatgtacaccaagtaatgtaatacttaaaagagaaaacattttgtagatagagattctctacttacccgtttatacatccttttgtagaaagtttaacataaaagacaataaaaaaacagaaatgagatttatccagcataaagggttaatttttctttgaattgtattaatgtgtgttatttttattgttgctaagttttatgtagctatatggttcatatgtatatataattttatatatcaataagagtaaagacacgggtacaaattaagagttatatggttttacaagtatatgttaaccccttggcgctggcggtcacggtgcgtctcattgccggcaatggaagtgtgccgggaaatcccaactcccggcgtcaagggattaaaagcaataaaaacaataatttcactaaaatctttgggtacacttggnctttttnccccttccaaggtttaag

SEQ ID NO: 29117 - DNA, 405 bp, Homo sapiens
  misc_feature (1)...(405): n = a,t,c or g
gtccctaactcgctccccttccagcagccgtggatccatccatgctccgtcagtttttgagaatgccacataagtggaatcttaactttggagattgatctttttcactctctataatcttgagatccatccatctggtttgtgtattagtggttgattgctttttgttgccaattagtatatatgccattaaatggatggatggtagtttgtttactctctgaaagacatttgggttggtgtcagtttcttggctattacaaataaagctgctgcgaaaactgatgtacattttatgtgagaatgttttcatttcttgaggataaatacccaagggtatgactgctgagtcatatgctannttttaaaaanggggcaaantttncccntaggggnngaactttc

SEQ ID NO: 29118 - DNA, 471 bp, Homo sapiens
  misc_feature (1)...(471): n = a,t,c or g
gccttcattccagtctttcatactctggtgtcctgtcccctgcccaagtatttgtctctcttttttttttannnnnnnnnnnnnnnnnnnnnnnnnnnnnnnnnnnnnnnnnnnnnnnnnnnnnnnnnnnnnnnnnnnnnnnnnnnnnnnnnnnnnnnnnnnnnnnnnnnnnnnnnnnnnnnnnnnnnnnnnnnnnnnnnnnnnnnnnnnnnnnnnnnnnnnnnnnnnnnnnnnnnnnnnnnnnnnnnnnnnnnnnnnnnnnnnnnnnnnnnnnnnnnnnnnnnnnnnnnnnnnnnnnnnnnnnnnnnnnnnnnnnnnnnnnnnnnnnnnnnnnnnnnnnnnnnnnnattttngaatttttagtaaaaacagggtttgccatgttggccaggntgtttcnaactcctggccnnatgggancttttcgccntggcctngnaacgggctgggattacaggcgngagccccatc

SEQ ID NO: 29119 - DNA, 528 bp, Homo sapiens
  misc_feature (1)...(528): n = a,t,c or g
atttnananccctattacatgaccactaatntantacgactcactatagggaatnnnnncctnnangccaacanttcggcncgagcaattctggaaaaatgtggctccggattatgagtatttagggngnttganggctttcttcccccaaggactgtgatttaccctctcagcatatatccaggggtgatagtcaaaatattaacatcctcaaaaattctgaccagaagctccctgtgctgaaaatttccaaggtggggagctttggcaagtgatattngggcaggttgaggtggggcggngggactcaaanaaatagttgattaactacagatatgtaagtatttccgtgttgtaacagctagtgtggctgagaacagccagtgacatgtcagattaccgaataaaaccacaaaagtggggtantttatgggctccaggtttgaacatgggctctaccactgaggacctgtgtgattattctggttaacctcttgntgcctcagtttcctcactggtaaaatgacc

SEQ ID NO: 29120 - DNA, 441 bp, Homo sapiens
  misc_feature (1)...(441): n = a,t,c or g
gcagctttaaaaagcacggaacagaggtcagagctgggtaggagggtgatcnnggctggccanagtccctggaagtgtgggctgtggttttattaatttatggagcatatttgaccccttgttaaaaggccttcctggagattccaggagctccctgtgaaattagtccaggctgggccttggtgatcatcccggtgggtctgggatttgttcctctgtggctactggcagcagccaagcaaacttgcagctgtcctgccaaactcccattcaggggacctgggcccacctctttcctgtcttctagtgacactcatcgaggagcttcactgtgcgggacaggccaaggtggtccggaagctgcaggggaagcggctgggccagctccagcctctgcccagaccttaaagcctggcgctgcttcagctggacggnacttcc

SEQ ID NO: 29121 - DNA, 506 bp, Homo sapiens
  misc_feature (1)...(506): n = a,t,c or g
gttattgaccactgtngaactncatngnaaatcnccgnnnnnnnnnnnnnnnnnnnnnnnnnnnnnnnnnnnnnnnnnnnnnnnnnnnnnnnnnnnnnnnnnnnnnnnnnnnnnnnnnnnnnnnnnnnnnnnnnnnnnnnnnnnnnnnnnnnnnnnnnnnnnnnnnnnnnnnnnnnnnnnnnnnnnnnnnnnnnnnnnnnnnnnnnnnnnnnnnnnnnnnnnnnnnnnnnnnnnnnnnnnnnnnnnnnnnnnnnnnnnnnnnnnnnnnnnnnnnnnnnnnnnnnnnnnnnnnnnnnnnnnnnnnnnnnnnnnnnnnnnnnnnnnnnnnnnnnnnnnnnnnnnnnnnnnnnnnnnnnnnnnnnnnnnnnnnnnnnnnnnnnnnnnnnnnnnnnnnnnnnnnnnnnnnnnnnnnnnnnnnnnnnnnnnnnnnnnnnnnnnnnnnnnnnnnnnnnnnnnnangggattaaccatgaaagaacatgtgagnaaangnnntnnaaangcca

SEQ ID NO: 29122 - DNA, 438 bp, Homo sapiens
  misc_feature (1)...(438): n = a,t,c or g
ggcgtggctggggtggcgggcagtgtgtgtnngatcaaagngggaaccgtttcagaaaccctcccaatctgtggggacaggtccttgcctcactggatgggcaagctctgggagcttgcagtgacttctctcctgcctgccacagggtatggtggcttgaaacacatgttccctggcgggcacagaggcccacgcccaggtcacctcatgcccacctccacttccagggcaagtatatcctgaccccgagccccatcacctacngggaggagcagctgctgcacttcctggggcagctgntggggattgcaattcgggcagacgtcccgctgcccctggacctcctgccctccttctggaagacgctggtgggcgagcccttggaccctgagcaagacctgcaggaagcggatatcctccctacaattacgtcaagaa

SEQ ID NO: 29123 - DNA, 97 bp, Homo sapiens
gcacattttactggaaaattattttattcatatgtaatttaattatacagagttttacaaagtagtttctatcgttattatgatttttttttttttt

SEQ ID NO: 29124 - DNA, 411 bp, Homo sapiens
  misc_feature (1)...(411): n = a,t,c or g
gcggcacgagaggtaatcgtgcgcaaaaagggagacgggaacggaggacctgttgggaacggctaattagcaggatgctgtgggtgaggagtccagtgtgacattttggggattgagttaggtgaaagctagtgtttgggaagatggctcgggaaactgcttacactagagggaatcttgagagcgttctttgaaaaggaatcagaatttagttaaaggttggattgagaatgttaagatgcgcattggaacgtctggagttgagggttcatgttgaagtggtgtgaagtgagggaagatggaattttttttttttngtttnaaagggggggnctggntatgtngntcaaactantnttgaacnccngggctnaagcaattttcccccttggcncccnaagggnggggatt

SEQ ID NO: 29125 - DNA, 464 bp, Homo sapiens
  misc_feature (1)...(464): n = a,t,c or g
ggtgaatatcctttataccagaggtttttcaaaaaagttgacaacgccccctcattcattgagatgctgtttcccaagtaggctcccgggcttgtgccaagcacggggctcgcagtgctgaaggtaatggagacctggtctggccccgccggagctcagggctatgccctcatgtgcgtactgatgtggctggagagtgagggagtacgcaaaggcccttctgggtcatgcctgcggagctgccgccttacctttgggggagctgaaaaggctgcatggaagagtgacttaggaaccagcctgggcataattagggcacacagtgaggaccgcacagagcaggatcancgagttgtgtggnttggtgtgnctgctgnaggtggtggnacggaaggcangaaacagattttggncttgatnttanaaagacttgnaatgggcttnaaggctttnaacaaaaaaaa

SEQ ID NO: 29126 - DNA, 482 bp, Homo sapiens
  misc_feature (1)...(482): n = a,t,c or g
ggcaaaatcaacagagtttagttttgctttgctttggaaggccaagccaacgatatatatgtgcgaggaattctctcctttcttaggaagaaaaagcaagaacagtggatatgaccctacgttcctggatgtagaaatcaaatagcctaggaaatcagggatacgggctctgcactgttcagggagagctctccctattttttgagacgctaaaaagtaaggtaaaaagtatatgtgatgacctgtagtgatgtggaaaagagctaaaaagggtaaaactccattaaaaattcccgtnnnnnnnnnnnnnnnnnnnnnnnnnnnnnnnnnnnnnnnnnnnnnnnnnnnnnnnnnnnnnnnnnnnnnnnnnnnnnnnnnnnnnnnnnnnnnnnnnnnnnnnnnnnnnnnnnnnggtttttttaaaatccaaaattnaccccgnattggggggcaantncctggaaaccccntaatttgggggg

SEQ ID NO: 29127 - DNA, 456 bp, Homo sapiens
  misc_feature (1)...(456): n = a,t,c or g
gcctagtttanaaactctaccccatctttattaccttgaatgtttggaaccccactttttaccttcatgggttgcagaaaaatcagaacagatgtccccatccatgcgattgccccaccatctactaatgaaaaattgttctttttttcatctttcccctgcacttatgttactattctctgctcccagccttcatccttttctaaaaaggagcaaattctcactctaggctttatcgtgtttactttttcattacactngactngatattctantnatctatacaaacaccaangggtnccatctttctgggctcctgattgctcaagcacagtttggcctgatgaanaggatttcaantacacaatactatcattgccaggactatgacctnaggcactctaaacatatgttttgtttggannccacagtgtttcaaaangggnccccntttta

SEQ ID NO: 29128 - DNA, 477 bp, Homo sapiens
  misc_feature (1)...(477): n = a,t,c or g
gttccagaaaaagaccaacagtattcttttccaaagcaagcctcacacttaactcctccttgccttctataatgttgtcattttgagacaaagtgatggatgggtggtcctaactaggatttggtcctgcctctgacaaaattaactagtcaagaacagctagagaagagtaacaaaagaaagaaaccactttatataaaacaaggtgatgtttgtcataattatctctaggcaagttctaaatacaaactcctggtgattttagaagtcaattacagagtgacaacatggtcgctcagattactctcaatctgttaactaagtatgtgaccggatgcacccagcctccttgataaaaccatgggctggccatatgacctgaaagacanatgantggtgcttaaactgtcttgagttaggaanccttttttganaatttgnggggttaanagntttccccnaattttccaaaagggc

SEQ ID NO: 29129 - DNA, 460 bp, Homo sapiens
  misc_feature (1)...(460): n = a,t,c or g
gggagacgccgccgccttcatgctgccggctttctgctcgcgccggntggaggccgagctgcagggcgccctggacgcctgcgcacagcgacaattgcaattggagcagagcctgcgcgtttgccgtcggctgctgcatgcctgggaaccaactgggacccgggctttgaagccacctccagggccagaaactaatggagaggacccccttccagcatgcacacccagtccacaagacctcaaagagttggagtttctgacccaggcactgnanaangctgtacgagttctaagaggcatcactaaggccggagagagagacaaggcccccagcctgaaatctaggtccattgcacctcttctggcacnacagcctccgccccaccgcattccccaggccaagntggngcnatnnttaaacncgagaccncccanggntntttnncaaacactntgtttt

SEQ ID NO: 29130 - DNA, 479 bp, Homo sapiens
  misc_feature (1)...(479): n = a,t,c or g
gcagctttcactgtcaggcacaaacttcttggctgactgaaagagcaacgtgttagtctctataagtggagtggactggtgtctgaggtgagtatagcccacttggatacagatgcccagtatttggttacctgccctggggagaggactggtttctccctggtgtatagactcataggctggctacagacatatatacacacacacccaactactgatttgccttgggagtacactgtgcttacttaatattgtacaagctggtgaccagattaccttatgagaaggcacatgatgtagagtgtaaaatccactagatttgaatttagaagacacagattctacttccaactctggtttgccctgagtgngaaccttaaaagggtcatttcattagcnngacttntgtttgaggataaaggcnttagggntncaaaatttcagagttaaacgttanaaatttccaaggtgggaggggg

SEQ ID NO: 29131 - DNA, 479 bp, Homo sapiens
  misc_feature (1)...(479): n = a,t,c or g
gggaaatgcctgagggacttcaagaagcaggatggcatgagctgagttaggcttttaaaagtcactctggctgctaaatacagaatgatttgaagggggcagtcagagaagtaggaatatcaggagtggtggtctgattactctgagatgtgtcttgattctattttgttttctttgaaataccttgtctcctagtttttcatagcttttgtagttatctacacttacaatgcccaacaagctgaatacagtctccctaccctttaataaattagtgtagctttttagtgcagttgttgaaaaacaaaatgtgagataaaatgaaataaatgtttaattttactctaaggncatattcattcccattccccattacccttaggaatcnnaaattttaanaancncttgcggaaaaattggnctttaaaaattttacattggccgggngcgggggtancccctgaaatccccccttttgg

SEQ ID NO: 29132 - DNA, 453 bp, Homo sapiens
  misc_feature (1)...(453): n = a,t,c or g
ggtgaattctgcactttggtttctaggcaacttgcacacattttaaatctgaatataaacacatacacacccccaaaacagaatgaaacaataaaaagcctaatgatataaaccatgtttgccacaagtctcagtaactatagcaaacaaatccaggccactacctggctaagtagagatgttggtggttagacctaggaaataaagacaaagcagctataaataacttcttttgttgcacagtgataatgtctctacaacgcaagcacatcaggtgtgctctgcctccaaggtgccctgcaagagaaggcatctcctcaagggaacgagtcttgttaagggagatttcatttcttttcctgttcttttaattagtcttacattaagattcttagaagttgnacatcttcttattgctagcagcaagctcggtaagtccaggttacttntaag

SEQ ID NO: 29133 - DNA, 410 bp, Homo sapiens
  misc_feature (1)...(410): n = a,t,c or g
ggtaacaaaacaaaaaagaagggagagaggaagaggaaaatacaaagaactccttgttgcttaggcaatatgtagaagtcaaatagtattatttaaagttgacaaaccaagtatatgaagtgtaagtaaggaaaaagggagatttagagcattaaaggtgtactatactattaatagtatagaatacatagtataattactagaataaaaatgtaaatcatcaatgctcaaagaagcaataataaagattacagtgaaaaacatgcagtaaatgtaccatcatacagtaaatatattaagtccaagcatataagttaaatcagtacatgtgaaaggacttacctattaaaaggaatatcagattggcttcaaccatggggttattggctngnnatttnttaaaaaaaccc

SEQ ID NO: 29134 - DNA, 408 bp, Homo sapiens
  misc_feature (1)...(408): n = a,t,c or g
gccttaatctacgtcccacaccctggaatttatcactgaaacattgtgactccaaaatctgaacttctcctgaatagagtagcccnnnnnnnnnnnnnnnnnnnnnnnnnnnnnnnnnnnnnnnnnnnnnnnnnnnnnnnnnnnnnnnnnnnnnnnnnnnnnnnnnnnnnnnnnnnnnnnnnnnnnnnnnnnnnnnnnnnnnnnnnnnnnnnnnnnnnnnnnnnnnnnnnnnnnnnnnnnnnnnnnnnnnnnnnnnnnnnnnnnnnnnnnnnnnnnnnnnnnnnnnnnnnnnnnnnnnnnnnnnnnnnnnnnnnnnnnnnnnnnnnnnnnnnnnnnnnnnnnnnnnnnnnnnnnnnnnnnnnnnnnnnnnnnnnnnnnnnnnnnnnnnnnnnnnnnnnnnttagaacc

SEQ ID NO: 29135 - DNA, 426 bp, Homo sapiens
  misc_feature (1)...(426): n = a,t,c or g
gtataagacccacacaaatatgcccaactgatattggacaaaagagcaaagcgtctcaatgaaggaagagcagcctcttcaacaaacgacgcgggagtcattgcacatccataggcaataaataaataaataaacctcgaccctaggaaaataacaggagaaaaccttcaggatcnnnnnnnnnnnnnnnnnnnnnnnnnnnnnnnnnnnnnnnnnnnnnnnnnaggtgggcaaatcacgaaggtcaggagatcaagaatcattctggntaacacagtggaancccgggttttattaaaatncaaaaaattacccggccgtgggggnggccccttgtagtcccagtantcggaaggcttagcnngaaaaatggggngnaatttggaaggcggagtttnccatgggcccaaaatcgnccccttgcct

SEQ ID NO: 29136 - DNA, 421 bp, Homo sapiens
  misc_feature (1)...(421): n = a,t,c or g
gccccctgcacaccaccccagagacatccgttaaggagatcgatgagttggttgaggtctacacggacgtgaaacaccgctggaaggcggagaatttcattttcatgggtgacttcaatgccggctgcagctacgtccccaagaaggcctggaagaacatccgcttgaggactgaccccaggtttgtttggctgatcggggaccaagaggacaccacggtgaagaagagcaccaactgtgcatatgacaggattgtgcttagaggacaagaantcgtcagttctgttggtcccaagtcaaacagnggtttttgactttccagaaagcttacaagcttgcttgaaaaggangccctggattgtcanccgaacacttttccagttgaatttaaactacnagntttaangggctttnnccaaca

SEQ ID NO: 29137 - DNA, 411 bp, Homo sapiens
gcaacaaccccctgggcaaggtgttctccagggaagagctggagctggtggccagcctttgccagcagcatgacgtggtgtgtatcactgatgaagtctaccagtggatggtctacgacgggcaccagcacatcagcattgccagcctccctggcatgtgggaacggaccctgaccatcggcagcgccggcaagaccttcagcgccactggctggaaggtgggctgggtcctgggtccagatcacatcatgaagcacctgcggaccgtgcaccagaactccgcttccactgcccacgcagagccaggctgcagtagcccgagagctttgaacgggagcagctgctctttcggcaacccaagcagctacttttgtgcagttcccgaagccatgcagcgcttgccgtgacaca

SEQ ID NO: 29138 - DNA, 398 bp, Homo sapiens
  misc_feature (1)...(398): n = a,t,c or g
ggtggagctgcctgtacgcgcggccctagtcggctcctcaacgtggagcgatgggaggccttgagaagaagaagtatgaacgaggctcggccaccaactacatcacccggaacaaagcccggaagaagctccagctgagcttggctgactttaggcggctgtgcattctgaagggcatttatccccatgaacccaaacacaagaagaaggttaacaagggttctacagcagcccgaacgttttaccttatcaaagacatnaggtttctcctccacgaacccattgtcaacaagttccgtgaatacaaggtgttcgtccggaagctccggaaggcttatggggaagaagcgagtggaacactgtatagcgtttaaaggacaataagcccactacaaact

SEQ ID NO: 29139 - DNA, 395 bp, Homo sapiens
gcaaagaaagtctcacagattcgcatccggaaaaccattcctaggccagatcctaatcttacccccatgggccttcctcgacccaaaaggtgagctccttctctgttacaagctaggttcacttttttggaaaattgtttgtcataatataattgccctttaaatggtcctacactctgagccatttattacatttctaggaatttatcctaaagaattaattagtaatgtcgctagatatttataagcaaggacattttaatacattgcctacataatcttagtaaaccctccaaatgaacctgtgttaggtcgtagcattgatgctggcacatgtgatttctgtgtgtcacaggatttacccaaccccagagctcaagctcctaaatactctg

SEQ ID NO: 29140 - DNA, 402 bp, Homo sapiens
gcggcacgagcaaaattaagaatttggcagacagctcagttagacgatcaccaaggtccttctcatttctaaagttatttgaagctgctgttttcattagtccttaagtatatgttgctaccatataatttggccacaaaaatgtttagatatgtgtcaaagtcctcagggcttcctgacagaagtgcttcttgactgattgtgtatttggtacaagggcttctttggtgatagtttctactctctttaaatactgttctgttatttttgaaatctgatcaagaattgacacaataaatctctttgatatttatacttatgcctacttttaaccttttaggaaaactttatgaattggaatattctaaaatcctgaaataatttggaatattctaaaattcg

SEQ ID NO: 29141 - DNA, 270 bp, Homo sapiens
  misc_feature (1)...(270): n = a,t,c or g
gcagagatgtcactgaacctggagctggaagagatgtgcacgacttgaaaagatgtacaaaatttggnnnnnnnnnnnnnnnnnnnnnnnnnnnnnnnnnnnnnnnnnnnnnnnnnnnnnnnnnnnnnnnnnnnnnnnnnnnnnnnnnnnnnnnnnnnnnnnnnnnnnnnnnnnnnnnnnnnnnnnnnnnnnnnnnnnnnnnnnnnnnnnnnnnnnnnnnnnnnnnnnnnnnnnnnnnnnnnnnnnnnnnnnnnnnnnnnnnnnnnnnnn

SEQ ID NO: 29142 - DNA, 409 bp, Homo sapiens
  misc_feature (1)...(409): n = a,t,c or g
gaagaaccatgtccggccggattgttaactcaatataaagaactttctgatagttggaactgacccaagaggggatggggcagaagggactgaagtctgagacaagaggttgggctgcatgacttcaggttacttccaaccttaaatgaggagcctatgagacagggaggcattagcagggaaattaagtcataatctgattccaccttagctccgattcacagctgaacaagacctactggtgccggggagcctggctccttgaaggtcctcccagcatccccctctgccaaggtcacattctgccaggctgggcttctcatttacttggtagcctgtggatcttctagttgccaaagagcagtgatggttccccatgctatatcgaaaccntttncagcntgntggg

SEQ ID NO: 29143 - DNA, 420 bp, Homo sapiens
  misc_feature (1)...(420): n = a,t,c or g
gaaatctggaggccagaagtacaaaacgaatatgggagctaaaatcaaggtgttagcagggctgcttcctaatggagctaggttctaggggaaaatctgttttcttgcctcttccagtttccagaggttgcccacattccttagctcgtgtctacatcacatcggtctctgcttcatggtcacctaattgtctcctcactttgactttcctgtctctgtcttatgaggatgggccctagtgagtagatcaggctcagtcgagnnnnnnnnnnnnnnnnnnnnnnnnnnnnnnnnnnnnnnnnnnnnnnnnnnnnnnnnnnnnnnnttnnnnnnnnnnnnnnnnnnnnnnnnnnnnnnnnnnnnnnnnnnnnnnnnnnnnnnnnnnnnnnnnnntggggccattattcacatanacatttg

SEQ ID NO: 29144 - DNA, 416 bp, Homo sapiens
  misc_feature (1)...(416): n = a,t,c or g
ggaaactaagtctctttccctgggaccgtgtccaattcctggaggccttggagcacgaaggtgtcacagacagagccctctgctcttggttgttagttgggtacgctgattcacagaggtgatatactctggatttcaagcatgtgtccacacacttcacttctacacccttgcttgtcctggcagcaaagtagcaccagggatgccagcaggctggggcatgtctgtgccactctcaggcagtgggaagcattctgctcacccccctaccannnnnnnnnnnnnnnnnnnnnnnnnnnnnnnnnnnnnnnnnnnnnnnnctggggatgctctgaggctgtcttggactcatctgcccagccgcagctcagcagaccctntgaccgnctgagcatttctcctntgccttctgctca

SEQ ID NO: 29145 - DNA, 416 bp, Homo sapiens
ggtgacaaacaggaagtcctttgaacacatccaagactggcaccaggaggtcatggccactcagggcccggacaaggtcatcttcctgctggttggccacaagagtgacctgcagagcacccgctgtgtctcagcccaggaggccgaggagctagctgcctccctgggcatggccttcgtggagacctcggttaaaaacaactgcaatgtggacctggcctttgacaccctcgctgatgctatccagcaggccctgcagcagggggacatcaagctagaagagggctgggggggtgtccggctcatccacaagacccaaatccccaggtcccccagcaggaagcagcactcaggcccatgccagtgttgactctaggagagaaagggttaaagcagtcccagccttacccacctgg

SEQ ID NO: 29146 - DNA, 421 bp, Homo sapiens
  misc_feature (1)...(421): n = a,t,c or g
gacaggaaccaggactgaaaataatcattaggccccccaaacacacacacattttaatgagaacttggcccaggtgattgtgcctctcttggctcagtactgtggctataggcagggagttcagcagggagaaatacacagaggcagacagagacgtaccctatatgggcatcaggaaagctagcagacccaagggcctggagccgacttcccaatcattcataaagatgggatttccctcaggccaagtatgctgtgggtagtagtcagatggtctgggttcaaaccctccctacagtattagatcttgtttgcctttctgagcctcagttttctcatctgtaaaataggaatataatattacctgtctcacaaggntattgggacgattaaatgaganaatggncttaanggggntaac

SEQ ID NO: 29147 - DNA, 405 bp, Homo sapiens
  misc_feature (1)...(405): n = a,t,c or g
ggaagtgtgtgtgtgttggagggagtgttggtggggagaagaggggtaaagagaagatgatactagtaaaataatctagttttgtaggttgggatgatcactggaattttttaggggaaatattctcaaaaaaagttgtaagagctacttttgtatgggttatcagtttggtgattcatactatagtaattgcattgtttaatatgcattgtatttcgattaattcatgcatgctgatttctgtggtaacaaatgtgaaaagtttggctgatggcttaagtggacattttcttaagaactctttaagtggtgcctgttgggataaactatgccaagccattttctgaatcttcatgaacaatgagctntntatcntatatcttaancagtttttttaanangagc

SEQ ID NO: 29148 - DNA, 423 bp, Homo sapiens
  misc_feature (1)...(423): n = a,t,c or g
gagcgggcacaagtgaccaaagccaatggtgaggaccaccttgggggctggagagcacagcaggcagagcagggctgaggcgccatgaggccatcaccaccatgcaagggaggagcagccagcagctctcctgggtggcccaccggctcctgccggccagagcgcatgagcactgaccttcctcgtggggaaggtctgcagacccgtgtgaacatggcagaggccacactccagctcccacccacataaacctttgcaaccacttcactacctctcactgggtctcgtgggcttgggacagcaacggttctgtttagtcagctggtgcaggtggttggcccaccgatgagaactcaaatagcacggatttcctggatganctaccacgtggngcttnttaaggttttgctttnggaaggctgg

SEQ ID NO: 29149 - DNA, 449 bp, Homo sapiens
  misc_feature (1)...(449): n = a,t,c or g
gggctctgaagcttctctagaagtagagccctcagaaagaaaaaaaacaacaacaaactgggctacaattagagagctgtgtgtgttctaatctgccatcagcaagcagaaagaccttaaacaaatcagttagcctctcgtgtctccttcataaattgaggttgggggccaaatgacctttaagattctttccagctttaatcttatgactctatgctatcttattggccaaggagagaagggataggggaagcgaggaaaggaggaaggaagagtggtctcagaagggaaaaaaggaggtccatgaggaacaggtgccagaaggaagagcaagtcacatcctggagttggctgttaagatgcaggctgccctgtagcctgtagcaagacgggataaaaaggcccctaccatccctataatttcnctttganaagggcaattgcaaata

SEQ ID NO: 29150 - DNA, 405 bp, Homo sapiens
  misc_feature (1)...(405): n = a,t,c or g
gatccttgggaacgagagaaaaaagaaacccaaactcacgcgtgcagaagatctccccccccttcccctcccctcctccctcttttcccctccccaggagaaaaagacccccaagcagaaaaaagttcaccttggactcgtctttttcttgcaatattttttgggggggcaaaactttttgggggtgattttttttggcttttcttcctccttcatttttcttccaaaattgctgctggtgggtgaaaaaaaaatgccncanttgancggngtngnagggaatancntaggccccaacgnaaaanntgtttccnttaaaaacanaggcaaacntggngggaaaaannnnccnaaaanncncttggnnaaaaaagggnntttnntntnnggnnnaaanngnntttt

SEQ ID NO: 29151 - DNA, 429 bp, Homo sapiens
  misc_feature (1)...(429): n = a,t,c or g
gtgcaaaaatatggtattattgtccattttattgtgtaaagtagcctatgaagagttctgtcatgtttttgcatgtttcttaaataaatcccctttaaaaatgtaagtaaatattttacaacgttttgaaaactttttttttttttnaaaacggagtntcnnttttttngtnnnnnnnnnnnnnnnnnnnnnnnnnnnnnnnnnnnnnnnnnnnnnnnnnnnnnnnnnnnnnnnnnnnnnnnnnnnnnnnnnnnnnnnnnnnnnnnnnnnnnnnnnnnnnnnnnnnnnnnnnnnnnnnnnnnnnnnnnnnnnnnnnnnnnnnnnnnnnnnnnnnnnnnnnnnnnnnnnnnnnnnnnnnnnnnnnnnnnnnnnnnnnnnnnnnnnnnnnnnnnnnnnnnnnnnnnnngatacaggcgngacccccccccg

SEQ ID NO: 29152 - DNA, 448 bp, Homo sapiens
  misc_feature (1)...(448): n = a,t,c or g
ggcatctgagaatcacctggtggggagctttgacagttctcagcgctcaaacataccccaaatcaattgggcccaggcatgagtatttctgggagttcccaggtgctccccggatgcagccacgctgaagaaccaccgcactgagtaagttaccttccattttcctccttcacaaatgctctaggtttcaggcggcccctttgtgtggattctgggggccttctgtacacacagcactgttgagggtctcaggcctcactgctccgaacaggaaagactcgtgattagcacagggccctgtcaaggtgaacatatccttctcagtgcaggcctggctgaacccatccatcctcctttcttggcctccacaggagctacaatgatagctggttcctggaatcctcctntattcagaactactgaggncnatggnaccggcaagnaaaac

SEQ ID NO: 29153 - DNA, 412 bp, Homo sapiens
gctggtgataaatgctgcagattttgagatggctgaatcactgggaatgggagaatttggggagctttatggaggtggagcttcatgcaggccttgagggataggtaggagttggaagaatggttgggaagagggggaaaggtcagaaggtcaatcaggggagacagcttgcagcacagcgggttaactcagtctcaaaaatggcccttgacatataaaatagtaatattaatagttcaggagcccaggagagtacctgtggcatggccctgagtatttaaagaagaatactatataaagttttcatcctagttttaaaaatggatagattgacttttatgcttattaagcgagcgcagagttctcagtcatcattatttgtatcttttatgaccatagcttgaaaaagtgg

SEQ ID NO: 29154 - DNA, 398 bp, Homo sapiens
  misc_feature (1)...(398): n = a,t,c or g
gcaaagcagtaaactctattatgtgtgttttaggtctaaagtcagttttacaaattaaatttgctcagaatatgacttaaacttacaaatgtaaggtattattatgattgccattattaatagcaataatgactttcataaaagattgttactgagtaaagccatatgttattgttaatttaattgacatagcctgtgtgaatcacttttatgtgcaaaactaatactgtggtacactctgaaactccagtccaagcatattgaaatttttttttatatgtggggaaaggagcnatatnggctatgtataaagccatagcaangagacattgattggtgggaaatgagaaaatactgnggggaatgnggaaattttatgtgcccatttgcttgacccc

SEQ ID NO: 29155 - DNA, 416 bp, Homo sapiens
  misc_feature (1)...(416): n = a,t,c or g
ggtttttgaggtttattcgggctgcagaatgtgttattaattcatttctctttaattgttaaatggtattccattgtattgttacatcacattttatttatgcattcaccagttaatggatatttggctcttttcaacttttggctttttggataataccatgaatatgcatgtgtcttagttcatatttgnnnnnnnnnnnnnnnnnnnnnnnnnnnnnnnnnnnnnnnnnnnnnnnnnnnnnnnnnnnnnnnnnnnnnnnnnnnnnnnnnnnnnnnnnnnnnnnnnnnnnnnntctagtgaggacctcagattgcttctccttatggtggaaagcaaacgggagcagaatgtgagtagagatcatgtggtgagaatgaaaaaacccngttggnngaaaaggtgccatgcttttt

SEQ ID NO: 29156 - DNA, 404 bp, Homo sapiens
  misc_feature (1)...(404): n = a,t,c or g
ggtttatgggaatttttattttgcactatgatttctcagtgcacagtcattgctgagagaaagatggaataaatagtatcaggagttgagaaaggagtcaatgtttatattagctgctgagaggagtggaagaggaggcttactgtggatttgtgaagcaatcctggaccatacagtgaaagaagaaagattggaaatcccaatgcattgaatattatatgtactcctagttaatggagtgagagagaaagtatgatgataagttgtagtcagctgtgtgatttattgaaatgtancattttaaaggtggaacaatgttaggaattaaaacagctangacacggccaggaaagtgatttgnaagtnaagatcattgggtctggangtcatancaatacgtctga

SEQ ID NO: 29157 - DNA, 414 bp, Homo sapiens
  misc_feature (1)...(414): n = a,t,c or g
ggcaccatggatctgcagcttcaggttatattaatgcctgaaataggtggagaggcaggagcatataggagatcctaaataatagtttttcttcaagaagatttaaaaaataccaacttctggtgagagtgatatttcgtattccattgccttcacttactatcagtgtactgttaactcctcaaacatctgtctctgctgagaaaagtctcctaagttctagacccactggccaagtggatagctctcttgggatggcccattagcagctccatttcaccgtgtttaaaacggaactcctcttccctgcttgaacctgttctgnggtcccaagctctttcaattttagagtgaccagatatgacagttttttcactattagcctctttcactctcaaaattagtttggacaat

SEQ ID NO: 29158 - DNA, 438 bp, Homo sapiens
gggctgatgcagcagaagtacatgagaggaagggggaaatttgggaggaaaaggaaatcaactttgcagggtataggcaggttgggtgagtgtgaggaaaagctttacagtacaaaagacctttaagctgaatctgaatggataacagggggttggcaggtgaggtggggtgaggatattccagacagatagtaccatatccaaaagccagagccatggccaggtgcagtgactcttgcctgtaataccggggatttagaggctgaggcgggatgatcacttaaggccgtgagtttgagacgttgccatagtgagaatacatctcttaaaaaaaattttttttttaaattttttaattagtcgggcatggtggtgtgcacctctagtcctagctcttgggaagctgaaatgggagaatccttttccctaggagttcga

SEQ ID NO: 29159 - DNA, 437 bp, Homo sapiens
  misc_feature (1)...(437): n = a,t,c or g
ggtagtcactgatagatgtagatctatttatgccatctttttatatgttttatgtttgtcctacttcagttttttttttctttttaccccattctttggagttgatggaggattcctttcctttcccttccccttcattctttctctttttctttctttcttccctccctccctttccttcctcccctctctccttccctttcctcccctccttaccctccctccaccctctctcccttgctctctccctctgtccgccttccctccctctcnnnnnnnnnnnnnnnnnnnnnnnnnnnnnnnnnnnnnnnnnnnnnnnnnnnnnnnnnnnnnannnnnnnnnnnnnnnnnnnnnnnnnnnnnnnnnnnnnnnntgcctgcctnanctcctgagtagctaggacacagggngngngccaccatgcctggntaaaaat

SEQ ID NO: 29160 - DNA, 445 bp, Homo sapiens
  misc_feature (1)...(445): n = a,t,c or g
gatcacattttgaggtactagggggttaggatttcaacatggaaattttgggtatgcacaataatgtccatggcagcaatcgattgtagcatctctatgaaatggaacactatccagcaatataaaaggatgcctatacataatatggacaaatctcaaaagccttaagctcagtgaaagaagccagatgcagatgattacatgtagtatcattcaatttatgtaaaaatctagaaaaagaaaaatcagtggagcaagaaggccaaagagaaacattcatcaattttctccccacaggaacacgagctgaacaactactcatgcaagaaagcacattcataagaaccagaaaactagatgagtgatccggagtacctgattttaacataatatcaagaagaaaggcattgaatgggtaggaaangnancttgctttgnttaaccc

SEQ ID NO: 29161 - DNA, 454 bp, Homo sapiens
  misc_feature (1)...(454): n = a,t,c or g
gaacactatacttttggtaaatgtagtcaaatagtgtgtaagttattttttcccacagacccagcacactgcgaattcatagagaatttactttcggttaaaaatttccaccctttaaaaaggaattattctcttccttgccctccctaattaaagtgaaaaaacttacattttgttttgtaaaattgaacagctatgtagagattgttttgggatctgtttctgtcacagccccatgttacctccagctttaatgtttgtcttgtgtgttttcatacaggtaattaggaaaaacagggatgtgcctctcaaaactttacaaactggccttagtctgtcatcctttgagtattttgtaaaaaataatcttattattcagtttaattgggcttctctttactaatattcacttttttcacagggntaacntataancttggcncaaaggnttttt

SEQ ID NO: 29162 - DNA, 448 bp, Homo sapiens
  misc_feature (1)...(448): n = a,t,c or g
gacattccacatgagactcatccatttcctaactccttantaaaattttcatgtcagttttctctggacacttcacagatcatagatacaggaatttagtcctgataagatatgtnnnnnnnnnnnnnnnnnnnnnnnnnnnnnnnnnnnnnnnnnnnnnnnnnnnnnnnnnnnnnnnnnnnnnnnnnnnnnnnnnnnnnnnnnnnnnnnnnnnnnnnnnnnnnnnnnnnnnnnnnnnnnnnnnnnnnnnnnnnnnnnnnnnnnnnnnnnnnnnnnnnnnnnnnnnnnnnnnnnnnnnnnnnnnnnnnnnnnnnnnnnnnnnnnnnnnnnnnnnnnnnnnnnnnnnnnnnnnnnnnnnnnnnnnnnnnnnnnnnnnnnnnnnnnnnnnnnnnnnnnnnnnnnnnnnnnnnnnntgtggncatatcctatggaaactgngcagccataa

SEQ ID NO: 29163 - DNA, 440 bp, Homo sapiens
  misc_feature (1)...(440): n = a,t,c or g
ggtggatccaaggagacattagaacaagtcgggtgagtcctgaaatgccagcaactccagttgaaggagtactgctacaagctcatccgcttccccaggaagcccttggaccccacgaaggaagacagctctgctgaactcaaattggcaacccagctgacaggaccagtaatgtgcatatcagtgtcttcaaggagaaagccagagtcatcaccaaggagaagttctttagtatatannnnnnnnnnnnnnnnnnnnnnnnnnnnnnaaatnnnnnnnnnnnnnnnnnnnnnnnnnnnnnnnnnnnnnnnnnnnnnnnnnnnnnnnnnnnnnnnnnnnnnnnnnnnnnnnnnnnnnnnnccaaatgnggnacatatacccatggaatactatcaccnttaaaangaatgaaaatgacctggtgcggtggttacnctgta

SEQ ID NO: 29164 - DNA, 450 bp, Homo sapiens
  misc_feature (1)...(450): n = a,t,c or g
ggagtggaaggagagaaaatgttttctctcttgggttgtttngatatttcnagagagtggggatgggtcgggaggttttctatgagtgcctgtggtgtgtctggcccgaanagcatgccactgatgtgaagagttctggctttgctgagggacccatcccttctcactccccatttgaaatgactgatgaactctttggtccatgaccagctgngaccagcctgggcactgaaagctcttagaatgccatcttgtnnnnnnnnnnnnnnnnnnnnnnnnnnnnnnnnnnnnnnnnnnnnnnnnnnnnnnnnnnnnnnnnnnnnnnnnnnnnnnnnnnnnnnnnnnnnnnnnnnnnnnnnnnnnnnnnnnnnnnnnnnnnnnnnnnnnnnnnnnnnnnnnnnnnnnnnnnnnnnnnnnnnnnnnnnnnnnnnnnnnnnnnnnnnnnnnaaa

SEQ ID NO: 29165 - DNA, 438 bp, Homo sapiens
  misc_feature (1)...(438): n = a,t,c or g
gagaaaaggagctatttaagaccttctngtaataaccaacatntctcctttanagcttttacttttggctaccctgacttgacttagtaaacactattttattgtaaggatgattcttaaaacaacagtggaatgctatcatttctgtcttctggtgaggttaattattggcgcacacagcataacagagttagagctcaaatccaggttttctgaggccagactcagtcgccttcccactatgctgtgatgaggggctgacagcatgcttcaggtctgtcttaaaagacagggagaggccacataagttctgtgttcacagagctggagccccctgcttggtggtgggcancgagaggaaaggatgcaagctttccagccaacaaccctgctcaggattcctggcagccctgacctangcaggttatgaaaactcta

SEQ ID NO: 29166 - DNA, 441 bp, Homo sapiens
  misc_feature (1)...(441): n = a,t,c or g
ggctaagcacacgtcccctaaatgcttggngnatgtttggagacntactatgggagggtattctaaaggtgggaaagaaatgtgagggcctgtgatgttatccccatttgaccacagtaggcaccagttgatatctgcttaacaaaccccttctccatagtccatgctganacttggncacatgttatattctcttaaaagacttaacattttaccatgtttctttgttgncattgaaaagcctttgaatatagttttgnaattttatatccaatatttaaaatttgccagttagttttcaaagnggttatgccattttacactgttctgncagcaatatatganaggtgcagttactncacattcttgcaacatttggtgtagtctgtttgtttagccatcatagtgggtgtgaagtantattgcatttttttttttttt

SEQ ID NO: 29167 - DNA, 443 bp, Homo sapiens
  misc_feature (1)...(443): n = a,t,c or g
gggcgtggtggtgcatgggcctgtagttcgaggtacgtggaaggctgaggtacaagaggattgnnnnnnnnnnnnnnnnnnnnnnnnnnnnnnnnnnnnnnnnnnnnnnnnnnnnnnnnnnnnnnnnnnnnnnnnnnnnnnnnnnnnnnnnnnnnnnnnnnnnnnnnnnnnnnnnnnnnnnnnnnnnnnnnnnnnnnnnnnnnnnnnnnnnnnnnnnnnnnnnnnnnnnnnnnnnnnnnnnnnnnnnnnnnnnnnnnnnnnnnnnnnnnnnnnnnnnnnnnnnnnnnnnnnnnnnnnnnnnnnnnnnnnnnnnnnnnnnnnnnnnnnnnnnnnnnnncatcaaaattccatttaaaaaaaatnaaaaaggccnggcacaggggctaatgcctnnaatcccccnctttgggnggcccaantnnntgntncgaggcaanaaacca

SEQ ID NO: 29168 - DNA, 447 bp, Homo sapiens
  misc_feature (1)...(447): n = a,t,c or g
ggagggaggcagggagccggagagccggaaccggagtcgcagnggcgganacccctgtgcggtgcggagggggcggcggccccgactctgacccgcgccgggggtgggccatggcggagatcagcgacctggaccggcagatcgagcagctgcgtcgctgcgagctcatcaaggagagcgaagtcaaggccctgtgcgctaaggccagagagatcttggtagaggagagcaacgtgcagagggtggactcgccagtcacagtgtgcggcgacatccatggacaattctatgacctcaaagagctgttcagagtaggtggcgacgtccctgagaccaactacctcttcatgggggactttgtggaccgtggcttctatagcgtcgaaacgttcctcctgctgctggcacttaaggttcctatcctgatcgcatacacttgatccgggg

SEQ ID NO: 29169 - DNA, 436 bp, Homo sapiens
  misc_feature (1)...(436): n = a,t,c or g
ggaagaaacaaactcagagaggtgaggtaatgtggctgaacnggtctttaagcccagatttctgactccacattcaaccctaccctcattgtactactactcactcatgcagcattcttcatgaatgttacagtttccagattcatgacataaatatggaaaacagctgcaatctacgcggaggtcagtcgaataaaaaaggcaggcaagtcagcaaattattgcagaacaattaagcactgaaattctaggtgggaacaaaatacttcagaaaaacagaaaggagcaacaaattacctcgtggaaatggggaaggcttcatgggaaataatgtttaacttagatttagacatttaactctacttggagtgtagagatttctgtgtagacagacaaaatgattatatgagagacagaagaaactgcacaaagcaag

SEQ ID NO: 29170 - DNA, 448 bp, Homo sapiens
  misc_feature (1)...(448): n = a,t,c or g
ggccagctgtgcactttcttctctttcccaaccccaggaaaggntttccttattttgngtgctttcccagtcccattcctcagcttcttcacaggcactcctggagatatgaaggattactctccatatcccttcctctcaggctcttgactacttggaactaggctcttatgtgtgcctttgtttcccatcagactgtcaagaagaggaaagggaggaaacctagcagaggaaagtgtaattttggtttatgactcttaaccccctagaaagacagaagcttaaaatctgtgaagaaagaggttaggagtagatattgattactatcataattcagcacttaactatgagccaggcatcatactaaacttcacctacattatctcacttagtcctttatcatccttaaaacaattctgngacatacatattatctcattttacacaa

SEQ ID NO: 29171 - DNA, 446 bp, Homo sapiens
  misc_feature (1)...(446): n = a,t,c or g
gnnnnnnnnnnnnnnnnnnnnnnnnnnnnnnnnnnnnnnnnnnnnnnnnnnnnnnnnnnnnnnnnnnnnnnnnnnnnnnnnnnnnnnnnnnnnnnnnnnnnnnnnnnnnnnnnnnnnnnnnnnnnnnnnnnnnnnnnnnnnnnnnnnnnnnnnnnnnnnnnnnnnnnnnnnnnnnnnnnnnnnnnnnnnactatgtgtttctgatcctttgtcagggctagccaattcctagagacagtgaataactcactcataatctagctgcctcctttatgtcgctctcataggactttgacacctctctgctacaatccacctgccctgttcatttcaagatcaggtaccaggaaactcgggacatccctatgctgcagaactcactgaaattattcaaactagccagtcctaaacatgcttaccctgccttgccattccttccgctgaaa

SEQ ID NO: 29172 - DNA, 433 bp, Homo sapiens
  misc_feature (1)...(433): n = a,t,c or g
gggaagcaaggaacagtattccgtcttagaaaacttagaacgttactcaattttacacatttttttaagtgccagacttgctggaagcgaaaaataattacttagcagttccagaaatctgttgtcagattctagtaattaatggaattctttcttttgtaaaagatcccacttgtgggaaataataagatacatatttaacttgagaatattgtaaaatcctgttcttaaaaaaatacccttttaatgcactaatgtagtatgtaagaaactgcaggggttttgtgcgtgtgtatgtgtgtgtgcatttgagtttcagttttattatccagcatttttgcataatatctccattacccccattagtaataggctattactattatgttnatataaaataaattatgtttatatttattgatagaggctagaa

SEQ ID NO: 29173 - DNA, 407 bp, Homo sapiens
  misc_feature (1)...(407): n = a,t,c or g
gaagccacattaatagaaaaacannnnnnnnnnnnnnnnnnnnnnnnnnnnnnnnnnnnnnnnnnnnnnnnnnnnnnnnnnnnnnnnnnnnnnnnnnnnnnnnnnnnnnnnnnnnnnnnnnnnnnnnnnnnnnnnnnnnnnnnnnnnnnnnnnnnnnncaggcatggatgggagtgcatgcttatggtcttagctactcacaaggctgaaaccagaggatcatttgcgcccaggaggtgcaagnnnnnnnnnnnnnnnnnnnnnnnnnnnnnnnnnnnnnnnnnnnnnnnnnnnnnnnnnnnnnnnnnnnnnnnnnnnnnnaanaaanancccccccnnaaaaancttttannttnggngaaaaangcccncnnaaaantcccncccgnnttnnnnaaaaaaacttt

SEQ ID NO: 29174 - DNA, 408 bp, Homo sapiens
  misc_feature (1)...(408): n = a,t,c or g
ggaaagcactcttcgtaaaattggccaatcctgggattctaggcccagatctaccagttatcagttatatgattttaggagaatttacttaaccaccctatgccttagttttttcatctttaaataactataataaggccatacctgtagggttgttgtaaggattgaacatatgatatatgnaaagnactatgctagggtatggnatatagnaagtcctcaataaanggtaaatattaatgtaagtagtatgcataangaagttcttaggagagtatcattaaanaattcattaacannnnnnnnnnnnnnnnnnnnnnnnnnnnnnnnnnnnnnnnnnnnnnnnnnnnnnnnnnnnnnnnnnnnncaggagtttagacccgtctgaccaacatggngaaaccctgc

SEQ ID NO: 29175 - DNA, 411 bp, Homo sapiens
  misc_feature (1)...(411): n = a,t,c or g
gctcggcnnnnnnnnnnnnnnnnnnnnnnnnnnnnnnnnnnnnnnnnnnnnnnnnnnnnnnnnnnnnnnnnnnnnnnnnnnnnnnnnnnnnnnnnnnnnnnnnnnnnnnnnnnnnnnnnnnnnnnnnnnnnnnnnnnnnnnnnnnnnnnnnnnnnnnnnnnnnnnnnnnnnnnnnnnnnnnnnnnnnnnnnnnnnnnnnnnnnnnnnnnnnnnnnnnnnnnnnnnnnnnnnnnnnnnnnnnnnnaaaaaacaactgaacactgcttaacatccaaaataagatccaggaactctcaatacttattatttatacaaacagcaataggtagatttatgttctgctttgaacctatgaaaatttaaagaccgngctttggcattgggcaagnnattcttttatactatacttgg

SEQ ID NO: 29176 - DNA, 409 bp, Homo sapiens
  misc_feature (1)...(409): n = a,t,c or g
gtaagaaactactgacataaacctgatacatgcgatagctgctcaataaatggcagctcccccttcctgctctttctttgggagctactcagatgtggccgcctgcggggcttctatcctgcgtccggtctctacctcccgggcacacacaggcccaaggctttgcggacgtctcagatgtctacagattgggacggatgatgtgaattctgaatatcaaagctggaggctgtaagcttgtttgggggtccttgatgatggggcagatataaggggtggcacagaagagggtattaagagtggggtctaggagccccatgtgaaggggtgtccagcagatgcgggaaaacacagaggcaagtcacttgttatgcctggaacctgcttgagaactttgntgncttnttga

SEQ ID NO: 29177 - DNA, 481 bp, Homo sapiens
  misc_feature (1)...(481): n = a,t,c or g
ggcctgaatgaacgatatcctgggttcttgagagacaagtgggagctgataattctgaaaattcattagtcaaagcatggagataaaggtggcagcaggaaggggagaggcaaggagtagacccgtgacagttttagaatcttatttgtgccaaaatactttactgcattggcttggacctctaatacaatgttgaattgttaaccatgatagcactgtatcctggtctaattcctgaattgaatggctagtcttaccattaagaatgctatttgnnnnnnnnnnnnnnnnnnnnnnnnnnnnnnnnnnnnnnnnnnnnnnnnnnnnnnnnnnnnnnnnnnnnnnnnnnnnnnnnnnnnnnnnnnnnnnnnnnnnnnnnnnnnnnnnnnnnnnnnnnnnnnnnnnnnnnnnnnnnnntgtggtgcggcccctgtaatcccactgntntggagctgangcananaatccctgaacttggagg

SEQ ID NO: 29178 - DNA, 479 bp, Homo sapiens
  misc_feature (1)...(479): n = a,t,c or g
ggtcctttgaatcagcatgttgggaggtgcaggagattcctgcctttgaacacctgcctaaagattccataacaaggggatttggtatgatgagatatatgcaaaaggtttggattctggaaaaatatatacaagtctttttccagggggggnnnnnnnnnnnnnnnnnnnnnnnnnnnnnnnnnaaggagtccagtgtaattttgtttctcaaattcctgtttctcaaatacaaagttttaggagaataagacaatttaggaaaatcaacacattattcatgtcccgtaaaacaccaagattgtttttctattttcctgagttatatcaatagaaaaaacataaaatgataattagtctccctgtcacttcatcagagttttatagattagtaattttcatgtatagcacatttatgatataacttatacccttatttattggagatgattttattagatgaacctgcagaccatgga

SEQ ID NO: 29179 - DNA, 484 bp, Homo sapiens
  misc_feature (1)...(484): n = a,t,c or g
gcggcacgagatttttattttccttctatttcaaccttaactttctttattctgaccttgagattcttcttattattattcttttaaatatnnnnnnnnnnnnnnnnnnnnnnnnnnnnnnnnnnnnnnnnnnnnnnnnnnnnnnnnnnnnnnnnnnnnnnnnnnnnnnnnnnnnnnnnnnnnnnnnnnnnnnnnnnnnnnnnnnnnnnnnnnnnnnnnnnnnnnnnnnnnnnnnnnnnnnnnnnnnnnnnnnnnnnnnnnnnnngnnnnnnnnnnnnnnnnnnnnnnnnnnnnnnnnnnnnnnnnnnnnnnnnnnnnnnnnnnnnnnnnnnnnnnnnnnnnnnnnnnnnnnnnnnnnnnnnnnnnnnnnnnnnnnnnnnnnttctttttttattttaacaagtcttaatagcatttactggatactcagcatttactagatggngatattaatagaatttattnggggggtctttgaaaaatt

SEQ ID NO: 29180 - DNA, 478 bp, Homo sapiens
  misc_feature (1)...(478): n = a,t,c or g
ggagagagctagcatttttataagattccaattcctgaccttctgtaggcagttttcacatttgtgaaatgtcaactggatgaaacaaagtccaaatgatcaggaagtcaacatcctctacttatgatgggtagagacataacaggcaataagatattacgtagacccaataggaaccatacgaaatacatttcctaaggggatgagattttttaagattaggaaatcagatcttttgtgattctatgaatcttttataggactattatttttaacaactctacatacccaagtaaatatggttctccaaagcagtcatgctgcggggttggtcccttactccagtacagctgcctcttttggctccaagaaagtcagaacttctcaaagagctttggaccagaggtcaagtcttttgagtgngacaagggacttttgttactacngaaaccaaccccantttggaaccgnaaaaaat

SEQ ID NO: 29181 - DNA, 473 bp, Homo sapiens
  misc_feature (1)...(473): n = a,t,c or g
ggcacttgcatgattctgaactagtcccttttaacatggagtatcttttttactcaaatagccagctgacaccaactatgttaactcatcaacatgttaacacccatgatgttaattcagacttagaattaagttgacgatgttgtagatatttggcagacaaagaaatgaacaaaaagaaatgaaagcaaacgaaaaaagtaagtctttgaggaaaataattttaagtatttgttgaaaatgatgaaaattgtgagcttcaagcaaaaatcagaattttaggaaacttctatgcaccactatgggcttgatagcttcctgatatatttaaaggcttttctaatgacatcagtagtcatattaacaaatgcaatttttttattataatgaagtgngntaacatttgaaaatctacgtaactcagcaaaccaatattttccaaatgaccaattaggatgctcaaaatntgcatg

SEQ ID NO: 29182 - DNA, 475 bp, Homo sapiens
  misc_feature (1)...(475): n = a,t,c or g
gcatgtgattaaaaatttttactgccacctactgatggaaagaagaagatgaatttttgtacaatgaaaatcccaaacacagtggatttctggtttccactgtgctgtcaggactgggaaatgggtctggggaaggggtgtgctgggcttggtatcccccccacccaaccccctttttttggccctgacaatctggtctctgcttctgtgtccttctgcttcagctcatcgcacagtgggtggagggaggtgctgacctggggagttgctccggggagagggctggaggtggggggatgtgtctggggagaaacactgggcactgggagtcagcagccgccagcccccacataacccagttaatcctttgtaattgaccccgaggttgcaatgattccctgngtttaatgcccaaacgggctaacctnagcagnnaancttgcntaaaggccttttaanacccccccccctttta

SEQ ID NO: 29183 - DNA, 488 bp, Homo sapiens
  misc_feature (1)...(488): n = a,t,c or g
gcaccatcatccatgctgtcttacaggctggaaattatacttttcctactgtccatgtctgctcagtggccaaggcatgtctacctttgtctccatcagtgtacccagtgtctcatttcaggccctcctcatctttattggaccgttgcagcagtctcctaactgggcttaatgctctagtctctccttccttcagtgtgccctctacactgcagccagtttcaggaacactaattgagtcatccccctgtttaaaatcattcannnnnnnnnnnnnnnnnnnnnnnnnnnnnnnnnnnnnnnnnnnnnnnnnnnnnnnnnnnnnnnnnnnnnnnnnnnnnnnnnnnnnnnnnnnnnnnnnnnnnnnnnnnnnnnnnnnnnnnnnnnnnnnnnnnnnnnnnnnnnnnnnnnnnnnnnnnnnnnnnnnnnnnnnnnnnnnnnnnnnnnnnnnnnnnnnnnnnnnngtgaagtggaaatgctgtgaactt

SEQ ID NO: 29184 - DNA, 425 bp, Homo sapiens
  misc_feature (1)...(425): n = a,t,c or g
nnnnnnnnnnnnnnnnnnnnnnnnnnnnnnnnnnnnnnnnnnnnnnnnnnnnnnnnnnnnnnnnnnnnnnnnnnnnnnnnnnnnnnnnnnnnnnnnnnnnnnnnnnnnnnnnnnnnnnnnnnnnnnnnnnnnnnnnnnnnnnnnnnnnnnnnnnnnnnnnnnnnnnnnnnnnnnnnnnnnnnnnnnnnnnnnnnnnnnnnnnnnnnnnnnnnnnnnnnnnnnnnnnnnnnnnnnnnnnnnnaatagggaggcccaaggannnnnnnnnnnnnnnnnnnnnnnnnnnnnnnnnnnnnnnnnnnnnnnnnncaattattgattaccgttaactattttatatgggaanggttcctggcatcccaaaacaactntgatagtacattaaagatcactgntaacngatcncntancngaannaataatta

SEQ ID NO: 29185 - DNA, 478 bp, Homo sapiens
  misc_feature (1)...(478): n = a,t,c or g
gnnnnnnnnnnnnnnnnnnnnnnnnnnnnnnnnnnnnnnnnnnnnnnnnnnnnnnnnnnnnnnnnnnnnnnnnnnnnnnnnnnnnnnnnnnnnnnnnnnnnnnnnnnnnnnnnnnnnnnnnnnnnnnnnnnnnnnnnnnnnnnnnnnnnnnnnnnnnnnnnnnnnnnnnnnnnnnnnnnnnnnnnnnnnnnnnnnnnnnnnnnntgaacttaaaagttggaagttaaaagaaaaaaaaggaattagaaaaaggaaacatggactaaatccaaagtagcaggaggggaaacaataaagatgagagcaaaaattttttaaacgacaaatacaaaactaatgaagaaaaacaaaaccagaagtttgtctctgagaatttcaataaaattggcaaagctttagctagattaagaaaaaaagagaagacncnaattaccaaagtcagaaatgaaacngaggatttccactaattttattgaaa

SEQ ID NO: 29186 - DNA, 462 bp, Homo sapiens
  misc_feature (1)...(462): n = a,t,c or g
gattcgaatttgtcaacttttaataaagtatgtcaatgacaagagtcccgtttcccaggagaaaatagattatgccctgtgttggcagcagggacctgtcctcctttaccccctaaaggtatagggggcaagccagaaaccagctcctctgaaaggagtaaggtctctacccctgaacagcccactaacatctggacccactagaccacctgtatctgccaaatcccccgccccaagtgggtgcacaggaatctcctcactcagttcctcccccatgtaatcctgaatcaatgttctctggcctccctaaccacacgcctgagtctatgtctccccccaggaaggctccagcgtgagataaaacagtgcaacaaagatattcagaacttcctttcccttcacctctaagcaatcaacttcaactctnttttccttaanggaaatgncccttgganaaaggaa

SEQ ID NO: 29187 - DNA, 389 bp, Homo sapiens
gattgaacaagtactcagtgtttgctgaatgaatgaatgtgggttagtcaatactagctcagctgcttacatcacttagcctccccgggtctcaggatctccttttatctgtggtgaccatccaatgtaaagccctagcataagacctagcatgctttagacccatggttgccgtgcacagccagctgcctgtcaatcattgcccattcccattgcccactagccattgtccactctatgttcacccctgttacctcacccagctgagggtcttaaacatagttttacctcttctcaaaggtcattctttacttggtagggtagggtctagaaagagtctgcaatttggttagagtctagatttagtttgcaacccagctgggctgggg

SEQ ID NO: 29188 - DNA, 478 bp, Homo sapiens
  misc_feature (1)...(478): n = a,t,c or g
tttgatttngnataccctttannnnnnnnnnnnnnnnnnnnnnnnnnnnnnnnnnnnnnnnnnnnnnnnnnnnnnnnnnnnnnnggcacgagcttaatgttcaataaaaattagagaaatcatggaaagttcatagaatggaaataatatacagtcatcttagatgtttcaaaagaattttagtgacatactaatatgctaaccatataataagtgaaaaaaggatatgacactctataaagtatggtcccaattatgtcaaacatgtatgcaaagaaaagaaataggtggtgagattataagacttgatatttttctcagttttagaaatgttctttgataaacaaattatttaaaaataaatcatagtttaaaattgatattaacaaatatgagtagagtcagtgaccatcattttaaccaatagttttcactaatgcaggtgattgtgaagctgtaaanggattgtattttcaag

SEQ ID NO: 29189 - DNA, 453 bp, Homo sapiens
  misc_feature (1)...(453): n = a,t,c or g
nnnnnnnnnnnnnnnnnnnnnnnnnnnnnnnnnnnnnnnnnnnnnnnnnnnnnnnnnnnnnnnnnnnnnnnnnnnnnnnnnnnnnnnnnnnnnnnnnnnnnnnnnnnnnnnnnnnnnnnnnnnnnnnnnnnnnnnnnnnnnnnnnnnnnnnnnnnnnnnnnnnnnnnnnnnnnnnnnnnnnnnnnnnnnnnnnnnnnnnnnnnnnnnnnnnnnnnnnnnnnnnnnnnnnnnnnnnnnnnnnnnnnnnnnnnnnnnnnnnnnnnnnnnnnnnnnnnnnnnnnnnnnnnnnnnnnnnnnnnnnnnnnnnnnnnnnnnnnnnnnnnnnnnnnnnnnnnnnnnngcttttctcgaacccatttctgatgtcggctataatgaaaacaagtntgaanaatggagacatctgtgggcaaagaaatatctcatcttncacctaaattagaaactaggaaa

SEQ ID NO: 29190 - DNA, 388 bp, Homo sapiens
gaattaaagatctttttaaagtcggttttgttaattcagacctcccatacattggagagtaattcctctttatctggaaaggaaggactagcatattttgatgagctgaatagtttgataaataaagatcaaactgatgtttttaccgttttcagtgaatcaggatataagaaatttcactagatagatatcatgtcattttcaagtggactcagaaggctcttaagaatattgctgggcctcagagctttatggactttaagtatcatatatgccatggcttaattctggtgttctggagtctgactgtaagtgaaggtgtacttgaaatgtattatattatgataaaatcaattttttgaaaccaaaggcctattgagatgatgta

SEQ ID NO: 29191 - DNA, 412 bp, Homo sapiens
  misc_feature (1)...(412): n = a,t,c or g
nnnnnnnnnnnnnnnnnnnnnnnnnnnnnnnnnnnnnnnnnnnnnnnnnnnnnnnnnnnnnnnnnnnnnnnnnnnnnnnnnnnnnnnnnnnnnnnnnnnnnnnnnnnnnnnnnnnnnnnnnnnnnnnnnnnnnnncttgagcctgggagggtgaggctgcctcgagccaacgaccctgcncaacanagcctnacttngtcctncncgncccngntttgcaancttctntttnggtntgatcntganggntacttnctttangncnagagggtggttttctcngncctaattgnanggtntcantnggtcaccttttncctntggngccattcnngnganngagccttngnctntactttggtatnntcnnccaanggtntntgcctnaatnnanntgtnnngccnnttccac

SEQ ID NO: 29192 - DNA, 445 bp, Homo sapiens
  misc_feature (1)...(445): n = a,t,c or g
gaggcacacctgcccttctgtgtgctctctccacacgaaggatgacagatactgtgaattcagccctcacggccaactgtgaaggggatggaaaaggctgggagggctcggggagagctcttaggggctgcggaagtccccacgggggtctgaaagtggagcccaagctttggccctccaggcatccccagtttccagcctcacctctgaagccctgctgcctttaaccaccaaagccgcagccccctgggtttctgtctaactcgaagtcttgaatcctagctagtttggggttgtgagcagtgtgtagcaaagttgatctctccatgtcaccaaatcaaaacaccctctgtcatcctacggcatttcctcttgaggtcacagagaggaatggcaagccctggaaacctgngtattctgngttgatttggtgtggggggaaggt

SEQ ID NO: 29193 - DNA, 135 bp, Homo sapiens
gcttcaagagcacgaagagtacattaaacagctcttcttaaatcgaatgttgcattttataagcaagtcaaatgtttattttacattcctataacttccttaaatttctctgcccattatctttttttttttttt

SEQ ID NO: 29194 - DNA, 442 bp, Homo sapiens
  misc_feature (1)...(442): n = a,t,c or g
gattttatacaacnnnnnnnnnnnnnnnnnnnnnnnnnnnnnnnnnnnnnnnnnnnnnnnnnnnnnnnnnnnnnnnnnnnnnnnnnnnnnnnnnnnnnnnnnnatgccagagcccaggctctcgatattgcctttcattttcctccaggaaaggatttacatgagatggcaggtggctggggaagcagtgagtacacactcacgttgtgaaggcagggagacttgtgggggacttgctgggaagctgaagagctcaggaggatgaggagagggagtggacggtttaaaaaagacagtgtgagaacaagagccctgagccagaggagaaaatgacagccctctcctccctctgatttctgagaggtgttcctgccccaggagtgaggacactgctttctcctggtcaggctatttccccatggaanggacctatancccctgg

SEQ ID NO: 29195 - DNA, 437 bp, Homo sapiens
  misc_feature (1)...(437): n = a,t,c or g
gccggaataccattgaagagactggaaacttggctgaacaagcgcgtgcccatgtagagaacacagagcggttgattgaaatcgcatccagagaacttgagaaagcaaaagtcgctgctgccaatgtgtcagtcactcagccagaatctacaggggacccaaacaacatgactcttttggcagaagaggctcgaaagcttgctgaacgtcataaacaggaagctgatgacattgttcgagtggcaaagacagccaatgatacgtcaactgaggcatacaacctgcttctgaggacactagcaggagaaaatcaaacagcatttgagattgaagagcttaataggaagtatgaacaagcgangaacatctcacaggatctggaaaaacaagctgcccgagtacatgaggaggccaaaagggccggngacaaatttggg

SEQ ID NO: 29196 - DNA, 442 bp, Homo sapiens
gggcatggagagggcagacccagggccgggggaggcaaaaggaggagaaagggatttctgacaacttgagctgtagaataatcagcattaggatgtcagtgagttccccttacaggtggcgttggaatggtctaagggtctgtaaggaggttggactggccgcctatagagtccaggtttctaagatgtatttgtctctctgggctatagctgttgtcattagagaagatagtgaagctgctttgcttgagggccttcctatgatactctatggacaatccaagttctatgtaatatatattttatacctttgaatcaactgagtaaaaggatactataaaaatacctattagggaaacctcttagaaaacctgttagacagcatctgctaaagctgaatatacgcctacccagcaatctcatttctaagtaaaggcccacc

SEQ ID NO: 29197 - DNA, 430 bp, Homo sapiens
  misc_feature (1)...(430): n = a,t,c or g
ggtagaatacagagaggagaacctacctgctaaccaagcaggtggagacaaccannnnnnnnnnnnnnnnnnnnnnnnnnnnnnnnnnnnnnnnnnnnnnnnnnnnnnnnnnnnnnnnnnnnnnnnnnnnnnnnnnnnnnnnnnnnnnnnnnnnnnnnnnnnnnnnnnnnnnnnnnnnnnnnnnnnnnnnnnnnnnnnnnnnnnnnnnnnnnnnnnnnnnnnnnnnnnnnnnnnnnnnnnnnnnnnnnnnnnnnnnnnnnnnnnnnnnnnnnnnnnnnnnnnnnnnnnnnnnnnnnnnnnnnnnnnnnnnnnnnnnnnnnnnnnnnnnnnnnnnnnnnnnnnnnnnnnnnnnnnnnnnnnnnnnnnnnnnnnnnnnnnncttgctnaaagccaaggangtccnttcannggttnaaangaggggactttt

SEQ ID NO: 29198 - DNA, 434 bp, Homo sapiens
  misc_feature (1)...(434): n = a,t,c or g
gtcagagattcccacattacttgcctcggtcatattgtggattttagaattggaatggtttcttgtaattttaccaatactgagcattaaagaaggccttgctatttttaagtctgtatcctaatcaaatgttgannnnnnnnnnnnnnnnnnnnnnnnnnnnnnnnnnnnnnnnnnnnnnnnnnnnnnnnnnnnnnnnnnnnnnnnnnnnnnnnnnnnnnnnnnnnnnnnnnnnnnnnnnnnnnnnnnnnnnnnnnnnnnnnnnnnnnnnnnnnnnnnnnnnnnnnnnnnnnnnnnnnnnnnnnnnnnnnnnnnnnnnnnnnnnnnnnnnnnnnnnnnnnnnnnnnnnnnnnnnnnnnnnnnnnnnnnnnnnnnnnnngccctgcaaaaatgtcaagaagtctggaacagngttaaatgcaaaactggggcaa

SEQ ID NO: 29199 - DNA, 452 bp, Homo sapiens
  misc_feature (1)...(452): n = a,t,c or g
gccgaagcagccagtttattctgtgccttttcccttcttgaggtatacacatttttatgtagatttaatcagggcctgttttgtctgtttttctgttttcatggattattataaacctccttttctctagagctgtatggagtcttcttaagcacctttttggatactttgttaaaagtactttatattctttgtagaaatcttggtatagagcggccagcgcaattgctatgctaaggctctgtgttattccagcaaggtgcgcaggctccgcttccgcagaagggagtagggtgggagttctggaggacagacccgcctggcagggaggcacgaatgtgaagggagggtcccaggaaagtnaggagcctcagcaggggtggcnggggagctgcaagcaaggccagtaaaaggantgaaaaaanggagggnattcctggggggtttgcccg

SEQ ID NO: 29200 - DNA, 443 bp, Homo sapiens
  misc_feature (1)...(443): n = a,t,c or g
ggtggcacaatctgtgttgtttatatgataccagatgccccacaagaacccttattcctctcatttcacattcttcctttaatagcctccttcagatcccatacctgacccctctctaacacaaaacttattgggtaagtgactttgaaaagttttgtggcacctgacccaccccagacactagggctatcagaaggtctcctttttagcccagcacaggcccaggccactttgtcgtgtttgttttaacttctaaagaaaatatgtttcagcattataagaaaggcagaatgcagaacacctacatttttgttttagtttggtgccaaggctcaggctgtattggcaaattcccgaaagttttcccactttgcctggcctgcttctgcttttctttctcagtaaacagttctgaaggcaggagtggaacccgggagtntttt

SEQ ID NO: 29201 - DNA, 453 bp, Homo sapiens
  misc_feature (1)...(453): n = a,t,c or g
ggtggccaagctttacatgaacacgcaccctggccgcctgcngctcggcctcacgcttggcctctggctgaccaccgcctgggtgctgtccgtggccganaggcaggctgttaatgccactgggcacctttcagacacactttggctgatccccatcacattcctgaccatcggctatggtgacgtggtgccgggcaccatgtggggcaagatcgtctgcctgtgcactggagtcatgggtgtctgctgcacagccctgctggtggccgtggtggcccggaagctggagtttaacaaggcagagaagcacgtgcacaacttcatgatggatatccagtataccaaagagatgaaggagtccgctgccgagtgctacaagaacctggatgttctacaaacatactcgcaggaaggagtctcatgctgccgnagcatnaacgcaagttgttgccc

SEQ ID NO: 29202 - DNA, 434 bp, Homo sapiens
  misc_feature (1)...(434): n = a,t,c or g
gcggcacgagtgnnnnnnnnnnnnnnnnnnnnnnnnnnnnnnnnnnnnnnnnnnnnnnnnnnnnnnnnnnnnnnnnnnnnnnnnnnnnnnnnnnnnnnnnnnnnnnnnnnnnnnnnnnnnnnnnnnnnnnnnnnnnnnnnnnnnnnnnnnnnnnnnnnnnnnnnnnnnnnnnnnnnnnnnnnnnnnnnnnnnnnnnnnnnnnnnnnnnnnnnnnnnnnnnnnnnnccctattctcagtgttcacagggaaaaatgccaggaaggttttgtgcacccagccttcctccctctcactctttagccccttttgaaatggcatttgaaaagtagactttccagaagaacacatccttgccggggagagtaagtgttcaggcacctggcctttgcacagacatgtggaaaagtgagctggcagcactcactntttacct

SEQ ID NO: 29203 - DNA, 412 bp, Homo sapiens
  misc_feature (1)...(412): n = a,t,c or g
gagaaaactgatcagtgattttgccattatcttgtccattctcatcttttgtgtaatagatgccctagtaggcgtggacaccccaaaactaattgtgccaagtgagttcaagccaacaagtccaaaccgaggttggttcgttccaccgtttggagaaaacccctggtgggtgtgccttgctgctgctatcccggctttgttggtcactatactgattttcatggaccaacaaattacagctgtgattgtaaacaggaaagaacataaactcaagaaaggagcagggtatcacttggatctcttttgggtggccatcctcatggttatatgctccctcatggctcttccgtggtatgtanctgctacggncatctccattgntcacatcgacagtttgaaaatgganaccgaa

SEQ ID NO: 29204 - DNA, 409 bp, Homo sapiens
  misc_feature (1)...(409): n = a,t,c or g
gcggcacgagcagtgacagggactgagcacacatgttcaagattgtatttcctgatgaggtcttaaaattctggttttctgtttcattggttctgaatggtctatgtgttctagagagcagaccagggcttataaggctgaaatttcattgtgaaaattatggtgcttaatctgatttctcaactgaaaggagaaatattcccccttgacatagaagcaggtcacagggtcacctctggggaaaaccagcttttccccgagggcttaacccagggcctttccggcacccagatcgcatcttcttagctgtgccccagagaatgaggtcgagattgtgatctgaaatattttcaaggcaggtgctgcttttcatgcccaaagaagcatgccacttnaganctagaacatt

SEQ ID NO: 29205 - DNA, 407 bp, Homo sapiens
  misc_feature (1)...(407): n = a,t,c or g
gactggaagtgtacatattaaaatatgtgaaatgcagctaaagtcacctttagagggtaatttatagtcttaaaatcttgtgttatgaaagaagaatagctaaagatacatggattaagtgactaacgtggaaaacaacgaactgaataaannnnnnnnnnnnnnnnnnnnnnnnnnnnnnnnnnnnnnnnnnnnnnnnnnnnnnnnnnnnnnnnnnnnnnnnnnnnnnnnnnnnnnnnnnnnnnnnnnnnnnnnnnnnnnnnnnnnnnnnnnnnnnnnnnnnnnnnnnnnnnnnnnnnnnnnnnnnnnnnnnnnnnnnnnnnnnnnnnnnnnnnnnnnnnnnnnnnnnnnnnnnnnnnnnnnnnnnnnnnnnnnnnnnnnnnnnnggcaggcagtcntnaanagac

SEQ ID NO: 29206 - DNA, 406 bp, Homo sapiens
  misc_feature (1)...(406): n = a,t,c or g
gactgcccacccctcagccttgcttaatgttttaatttttaaaatttaaataaattttgttccttcatactttacacttcgaattttggtgcctggcagaaggactagtccgtcgagagagaaagaccatgatacaggtggcgatttggccgctgtcctctttggacttgaggtccacaatgatgtggtcgttggtgttggggatgaacttgaagaatgaactttaacgtgcgcggggcccacctnccccatgtggctgacggaaatgtaaccgaagtcctgggtggtgctcaggagtcctcgctgcaccgctgggggcaggaccggcgctgcagcactttncagcaggcggactaggggtgtgaggcaacctggcggtcggatttccnggggnggcctgggaaca

SEQ ID NO: 29207 - DNA, 398 bp, Homo sapiens
ttcggcacgagtgggaaggctgcccagaggaggtggcactgaactgagtcctaaaggttgactggcaggtgacagcacaggacagcgtggtatttgtggcatcacacatggttgggtctccctgaagaggagcccaggaaatgccaagtcttggtgctggtcttggagtggtgagtgggttctggttactcagggtggggcagccattgagcccgtgttgtggttactgtgttggctgtgtggttgtgtcctttgaggagggcttcttggtgtgacaccccggctcctggctgcatcggccaggcctgctgtgtagagcgggttttgggaggtgaaagaccagaggcctggtcactagggtggggagttcagtatgggggtccgtgttccctttcacc

SEQ ID NO: 29208 - DNA, 401 bp, Homo sapiens
  misc_feature (1)...(401): n = a,t,c or g
ggcatttgaaaatgtgctgttgttccaaagaaaaattagcaaaggacttgagatttagaaaagtctcctttgtaatgtgcatcattaccagttatctaaagaaaaacatgtaaaagccaacaaaacccttgaaaatattttgcatatggatgtctgtttcacgtttcaactgaagatgtatagagcacctctgatgatgaggaagataccatgctaggcagtactttcaagaacgtgagttcttatttctgcaggccttttgtgcccccttttaaatgttagcatttattaggtacaaactagtggggaaggtttttttaaaaagttttgcagtcttgtaatttacctttttaaaaaatttannnnnnnnnnnnnnnnnnnnnnnnnnnnnnnnnnnnagc

SEQ ID NO: 29209 - DNA, 411 bp, Homo sapiens
  misc_feature (1)...(411): n = a,t,c or g
gcctaaattatacagatttttagaagtgaatttaggaatctgttagagttagacaataaataattatatctataatgttaaaaatactaaactttttctctgaatataatagtttagccagccactaaattgacccttgtctcagctgatgctggttttccttctgtgtgtgtgtgagcatgtgtgtgttcagggcttttttttaatcaaacaagttttttcaaagatgcccagtcaacaaaatactgtatgttagcagccacagccaccatcagaatgaagttttaagatcactgtttctgattacatagaaatagccaatggatttatcgaaggttattattcaaaatgacaggacagaaaatactctggcttatcccctgngctcattccttttctagaaccaagggg

SEQ ID NO: 29210 - DNA, 407 bp, Homo sapiens
  misc_feature (1)...(407): n = a,t,c or g
gactgggagaacctgaactaagacaccaggggaagtgtacttcaagcagaggaaaagggagataagaaagctctaatcctggccaagagctcagcatagaggggcagaggaaaggcagggtggccagagcacaatgagcaggggagtgccgcggggggactgaagaggggaacaacggccaaatgatgccagggtcctggaagctgaggtatcactttctattgtnnnnnnnnnnnnnnnnnnnnnnnnnnnnnnnnnnnnnnnnnnnnnnnnnnnnnnnnnnnnnnnnnnnnnnnnnnnnnnnnnnnnnnnnnnnnnnnnnnnnnnnngaacattggcaggactatgttcctttctaaaagcctanaggaggatgccttttctgcctggctttttttggtcataac

SEQ ID NO: 29211 - DNA, 450 bp, Homo sapiens
  misc_feature (1)...(450): n = a,t,c or g
gctccaattaaaagaaaaatataaataaaagcaaaaaaatgaagaaaaaatatgattctctctgtattttaaagcctgttcaactgagtagtaactataaaaagaaaatctgttaacctcacaatacttccaaacctagacagcagagggagtcttagaaacaaatacccaacacattaagttgtataaatcaagccactttaggaacaatgaaaactgggtttttactcattgtaatcactttgtaggatattataaactgtgtaaataaatgtattaaaaaaattatatgtgtaaaaatattcaagtgatattatcttgaaattaatttaaaatgttaagtnnnnnnnnnnnnnnnnnnnnnnnnnnnnnnnnnnnnnnnnnnnnnnnnnnnnnnnnnnnnnnnnnnnnnnnnnnnnnnnnnnnnnnnncctgccacatggggnaacc

SEQ ID NO: 29212 - DNA, 408 bp, Homo sapiens
  misc_feature (1)...(408): n = a,t,c or g
ggacaggttcagctctctgcagcacactaccctcaagccacctgatgtgacctgtatctccaaagtgagatcgattcagatgattgttcatcctacccccacgcccatccgtgcaggcgatggccaccggctaaccctggaagacatcttccatgacctgttctaccacttagagctccaggtcaaccgcacctaccaaatgcaccttggagggaagcagagagaatatgagttcttcggcctgacccctgacacagagttccttggcaccatcatgatttgcgttcccacctgggccaaggagagtgccccctacatgtgccgagtgaagacctgncagaccggacattggacctactncttcttcggacctttctggtattcatgggctttcttcgtagaatactt

SEQ ID NO: 29213 - DNA, 296 bp, Homo sapiens
  misc_feature (1)...(296): n = a,t,c or g
gcggcacgagnnnnnnnnnnnnnnnnnnnnnnnnnnnnnnnnnnnattggtaaccattacaaaatttcatttatccatccactgttttcattttaatacaagcaggtagataagttttatataccctccaattttttctctcttcttcgctggcccatattgcatgtagaagccactgataaaagcagcactttagatgatattcagccaatgaatccataattgtttattgattccctcttatgttcccagggtatggtgaattgatgttgttaaaatagatttttttttttttt

SEQ ID NO: 29214 - DNA, 446 bp, Homo sapiens
ggacttcaagagtaacactgttgtggctcccacctccggggacttcataggtttgagtatgtgtgtgggaatgtggtctgttttatttactcttgctaatgaggctgaacggagctagtgagggcattaaagcattttagtgttattagttttaaaattagcccgagctgttaaggagagtccctgctcactttgcttatgtgagaaaggggcttctgaatgccaaggttgaatgcccagtgtctttcatcctaaaaaagacaactttatgcgctatgcgttagaatgaacagggaaactttaaatataatgatatggggtgcctgggccccacctcctcctttgcttcactggccctccctggacatcagggggtgtggtttttgctttttggtttttaagttttcccaagtggttctcgtgcaccaaggttgaggcccaccggc

SEQ ID NO: 29215 - DNA, 408 bp, Homo sapiens
  misc_feature (1)...(408): n = a,t,c or g
gcagagagtctgacaagaatttgaaaaagggtgtatagaatacaaatactgttgaatggtgcagcaacagagctgtacaacacctttgtcttgcctggaaggcagtgtgttagtatggagagagcgagggctaaagtagagactgtagatattatgtgcctaatactgtaattttcccagaactgatagcttgattttgccagttatacacccaaagactttggacattggtgtggaaatacatttgctcactacatgctagatgccagactatcatttgttgattggttgattcattgtttggaaaatcctggactactataataggtgccaggcatcatacccagagagggacctagcataaccagaattcattcaaggaggacttccagaattctgagangtcta

SEQ ID NO: 29216 - DNA, 447 bp, Homo sapiens
  misc_feature (1)...(447): n = a,t,c or g
ggctcgaactaccaactgataatgtctcaagcagacaacaggtgaccaaattaaggaaagaaaccaggatcctggcagcccaggaagcagagccggtcatgacaacatgcagttgatgatgtgggggtgaaaggctgagtaagcggttgcaatctgcagtgagccaagctgaaaggcccgggcggatgtgaaggctggtggtaaggaaatgggaagcaggcagccaagctaaccctgtgtccactgaaggagtgaggtggccttgagcacagcagcatccctgggtcttacgtcggccagaagtagaaagggaagaagcctaaaggaagtgaaagtgttgctggatctcctgctggcattgctcctccttcacacagcatcccggttctccctgcagccacctgatcttccctttgccccttcttaccanagccccccacntttaca

SEQ ID NO: 29217 - DNA, 556 bp, Homo sapiens
  misc_feature (1)...(556): n = a,t,c or g
gcggcacgannnnnnnnnnnnnnnnnnnnnnnnnnnnnnnnnnnnnnnnnnnnnnnnnnnnnnnnnnnnnnnnnnnnnnnnnnnnnnnnnnnnnnnnnnnnnnnnnnnnnnnnnnnnnnnnnnnnnnnnnnnnnnnnnnnnnnnnnnnnnnnnnnnnnnnnnnnnnnnnnnnnnnnnnnnnnnnnnnnnnnnnnnnnnnnnnnnnnnnnnnnnnnnnnnnnnnnnnnnnnnnnnnnnnnnnnnnnnnnnnnnnnnnnnnnnnnnnnnnnnnnnnnnnnnnnnnnnnnnnnnnnnnnnnnnnnnnnnnnnnnnnnnnnnnnnnnnnnnnnnnnnnnnnnnnnnnnnnnnnnnnnnnnnnnnnnnnnnnnnnnnnnnnnnnnnnnnnnnnnnnnnnnnnnnnnnnnnnnnnnnnnnnnnnnnnnnngtgtgggcagngtgctgctggaggacgctatgatggctaatggcntgtcgacccaanggcccaaggtccatggtgggctaacaatgggggaacggatttntcnttgtggacangactaagntttggaggaaa

SEQ ID NO: 29218 - DNA, 556 bp, Homo sapiens
  misc_feature (1)...(556): n = a,t,c or g
ggttcaggatcagcctggacaacatnnnnnnnnnnnnnnnnnnnnnnnnnnnnnnnnnnnnnnnnnnnnnnnnnnnnnnnnnnnnnnnnnnnnnnnnnnnnnnnnnnnnnnnnnnnnnnacccgnnnnnnnnnnnnnnnnnnnnnnnnnnnnnnnnnnnnnnnnnnnnnnnnnnnnnnnnnnnnnnnnnnnnnnnnnnnnnnnnnnnnnnnnnnnnnnnnnngaacttgctaatgagaatggggcctgggaagaactttttttttctggagctgccagtctgtatcaatgaagaacaatttatttattttgcctgagcacatcatatttagtctgtgnttttctagttnggntgcccaagtaggagtccccttgtaagaagataatgtgcatcttctatgttttatttatttattattatttattatgagtattttnncnngggggggncttgccccaggctggagtgcantggngnganctctgtcctgnaacctcaccttccaggtcagcaatntctactcagaggttaggcanaaaatccttgaccccggagg

SEQ ID NO: 29219 - DNA, 561 bp, Homo sapiens
  misc_feature (1)...(561): n = a,t,c or g
ggagctgccttggagccaagcaaggatttaaaggattccaagttgctcctgaacatcataatgaccataagacctttatctatgataacactgaattcacccttgctcatggttctgtggtcattgctgccattactagctgcacaaacaccagtaatccgtctgtgatgttaggggcaggattgttagcaaagaaagctgtggatgctggcctgaacgtgatgccttacatcaaaactagcctgtctcctgggagtggcgtggtcacctactacctacaagaaagcggagtcatgccttatctgtctcagcttgggtttgacgtggngggctatggctgcatgacctgcattggcaacagngggcctttacctgaacctgtggtagaagccatcacacagggagaccttgtagctgntggagtactatctggaaacaggaattttgaangtcgagttcaccccaacacccggccaactatttagcctntcccccttagtaatagcatatgcaattctggaccattanaatcgcttttagaaaaagncattggagtaatgc

SEQ ID NO: 29220 - DNA, 565 bp, Homo sapiens
  misc_feature (1)...(565): n = a,t,c or g
gggaaggcaaggtcacatatgtggaatgctgctaagagatcaagtaagagnnnnnnnnnnnnnnnnnnnnnnnnnnnnnnatgtggaatgctgctaagagtcaagtaagannnnnnnnnnnnnnnnnnnnnnnnnnnnnnnnnnnnnnnnnnnnnnnnnnnnnnnnnnnnnnnnnnnnnnnnnnnnnnnnnnnnnnnnnnnnnnnnnnnnnnnnnnnnnnnnnnnnnnnnnnnnnnnnnnnnnnnnnnnnnnnnnnnnnnnnnnnnnnnnnnnnnnnnnnnnnnnnnnnnnnnnnnnnnnnnnnnnnnnnnnnnnnnnnnnnnnnnnnnnnnnnnnnnnnnnnnnnnnnnnnnnnnnnnnnnnnnnnnnnnnnnnnnnnnnnnnnnnnnnnnnnnnnnnnnnnnnnnnnnnnnnnnnnnnnnnnnttatcanatggacatgctccttagagccctcaatctntcaactanagacngttccaggacacatggncttccttgaacactgctgcntcggtgnaaactcnanancatccagttgctgntgngttttnactccatgtggg

SEQ ID NO: 29221 - DNA, 472 bp, Homo sapiens
  misc_feature (1)...(472): n = a,t,c or g
gcagggatggaaggagtggacaccctgggtacttaagactgaatgtgtggtctcaggattgcatacgggccatgtgggcagtgcatttggtacccttaataggacttcttggaatcaaagtggtttgctttgtacaaagttgtaagcatggtgtttgggatatgtttgttgaatgaatgaatgatttgtgcttgccatatcaaatgaatgaaggtgggaaaaatgaatgaagaagttaaaaaggttaagaattcatgtaaaatgaagataataatcatacataccttacacgactactgtganaatgaggtggtataatgcacttaaagctgtnagcacanagcctgcagtggcaggctttcaattctagctagtattgggattacattttcccaggngtgttaatcacctcaactggcatacaacatcccccggcttgggtggcttnaaaacaaaattttggtgnncgggc

SEQ ID NO: 29222 - DNA, 467 bp, Homo sapiens
  misc_feature (1)...(467): n = a,t,c or g
ggtgatcttgggtaagtgatttcttctctttggattccattttccaccactttaaaatgggaggattggtatagatggtcatttcctattagtaggtggggaaaaaggagaaagggggactaaataagtttgcgaacataggtaaacaaagttaaatagattactgcagcctcatgcattatggcatatgaattgggttgctggacttctagcttggccttgcaagttaagtgagagtcagtaatatgagtccagctctgtctttttcctaatggtttagtggaaagagcatgggctttagaatcagacatatctgggtttgaatcctgactactccttagtagctttatggctttataagttatctagcctttctgaacttgnctcctcatgtataaatcaggcaggataataccttgcggagttgtaaaagataatgacattccatgngaaaatatcaaatagaa

SEQ ID NO: 29223 - DNA, 575 bp, Homo sapiens
  misc_feature (1)...(575): n = a,t,c or g
gagnnnnnnnnnnnnnnnnnnnnnnnnnnnnnnnnnnnnnnnnnnnnnnnnnnnnnnnnnngtcagtttnnnnnnnnnnnnnnnnnnnnnnnnnnnnnnnnnnnnnnnnnnnnnnnnnnnnnnnnnnnnnnnnnnnnnnnnnnnnnnnnnnnnnnnnnnnnaaannnnnnnnnnnnnnnnnnnnnnnnnnnnnnnnncctagctaacatttaagcccgatttaatttgtgtcttctctgtgaatctatacccagccattgcaatctactttggcttaatattaagggacttgtgatgttttctgccacagtatcactttagtttcatgcattcaccaccccaagaggnattcactcttaaaataagttggattctgcagtcnaacataggctgccatcaaatggagtggttataacacagtctcattggntggagccattagganagagctgganttgtattanaagatgatgctatgaccccatctgtgagcaangcagacatggtagtcagtcgtntactcattcttactgactcggctagcttanaatctttttaactcagnnttggggagg

SEQ ID NO: 29224 - DNA, 452 bp, Homo sapiens
  misc_feature (1)...(452): n = a,t,c or g
gcaggaaatcaggcaacaccaaaaacagcaccagccaccatgagcactcccacaatactggtcgcaacagcagtccatgcatatcgatagtaagtcgctgagaaggaacaccctctgaagtttggtggaagggcgtgcagttaagctactttttctcgaaaaacctctgtttgttgcaaaacggttatttagcccttccacggacaaaatatcagtagaacttttaacatctgaattggagatttctgtggtaaaacttgaaaagccattatcttgtctactgtctttagggagtgcttgtaccctnaacagctgtcaaatgctcaaagaaagcctctccactgagatagcatgaatgatagatatttatatttaaagagtaagggaatagtatatgagctttaaattataaactgctgggccggtgcggtgcgcctctgnaatccaacaat

SEQ ID NO: 29225 - DNA, 456 bp, Homo sapiens
  misc_feature (1)...(456): n = a,t,c or g
gtatcttattagtgtaaatggcccttttcctttgtctttctgaaataggagaataccataaatgtgtttacatctttatttaaacaaagcatttggtaatattttaaatgctgtcctttcaggtaccatggaggaatatggatataatacctaattaataagtggttgcagacatatcattgcagactgttgcaaattgagggtgatctctagaatcctattcccagattctctcattggtattgccatggtcagtatttctaaaaatcagatcttggaaacacatagcacagtttaaaatcatgtgctcagatttgntctagatttgtgatattggcatatttcttaaccattctgtgcttcattttccccatctatanaacagggctaacagtcctacctcataggactgnttctgaggattaaataggatattggntataccggntncccccg

SEQ ID NO: 29226 - DNA, 538 bp, Homo sapiens
  misc_feature (1)...(538): n = a,t,c or g
gagaagtgtttcgtttaaatcttaattctangataaaaaaataaggcatagtgcattccgacgaggttgtctcttgcggggaacaactgctctcttcagaattgtttancaaagctctcaccttaggcatagcttatgagggactatctggagctatgctttnggagccagggattttctttcaccctggtgctgtctgtgtacgttggaaagatgggcaanaagtatgcctctctcantaaagnggataggggaagaaccanaanactcctnaggccccttgtataatagaagagtatgancatggcntataacggattgattaccttagatgtttgcccctactgtatatgagcaaatgatgctgnattaatgtnatcataancagtatggnaatggcattntgactatgannatgcctcatncttaagggagcaggctgaaanctcaggcattcaatggnnagctcatggataaagcatcannatgctagcataccntggngaactacntnangggcnaccggtnncanngccta

SEQ ID NO: 29227 - DNA, 538 bp, Homo sapiens
  misc_feature (1)...(538): n = a,t,c or g
gaccagttatggtttctgcgcggcaggaatctgccattctttgcctataaaactgacagnggcctggcctttcccactctgaattggattgcttaggactttttgtttgtnngttcattgtattctctttgttaggttggttggaggctgattttgcccttaaatctattttgtcatgcttgcctgtattgaacctcatagaatgttttgaagaatttcgttttccaatttgctgagttattttaattcttattccactgagcctttaaatgtacaagtagttttatctcttgataaaaattaaagtgaccctggnnnnnnnnnnnnnnnnnnnnnnnnnnnnnnnnnnnnnnnnnnnnnnaaggcggatgggtcatccgaggtcaggcgctggagaccagcctggccacatggtgaaccctgctttactaaanttnccaaagtatccggcatgntgnacatgcctgagtcccantcttggaaggttaggccnanaaccttgaatcaggggctaaggttgaatggctgaaactacatt

SEQ ID NO: 29228 - DNA, 472 bp, Homo sapiens
  misc_feature (1)...(472): n = a,t,c or g
gcgacttccgcacggatgactcccagcccccaacgctgggccaggagatcctggaggagccctccctgccctcctcggaagttgctgatgaacctcctaccctcaccaaggaagaaccagttccactagagacacaggtcgttgaggaagaggaagactcaggtgccccgcccctgaagcgcttctgtgtggaccaacccacagtgccgcagacggcgtcagaaagctagcaccatcccggccctccgcctcctggccctgcctctatttattgcattctggttctggccgcgccgcgttgctggggtaagggcaagcactggggtcaagagcctgcacacatgagccttccgggctggaaggctggcgtaggacttggggctgtagcatcatcttcctgaccctggcacctgngctacttgttccganaagaggagcgctcatgncttttttgaccccaagttggctggac

SEQ ID NO: 29229 - DNA, 445 bp, Homo sapiens
  misc_feature (1)...(445): n = a,t,c or g
gggagttttcaccttttccatatcttcttctttattctttgaaactatttttcttcttagagttgtctttggtagagtggcccttaacttagtgtacagtatgattcatacccccgggggtggtcctttctcataaacccttctttcttttttttgagatnnnnnnnnnnnnnnnnnnnnnnnnnnnnnnnnnnnnnnnnnnnnnnnnnnnnnnnnnnnnnnnnnnnnnnnnnnnnnnnnnnnnnnnnnnnnnnnnnnnnnnnnnnnnnnnnnnnnnnnnnnnnnnnnnnnnnnnnnnnnngtggtttnnnnnnnnnnnnnnnnnnnnnnnnnnnnnnnnnnnnnnnnnnnnnnnnnnnnnnnnnnnnnnnnnnnnnnnnnnnnnnnnnnnnnnnnnnnnnnnnnnncgtgancactgcgatggacccttnataaacgtttaagc

SEQ ID NO: 29230 - DNA, 465 bp, Homo sapiens
  misc_feature (1)...(465): n = a,t,c or g
gcaataagacagcagctcaaattgttttgcgtttnnacatccagngaggggtggttgtcattcctaaaagctttaatcttgaaaggatcaaagaaaattttcagatctttgacttttctctcactgaagaagaaatgaaggacattgaagccttgaataaaaatgtccgctttgtanaattgctcatgtggcgcgatcatcctgaatacccatttcatgatgaatactgactgccgggagttcctgaacagatttttcactcccatgagtgccaagacggtgcaatgggtagtcccctagatgngaaaatgangagagagggttttaccatcctgagaagaaataatgatggaaacatgtttaatggttgtgcagngggaaatgactttgactcagnccattgaagtaaaaatattaaaatctgttgaaataactcttnggaaattatcnactaaatttttcaga

SEQ ID NO: 29231 - DNA, 412 bp, Homo sapiens
  misc_feature (1)...(412): n = a,t,c or g
gcatataaagctctcagctccatccatgcttggcacagggaagctgatatggtttggatgtttgtcccctgaaaacctcatgttgaaatgggattctcgatgttgtgatagcacctggtaggaggtgattggatcatggggcagattcctcatgaatggtgtagcagnnnnnnnnnnnnnnnnnnnnnnnnnnnnnnnnnnnnnnnnnnnnnnnnnnnnnnnnnnnnnnnnnnnnnnnnnnnnnnnnnnnnnnnnnnnnngagttttttggcaatntgttttagctcatcacccatcgttagtatatnnnnnnnnnnnnnnnnnnnnnnnnnnnnnnnnnnnnnnnnnnnnnnnnnnnnnnnnnnnnnnnnnnnnnnnnngnttaacaccattctctcggggaataggagaa

SEQ ID NO: 29232 - DNA, 405 bp, Homo sapiens
  misc_feature (1)...(405): n = a,t,c or g
ggattgcatttaactgtgagcagctttttcagatattaatcaaaatgcctgcaaagactacacagttgcaagggacatcagcttatatcccaacattattggttcctgatccatagttgtgagaccttggttgattccctgatagtacagcaactccctgggaatggaagttcaacttgttggctttagaacaacataagcagtttcattgaacattcactgaatgtctcctctgtgctgagcccatgtcagggactgggtctttaatcatgttcttggatgcagcatccctgcactctacctgcacatgacttctgaacagcatgctctgcccanacaagcctcagtgagggccaggacttgaaccctgtggaagcatgtaaagacatatttccgnggtggcaa

SEQ ID NO: 29233 - DNA, 410 bp, Homo sapiens
  misc_feature (1)...(410): n = a,t,c or g
ggtgtaacatacgggctgagacatttggttatttgagccttttcaccctttatttgtaaaaaggaggagagcctttaagtgaaatgtaaactaaacttggaacccctaaaacgattttgaacactacttgacatttaaatgtttattaaaaataaagcaaagattaagaagcatgtttggtaaagagttctttggcaggaaatggggacctatcagccaagctaatagccttagctatggcatccatagtaactaagacacgctgccgatgtaaatattnatgccagcaagcagtgctgnagaacccgggccgagcagttcanagcagtgaaattaaagcatcaaccgccaatgnttgatttatnttgnattatccgggtantccaangnattaccatnattnatntgtt

SEQ ID NO: 29234 - DNA, 398 bp, Homo sapiens
  misc_feature (1)...(398): n = a,t,c or g
gaaaagnnnnnnnnnnnnnnnnnnnnnnnnnnnnnnnnnnnnnnnnnnnnnnnnnnnnnnnnnnnnnnnnnnnnnnnnnnnnnnnnnnnnnnnnnnnnnnnnnnnnnnnnnnnnngtcnnnnnnnnnnnnnnnnnnnnnnnnnnnnnnnnnnnnnnntgacagagtgannnnnnnnnnnnnnnnnnnnnnnnnnnnnnnnnnnnnnnnnnnnnnnngttcattcnttggaggcagnantnccaggngaatntattgtaggaattcntttggtttgccnattcatggagtggctgtnaantgaaagttcnctgtaggngccaaaaaagcntccnttcctgggttagggagcaggaaagcccnttgtaaaaagggggctttnattttgggtcatcccatt

SEQ ID NO: 29235 - DNA, 407 bp, Homo sapiens
gaaagcctacagctgagggaggggaaggaacattgaggaacgaccctccaacaagcagctgtccctaaacctaactctagaagacttggaaaatggtggtgcactgaaggtaaccttaacaaaaatctcaatcccagctcagcttctgaccaaattaactcaactgtccctaccgatggcctggaagaacaaacagtgtgcccatttctaaacagatacttttacctctgtctctcctgtcttaacatatgtctggcattcaataagaaattatgaggcatccacaagagcaagagaaaaacgaagccactgtgaagagcgaaagcagtcaacagaatcaaactcatatatgataaggatgtcgaaaccatcagacaaggaatttaaagtaactgattcatatgtta

SEQ ID NO: 29236 - DNA, 411 bp, Homo sapiens
  misc_feature (1)...(411): n = a,t,c or g
gcttcattgttagtttctcagcttggtactgctgacacttagggctggagaattctttgttgcagggactattgtgtacatcttagatttcagtagtcccgcatccctcctttgggctacttgtgacaatcaaaaatgcctctagacattgctatgtgatccctgtgggtggggggaatggttaaagtgctctgacagagaactactgggtataatgggaagtcactgggggcttttaagcaggggaaggacaagaacagatttatgtctataaaaggtggctctgnnnnnnnnnnnnnnnnnnnnnnnnnnnnnnnnnnnnnnnnnnnnnnnnnnnnnnnnnnnnnnnnnnnnnnnnnnnnnnnnnnnnnnnnnnnnnnnnnnnnnnnnnnnnnnnnnnnnnnnnnnnnn

SEQ ID NO: 29237 - DNA, 403 bp, Homo sapiens
  misc_feature (1)...(403): n = a,t,c or g
ggnnnnnnnnnnnnnnnnnnnnnnnnnnnnnnnnnnnnnnnnnnnnnnnnnnnnnnnnnnnnnnnnnnnnnnnnnnnnnnnnnnnnnnnnnnnnnnnnnnnnnnnnnnnnnnnnnnnnnnnnnnnnnnnnnnnnnnnnnnnnnnnnnnnnnnnnnnnnnnnnnnnnnnnnnnnnaaaaggcctgaacaacaataatnnnnnnnnnnnnnnnnnnnnnnnnnnnnnnnnnnnnnnnnnnnnnnnnnnnnnnnnnnnnnnnnnnnnnnnnnnctccattggcctttaccatcttattttattnttatttttttttttttnacttatttattaatttttgaaanggagtctnactttgnnnctaggntgaantgcantggtgcaatnttagntnactgngacctcc

SEQ ID NO: 29238 - DNA, 233 bp, Homo sapiens
  misc_feature (1)...(233): n = a,t,c or g
gggtttaagggggaatttaaaacattaggtagcagcttgtagaggatatatttagggtcatgatgtccttcttgttggccttaaaaacacttcctgcgccaggttcaagggtcaattgggaacaggatcaacagaggatgagggtttttttttgtttgtttttgtatcattttaagacaaggtcnnnnnnnnnnnnnnnnnnnnnnnnnnnnnnnnnnnnnnnnnnnnnnnnn

SEQ ID NO: 29239 - DNA, 402 bp, Homo sapiens
ggttccattttgggtggcagcagctttggatcactcattattacaaggtcatgctgaaattttattttgctcttgctatagatacttaggtaatgtggatttgttttggtagctatttcactgaaggaagtgctacttatataaaagctagaaataatgtgattcctaggatgagaaattggttaacagagctctgttgtctggttttagtctttctaaaggatattttaactaaaactatggagatgctaagagagtgactttctaaatatgaaacagataatttacggtacaaggctgacatagtgcccttgtcagtttctgtaagatgccactactgtcacaaggtgtttcagactcttgataaggcagtgttttgtattttagttctaacattgagtt

SEQ ID NO: 29240 - DNA, 409 bp, Homo sapiens
ggatatattcaatgtagataaatctcaaatgcatcaatgcttaagtgaaagacactggattcagtaggctacttatgattccatttctgtgacattgtggaaaaggcaaaactattggacaagaacatcagtggtggtttgggataggctgacaagggagtatgagggattttttcagaggaacagttttatccgactgtaggtatttctagcacagaattgggagtctgtccagtaaaatgatagcgattattagactcttggttggagaaagatttgtcatcttgacgtaataggtgatagctgaaacttacggggagaatattacaaagcaagaagggggagaatattacaaagcaagaagtagcttatgtctagaaccaatctataacgtctaacatttagacta

SEQ ID NO: 29241 - DNA, 399 bp, Homo sapiens
  misc_feature (1)...(399): n = a,t,c or g
gnnnnnnnnnnnnnnnnnnnnnnnnnnnnnnnnnnnnnnnnnnnnnnnnnnnnnnnnnnnnnnnnnnnnnnnnnnnnnnnnnnnnnnnnnnngggtcaccctgtggatgctgtgaatgctctgaggaggaagcagagacagtttccctagaatgggtgttgcttaagctgagccttggagactagatggccagtgcaccaagcttccttctcatcttgctgcacaagatgtgctggggaaaactagccttctctcgtttcttgaacattattgtgttagcaggggacagttcatctgagctgccctgggagtgtcaaggaaaggctctttctgagccccaaagaccaccttccctgccttgctttacccgtgctggctcccccgtgacaaatctcgcgt

SEQ ID NO: 29242 - DNA, 413 bp, Homo sapiens
  misc_feature (1)...(413): n = a,t,c or g
ggtactcttatcagtccttgatgtaggacctgttatnnnnnnnnnnnnnnnnnnnnnnnnnnnnnnnnnnnnnnnnnnnnnnnnnnnnttgtcatgcaacgtgtaaatggcagagctaggatttgtacccagcatgtctcttaaccactaggtgtcctgcctgtgcttggggcagagatgaaggcctctctctccctgttctcctagtcactatacctcctgtggagaggagtgagtgaagaagtggaagaaagaaaaagagttactttccgggagggcagaagttcccagtctgtgggcccagaagaaagcaagcaggggaaaatggtcccatcattaccgttccataaaatgcaagcatatgtaacacctgcaaatcttatctaagtgcatgagattttaaaaagatcaat

SEQ ID NO: 29243 - DNA, 403 bp, Homo sapiens
  misc_feature (1)...(403): n = a,t,c or g
gggggtcttggaggtcatcagatcttggctcctccactgaaccagggccttggggctaccatgcttaccttgttggtgtaagtgagctctcgcagcagccagacatactgcagagcccattgtgggtgcaggcaaactgactcccaggtcatgtgcaagaggccatgagagaagacaggaggatattcaaccaatctggcttcagaaggaggctctgtgaggacagctgagtggcccaaggtggctcaaacagggtacaagcaatcgtcatcctcagagtgggactccatagtgtgataaagcanccatggagcggggacaggagacagggacgggacaccaccagggcaggggacccatgcatacaggaccctganctcanaanggccctaaatgttctgcc

SEQ ID NO: 29244 - DNA, 411 bp, Homo sapiens
  misc_feature (1)...(411): n = a,t,c or g
ggtactcatgtactccagaagtagctccattcccaacatggttttgtctcatagcagttttggtcccagggagttgggtggtagtggtgggaggactcggtgtgtgttccttctctggatcaacgaaactgcatggacttcaggcaggtccctgaatccattgtgagaattgtgggacttgtctgtaactaggattacaggtatctccagtgctaatggcaactgctagaaatctctagcttaccttttctttctaatggggagtccctcttggctccaggcagatcttatttaggtgttttgcttccctgtgtatgctatcacactaacttgctcataaacacaacttgaacaacatctgtaatgcttaaacctaattattttaacatctgnaattcttaaacataatta

SEQ ID NO: 29245 - DNA, 434 bp, Homo sapiens
  misc_feature (1)...(434): n = a,t,c or g
ggctagaacagtctgacttttcttgtttttctatcccttgctttcttgattagaatgaataggaggtgggtctggatatagcagctggaaacctgtgttccatgagtgatggggaagagagggagggaataggttcctctgatttttggcattttctaagacctgatgcccaccttgtcagagaatgcgatgactacttttgtgttcttccttttccctttttctcccaattataaaattgttttctctttcagaactgcagaagtgcattttgtttctttgacactttgatgttgttaatttagctgaatacctagtgaacattttgtgtcataatccccttgttttatgaaatccagtatggtctagtcaccttacatttctgcctcatattgccttaagcctttttttgtcgtagctcttactanattttg

SEQ ID NO: 29246 - DNA, 458 bp, Homo sapiens
  misc_feature (1)...(458): n = a,t,c or g
gtggaagaagaagcttatggtcttcttttcatcttgtatgtctgtgaaataccactatgagttgctgaactacattgatttgcccgtcttggccattcatggaaagcaaaagcaaaataagcgtacaaccacattcttccagttctgcaatgcagattcgggaacactattgtgtacggatgtggcagcgagaggactagacattcctgaagtcgactggattgttcagtatgaccctccggatgaccctaaggaatatattcatcgtgtgggtagaacagccagaggcctaaatgggagagggcatgccttgctcattttgcgcccagaagaattgggttttcttcgctacttgaaacaatccaagggtccattaagtgaatttgcttttcctggctaaaaattctgacattcgnctcgcttgngaaaatgantganagaattactttnttctaggc

SEQ ID NO: 29247 - DNA, 426 bp, Homo sapiens
  misc_feature (1)...(426): n = a,t,c or g
gggacctaaaatcctttacaaactattcaggaggctattctgcagaccatcctgttattaaggtcttctggagagttgtggaagggttcactgatgaagaaaagcgcaaactgctgaagtttgtaacaagctgctctcgaccccctctcttggggtttaaggagttgtatcccgcattttgtattcacaacggaggctccgaccttgagcggctccccacagccagcacctgcatgaacctgctgaagctccccgagttctatgacgagacacttttgcgaagtaaacttctctatgcgattgaatgtgccgctggctttgagctgactgaagctgangctggggtcanacccctaccgagaaccagngcttnnttcnnnncagcgcctncccanaccangaggatctcncactgncnncttgagg

SEQ ID NO: 29248 - DNA, 424 bp, Homo sapiens
  misc_feature (1)...(424): n = a,t,c or g
ggagagataataccttcagcccagaaatgctggcttctagtagtaaacataaaccacatgaagccaagccacatgttcctgcctgtgtctgcccctgcaccacccaataacacatgactgactgttaattacatgtttgaaattgctacatgcntatgggatcctaatgtcnccatatgnaccaacttanngntgctgnttgnggccanncccacttcgatgggtttnnngctnntganctntantcttatttnattgntannattcaanaancntntctnnatgcccatggtggnancattctgatctaanttntttntgnntttgatcntnctnnnnttnntnttnnacnancngnacnntntnnntnntctgntanatngntaagntgnnttcttnanntnnntttnngntanctgtctct

SEQ ID NO: 29249 - DNA, 432 bp, Homo sapiens
  misc_feature (1)...(432): n = a,t,c or g
gtaaagataaaaagttagaggttggttcaccttctatttactcaggccagattctctaacagaatatttttgaacttgattcatctaggagtgctcanagtttttgaggagcaaatcccaaaactgcacatgcaggtgaatgggtcttaacagatttggaagtgccccttgccttaatttcttctgacttgacacaaannnnnnnnnnnnnnnnnnnnnnnnnnnnnnnnnnnnnnnnnnnnnnnnnnnnnnnnnnnnnnnnnnnnnnnnnnnnnnnnnnnnnnnnnnnnnnnnnnnnnnnnnnnnnnnnnnnnnnnnnnnnnnnnnnnnnnnnnnnnnnnnnnnnnnnnnngtagganggggaggattgcttgacccaggagttccaggctgcagtaaagctaanatggtgccactgnacttcacctgggc

SEQ ID NO: 29250 - DNA, 428 bp, Homo sapiens
gaaatcagagccagaagaataagcaaaccaacatctaacaataatagttaagtattgagcacttactgtgtactctgtgcctggcatgaggctatctcattaaaccttcataacattatgaggtaggtactcttactatcccatttcaagaatgaagaaaattaagacttaagttatatcatttgcccaaggtaacacaataaatgccaatttgacatgttgatactcaattaactatgataaacaatatatctgaattactgccattgacccccctcaaagctaagaactggaaaggatctcaggggtcatataggtttaatcccctgccacctcatgtatgcatctttggatgggcatctatggaaggagctagcctgtatttaataccttccagatgtgaggacctgagctagatgctttagacg

SEQ ID NO: 29251 - DNA, 379 bp, Homo sapiens
  misc_feature (1)...(379): n = a,t,c or g
gcaattatacaaaattcaannnnnnnnnnnnnnnnnnnnnnnnnnnnnnnnnnnnnnnnnnnnnnnnnnnnnnnnnnnnnnnnnnnnnnnnnnnnnnnnnnnnnnnnnnnnnnnnnnnnnnnnnnnnnnnnnnnnnnnnnnnnnnnnnnnnnnnnnnnnnnnnnnnnnnnnnnnnnnnnnnnnnnnnnnnnnnnnnnnnnnnnnnnnnnnnnnnnnnnnnnnnnnnnnnnnnnnnnnnnnnnnnnnnnnnnnnnnnnnnnnnnnnnnnnnnnnnnnnnnnnnnnnnnnnnnnnnnnnnnnnnnnnnnnnnnnnnnnnnnnnnnnggaaatncanattattgggccatanntaaagnnntattggatacanncatgcttg

SEQ ID NO: 29252 - DNA, 484 bp, Homo sapiens
  misc_feature (1)...(484): n = a,t,c or g
gcggcccgagtgaacgagctcaaagggctggtgctgtgccccttcttgcctactgggcgggaagtgatgggggttactttaccaagcatcttcccctggtgagcctggtccatcactctgccattccatctgcagccttgtatctagagagcagaccaagctggcgtgcgtcaggctgtgggctggctgggatgcctgcccaggctgacaccttcccagtggcaatttgtcctggactgggagatatttgcgtattgcctcggattagagagaactcaagggctaaatgggcatgggaagtgttgtgtgctgtgcccacttcttggtctgctgaaggctctcaaaagtcctgcatgagtggatcctgcctgctgncgtggtanctagggtctcctgatggtggcagatcccccagttgttccccctggcctgctgcaacagcaggnttgggaaaggcagatctcctctncttgcttnaaggccg

SEQ ID NO: 29253 - DNA, 274 bp, Homo sapiens
ggaccagaattcccaactcttagaaggaaaccataaaccagattgtttgtacacacagtttagacacagcaaaccactcttatatttaggaaaagttttagattggtataagctattttttatcagccgcatttccagattgcagccacagacccccccttgcaggcgagccccctctgtgaggaccacagcctaggcctcccaggtgaacccttctctacacacccccattcccccactccagataaagcttcagttataaaaaaaaaaaaaa

SEQ ID NO: 29254 - DNA, 455 bp, Homo sapiens
  misc_feature (1)...(455): n = a,t,c or g
ggnnnnnnnnnnnnnnnnnnnnnnnnnnnnnnnnnnnnnnnnnnnnnnnnnnnnnnnnnnnnnnnnnnnnnnnnnnnnnnnnnnnnnnnnnnnnnnnnnnnnnnnnnnnnnnnnnnnnnnnnnnnnnnnnnnnnnnnnnnnctttggtgnnnnnnnnnnnnnnnnnnnnnnnnnnnnnnnnnnnnnnnnnnnnnnnnnnnnnnnnnnnnnnnnnnnnnnnnnnnnnnnnnnnnnnnnnnnnnnnnnnnnnnnnnnnnnnnnnnnnnnnnctaannancacantanctganctgaaaaattcaaaagtgagcttcagtggcanatngantcangcagaaagaanaatcanngancttgaanacngatcatttgatattatccagtcaaaggancaaggaggaaaaatantaaagtaagcctacaggactctaacccaatatgcgcattatanaagg

SEQ ID NO: 29255 - DNA, 477 bp, Homo sapiens
gcttaatatatattgtcaaaagttccttttacatatgtctgggattggaagcaaatataaatgtatccattgagaaataacatactttacttttattgtttacatggacctatttattttggatatttttcttaaaagtaatctgcagagctttctcaagaggcaactcatcacttattatagcccacctccctcacccccacacatggagcttctaccttttaaaaatgctcaacacaggacaacattgtagtagggaaactggttttcatagaacagatataaccttctcagtttattagaggctttttctgatctatcttcatgacaagtgtaaggaaatttaccacacatttttatgaaacattttctgaaaaagtaatggaaattataggaattcctatgaaaaaaattactgatttggggaagattttttaaagtttgtgttaatatgattaaaagaaatcatcggttgct

SEQ ID NO: 29256 - DNA, 478 bp, Homo sapiens
ggctttcctccatgttagatgtgacttggaaaatgagaaagatttagcaaaattccaccgtgtcttttgccaggctagagacagggagagcagagtaaaaccctcaggctgctgaaatttctaggctgttaggaagcccctcgaattctgtgaaaatgagggtttcttaactcacactgagagcggaaaggggcagacccttttcataactccctcaagtgtgtgttacctttctttaccagcatggtaagcaacaggacatatcccagcctcggacatgtctgtatgatccaaggtacccaaagtcagacagagtaaactcaagcctggcgctggctttctgccgcttcatgtgctttggaaaaagcaggagaagcaatagcagcaggagtccccagcagctggagccgcaagaatgaactgcaaagagggaactgacagcagctgcggctgcaggggcaacgacgagaagaagatg

SEQ ID NO: 29257 - DNA, 442 bp, Homo sapiens
  misc_feature (1)...(442): n = a,t,c or g
gnnnnnnnnnnnnnnnnnnnnnnnnnnnnnnnnnnnnnnnnnnnnnnnnnnnnnnnnnnnnnnnnnnnnnnnnnnnnnnnnnnnnnnnnnnnnnnnnnnnnnnnnnnnnnnnnnnnnnnnnnnnnnnnnnnnnggcatctgtagagcagaaagtacattagtggttgctgggagatagggaggttgggaggaaatggtgaatggtgttaatgggtatgttctaaggtcagantntggtgatgnntgcacncntntgnagcaangcggtnnacctgngntnttcnctntatcnngggtgnagantgtnngctattttancattnttnagatggcngcnntnnttanananncntncggccttggngtantnncactnntcnttgngnnnatctgnncctnancntngnatactggttccacantngnnngccatngngatgcc

SEQ ID NO: 29258 - DNA, 484 bp, Homo sapiens
gtcctgaattagctcagggcttggtacaggtgttaacatcctttccttcctttcccccatcttatgtttgccattattgtctattctaaaagcagtcacctttttcatatcttttaaagggtttacattctcacttactagggactgtatttattatgagtctacaaataaccacaactcttgtgtctgtaatagaaacacccttgaactggctccagagggactgaggagagggtgcaggatgtgacccagagcccaaggacagacactgccactcactgcagtcaggaagagcaaaaggcttcacctgccttctcacaggtgcatctcatgtggggagtatgcaccgctctcccagttttaaagatggagcacggggctcagagacgtcatatggcctgtctgtaagtcacactgctgagaaggaagagctgcagttgaacctgggaagactgattcccattgcagccatggtgatgccttg

SEQ ID NO: 29259 - DNA, 475 bp, Homo sapiens
gagcaccatgagcttcaataccctgtcttcttttagcacttaaggaggctcatttatttctggtgctgcacttgtcaagatttggggagagaatgtgtttgcatatatgtgtgtgtccttgggtttgggggtggcgattcaggcacgctgccagggagatctggcttcctgccttagactctcctttactccctaatcatggtgtaggctgttcattccctaaaatctctttctcagcttttgttccttgcttgccacattattgagaaggaaaaaaaatgcagggggtggggggtgcatagggaatcagttgagaccaagagaaaagagacaactacctaacagagggaagaagacgtactttttccctaattttagcttcttgggtgctcacctcataggtgaggtggagctctgattttctccatgctgtttcctcttcttgaactgagacaatgggtccaattcaaagaaa

SEQ ID NO: 29260 - DNA, 478 bp, Homo sapiens
gcaatccagcacttttccttgaggaactcacacttgggggaccaaaatgtgcaggacacaaatacttatgatctagtagaagaaaatgaattagtcacataatctcacaggcatttaattacaaattgtgatgggtgctgtaaaagaaaaaaatgtgtatcagaattggagataaaggtagaagtgaacagatattcaaggtgatgtctgaatgatgagcacatatttatcaaaaggaagacgggaggaagagcactctaggcagagggaatggcatctgcaaagaccctgaggtaggacagaacttggatgtctggggaactgacaggggacccaagggacaaggagcccatagtaaacaagagaaaagacgtatgataagactgaagagagaagtagaggtaaatcatacatggacttgtggtccacgttaaggactttatgcaagaagtaaatctagatatacctactcaactta

SEQ ID NO: 29261 - DNA, 479 bp, Homo sapiens
  misc_feature (1)...(479): n = a,t,c or g
gttttttcctnnnnnnnnnnnnnnnnnnnnnnnnnnnnnnnnnnnnnnntttatatgttggtcaaagggtacagacttacagttatgaaatgaatacattctggagacctaatgtacagcatgnnnnnnnnnnnnnnnnnnnnnnnnnnnnnnnnnnnnnnnntagatcttaagtaatctcaccacatatacacacaannnnnnnnnnnnnnnnnnnnnnnnnnnnnnnnnnnnnnnnnnnnnnnnnnnnnnnnnnnnnnnnnnnnnnnnnnnnnnnnnnnnnnnnnnnnnnnnnnnnnnnnnnnnnnnaaactttcatttgtataattttaggtataatttgggcgactacaatggagagatcgtgtctgaggttatggcacagagacagccaatgaaacctacttatgccatccccatcatccctattactaatagcagtcaatttaaacaccaggaagcaatggatgtgaaggagt

SEQ ID NO: 29262 - DNA, 488 bp, Homo sapiens
gtcaggtgagattttcaaacattcaagcatttattccttcttggtgtcagtggagccctgtgacactcacacaggtaggtgggcaagaagcatggagcgcaccctaattaaatgcctactctgtgcaggccctcctgtgatctttgctaagtgaatagtcattatgaaatcaaacagatgaagtcagatatcttggggaaagtcacagtcaagtctgtctttaaactcagaacatttctattctacacgggtacttcttaatcttagtcacttgtgtctgggttaagcccttaaataacttataccagtttccctagcattccttcctgcaacctagagattcctaattatgataatatccctgatggaatgcagtggttcccacatctggcttgtccccagcaaagaattgaggattcagcactctgtgaaggaaaagcatggtgtgcagttagagcagatccacagtgacctgacttcatcagaag

SEQ ID NO: 29263 - DNA, 481 bp, Homo sapiens
ggcctcttaaatgtggccatttagtttgaactcctttttagttattttaaacagtatatgcttaaacatcacacgattttataaagcaagaaaaatgaaatgatctccctattcccccatggtgtaggcctccagatccttttctggcttttaggcaggacaattaacaatgtggattctgcagtcagactgatggggtttccatgcatggcctcaccattaactcctcactggggagaccttgggcctcggttttttattcatagaatgcatgttgaataaaccatgtgggaaaaagcagagccagcaccagcccctgctgactcactgatccctcggaaaggtctgggatgagtcaagtcttcagggaataagcagcaaggacttggaattcctgagcaagccttgggttccccacgccctaggaagtccctctggaaggggagcaggacctctcccaccagatggacggagttcgctt

SEQ ID NO: 29264 - DNA, 431 bp, Homo sapiens
  misc_feature (1)...(431): n = a,t,c or g
gctggtgctgagtatgcctccaaagccagtgctggtgctaagcgcactactgaagactgtgctcgttgtgggtgcactgccaaagctggtgctagtgctgagtacaccactaaagccagccgtggtgctgagtgtgcctccaaagccagagctggctccaccactgaaagtggcactggtgctgagtgggccactaaaactagagctgactccaccactaaagctggcactggtacaaggcatgccaccaaagctaatgctggcttcactgctgaaactagtgctggtgctgtgtgcacaaccaaagctaatgctggctgcgctgctgaagctggagctagtgctcagtgtaccaccaaagctaatgctggctgtattgctgaagctggcactggtgctgggtgcaacaccaaangtaatgccaggtcacc

SEQ ID NO: 29265 - DNA, 418 bp, Homo sapiens
ggggcccagttaaatatgatttgcattttttaaatttgccagttttattttctaaattctttcatgagcttgcctaaaattcggaatggttttcgggttgtggcaaaccccaaagagagcactgtccaaggatgtcgggagcatcctgctgcttaggggaatgttttcgcaaatgttgctctagtcagtccagctcatctgccaaaatgtagggctaccgtcttggatgcatgagctattgctagagcatcatccttagaaatcagtgccccagatgtacatgtgttgagcgtattcttgaaagtattgtgtttatgcatttcaatttcaatggtgttggcttcccctccccaccccacgcgtgcataaaaactggttctacaaatttttacttgaagtaccaggccgtttgcttttt

SEQ ID NO: 29266 - DNA, 411 bp, Homo sapiens
  misc_feature (1)...(411): n = a,t,c or g
aaatgttctgatgaccaggtcagggtcaaaggatgttnccaggattccttcccttcccttccgttcccttcatttcacttaggtaaggatgatatggtatgacttgatggaattatgtagtacagggatgacattattttctgngtctgttcgcaagggtaattaggtccatgctgcctaggagtcatttcagaacactgacagagagtgtttggtctcagggcangaaatgccangaagtgggaattggcccatagagaccctgctgtnaaacagatctggtgttccttgacagagtggcgctnngnctcttgntgccccttttcatagcactttctctcaccatgaagttgantgatttatctccccgtttgtacttatggggtatgcttcacttggttgtggnggggg

SEQ ID NO: 29267 - DNA, 414 bp, Homo sapiens
  misc_feature (1)...(414): n = a,t,c or g
gctggaatttggtatctcattgccacaaagggtctctttngtattaagatctctgttttaatgtttagactagtcattnnnnnnnnnnnnnnnnnnnnnnnnnnnnnnnnnnnnnnnnnnnnnnnnnnnnnnnnnnnnnnnnnnnnnnnnnnnnnncatgggtcatggtcttcacatttggctcanaatgtatctctttaaatattaaaaaagaaagaaaataaaaaatgaaagcaggctatagagcaaaaagtacaggatgatctcagcttcgaaaagttctctctatatatacatttttaagagtgtttcaattttcttttatgcttttcaaagtttctacaaggaacatatattactcttgtaatcanatatgaaaatgatggaaggaagaaaggatgaaagggggaggag

SEQ ID NO: 29268 - DNA, 423 bp, Homo sapiens
  misc_feature (1)...(423): n = a,t,c or g
gaggcccaacaccaccacattagggataaaatttcaatangcattttgctgangaaaaataaatcataaccaaaccacagcaatatttcatcttggtaatgcacaagttctttccattcattatgtagaggatgagtcttctctttgaaattcctttanataaaaccttctttcaccatttatagctaataattttaattgtttaattcnnnnnnnnnnnnnnnnnnnnnnnnnnnnnnnnnnnnnnnnnnnnnnnnnnnnnnnnnnnnnnnnnnnnnnnnnnnnnnnnnnnnnnnnnnnnnnnnnnnnnnnnnnnnnnnnnnnnnnnnnnnnnnnnnnnnnnnnnnnnnnnnnnnnnnnnnnnnnnnnnnnnnnnnnnnnnnnnnnnnnnnnnnnnnntttntntatgntggncaggctggc

SEQ ID NO: 29269 - DNA, 427 bp, Homo sapiens
  misc_feature (1)...(427): n = a,t,c or g
gcagagtaataatctgtgggcagtgaagcgtttgtgaatnnggggaatcaggtgtgttttggacatgtttagtccctatggagatgtcaggtaggttgttgaatatgtgaatctggagctcggggataaggtcagatctgaagatatacgagaggtagcatatttataagccatgattggttgagggtacctaaagagagagtgtacataaataaaaaaacattctcacatttagaagtctgattattttttaaaagaaggatgagtcatcaaaggaaactaaaaaggaaagatcagtgaagtaaggggaaaaaaacaaaagcccagtagatgaagtatctcaaggaggaggaaagtctgaatgtgtgaatatcaaatgcagaacaagagagctnagatgagaatggggaattgactgggggatttt

SEQ ID NO: 29270 - DNA, 421 bp, Homo sapiens
  misc_feature (1)...(421): n = a,t,c or g
gccctggtatagttaaaagaaaaaaataaatgaagtgattgcagcttgagttgattttatgaacaggcacaagtatgctgccttatgctttctgatcttgcaagcactactctctagggccttatacatgggaggacatgatagacatgtatacaaaaaaaaaagactattctatattgattgccataagtaaatgcttttatcattctcaggagggatggttttgaagcataaatatgctgtaaaaggatggcagcaaaaaggttttcaactcatttgtattccttgattaactcagtttgacagaatagaaagtcactggtttgtaaagaaggtaaggaagcctgtgnacaagagtccaatgacctagtatagatagagaatgaagaacattttagttnccatattattaccgaaatct

SEQ ID NO: 29271 - DNA, 419 bp, Homo sapiens
  misc_feature (1)...(419): n = a,t,c or g
ggaatagtaattatacattattagattacatgacttcttagaaatatggaatcaattttgactatagcaaaaagaaattatacaaagcttgaaaataattttgttattttataaatgtgtaagccccttaatgtctatcagtaattactgatttattagaaatatcatgtttttctctaatattgcccagtaaattttttttaaatttatttccatcagagttactaatttagagtgtaaaatagcaaaataagaaatatcaaggaaaaaaggtatttctggtaactttttatctaaaattgaccattttgatacagaatggtaacaagtcatgcttagggttaggaaatgtaactgtattcactatactcaatcctaaaaantgggnaatacctctatgttcaaggaggtttaagttc

SEQ ID NO: 29272 - DNA, 428 bp, Homo sapiens
  misc_feature (1)...(428): n = a,t,c or g
gggtacactggtacctacacgctgtcactcaggcagagggtgaagacacactttcgtggacaagagcacacaggcgaatacattcacacaggtgcgcgcnnnnnnnnnnnnnnnnnnnnnnnnnnnnnnnngtagtcacaggctagaccgggccacggagcagaggctggattgcccctcagcccgaagttctccacctggccttggcatggagtagggttgtgcgctgaggtctctcccaaggctgtgtgctgggagtcactcttgagcctagctggagggttgcaggagctctagggtgttggatgggggatcccaagatccacagaggtcctggcagagctgggggccatggggtgcaagggagagagggcggattggctgatctanaatggtgaggcanagggtatgtgtggcttnnggctttg

SEQ ID NO: 29273 - DNA, 417 bp, Homo sapiens
gcccaggacctcattgtggcagacggccctgctgtagaagttggagattctttggaagtggcctataccggctggctctttcagaatcatgtgctgggccaggttttcgactccactgctaacaaagataagttgcttcgcttgaagttaggatcaggaaaagtcatcaagggctgggaggatggaatgctgggcatgaaaaaaggaggaaagcgattgcttattgtccctccagcctgtgctgttggctcagaaggggtaataggctggactcaagcaacggactcgatcctggtgttcgaggtggaggttaggcgggtgagtgaaactctctgtgttttgtttgatgagtcctctgcctgtctctttgctagttcacaaaatgaataaataaatgaagatcttgaaaaccagggt

SEQ ID NO: 29274 - DNA, 418 bp, Homo sapiens
  misc_feature (1)...(418): n = a,t,c or g
gtgtggcgagtcccacagtctggccctcagtgaccgaggccagctgttttcttggggtgcagggagtgatggtcagctaggactcatgactactgaggattctgtggcagtgcccaggttaatacaaaagctgaaccagcaaacaatattacaagtttcctgtggcaactggcattgcttggctcttgcggctgatggccagttcttcacctggggaaagaacagccatgggcagcttggcttagggaaggagttcccctcccaagccagcccacagagggtgaggtccctggaggggatcccactggctcaggtggctgccggaggggctcacagctttgccctgctctctcaggagctgtttttggctgggggatgaataatgccgggcagctagggctcantgatgaaaaaaaat

SEQ ID NO: 29275 - DNA, 422 bp, Homo sapiens
  misc_feature (1)...(422): n = a,t,c or g
gcgattgtgtcagtaaggggacctgtggattccagccagatatgactccaacaaagacggaagattgtgaaattatcaaaggtgggatcatagtgttgtggtcatgcttgttctgtagagataaatactgacccctttagcacaaatgcatgtttcataggatttgcttcgtggaagctagtgggagagagaaggagaaaggagcggcatgtggaggacacgagggtggtccccgatggccgtggacctgggtggtaagcacctgcagttaatcacaccattatctactctgtgggtggatttgaaattttccttaaagaaaagtgtgaaaattgggtttggcccaggtcttttctcagggagcttcgtgactggatcatctagaagangggaaatggncatttataaaagctgaggtagag

SEQ ID NO: 29276 - DNA, 419 bp, Homo sapiens
  misc_feature (1)...(419): n = a,t,c or g
gcggcacgagcttgggaaaagttttatacacaggaacacttgaataattgaacacaaatgttcattgtagttcagaattagtagaatattcaacaggttaccattggcatgtgggaagcaagagagcactgtggctagaaggtattgttttagagggaaacctgaaatggactgcagtgtacctgctgctatgctgactcaaaaaaaaaatttcacaaagtaggcaattgtcagggtttctagcagtctctttgagccttgttaaagaaattgttaatctcattcatacctaccaactcctagacctccatatcttaagatttggattactgntgtancttaactgtnctccctgcatataatccccatatttaggctgctcttcaattagccncatattgnaagttcattttcctcct

SEQ ID NO: 29277 - DNA, 405 bp, Homo sapiens
  misc_feature (1)...(405): n = a,t,c or g
gcctgaatgttgcccacctgtcctcaagccacacatgcacctgtaactcagtgcaagcccagaaactccccgtggggactcctagagctgtcagtggcctcacatagcagctggtccagtctcttgtgattgcccaaggaaactgaggcctggagagcttggggtcactgctctgaggccatagagatgcctagtagaagggccaggcctagaagcaggatccttgctgcccctctgagctgtttccatttaaaatcacatgaaggnnnnnnnnnnnnnnnnnnnnnnnnnnnnnnnnnnnnnnnnnnnnnnnnnnnnnnnnnnnnnnnnnnnnnnnnnnnnnnnnnnnnnnnnnnnnnnnnnnnnnnnnnnnnnnnnnnnnnnnnnnnnnnnnnnnnatggagc

SEQ ID NO: 29278 - DNA, 423 bp, Homo sapiens
  misc_feature (1)...(423): n = a,t,c or g
gagaggggactggctgcctgcagacaggtagctccacagggcaccgatagggtttgggacaggtgggatatgcaagcctaaataggtggtagatgattccaggtgccagggtctgtccttgggccttgagcttcaatcctaattcccatcgctgactccaaggttctgcttggctgctgcccactgccttcaattcatacataaggacccagctctccattccatgtgtctcctttgagaaagaaccagcctagaggctgaggtggggtggtgcacttccatcaggagttcattggtttgagtgggattggcggncaggggctggggtggacaataatgaagtcttttagctgggttcgtatcttacttggttgcatgacccatcaggtaagggaggcccaacggctncattaatttggaaaa

SEQ ID NO: 29279 - DNA, 415 bp, Homo sapiens
  misc_feature (1)...(415): n = a,t,c or g
gcaggaatgaaaaagcaggtatagaacttcaggtgttttgtcaccctccctcccccagtggtgtgtgtaggaaaactttgcttctttctgtaaatctgatgtctaatctcttctgactttacgttcaatcagttgattattttcattcagcagatgtgatcggtttgcagggttctcagtcaagtaggatagagaaaacatgaagatacacaactaaataaaatgctatatataaaatgatgttttatgcaataattatagctatgctatgttaattcagcaattattgctgctttggggaaatgagaaggctttgaggaggaggtagtatttcaaaatgatgaggtttgaaagaagtatatgatgaaatgcagaaacgaagaggnngcgnatttgtttnangagaagnggataa

SEQ ID NO: 29280 - DNA, 408 bp, Homo sapiens
  misc_feature (1)...(408): n = a,t,c or g
ggnnnnnnnnnnnnnnnnnnnnnnnnnnnnnnnnnnnnnnnnnnnnnnnnnnnnnnnnnnnnnnnnannnnnnnnnnnnnnnnnnnnnnnnnnnnnnnnnnnnnnnnnnnnnnnnnnnnnnnnnnnnnnnnnnnnnnnnnnnnnnnnnnnnnnnnnnnnnnnnnnnnnnnnnnnnnnnnnnnnnnnnnnnnnnnnnnnnnnnnnnnnnnnnnnnnnnnnnnnnnnnnnnnnnnnnnnnnnnnnggtgaattgctcaatctcaggataaaacctgaatggatagtncgccgcttcttatggatgancnntnaaagtggttantngagacgggtttcctctgggncatnctgtntngnctcctggnntcnannnnngagnntgcttggncttncangntnntggnactac

SEQ ID NO: 29281 - DNA, 407 bp, Homo sapiens
  misc_feature (1)...(407): n = a,t,c or g
gnnnnnnnnnnnnnnnnnnnnnnnnnnnnnnnnnnnnnnnnnnnnnnnnnnnnnngtcnnnnnnnnnnnnnnnnnnnnnnnnnnnnnnnnnnnnnnnnnnnnnnnnnnnnnnnnnnnnnnnnnnnnnnnnnnnnnnnnnnnnnnnnnnnnnnnnnnnatattcagannnnnnnnnnnnnnnnnnnnnnnnnnnnnnnnnnnnnnnnnnnnnnnnnnnnnnnnnnnnnnnnnnnnnnnnnnnnnnnnnnnnnnnnnnnnnnnnnnnnnnnnnnnnnnnnnnnnnnnnnnnnnnnnnnnnnnnnnnnnnnngacttaccttatacattanaaggctctnacccgcttaaagnnntcttggcntataaagganngnacnnagaattaccnnngnntnnanggncntggct

SEQ ID NO: 29282 - DNA, 419 bp, Homo sapiens
  misc_feature (1)...(419): n = a,t,c or g
ggatatggggtcctccaagaaagttactctctcagtgctcagccgggagcagtcggaaggggttggagcgagggtccggagaagcattggcagacccgagttaaaaaatctggatccgtttttactggttgatgaatttaaaggaggtanaccaggaggatttnctgatcattcacatcnaggatttnaancngtntcctacctnctgaanagtgncngcatggnccatgaatactcttgtggacacactgnntaattgatcccanganatttgcaattggacgantgatnccnnnncntcntgctttntgagatcccttctttnannanncagcnnattntttactttnttnntatnnncttntgntttnanaaanntnnttnnntnancttnnngntttnattntntgatncatccg

SEQ ID NO: 29283 - DNA, 422 bp, Homo sapiens
  misc_feature (1)...(422): n = a,t,c or g
ggaagaatttatggtaacacaggaaaatgtctatatcatattaacttttttaaaaagcaggattgtaaattgtatataccttttcttctcacctatgggaacatatttctagaaaaagggaaactcaccaaaatgttccctcagcatcacacaggaagactgactaccattctttcatgcagcacacctttnnnnnnnnnnnnnnnnnnnnnnnnnnnnnnnnnnnnnnnnnnnnnnnnnnnnnnnnnnnnnnnnnnnnnnnnnnnnnnactttgttaaattctgtgctggcttctctgcaagtcctgggagtataaagataattcagaaagtccttcccttgaagagtttgcatctatgatccgaaaaactattctgtgtgagtaaacaatcaagcctcaaaagctataagcataattcga

SEQ ID NO: 29284 - DNA, 223 bp, Homo sapiens
  misc_feature (1)...(223): n = a,t,c or g
gcttctgttgtttcctcgagcaagtaaaaactttcttgagttagttttggtttgctctccacttttttcacactaaacttcagtctttgctgcaaacacttggtaaacaagtctttattcagtaatcatggcatttcgtttcttgatacagcacattcaggagcactgtctgtgagggagactgaatggaggaggggggggttgnattatnattcangccttt

SEQ ID NO: 29285 - DNA, 411 bp, Homo sapiens
  misc_feature (1)...(411): n = a,t,c or g
gcaccaaataactacaaaatctcattttaaatgagtaaggagaacgtgtacagaagcaaattttcttcaaaatagttgtgggaagagcttatatgtgaaagcttatgactggttttgagggagaacttactggagaaaatggactctatgttaagtatggttttcagatagaattctttccttttttaatgaggaaaaaaaatccacattaatattgaaacnnnnnnnnnnnnnnnnnnnnnnnnnnnnnnnnnnnnnnnnnnnnnnnnnnnnnnnnnnnnnnnnnnnnnnnnnnnnnnnnnnnnnnnnnnnnnnnnnnnnnnnnnnnnnnnnnntgtatttattaaaactgttctctagaagctttggactgaatcccaaaagtgtttataagttcaaaagcaaagtatt

SEQ ID NO: 29286 - DNA, 416 bp, Homo sapiens
gcctcacttctgtagtttgtgaatcaaaagtttagtatattttgattctcatttttattattttcactctatgttaaatgaataatgcgtaatgtgacattagttattttaggcagaccagatgagttcttactaagagtacattaaattgaggaccctttgccccttttttatatcagatactctggatgaatattttgaatatgatgcagaggagttcttggtctctttggccttgctgataacagaaggacgaacacctgaatgttctgtaaaaggtcgaacagaaagctttcattgccctccagcacagtcttgttacccagtaactaccaaacatgaatgtagtgacaagctggcccaggtgagaatcttgtgttgaatgctttggatcttttatataaactagtttatgt

SEQ ID NO: 29287 - DNA, 421 bp, Homo sapiens
ggatccctgttcataatgccaaaaattggaagcagcccagatgactgcatacatgcatacagtagaatactactcagcaatcaaaaggaaagaactgatacttgaagcaatgtggatggatcacaaaagcaacatgctaagtgaaagagaccagatacaaaagactatgctatatgatttctatttctggaaaaagacaaaactatagggacagaaatcagatcggtgcttgccaaattatgccactccactcctcataaatgcctgtggatcacttgacaaaactcagacttcttagtgtgaccgattcaaggccctagataacttgacttcaatccaacctctgtactttcaactctttgtactgcttccctgagccagcagagacagttctccagcattccttgcatgcctctcctaa

SEQ ID NO: 29288 - DNA, 430 bp, Homo sapiens
  misc_feature (1)...(430): n = a,t,c or g
gcggcacgaggagaaagacctgaacgtaacgaagtcaatgaataggaagatactgcctttgctaaataatgtaccacaaagagcctttaaatgggaaatgccttccgtgtatatcaagatcaggtgtttatgagcttgcctacaatctctgtgtaaaagttgaatgaaagggccgcagaaggggttggttctggggtcatctttcactcaaggctgtggacagtgtggtctgggagtcaggaagcaggacatcccatcccagctcagccagcagctggcccatgtgctaaccttccttagacccaggttcttcctcagtaaactcagtggaaacatgtgagcctgaccttgctcaatggtgnttcaaagccggaaggaanagacagtgggatctgaaagtgctttangaagtataaatgtgaattgcctt

SEQ ID NO: 29289 - DNA, 429 bp, Homo sapiens
  misc_feature (1)...(429): n = a,t,c or g
ggtgaaagataaccttttcccttttgaagacatgtgttgaatttttacggtagactcccctttcattaaaaaatgatctnnnnnnnnnnnnnnnnnnnnnnnnnnnnnnnnnnnnnnnnnnnnnnnnnnnnnnnnnnnnnnnnnnnnnnnnnnnnnnnnnnnnnnnnnnnnnnnnnnnnnnnnnnnnnnnnnnnnnnnnnnnnnnnnnnnnnnnnnnnnnnnnnnnnnnnnnnnnnnnnnnnnnnnnnnnnnnnnnnnnnnnnnnnnnnnnnnnnnnnnnnnnnnnnnnnnnnnnnnnnnnnnnnnnnnnnnnnnnnnnnnnnnnnnnnnnnnnnnnnnnnnnnnnnnnnnnnnnnnnnaggctgtccccacgcacagcatcccatgtttgcaagcttggcttggccattcatgtcccgttgcaaaccg

SEQ ID NO: 29290 - DNA, 336 bp, Homo sapiens
  misc_feature (1)...(336): n = a,t,c or g
ggaaaaacgcacaccagacgggcaacaaacagtctgggtccccagctcgctcttggtacttgggaccccagtgcctcgttgagggcgccattctgaagaaaggaactgcagcgccgatttgagggtggagatatagataataataatattaataataataatggccacatggatcgaacactcatgatgtgccaagtgctgtgctaagtgctttacgaacattcgtcatatcaggatgacctcgagagctgaggctctagccacctaaaaccacgtgcccaaacccaccagtttaaaacggngtgtgttcnnaggggtgaaannntnnanaaccta

SEQ ID NO: 29291 - DNA, 423 bp, Homo sapiens
  misc_feature (1)...(423): n = a,t,c or g
gaatatttaagctacttgtttagaatgtttgactactcttctgaaaccacgtaatttttacatattggtttcatatacttataagaagagctgtcttctaaacttactaaatggtcatatttcaaagagaaatatcaccagcttagatgattaattttcaaaaaacttatttattgtgtcacacaaaatataacaaatttacttgacatggaacatcagttaaatatagtttaatatctgataattgagaagaaccaatgttcttggttttgaacataagttattattgtaatgcacacatgcaaggtgctggataataaacgttcattttaatacagccctgctgtggtggagatctcacattctgnggaaggcatctgctanganagactgnntacangagccttttanaancttgctatc

SEQ ID NO: 29292 - DNA, 382 bp, Homo sapiens
  misc_feature (1)...(382): n = a,t,c or g
gagagagtagcggaacaaggggaccctttccttggggaacaaggacagtgcacgtaggaggcccagcacgtgcagaggtggagcggcatgaaagcatacagtatgtgccgggaacaaacatgttggcaaggtgtgtggggcggggctgtggcgacagagtccgggaggaggcgaagtggctgaggagttaggccagcccatgaagggccttgcctgtcatgctaaggtggtgggactgactcannncttcctatgtttctaatggntcaactncatttgaggnncttcttttattnatcncnnntgggangnnatnatnncctnnttcnttatnnnttgagncccnttgncnnnnnannntnnncttnantnnnncnnctcc

SEQ ID NO: 29293 - DNA, 427 bp, Homo sapiens
  misc_feature (1)...(427): n = a,t,c or g
gtttaaccaaccccttgtccttatctatgaacaaacttcactttgtgttaactttaacttgtcatagaaaccttatgaaggcagagtgttcattgtggtataaaacaacattggnnnnnnnnnnnnnnnnnnnnnnnnnnnnnnnnnnnnnnnnnnnnnnnnnnnnnnnnnnnnnnnnnnnnnnnnnnnnnnnnnnnnnnnnnnnnnnnnnnnnnnnnnnnnnnnnnnnnnnnnnnnnnnnnnnnnnnnnnnnnnnnnnnnnnnnnnnnnnnnnnnnnnnnnnnnnnnnnnnnnnnnnnnnnnnnnnnnnnnnnnnnnnnnnnnnnnnnnnnnnnnnnnnnnnnnnnnnnnnnnnnnnnnnnnnnnnnnnnnnnnnnnnnnnnnnnnnnnnnnnnnnnnnnnnnnnnnnnnnnnnnnnncattgctt

SEQ ID NO: 29294 - DNA, 421 bp, Homo sapiens
gagactcttcaagctgatcatttcaacactcgcctcagctttggagatgcagctcagacactctgggctcggacaggataccttggttttgtccgccggaccgagctcacagcggccactggagagcgtcatgatgcattgtatgtggtgggagcgctggatgaaacactggagctgagaggattacgataccacccaattgatattgagacctcggtgtcccggatccacagaagcattgctgaatggtaactccctcagcatacactgtgcttcccacttcagctttagtcataatctcaactgatctaattaattggtcattgggaccacatacctaccttgaaacatagagctccatgggaggagtaaggaaatagactgattcttggctttggtgtgcaatctgctgtggccaaca

SEQ ID NO: 29295 - DNA, 435 bp, Homo sapiens
gcgagtgtcctgcgagagcggcgattggcggggtggcggctctaggagcgtcggtcgcctctctgagggccggccccggaggcctcggagcgccgggcctaccggacgtttgcggcgaagctgccctgactgaaaagcgtccgcggggccgtctgacaggtccgggaagaggcccctgaggggcggacgggcgcgtctccaccgttttcgcagagggatactggtgaagcgggagtggtgtgcggcctcaggtccgggcggcactggggttagggactgcggagggaagtggtgcgtgttttttgtcctgaggggtaagtaaaagctcgctcttgtccggaatgctttcagaaattaacggataaatctccacctccaccaattttagtgtcccattgccaaattttcttgagttggtttaatcatctaatgaag

SEQ ID NO: 29296 - DNA, 416 bp, Homo sapiens
  misc_feature (1)...(416): n = a,t,c or g
gnnnnnnnnnnnnnnnnnnnnnnnnnnnnnnnnnnnnnnnnnnnnnnnnnnnnnnnnnnnnnnnnnnnnnnnnnnnnnnnnnnnnnnnnnnnnnnnnnnnnnnnnnnnnnnnnnnnnnnnnnnnnnnnnnnnnnnnnnnnnnnnnnnnnnnnnnnnnnnnnnnnnnnnnnnnnnnnnnnnnnnnnnnnnnnnnnnnnnnnnnnnnnnnnttanattnaaaaaatatattgggccgcncagnggnttcacacctactatgtngtactttgggaggccgaggcgggagggattacttgacctangangtnnanancttnctgtgcntccttttgtgaccctgtntntatgntngatnttaatntatttctgngnantngtgtnttnatcngtgggtctcattnnnnnngnnnnnttag

SEQ ID NO: 29297 - DNA, 415 bp, Homo sapiens
  misc_feature (1)...(415): n = a,t,c or g
gagccaacgtaaaaatacaataaaaatattcataatatgaatggagtgatggtgttcttggacttgtaaaaatttctctgaatttaaaataatcttcaattagtgtatataatttttctaatcagaaagaatactttattaatnnnnnnnnnnnnnnnnnnnnnnnnnnnnnnnnnnnnnnnnnnnnnnnnnnnnnnnnnnnnnnnnnnnnnnnnnnnnnnnnnnnnnnnnnnnnnnnnnnnnnnnnnnnnnnnnnnnnnnnnnnnnnnnnnnnnnnnnnnnnnnnnnnnnnnnnnnnnnnnnnnnnnnnnnnnnnnnnnnnnnnnnnnnnnnnnnnnnnnnnnnnnnnnnnnnnnnnnnnnnnnnnnnnnnnnnnnnnnnnnnnnnnnnnnnnnnnnnnnnnnnnnnnnnnnnn

SEQ ID NO: 29298 - DNA, 426 bp, Homo sapiens
  misc_feature (1)...(426): n = a,t,c or g
ggaaaaagtacaggtgtgaagggctggctgcccaaatcccggggcacagtgtatttggaaaaagaaaaaaaagaaaaagaaaatctgtctttctaatatccccttagcatacgccttgttggaaatgtttgctttggcgaaagtgaaatcgagacattgagacagcattcccaggaacaaaggctgggggtggagggtggaggagggagcaggaacagcccctgtctggaagaactgcaagttctgaggcctgaacaagaaatgtgtcctgttcccgtgctcctggctgcagctgggaagcttcttcanaaaggagacctcccggccctcaccgggatctggctttccttcccttcccaccacatntgtttatacaaaggagggccgctgaaggacaaacataacccgtgtttacttgngagtccc

SEQ ID NO: 29299 - DNA, 448 bp, Homo sapiens
  misc_feature (1)...(448): n = a,t,c or g
ggaatttcattaacttggtataagttaaataccaataccaaaatgctacagcaaaactaacacctaatgaggaaagtttagatgcattcactttaagacgaagccttaaaggatgtccattttcattgccagtgttaggcagtcctggaaggaaaaggaaatagagttataggtaaagatcaggaggaagtgataaaactgttgttctttgcaggtggtaatgattacctacaaccaagtcagtagcaaacttgtaactaataagaattcagtaaagctattgagtaagaaatcagtttaaaaaatcagtagtctttttcttcatcagtagtaagcaaccagaacataaaaagcaaggtattattccaaaatacatcaaaatataaattattcaggaatgatcttaacccaagctctatagagaaatctggacaangtggagaccatg

SEQ ID NO: 29300 - DNA, 421 bp, Homo sapiens
  misc_feature (1)...(421): n = a,t,c or g
gatgactcaaagcctcaggtccatagtagttaagctgttgtgccatttttgaattaatgatttttagatgtgtttagataacctccaaaaccggaggaatttggagctttttgtttgtttgtttgtttcggttttgggttttgttttggttntttgttttgttttgngacnggncctngntgnattgggagngcagnnggcacaaacatggctcactacagcctnaatnncctgggntcatgtgantttncccacccngcctnctgantaatnggnactacnggcttnccccacccacncccggctaattnttagaanttttgctggtnatatggtctcactttnncgcccangcatgncgctnctgggcnaaccngncctcccncctcngnccccanggantgntaatanngcctgaggc

SEQ ID NO: 29301 - DNA, 442 bp, Homo sapiens
  misc_feature (1)...(442): n = a,t,c or g
gcattaatgagcactgaacattatttagtaccatccataattctatgatataggtactattagcctcattttacagatgaggaaaccaaggcctaaagtaattaaataatctgtccaaggccacagaatttgcatgtggcagagctgggattcagcctcctggtagtctgaatacaaagtctgtgcccttaaatcattatataactatgctatagttagtaataaacaaagggaaaaagaaaggactttctatttaagtactgtaatataagtcagtgatccccaacccccaggctgcagactgatgagtnnnnnnnnnnnnnnnnnnnnnnnnnnnnnnnnnnnnnnnnnnnggtctggtaatccnnnnnnnnnnnnnnnnnnnnnnnnnnnnnnnnnnnnnnnnnnnnnnnnnnnnnnnnnnnnnnnnnnnnnnnnnnnn

SEQ ID NO: 29302 - DNA, 192 bp, Homo sapiens
ggggaaatactggtaaattgggccttggtttgtgagaaacttcagcgcaggcctagatcctgggggaggggagaagaggaacgccttcagtgagtgtcaataatttttaagtttatacttaactactcattaagttctttttgatataagttctttttgatacttgttagtgtttcactttttttttttttt

SEQ ID NO: 29303 - DNA, 408 bp, Homo sapiens
  misc_feature (1)...(408): n = a,t,c or g
gatnnnnnnnnnnnnnnnnnnnnnnnnnnnnnnnnnnnnnnnnnnnnnnnnnnnnnnnnnnnnnnnnnnnnnnnnnnnnnnnnnnnnnnnnnnnnnnnnnnnnnnnnnnnnnnnnnnnnnnnnnnnnnnnnnnnnnnnnnnnnnnnnnnnnnnnnnnnnnnnnnnnnnnnnnnnnnnnnnnnnnnnnnnnnnnnnnnnnnnnnnnnnnnnnnnnnnnnnnnnnnnnnnnnnnnnnnnnnnnnnnnnnnnnnnnnnnnnnnnnnnnccccattttttangctttgnaaanccgggattatncttgannntgtctgnanntcctgggaancataattttaaacngaaactttttttgntnaagnnaaattttttggattattcaaaccggggntnaatttcctaatacgg

SEQ ID NO: 29304 - DNA, 442 bp, Homo sapiens
ggcgttctgcacgcacctgcccaagtgccaaaacccgccgtcatctaaaggctgtgggtcccgttacgagggtttattccagcgcgaggtgtcagggcggccaccggggaacggggatcggtgaccccggtggggaagggggaagatcgttcatatggacaaaagcggaggtgcggaacggctgcattttccacggaggctagtgcacagatgtcagggttgaccggctgctgtcgttacgccctcggagcttcacatcacactgtacagagggagcggtgaccagggtctctgctgccagcgccacctcgtccaggttttcatagcgcacagggagtcgggcggatgcgcaacatctccgcacagggtcaggaagcggcggtcaggcaccgagaaaacagcccagttacgtgaggcagtgtccggggcttaacgtttccgc

SEQ ID NO: 29305 - DNA, 404 bp, Homo sapiens
  misc_feature (1)...(404): n = a,t,c or g
gtgccacaggagctgtggttctattctctctttctctgcccctcttatctatccttttagagtcttcttcagaactcttggggaaggtagaagaggatcctcttaacaacctctgtcagtgcctcccttagagccttaggtcctacattttccttttatttttccacatgaatcattatgtacatcatgtaatcttactttttattacaagattcaggaaattttagaatactaataatttaccaataaagatgaaatagtaagtcagtttttcagtgcatcttttgctctttaaagtttacatnagccctcccgaggtctgcctgncagattgctgctgtatcccatagnttngnnnnncanttngnntnnaaattannntaatnggannaantntnnnagtt

SEQ ID NO: 29306 - DNA, 386 bp, Homo sapiens
  misc_feature (1)...(386): n = a,t,c or g
ggaaaggggtagaagggggtggtaggtagggtaggggggggctaacagggcccctcagctattccagatgggctggcccagctccttttccaaatctgaaacttccaaacctggttttctttgatattttttttcttcattttgaacaagcagcaatgttcattgtccatcacagctactgatcataacactggactgtgaagcagacacatgcccagacatcaccagcagactctttttttaaaaaaaaaaaaacagggcttcacccccggctttttgaattttttgtaaaaatggggtctgttnccnaggctggtnttaaacttttgggctnaagcaatccgcccncctntggccgcccaaagggctggganaaccnggcctga

SEQ ID NO: 29307 - DNA, 372 bp, Homo sapiens
  misc_feature (1)...(372): n = a,t,c or g
gcaaagagttgttataggaaagaaaaaatcagttggaacttgtcacagtgaaaaacttttgtactttaaaaagacaactttttttttttctttttgaaatnntgnagngnangggcatgatcggggntnantgcagcctcaancaatcntccanannnnnnnnnnnnnnnnnnnnnnnnnnnnnnnnnnnnnnnnnnnnnnnnnnnnnnnnnnnnnnnnnnnnnnnnnnnnnnnnnnnnnnnnnnnnnnnnnnnnnnnnnnnnnnnnnnnnnnnnnnnnnnnnnnnnnnnnnnnnnnnnnnnnnnnnnnnnnnnnnnnnnnataaatgtgancccccacactgggcccaaaaacggttttttttaanaaatt

SEQ ID NO: 29308 - DNA, 399 bp, Homo sapiens
  misc_feature (1)...(399): n = a,t,c or g
gtgaattgtagttaaatgaccccaaactggcatttaacactgtttatnnnnnnnnnnnnnnnnnnnnnnnnnnnnnnatgaaaaaggtttcagagttgctaaagcttcagtttgtgacattaagtttatgaaattctaaaaaatgccttttttggagactatattatgctgaagaaggctgttcgtgaggaggagatgcgagcacccagaacgtcttttgaggctgggcgggtgtgattgtttactgcctactggatttttttctattaacattgaaaggtaaaatctgattatttagcatgagaaaaaaaaatccaactctgcttttggtcttgcttctataaatatatagngnanacttggngnaaactttggnnaaanacccnatttgnggaattt

SEQ ID NO: 29309 - DNA, 436 bp, Homo sapiens
  misc_feature (1)...(436): n = a,t,c or g
gatacctgagttattggccttaacaaggacttaaagatgccgaaagttcagtataaatcgaactgtaaaccatccacatttgcatatcctgcccctctggaagtaccaaaagaaaaagaaaaggaaaaggtttctactgctgtattatctataactgccaaggctaaaaagaaggaaaaagaaaaggaaaaaaaggaggaggagaaaatggaagtggatgaggcagagaaaaaggaggaaaaagagaagaaaaaagaacctgagccaaacttccagttattggataacccagcccgagttatgcctgcccagcttaaggncctanccatgccgganacctgtanataccagcntttcaanccactntctattggaggcntcatcnttttgaaggntnccagtgaanacnttgagganctggnggaacctggggcac

SEQ ID NO: 29310 - DNA, 436 bp, Homo sapiens
  misc_feature (1)...(436): n = a,t,c or g
ggtttaatcgactacgatcccagacagttagtaccagatacttgcatgtagaaggaggtaattttcatgccagttcacagcagtggggagccttttttattcatctcttggatgatgatgaatcagaaggagaagaattcacagtccgagatggctacatccattatggacaaacagtcaaacttgtgtgctcagttactggcatggcactcccaagattgataattaggaaagttgataagcagaccgcattattggatgcagatgatcctgtgtcacaactccataaatgtgcattttaccttaaggatacagaaagaatgtatttgtgcctttctcaagaaagaataattcaatttcaggccactccatgtccaaaagaaccaaataangagatgataaatgatggcgcttcctggacaatcattagacagag

SEQ ID NO: 29311 - DNA, 419 bp, Homo sapiens
gcggcacgagcaacatggcggcctcagcaaaaaagaagaataagaaggggaagactatctccctaacagactttctggctgaggatgggggtactggtggaggaagcacctatgtttccaaaccagtcagctgggctgatgaaacggatgacctggaaggagatgtttcgaccacttggcacagtaacgatgacgatgtgtatagggcgcctccaattgaccgttccatccttcccactgctccacgggctgctcgggaacccaatatcgaccggagccgtcttcccaaatcgccaccctacactgcttttctaggaaacctaccctatgatgttacagaagagtcaattaaggaattctttcgaggattaaatatcagtgcaggcgtttaccacgtgaacccagcaatccagagaggt

SEQ ID NO: 29312 - DNA, 419 bp, Homo sapiens
ggttgtcacgatgaagcatgctagaagctgtaacagagtacatagagaataatgaggagtttatgatggaaccttaatatataatgttgccagcgattttagttcaatatttgttactgttatctatctgctgtatatggaattcttttaattcaaacgctgaaaacgaatcagcatttagtcttgccaggcacacccaataatcagtcatgtgtaatatgcacaagtttgtttttgtttttgttttttttgttggttggtttgtttttttgctttaagttgcatgatctttctgcaggaaatagtcactcatcccactccacataaggggtttagtaagagaagtctgtctatctgatgatggatagggggcaaatctttttcccctttctggtaataagcatcacatttctatgccc

SEQ ID NO: 29313 - DNA, 414 bp, Homo sapiens
  misc_feature (1)...(414): n = a,t,c or g
gagtctnnnnnnnnnnnnnnnnnnnnnnnnnnnnnnnnnnnnnnnnnnnnnnnnnnnnnnnnnnnnnnnnnnnnnnnnnnnnnnnnnnnnnnnnnnnnnnnnnnnnnnacannnnnnnnnnnnnnnnnnnnnnnnnnnnnnnnnnnnnnnnnnnnnnnnnnnnnnnnnnnnnnnnnnnnnnnnnnnnnnnnnnnnnnnnnnnnnnnnnnnnnnnnnnnnnnnnnnnnnnnnnnnnnnnnnnnnnnnnnnnnnnnnnnnnnnnnnnnnnnnnnnnnnnnctgnnnnnnnnnnnnnnnnnnnnnnnnnnnnnnnnnnnnnnnnnnnnnnnnnnnnnnnnnngctcacctncagagtatctgggantgcatatgncggntaccgggctgggcggtnacaatttttggccntttttgg

SEQ ID NO: 29314 - DNA, 470 bp, Homo sapiens
  misc_feature (1)...(470): n = a,t,c or g
gagggagtaaaccctatctataaggtgccaccccatcatccaagctgccacactgcccggagcagcctgttcctgcactccaccctgctggccccaggacttctgatctcagtcctctgggagggaggttcgcctaggaggtgccccccacattggtgtccccatgggcagcaggcagacagctcacccccaccagcatgatggccccagctgggggcagtggcaggagccttacttttgtcacagccttgcccacaaaccctgcctctgaggggagactgaggaagggcagagccagaagcaagccgtgccaggccatctgcctgctcatggggtcctaaagcgcgggctaagcctgcangaaagccggggcggnggggggggggttnanngccnatngcccccaattttttccaaagncccccaaanngcangggnttgcnntnnnccntgggccaagggcttngggc

SEQ ID NO: 29315 - DNA, 477 bp, Homo sapiens
  misc_feature (1)...(477): n = a,t,c or g
taaaattttaatttgtggtttatttcataatcccaaactggatctttcatttcttcttctaaacagtccactatgaaacttttcttagaagcaattaacccaaaacaccaaaatcatttccctagcagttgctgctaataaactggaactgtatatcccaagtccaagaaagatgtgcaaatgaaatgcttcttgcttcacccttattatctggagcccctagagtcttattttccttttggacatgaattcaggaacagttcaatatacctatgatgaacgtgggaccgatccttgagcatcgctgcaacagcatcctcatgggtctcaaagtgcacatcagcttctccagtggccttcccactggagctgtattccatggtgattctaacaggcttgagtggagcaaaaaagtttataatgcttgggcattggcttggaaaggnaatcctctcatgtggacaaaatgcanagaag

SEQ ID NO: 29316 - DNA, 471 bp, Homo sapiens
ggtttaacgcgtttctgggccgccgtaagcccggcctaggggcagctttgactcgagagccggctataggcgcatggaaggttccctggaacgggaggcgccagcgggggcgctggccgccgtgctaaagcacagctcgacgttgccgcccgaaagcacccaggtccggggctacgacttcaaccgcggtgtgaattaccgcgcactgctggaggccttcggcaccaccggcttccaagcaaccaacttcgggcgcgctgtacagcaagtcaatgccatgatcgagaagaagctggaaccactgtcacaggatgaagaccagcacgcggacctgacccagagccgccgcccacttaccagctgcaccattttcctgggatatacatccaacctcatcagttcaggcatccgtgagaccattcgctaccttgtgcagcacaacatggtggacgtattggtgaccacagctgg

SEQ ID NO: 29317 - DNA, 467 bp, Homo sapiens
  misc_feature (1)...(467): n = a,t,c or g
ggccagtgactaggccgggcctgggcctcccatcggggccggactaggacgaggccccggggaggcccctggcctaccagacccttttctcaggccgacagccgccaggaagatgcaacgtgccctgccaggcgcccgccagcacttgggggccattctggccagcgccagcgtggtggtgaaggctctgtgtgcggcggtactattcctctacctgctctccttcgccgtggacacaggctgcctggcggtcaccccgggctacctctttcctcccaacttctggatctggaccctggccacccatgggctgatggagcagcatgtgtgggacgtggccatcagcctgacaacggtggtggtggccgggcgtttgctggagcccctctggggggccttggagctgctcatcttcttctcagtggtgaatgtgctgtanggctgctgggggccttcgcctacctctt

SEQ ID NO: 29318 - DNA, 467 bp, Homo sapiens
  misc_feature (1)...(467): n = a,t,c or g
gcggtgcaggaacatgccagcaccaacatggggctggaggccataattagaaaggcactcatgggtaaatatgaccagtgggaagagtccccgccgctcagcgccaatgcttttaaccctctgaatgccagtgccagcctgcccgctgctatgcccataaccgctgctgacggacggagtgaccacacactcacctcgccaggtggcggcgggaaggccaaggtctctggcagacccagcagccgaaaagccaagtccccggccccgggcctggcatctggggaccggccaccctctgtctcctcagtgcactcggagggagactgcaaccgccggacgccgntcaccaaccgcgtgtgggaggacaggccctcgtccgcaggttccacgccattcccctacaaccccctgatcatgcggctgcaggcgggtgtcatggcttcccaccccaccgggcctcccgcggc

SEQ ID NO: 29319 - DNA, 461 bp, Homo sapiens
  misc_feature (1)...(461): n = a,t,c or g
gaaggtatcgctggagaattgttgccaggcaggggtaaagcctccatgtgcacttgtcacgtttttacatccacactgggtctgcacatacaacagcatggcctaccaaatatgcagcttacagacttagacttaaggtagactttaattaatagagattggatttgaatcctagcacctctcattccttgtctataaaatgaggatattaatagtacccacttcataggattgttgtaatgtaataattggcccattaaccataataaagatacttgtggggaaaggcaacttaatatatggaggctatagtaggtattttcttttagatctatactgtttagaattgaactgcctgcttgtttcgaaagatcttttcggagtatctgttaccgggtttaggccttttcttggtaggagggggcttcccactggttttacttggttttanccnagtgata

SEQ ID NO: 29320 - DNA, 461 bp, Homo sapiens
  misc_feature (1)...(461): n = a,t,c or g
aaaacaatctagattattccttttcatcctaaataagcctaccaaatttcatgctgttggtttgccatgaatgatattacttcctacattatatttgtgttttttcaaatctgctatggaatgaacttattcctagatttggatatgtaagagaaacctgcagtcatcttttgatttataaggcaattcttgtggataaatagtgatttctcagcctctgacccattttataactgaaatttagccctttagagcttgttatatctggttttcctacgtttttctatgtaatattattccattccagtagcattattgatagaaatagtaagtatttatggaatagtaaaatatggacaaattacgtgtgtgacatatctggcaaaataagtagaagcttattcttggtttggggaatgaatttatgnattgnagngaaacctttactgggggnaaaaaat

SEQ ID NO: 29321 - DNA, 479 bp, Homo sapiens
  misc_feature (1)...(479): n = a,t,c or g
gagatctacaaggagttctttgaagtagccaatgatgtcatccccaacctgctgaaggaggcagccagcttgctggaggcgggcgaggagcggccgggggagcaaagccagggcacccagagccaaggttccgccctccaggaccctgagtgcttcgcccacctgctgcgattctacgacggcatctgcaaatgggaggagggcagtcccacgcctgtgctgcacgtgggctgggccacctttcttgtgcagtccctaggccgttttgagggacaggtgcggcagaaggtgcgcatagtgagccgagaggccgaggcggccgaggccgaggagccgtggggcgaggaagcccgggaaggccggcggcggggcccacggcgggagtccaagccagaggagcccccgccgccaagaagccagcactggacaagggcctgggcacccggccaaggtgcaatgtaggaaccccccgaangctt

SEQ ID NO: 29322 - DNA, 446 bp, Homo sapiens
  misc_feature (1)...(446): n = a,t,c or g
gtacaatggcgattatgttctgtacctgtaacggctatttgcaaagcagatacttgagccattgtgcagtgtatgctgatgactgggtaacagatccccgttttctaataggttttggcttgtggttaacaggcatgttgataaacatccattcagatcatatcctaaggaatctcagaaaaccaggagatactggatacaaaataccaaggggaggcttatttgaatacgtaactgcagccaactattttggagaaatcatggagtggtgtggctatgccctggccagctggtctgtccaaggcgcggcttttgctttcttcacgttttgttttttatctggtagagcaaaagagcatcatgagtggtacctccggaaatttgaagagtatccaaagttcagaaaaattataattccatttttggtttaagngcgttttttatga

SEQ ID NO: 29323 - DNA, 459 bp, Homo sapiens
  misc_feature (1)...(459): n = a,t,c or g
gataccttaaaacagttcattcttttattaatatttattaagcatattctatcaggcaggtgctgggctcggggctgcagatacagtgatgaacaagacagataggcactctgactgcatggcccatagtctagttggaggagacaggtaatcagcacaatgatgtagaaatagaggaagcaggagaggaagaggaaaaggaaatagcgattgttcatagtgatgcagagaaagaacaggaggaggaagaacaaaaacaggaaatggaggttaagatggaggaggaaactgaggtaagggaaagtgagaagcagcaggatagtcagcctgaagaagttatggatgtgctanagatggttgagaatgtcaaacatgtaattgctgaccaggaggtaatggaaactaatcgagttgaaagtgttaaccttcaaaaaatgaagctacnaaagaatttgaacc

SEQ ID NO: 29324 - DNA, 467 bp, Homo sapiens
  misc_feature (1)...(467): n = a,t,c or g
cgccagttatccaggctctgcgaaggacccgcatccgcgccgtcatggtgacagggacagnggtnagtgnannccgttttcttacactacnantgnatntncaagacatgctcttatctactancanaagtgctanccttttntaattcatattnnatgancagacccttaattcnattgtntcaaatctgttntatantatgatctangatannatntanttntgatantaagantntaaantatcattacnnatttataataactatttnacnnatttatnttntaaattaaattntttattcatactattcnnnaatttttaattttngngnttcaanaattatcnattntntattantngtattcntgnntnaancatantttntnttatannttgnattnaattnnaaanganttttananttntnttntannntntnncatttttngnttnttatttttta

SEQ ID NO: 29325 - DNA, 528 bp, Homo sapiens
  misc_feature (1)...(528): n = a,t,c or g
gctcatttgctaatccctagcatattttggactatgaaattcatttgcaattgaatataatatcagaagaaattacagggtgatactgtatacctaacgatataaaaaaattttgtttattgtaggtacggctgcttttttgtggtatgacagtgttagaaatgattcgtttgtaatcttctttgcctgttatggtcaaactattatctaattatatttttaaatttatcttttagggacagtatggaaattaccagcagtgaaaaagtacttacattccagtagccagtatctattagcagccatattgtcacctcagcactgtggacacctccctgtgaagagatccttccattccatctagtttttggaaaaaccttgtggataagtggctgtttcatcaagtaagcagcctttgtgggttaattataaaaggctttagtagctcaaaatctcttgatttncattctactctagatggcacctttggcnagaaatgcaatgacntaccaatttgtatgattttgg

SEQ ID NO: 29326 - DNA, 523 bp, Homo sapiens
  misc_feature (1)...(523): n = a,t,c or g
ggaggacctctacctgaagccaatccagagaacaatcttgatgatgggccgctacgtggagcccatcgaggatgtgccttgtgggaacattgtgggcctcgtgggcgtggaccagttcctggtgaagacgggcaccatcaccaccttcgagcacgcgcacaacatgcgggtgatgaagttcagcgtcagccctgttgtcagagtggccgtggaggccaagaacccggctgacctgcccaagctggtggaggggctgaagcggctggccaagtccgaccccatggtgcagtgcatcatcgaggagtcgggagagcacatcatcgcgggcgccggcgagctgcacctggagatctgctgaaggacctggaggaggaccacgcctgcatccccatcaagaaatctgacccggtcgtctcgtaccgcgagacggtcagtgaagagtcgaacgtgctctgctnttcaagtccccaacaagcacaacttctggcaaattgtaggcggccttcttgacgctgccgcccgg

SEQ ID NO: 29327 - DNA, 485 bp, Homo sapiens
  misc_feature (1)...(485): n = a,t,c or g
gctgtcctcagaccctatcaggagaagagcttgcgaaagatgtttggaaacgggcgtgcacgttcgggggtcattgttcttccctgcggtgctggaaagtccctggttggtgtgactgctgcatgcactgtcagaaaacgctgtctggtgctgggcaactcagctgtttctgtggagcagtggaaagcccagatcaagatgtggaccaccattgacgacagccagatctgccggctcacctccgatgccaaggacaagcccatcggctgctccgttgccattagcacctactccatgctgggccacaccaccaaaaggtcctgggaggccgagcgagtcatggagnggctcaagacccaggagnnggggcctcatgatcctggatgaagtgcacaccataccagccaagatggtcccgaagggtgctcaccatcgtgcaggcccactggaagctggntttgaangggacctatgnncgggaaaaa

SEQ ID NO: 29328 - DNA, 472 bp, Homo sapiens
  misc_feature (1)...(472): n = a,t,c or g
ccttcacctccccactccagccccggctcagttcagggaaatgctgttccacatcagccctctgctctctgaggcagccgcgcctctgactcggagctacttgaaacttctgctcttgctaggattggagtctacctatctcttccatttgtcccagctggagttctggaactttcctcctcggggtgggggtggcggttgttaaggatgcggaangaaggagatcnaangaatgntagancctgtnactcnnngancnncccnnttattanaggaacncatnccngttntgannatngnnnatnnnnntgaattaaatagagantnctnnnangaattcnattaatannnananncnnctnnntnaantnattntnnnntannntcttnnnntcnnnctatttcnttantcnannnanccntccnntcantatgnggnntntatnnnnactccncntnnggnnnattaact

SEQ ID NO: 29329 - DNA, 484 bp, Homo sapiens
  misc_feature (1)...(484): n = a,t,c or g
cttttgctggcctcctcatcggcctggcccaactcaactgctccgagctgaagctaaagcggctctgttgcaggcacgggctcctgggtgtggacaaggtgctgggctatgccctcaacgagtggctgcaggacatccgcaagaaccagctgcccggcctgctgggaggcgtgggccccatgcactcggttgtccagctcttccaagggttccgggacctgctgtggctgcccattgagcagtacaggaaggatggccgcctcatgcgggggctgcagcgaggggctgcctcctttggctcatccacagcctctgccgcctggaactcagcaaccggttggtacaggctatccaggccacagctgagaccgtgtatgacatcctgtccccggcagcccccgtctccgtccctgcaggataacgctctgcgcggaagctgcgcaaggccancanccttgccaactgcgggaaggngngggccaag

SEQ ID NO: 29330 - DNA, 480 bp, Homo sapiens
  misc_feature (1)...(480): n = a,t,c or g
aaaccagagaatgtaccttaagggggagggctagtgtgggggagggaggcttccccagccttaagagaccctctcagcccagtgactgtccccaaacccaagtctcctggcaggaactaaaacctcagccccactctctcacaccatgtggaatctcgtgggggtcggggatccccttaagaagtggtaatggggacaagatgcggccctggtgctgtaggctacatcctgatacctataagttcacccccaccccacagctgctggagagaaatcccaagaggcagcccttcctcaccatcccattaaagacctggctggttagcgtccagctcagggagaagggcgctagtgcctaacctcactggtccctctcccggaggcccttgtagagggccacgtccataaattttcttatggaactctcccacatcctcttcccaacttatttgnttctntnacaacctatctgnaatttct

SEQ ID NO: 29331 - DNA, 478 bp, Homo sapiens
  misc_feature (1)...(478): n = a,t,c or g
gctgcggatcatgtccctaaggggcagcctctcgcgtctcctccagacgcgagtgcattccatcctgaagaaatccgtccactccgtggctgtgataggagccccgttctcacaagggcagaaaagaaaaggagtggagcatggtcccgctgccataagagaagctggcttgatgaaaaggctctccagtttgggctgccacctaaaagactttggagatttgagttttactccagtccccaaagatgatctctacaacaacctgatagtgaatccacgctcagtgggtcttgccaaccaggaactggctgaggtggttagcagagctgtgtcagatggctacagctgtgtcacactgggaggagaccacagcctggcaatcggtaccattagtggcatgcccgacactgccagaccnttgtggtgctgggttgatgcccatgctgcatcacacaccccttaccactttatnaggaaa

SEQ ID NO: 29332 - DNA, 615 bp, Homo sapiens
  misc_feature (1)...(615): n = a,t,c or g
ttcaggnntncanatcangnnacanttgnnntgnanttnngnactnngagtcannaaatnnnnnnganatcnnnagaannagagtgtcnnntnggagccanttccatacgatacnccancttggcacgaggccttgtgccaccagtggcagaacaagggaagctacaaaggagttcttcaccatgcacaagtactttggtttaaaaaaatagaatgtaatcttttttcagcaaggaatgctccccgccatgagttaggatgggaaaattattttggaagagaagaacaaagttgttatggctccagaagggaatggtggtctttatcgtgcacttgcagcccagaatattgtggaggatatggagcaaagaggcatttggagcattcatgtctattgagttgacaacatattagtaaaagnggcangacccacggttcattggattnngnattcanaaaggagcagactgtggccanaggtggtagagaaaacgaacnctacagaaccanatcggagtgnnntgcccagtggaagnattnaccaagnggcaanantantaccgagaattcntgnnnacaaatcnaatnnctaaanttaaacgnnanaantgatgg

SEQ ID NO: 29333 - DNA, 514 bp, Homo sapiens
  misc_feature (1)...(514): n = a,t,c or g
ccaggccctcagggagaaaggagcaacacactgcccctaggcgtgcgtgtggcccagtttctctctgctctccattaagtgcattcactctgcttgccttgggcccagcccctggtgatcacagggttcaaacagtgtcctcctagaaagagtgggagagcagttcacttctctgtgttctgcctcccctctggtctccagagttttcctgtcctctagaggcaagccaggccagggagctgggagcgagcaagctgaggccacgtccacaaggagcttttcatgcccctgtgccgcatagcctcacctctttcctccagagtggctctctgcggccctgtgttcctgctacagagtgttcttttctggagtcaaggatgttctcggtcaccctctggtctgcctgncccattccaccccaccccagggggaacagtancttaccttgtattccattgtctctggctcactnttacggncggnntccanngactgaagcattnccaccttgaag

SEQ ID NO: 29334 - DNA, 531 bp, Homo sapiens
  misc_feature (1)...(531): n = a,t,c or g
caagaccctggccggctcctgtgggaagtttgccccctttgaaattaaagagcacatggtcctggcccctcggcgtcggaccgctttccatccagacctctgcagtcagctggaccagctcctccagcagcagagcggcgagttctccttcttgaaagacctcaaaggccggcagcccctgaggtccggacccacgcacgtttccacccggaatgcagatatttttaacagtgatgtcgtcatcgtggagcgtgggaagggcgacggtgttcccgagaggaggaagtttggcaggatgaagctcctgcagttctgtgagaaccaccggcctgcctactggggtacctggaataagaagacggcactcatccgcgcgcgagnccctggcccaggacacgaagctcctggactatgaggtggacagtgatgaagagtnggaagaagaagacctggggaagtccctgtccacagtgagggggatgatgntacnacttggnaangnnaanntgangccatggtttttttgncccg

SEQ ID NO: 29335 - DNA, 398 bp, Homo sapiens
  misc_feature (1)...(398): n = a,t,c or g
gcgacacggcaggttcccgcccggaagaagcgaccaaagcgcctgaggaccggcaacatggtgcggtcggggaataaggcagctgttgtgctgtgtatggacgtgggctttaccatgagtaactccattcctggtatagaatccccatttgaacaagcaaagaaggtgataaccatgtttgtacagcgacaggtgtttgctgagaacaaggatgagattgctttagtcctgtttggtacagatggtactgacaatcccctttctggtggggatnaacatcacagtgcacanacatctgatgctaccanattttgatttgctgnangacattganagnannatncaancangttnttaacangctnacttnctggatgcactantnntgacntnngatg

SEQ ID NO: 29336 - DNA, 444 bp, Homo sapiens
  misc_feature (1)...(444): n = a,t,c or g
agagcagcctgtggatgatgctgcagaagtccctcagagggaaccagagaaggaaaggggtgatccagaacggcagagagagatggaagaagaggaggatgaggatgaggatgaggatgaagatgaggatgaacggaagttactgggagaatttgataaggaactggagcttccgtcanaccgagaccggnttcgttnggaggtgaaggctggcatggngcgngaactggaaaacatcatccaggagacagagaangagctggacccanatgggctnaanaaggagtcagagcgggatcgggcaatgctggctctcacatccactctcaacaaactcatcaaaagactggaggaaaaacagagtccngagctggtgaagaagcacaagaaaaagagggttgccccaaaaagcctncccatcaccccaacctacagggaaaaatt

SEQ ID NO: 29337 - DNA, 450 bp, Homo sapiens
ctttaacaaagcagaatgattcttctaagtttggcaacaagaaggcttggatctgagtcttctacctggcaggatgccaatcctgtttgttgtccgtatgtcctgaaaacatgagggactggcagatgtcattttggtctaaagagctgacttgtttgaaattcagccttaaattaagctcttagttgttcagcttggggggcaactttgatttttctctgtgttgtagtctctcatatttactcaaggagggaccaggatgatacagtcatctgaggttatgctttgcaaaaggctgacggtatggaatatgtttccatgtctgagtcttagaaactggctgctcattgttagaaagtgatgctttgtgagactattgcttggggccaaaaataatcagggattttaaattggcaagggacaaggtgctagaatcctaagctctggaaa

SEQ ID NO: 29338 - DNA, 459 bp, Homo sapiens
  misc_feature (1)...(459): n = a,t,c or g
ctctgctttcttggaggcagaaacaagcatgtgacaggatgcagagaattactcctggctttgatgtctcttcaacagcttgatgaaacctggtttttccacctgtcttcacttctccaagccttacctgcaagcgcttccgtgaaagcccccagcacaccatctctgggatgtggaagcttaggaggggagaattaaaaaaacagaacgaaggtaacagtaatcaagatccaaacttagaaaacatttcttgaagtgacattatctgctccttttaacccaatccctttgtcaccagtcagtgtttgtttaggaagtgtaagctaattttaatattaaagtgttgtagtgattaagaaggtaagtttgtgaataatgtatgaatcatccacacttttgccttttttcccaccttatggtccatgttactgctgcaccctggtataatgcnnagaatag

SEQ ID NO: 29339 - DNA, 523 bp, Homo sapiens
  misc_feature (1)...(523): n = a,t,c or g
ctcttgatacntctnatgacccgttatnaccctnaagcttgccacgagggtangagtcctcatttcagagagaagagcccagtcagggagccagttgataatctgagtcctgaggagcgtgatgcccgcacagttttctgtatgcagttagctgcccgaattcggcctcgagatctggaggactttttctctgctgtaggcaaggttcgcgatgtacgtatcatttcagatcggaactcacgtcgttctaagggcattgcctacgtggaattctgtgaaatccagtctgtgccactggccattgggctgactgggcagcggttgctgggagtgcctatcattgtacaggcttcacaggcagagaaaaaccgactggcagccatggccaacaacctgcaaaagggcaatggtggaccaatgcgcctctatgtgggttccctgcacttcaatatcactgaagacatgctccggggcatctttgagccctttggnaaaattgataatattggcctgatgaagactc

SEQ ID NO: 29340 - DNA, 520 bp, Homo sapiens
  misc_feature (1)...(520): n = a,t,c or g
cctcgtgccaagcttggcacgaggcaagaaggagattgacaaatccaaggacaagaaggaggtcaccatcgtggtccttggcaacaagtgtgacttacaggagcagcggcgtgtagacccagatgtggctcagcactgggccaagtcagagaaggtgaagctgtgggaggtgtcagtggcggaccggcgctccctcctggagccctttgtctacttggccagcaagatgacgcaaccccagagcaagtctgccttccccctcagccggaagaacaagggcagcggctccttggatggctgaagagctgccgttcctctttcacgatcccagccccattcagtgtctggggctctggtagatgtgttgagggcaaagtanaggacaagctgtctttccagtcagccagggagctcccgcaggccacgccccaccactttgtccctctacctcttggaagtgcaaatactcttggttgacatcccttctnagccttccagctactcccatncagnttttaaa

SEQ ID NO: 29341 - DNA, 526 bp, Homo sapiens
aatactgtcatgttcatgcagggaaaaaggcagaaagaaatatggcatctccttaaaattgcctgtacacagagttctgcccggtcccttgtaggatccagtctagaaggtgcagtaacccctcagacatcagcatggctgcccccgacttcagcagaacatgatcattctctgtcatgtgtggtaactcctcaagatggggagacttcagcacaaatgatagaagaaaatttgaactgccttggccatttaagcactattattcatgaggcaaatgaggaacagggcaatagtatgatgaatcttgattggagttggttaacagaatgagttgtcacttgttcactgtccccaaacctatggaagttgttgctatacatgttggaaatgtgtttttcccccatgaaaccattcttcagacatcagtcaatggaagaaatggctatgaacagaaactacatttctactatgatcagaagaacatgattttacaagtataacagttttgagtaattcaagcctctat

SEQ ID NO: 29342 - DNA, 529 bp, Homo sapiens
  misc_feature (1)...(529): n = a,t,c or g
tagtgtcagatacaaacgccttttaaccctgtggtggggaagagtaaactgattgcttccaatgatcatctcttccctctgcgtccactgttctcagagtctcagggagtatgagaggatgtgtctcttcctttacttccctgtttgttgtaatgagtccttcgatgagagtaattacgtgaccgaattttccataactatttgttgattattaaagttttgcagtggctggttttcctattggtgtcttacaaccaagcatttcttctaatttggttgtggcaggttcattcacattaaatatacagttattatttatcttcttcttctccactactccgagcctcacacaggctgctaaggcgtttttctgcacatcagaagataatacatcataacattgagaggtaccttgatcgagaagctgacttgggaattttctgactgcagccaagtactggtcctcactgaagtgggcctcttcttcactcaaaaagnacttgcaaattatctgatagctttccccaaa

SEQ ID NO: 29343 - DNA, 527 bp, Homo sapiens
  misc_feature (1)...(527): n = a,t,c or g
cagcccggccctgctccccaaggggctcgggctgtgtgggctggccttggcagaaggtggacaatcctctaggtccaaggacatgggggtcacagaggtgggggccttgggcccacacattcgaggagagttcccaaaagtttccagtggctgtcccaggcaggtatcaggttcggcccacacctgagtgcccatactctgggcagggctgggaggcacctgacctcaacctccagcagctctgcaagtgtggggtgaaaaaaggtgaatctgtgtgaggatggggttggctgcagctgtggtgatggcctgggcgggggcggtgggtgctggaggctgagggtgtgctggcgggtgctaggcagggcgatggaagaggttgccagttcggagccgcctcaagagctccaccacagcaactgccgctcccgatgggtgcccttcatgaagctgctgttctccagggcacggcgggacaagtanggcancacctcatnacgggccatagggcacgtacttgtcacggg

SEQ ID NO: 29344 - DNA, 371 bp, Homo sapiens
  misc_feature (1)...(371): n = a,t,c or g
cgagagtacttccgcttcagcgtcgggggcatgactgacgtggctgagatcaagggccacaggcggacctacgtgggcgccatgcccgggaagatcatccagtgtttgaagaagaccaagacggagaaccccctgatcctcatcgacgaggtggacaagatcggccgaggctaccagggggacccgtcgtcggcactgctggagctgctggacccagagcagaatgccaacttcctggaccactacctggacgtgcccgtggacttgtccaaggtgctgttcatctgcacggccaaccnntccccgagccgttgcgaanaccgtatggagatgatcacgtgtcnggctacgtggcccagganaagctggcc

SEQ ID NO: 29345 - DNA, 370 bp, Homo sapiens
  misc_feature (1)...(370): n = a,t,c or g
ctggaagaattcccggccgcaggaatcaggaagacaacactgggaagtacccggacatcatcagccgcatccccaagattaaactcccatcggtcacatccttcatcctggacaccgaagccgtggcttgggaccgggaaaagaagcagatccagccattccaagtgctcaccacccgcaaacgcaaggaggtggatgcgtctgagatccaggtgcaggtgtgtttgtacgccttcgacctcatctacctcaatggagagtccctggtacgtgagcccctttcccggcgccggcagcttggtggagacagaaggccaanttggctttcgcaacttccttggncnccanggccntnnancaaatcgccgat

SEQ ID NO: 29346 - DNA, 382 bp, Homo sapiens
  misc_feature (1)...(382): n = a,t,c or g
ggtaaatgtgtaattatgtccattatgcttcaaagttgagttttcatctttgactccaaaatgtcagagggaggccgctctaaactaaaaataacgaaaggttgccaagtattaatactagttacctccctcttttcgtagtttttgtcatgtctgtcaacttactcgattgtgtggttgcattcagaatatttgaagtttcttacgtagacagaaataatacaaatattaactaggaaaaaacagtatagcaccaagccagtatttggtatctctctctagagcgagcaagatagggagagaggaggaaaaaatacacataatacaaacatacatgcatgcacacatacatacatatgtatacacacacntaatttgaaac

SEQ ID NO: 29347 - DNA, 387 bp, Homo sapiens
cctcgtgccaagcttggcacgaggattacattgacattttaatcagtaaggcagatgccctccaagatgtgggcgggccttgtctaatcagttgaaggcctccactattccacccacagtaaccaccctcccacacaggcagggcctccctcctcatgtggcagacagaagtcaggacactgggggctggaaaccaacttataaaactgaaagggccaggacagaactgatagcaccctcccagggaggtcaggagcaggaggtggtggccacagaagttcaccagcagcccaaggagccctttccccaaatgtccatgggatctgcgtgcttggcagccaagaggggctgtggcccttcacgctggacttgggatgcctggaccct

SEQ ID NO: 29348 - DNA, 384 bp, Homo sapiens
gctgtctcatgactagctgaaagtatgcatacatgtcaactaaaatcctaaactgtttttcacatgttctttctttcatccagcagtgttttctaccatccctcacacccctggccacatcatatttatagtattttgaggtctaagcccaggactttctctttgcttcatgtattcctctcattttagtttctgtcttacctcgacacacaattatgtaaggcagagaggtgaggcagaatgagaagagttgagagttagaaatagatccactaaactggagtgaaggagagaagccctgaagagctatataatccacctgtaggtcctaggaggaaggtgaatccatataatattatgtgataccccagagaggacacaagc

SEQ ID NO: 29349 - DNA, 389 bp, Homo sapiens
  misc_feature (1)...(389): n = a,t,c or g
gtggtcactgtgtttggaggctgtagattccttagtaaagactgagagtggagcgcttgccgctggatgcatactcatctccaaaggtgcttgttctttacctgttcccttccgtgcaagttccaaactccactggaggttacggtgtggtgctgtggacttgtactttacactttttggcctcagtagaccttcctgtttacccttgccagagcttgggttggttcttaatctaaaggagaaaaaagctgtcttgaatcctaccataattccagagtcagtagcaggcaaccaagaagctgcaaataatccaagcagtcacccacagctagttggatttcagaaccctttttccagttctcaagatgaggagganattgatatggata

SEQ ID NO: 29350 - DNA, 390 bp, Homo sapiens
gaggaacaggactccctgtcacacaaggctgtgcagacctccagggctgcagccaaggacctgactggagtgaacgcccagtctgagcctgttgccagcggctgggaactggcctctgtcaacccagagcccgtgagttcccctacaacacctccagaatacaaagcgttgtttaaggagatctttagttgcatcaagaaaactaagcaggaaatagatgaacagagaacaaaataccgatcactctcctctcattcttaattgaacctctagctctactactaatttgcctattgcctatcgcctctctctcccattcagacaagtgtttgtagactctgaagcctaatgttactcatgacgtttgcctcattgctttgcttatttagc

SEQ ID NO: 29351 - DNA, 387 bp, Homo sapiens
  misc_feature (1)...(387): n = a,t,c or g
cgcctcctctgcttctcctttctccgctgctatagaccagttcattgtgtgtggctcccgtgtctctgttgcccccttcagtgcagaaggctttgggtaggacttcgggtgttcggtcctggtcgcagagcacagatctttaaagaagcgagagaggaggccccaccctcctggcagcagatgcctggggcaaggccaggggaaactgggggggcctcagggacaggcctggaaaggccacgatggctgctgaattcaaacaaggagtccctccagcctgaataacacgtggcacaaatgggcccggcctttggcagaggagcaagtgatatgatgtgtaaagtatgttggnggngaaagcnaggntccccanganangnnanagac

SEQ ID NO: 29352 - DNA, 466 bp, Homo sapiens
ggtgacactgactccgtcatgtgccgattcggcgtgtcctcggtggctgaggcgatggccctggggcgggaggccgcggactgggtgtcaggtcacttcccgtcgcccatccggctggagtttgagaaggtctacttcccatacctgcttatcagcaagaagcgctacgcgggcctgctcttctcctcccggcccgacgcccacgaccgcatggactgcaagggcctggaggccgtgcgcagggacaactgccccctcgtggccaacctggtcactgcctcactgcgccgctgctcatcgaccgagaccctgagggcgcggtggctcacgcacaggacgtcatctcggacctgctgtgcaaccgcatcgatatctcccactggtcatcaccaaggagctgacccgcgcggctccgactatgccggcaagcaggcccacgtggagctggccaaaggatgaggaagcg

SEQ ID NO: 29353 - DNA, 462 bp, Homo sapiens
gaaaggtgcggcagcggatcggctactgcccgcagtttgatgccttgctggaccacatgacaggccgggagatgctggtcatgtacgctcggctccggggcatccctgagcgccacatcggggcctgcgtggagaacactctgcggggcctgctgctggagccacatgccaacaagctggtcaggacgtacagtggtggtaacaagcggaagctgagcaccggcatcgccctgatcggagagcctgctgtcatcttcctggacgagccgtccactggcatggaccccgtggcccggcgcctgctttgggacaccgtggcacgagcccgagagtctgcaaggccatcatcatcacctcccacagcatggaggagtgtgaggccctgtgcacccggctgccatcatggtgcaggggcagttcaagtgcctggcagccccagcacctcaagagcaagttcggcag

SEQ ID NO: 29354 - DNA, 454 bp, Homo sapiens
  misc_feature (1)...(454): n = a,t,c or g
ctttgtataacatcatgcttttcctctcacactcttgaagagcttccaagaagttgatggaacccaccaatatgtcatagtaaagtctcctgaaatgtggtagtaagaggattttcttccataatgcatctgaaaaactgtaaacaaagacaaccatttctactacgtcggccataaacagctatcctgctttggaagagaagcatcatgagccaatttgataggtgttttaaaaataacttgagttttcctaagttcatcagaatgaaggggaaaaacagccatcatccaacattattgagattgtcgtgtatagtcatcgaatatcagccagttcctgtaattttgtgacacgctctctgccaagcccaccaagtatttcctttatagctaaaagttccatagtactanggaaataaagcaatnaagacagtctcagcagccaggattttgg

SEQ ID NO: 29355 - DNA, 444 bp, Homo sapiens
caaagttgggcatcgcatccagggctgagattgaggactggttcacggcagagaccctgggagtgtctggcaccatggacctgctggactggagcagcctcatcgacagcaggaccaagctgtccaagcacctggtagtccccaacgcacagacaggacagctggagcccctgctgtcccggttcactgaggaggaggagctacagatgaccaggatgctacagcggatggatgtcctggccaagaaagccacagagatgggcgtgcggctgatggtggatgccgagcagacctacttccagccggccatcagccgcctgacgctggagatgcagcggaagttcaatgtggagaagccgctcatcttcaacacataccagtgctacctcaaggatgcctatgacaatgtgaccctggacgtggagctggctcgccgtgagggct

SEQ ID NO: 29356 - DNA, 502 bp, Homo sapiens
  misc_feature (1)...(502): n = a,t,c or g
gaaagaagaagagtaagaatcatgcccaggagagggatgaggtctccggtttggtgagcggcctcatgcgcacatccgttggccatcaggatgccaggccagaggctccagcagcttctggcccagcccctgtcagcctggtagagacagcacctgaagacagctcaccccgtgggacactggcaagcagtggagatggatttgaagaaggtctgactgtggccacagtagtggagtcagccctttgtgctctgagaaattgttcatgcccccagnggaacanaacccggccccctggcccagccagagcctntggtgtggntcaccaagtgggttgactactccaataagttcngctttgngtatcaactgtccagccgccgtgnggntgtgctcttcaacgatggcacacatatggcctgtcggcaacanaaagactgngcactacaatcccacacacaaagcacttctcttntccgngggtgctgtgccccggccctga

SEQ ID NO: 29357 - DNA, 479 bp, Homo sapiens
  misc_feature (1)...(479): n = a,t,c or g
agagatgtgcctgtgggagggggaggaagttggctgagccattgagtggtgagggaggccatccaagatggcatgaatcgggctaaggtccctgggggtgcagatggtactgctgaggtcccgggcttagtgtgagcatcttgccagcctcaggcttgagggagggctgggctagaaagaccactggcagaaacaggaggctccggccgcacaggtttccccaaggcctctcaccccacttcccatctccagggaagcgtcgccccagtggcactgaagtggccctccctcagcggaggggtttgggagtcaggcctgggcaggaccctgctgactcgtggcgcgggagctgggaccaggctctccggcctttctctggcttccttgcttgcctgtgggggaaggggaagatggnaagaaggntggnangnccnatnntgcttnnngggggcncanncntcagannannntnttnatct

SEQ ID NO: 29358 - DNA, 498 bp, Homo sapiens
ggagcttaaggatgagacatcggcagagcctgcaaccgactagaggacctgggtcccggcagctctttgctcacccatctccccagtcagacaaggtttatacgtttcaatacatactgcattctgtgctacacaagccttagcctcagtggagctgtggttctcttggtactttcttgtcaaacaaaaccaatggctctgggtttggagaacacagtggctggttttaaaaattctttccacacctgtcaaaccaaaaatctatcagcccacgtggtgtggttggtgaacagtgcatgccaggaggaagcagtccctcctcaccagctctccagccaggacgatcacacagagatgaatggcatctgagtattacggcatccagagccactgctgactcccacttgcacgccaccattcagtcaccagactgggtgccctccgatgggtggaataagtctgcttatgccaaggctggctttggtcccacaaatgagt

SEQ ID NO: 29359 - DNA, 443 bp, Homo sapiens
  misc_feature (1)...(443): n = a,t,c or g
agtgaagcaggctcccagccacatggcatccatgggacagcactcatcggtggcttgcccatgccatacccaaaccttgcccctgatgtggacttgactcctgttgtgccgtcagcagtgaacatgaaccctgcaccaaaccctgcagtctataaccctgaagctgtaaatgaacccaagaagaagaaatatgcaaaagaggcttggccaggcaagaagcccacaccttccttgctgatttgatatttttggtcatggagaagggtgggattgggtgggaatggggtgntgcnctngnccngggtgatggannnngttctnnnnnnttaannttnnnnannatngantangaaaagnnnnnnngnnnnnntnnatnncnntngncntncnnnnnntgnnngnngnnntnnnaatcnatnntnngnnnnnccnnnnngnttgtt

SEQ ID NO: 29360 - DNA, 520 bp, Homo sapiens
ggagccatcctcacgactgtctttttctctgtcttttctcccgtaggccctgagcctgtgcaattatttcgagagtcaaaatgtggatttccgaggcaagaaggctgggtctcttctgcgtcagtcgccccagccaaggcacacattttatgctgggccccgtctgtctgcctcggcctccagcaaggagctcctcatgaagctgcggcggaaaacaggctactcctttgtaaattgcaagaaagctctggagacttgtggcggggacctcaaacaggcagagatctggctccacaaggaggcccagaaggagggctggagcaaagctgccaagctccaagggaggaagaccaaagaaggcctgattgggctgttgcaggaaggaaacacaactgtattagtagaggtaaactgtgagacagattttgtttctagaaatttaaaatttcaactgttggtccagcaagtagcccttggaaccatgatgcattgcagacctaaaggatcaaccctctgatac

SEQ ID NO: 29361 - DNA, 524 bp, Homo sapiens
gtggctttgtcctaggatccctgcacaataggaaattgtggtcctattgtatagtttgcagttattgtctctggaagggagtttgcagagttctcctgtggcgaagaggaggcaaggaaggctaagtgtcagttaagcaatagctattggggctacttctttgttaatcccataccccagatttctctcctgaccttttggggcaaagaggtgggtatttactaacttgaaggaaaactagagtggggaaaaggccggcaaattagggacactttggcgagggagaaaaaggaggcagtttgccacttggagaagatgaggaagacagggttgcaagacggtgactccaaaagagggagctcgacaggggtaatgtaaacagagatgctaactaagtcagaaaactctcctggtgaccaaaagagaaccactattgggggtaatggctagatttggctcctttaacttaaggaggggagatttgagaatgcagacattgacttcctggagcagcagcaaaaaca

SEQ ID NO: 29362 - DNA, 518 bp, Homo sapiens
agcagaagctggagacggacgccatgttccggctggagcatggcgaggccgaccgcagcacactcaagaaggcgctgcccacactgagccacatccaggaggcccagagcgcctggaaggacgacttcgccctcaacagcatgctgcggagaaggttccgggaaaagaaaaaagccatccaggaggaggaggagagagaccaggccttgcaggccaaggcgagcctgaccatcccgctggtgcccgagacggaagatgaccgcaagctggcggctctgctgaagttccacaccctggactcctacgaggacaagcagaaactcaagcggaccgagatcatcagccgctcctggttcccctctgccccggatccgcctccagcagcaaggtcagcggcgtcctgaagaagctggcacagagccgcagaaccgcgcttgcacctccccataccgtcggggacctggcatcgtgcggcggaggtctcggacgtccggagagcccacatgcggccgacaccc

SEQ ID NO: 29363 - DNA, 532 bp, Homo sapiens
ggaaaagcaacctagatcaccttatggatgtcgcaataatacaaaccagtgtacctctgaccttctcatcaagagagctggggtgctttgaagataatccctacccctctcccccaaatgcagctgaagcattttacagtggtttgccattagggtattcattcagataatgttttcctactaggaattacaaactttaaacactttttaaatcttcaaaatatttaaaacaaatttaaagggcctgttaattcttatatttttctttactaatcattttggatttttttctttgaattattggcagggaatatacttatgtatggaagattactgctctgagtgaaataaaagttattagtgcgaggcaaacataactcatttgaggataaagtttgtgttggatatgtggttcctgatgcattttgacttgctttttaaatgcttatctttttctttaaagatttattcaataaaactaattgggacccccgtatttcagtaggacctgggtagggattggaagacttgc

SEQ ID NO: 29364 - DNA, 525 bp, Homo sapiens
cttttatttgtcctgtggaatttcctccactcaggatttgactgagagtatccccagagtgtccagttagacctagaagctggatttgatcctggttcatttattttcccccaagaatactccataggtgatgctatacactttctcttacatcatttcaggaggaacatgatgtctgattgttccactttcagtgattttaatattgatcaatgagttctggtggtaccaactactacaaagtttctcatcaatctttcacctgatggttttagcagctattgataattgttgcctggatccattatttcatttcaggggttgtaaaatagtgattttctggttctatcaaacctcttgcatttatcatctatgattcttctttaaggaactttctctaaatctgaatgggaaagatgcgataaatatttatcaaattttagagtgagttagtgcctagcaacctccaaagttgacaaatgagtatttctttaaagcaaggtatggccaccaatactttgaaac

SEQ ID NO: 29365 - DNA, 520 bp, Homo sapiens
ctccaactcgggaaggcaggctgcccggctcttctccgtgcctcatgtggtgcagcaagagaccaccctggcctacctagagaaccaggtggcagcagcactcaccctgcagtccagccacgagtaccgccattggctcctcgtctacgcacggtacctcgtaaacgaagggtttgaataccgacttcgagaaatatgcaaggacttactgggtccggttcactactccactggaagccagtgggagtcaacagtagtgggtctgcggaagagggagctgctgaaggagctgctaccagtcatcgggcagaacctccgattccagcgcctcttcaccgagtgtcaggaacagctcgacatcctgagggacaagtagcctgccccagcctgcctggctgcagcaagggcagggccacactctcgcgctgatgacatgcaggaccgctctacctgaccaggctgtagggggaggagacactgcaggagatgtgctgtctgcaccagcgccagccactcctgg

SEQ ID NO: 29366 - DNA, 519 bp, Homo sapiens
aaaagttcggagcaggacggcttacctgttttctagatttgtcaaatctctcaataagcaaatgaatcctttcattgaggatattttgaatagaatacaagatttattagagctttctccacctgagaatggccaccagtccttactgagcagcgatgatcaactttttatttatgagacagctggagtgctgattgttaatagtgaatatccggcagaaaggaaacaagccttaatgaggaatctgttgactccactaatggagaagtttaaaattctgttagaaaagttgatgctggcacaagatgaagaaaggcaagcctctctagcagactgtcttaaccatgctgctggatttgcaagtcgaaccagtaaagctttcagcaacaaacagactgtgaaacaatgtggctgttccgaagtttatctggactgtttacagacattcttgcaccctcagttgcccttacaaaaggatattctcagaagtggagccgtactttccttctcgatgatatt

SEQ ID NO: 29367 - DNA, 519 bp, Homo sapiens
  misc_feature (1)...(519): n = a,t,c or g
cgggctttccctgggagacagttagcgctcttccctggagggaagtcactggacagctgctactgaggaaggccacagggggagccactgtgggaagatgcttgacccctgaggcctgacagattcgagtgctcctgactcttgtcctctaattgtcacagcagccccagtgaatgcactggtgtctcatctgctggtggttgagcctgagaagctctatgccatgcctgaccccgcaggccctgatgggcacctcccagccgtggctaccctctgtgacctctttgaccgagagattgtggtcaccatcagctgggccaagagcatcccaggcttctcatcgctgtcgctgtctgaccagatgtcagtactgcagagcgtgtggatggaggtgctggtgctgggtgtggccagcgctcactgcactgcaggatgagctgccttcgctgaggacttagcctggatgaagaggggcacggncagctggcctgggggaactgggggctgcctgtgtaacta

SEQ ID NO: 29368 - DNA, 499 bp, Homo sapiens
  misc_feature (1)...(499): n = a,t,c or g
caatctagtaggatgttctcattttaaaaacgaggggaaaagaccagagtttttcaggagaaaactggaggaaaatgggcacaaaaactcagaaggcagctattcccagcagcttcctagttaacaacccccatgctgcctccagtctttgtctgtattcttctgtatttaaccttcagattgtaagccttttctggcaagcttttcttctttttttaaactcttttcctgaaactttttatgaatggctatggcaccattaatgctgctgaatatctttaaactctgcacaagcaagtgtgtagcttaaggccactactggtaaggaaaccaagtgtcctctgtgccttttttctttctgtgaagtaatttaagaatatccaaaaaaattagactttaaaaagttatcttggtacaacaccgtggtatatacacttggaagcttaaaaaggngtttgctggaacttagaagcagctctaaatctagtagagcagactt

SEQ ID NO: 29369 - DNA, 496 bp, Homo sapiens
  misc_feature (1)...(496): n = a,t,c or g
gtgtgagcaaggacgtggttgtcagcaaagaggacgcacgtgcaggttctggagctggagctgccggcttggggacagccacatcatcggtgacaggcgagcctatagagacttcacccgtgattcacctggtgacagatgccaagggcaccgtcatccacgaagtccacgtccagatgcaggagctgtccctgggcatgaaagccctggccccagagccccccgtctcccaggagctcccctgctccagcgagggcagccgtgagaacctgctgcaccaggccatgcagaactccggcatcgtccttgagcgcgctgctggggaggagggtgccctggagccagctcctgctgccgggtccagtccccagcccctggcagtggcagccccgcagctgccggtactggaagtgcagccgctggagacacaggtggccagcgaggcctcagcggtgcccangacccaccatgtnctcantgaatgagacnttccaca

SEQ ID NO: 29370 - DNA, 464 bp, Homo sapiens
  misc_feature (1)...(464): n = a,t,c or g
agggagtgtccttagactgccattgccaggcccccagcgggcgggctggtcccatgtcccactgaggcagaaaccagttactagggggagagaggcatttacacaagatacccagcttgcgagggcagcccagtgtgtgattcacaggactggctaactccactctttctactatgtcctttctcttgaagtcacaggagtaagtgacctttgaggggcactccagagagaaaggatgtaagggttgaggacctggtgactgtcttcaggcagcagtcagagagttgatggtgaaggaggaggaggctcagagacaaggactggacatgggaaggtggaggaggagagtggatgcctgactccccaagcacccgcagaacagcgccctgtgctcatgagggttaaatgggggctcaagtctgctgtgcgtggtgccagatangtggngcattgttgagttggac

SEQ ID NO: 29371 - DNA, 472 bp, Homo sapiens
  misc_feature (1)...(472): n = a,t,c or g
aaaaaagtcagcccctgcacatctctgtagtgcttttcatgtattcaaaccacttccgtatatgacctctcacttagtcctcatgacaatggagcactnnnnnnnnnnnnnnnnnnnnnnnnnnnnnnnnnnnnnnnnnnnaagttcaggtcctctgaccccagaagtgtctgtgatgaccctcccaaccttggctatctaccccacctgtggagaggaggtctggggtgacatctattgtagatcccacctgagagtttaaccaatgagaagacttactttcctggtaggcagcctgctttgttttgcacaggaagatagattttttttctcatctttcttataaacaacctcatgcacattctgtgtttgagccaagactagtcacccattgggggctaaccgtgcagtgtnagctgcntncacaccctcacttctcccttcactccccctttctcactcagggctggga

SEQ ID NO: 29372 - DNA, 466 bp, Homo sapiens
  misc_feature (1)...(466): n = a,t,c or g
cccacgcgtccggtcggcccttgtaccaaagaagaatctcatctagctcagttcaaccttgttctgaagaagtaagcactcctcaagacagtctggctcagtgtaaagagcttcaggaccacagtaaccaatcttctttcaacttttcatccccggagtcctgggtaaacaccacctcatctactccttatcagaacattccgtgcaatggatccagcaggacagctcagcccagagagttgatagcgctacccaagactgtcaaaccccctgaggatcaactgaagtcggagaacctcgaggtgtccagttccttcaactacagtgtgctgcagcatcttggccagtttccaccccttatgcctaacaagcagatcgcggagtcggccaatagcagtagcccccagagctctgcggggggcaagcccgccatgtcctatgccagcgctntgcggccccttcaaag

SEQ ID NO: 29373 - DNA, 455 bp, Homo sapiens
  misc_feature (1)...(455): n = a,t,c or g
gtnnnnnnnnnnnnnnnnnnnnnnnnnnnnnnnnnnnnnnnnnnnnnnnnnnnnnnnnnnnnnnnnnnnnnnnnnnnnnnnnnnnnnnnnnnnnnnnnnnnnnnnnnnnnnnnnnnnnnnnnnnnnnnnnnnnnnnnnnnnnnnnnnnnnnnnnnnnnnnnnnnnnnnnnnnnnnnnnnnnnncctccacaccaagtgcctccccaccaaccaccccaacagccccgagtctatttccacgtggagggtgagatgggcttgagaacttgcctgaggctattcacctcccagctgtgaaagaaaggggctttagttctttccctgcctatgaagtctgcactaccaactggctccctcccccaagttcagctaaagaattccttctcctgtggaagttttaccctctgntcctctggcaccctccaatggatcctgtggtgccaaggaagaatggg

SEQ ID NO: 29374 - DNA, 458 bp, Homo sapiens
  misc_feature (1)...(458): n = a,t,c or g
cccacgcgtccggaaatactgggtctctacttaaatttgtaacctaaatgcctcacacctcattttctgaacaaataaagcccaaattcagtgtcctttttgataggatcctgtcctgacctttccaaatctgatgctagagccttgtgtaccctgagttcagccaaactgaactcttaatggtcccttgctccatactctccccttgctcatgcctttattctcctggtctgattcatctttgcatcttaacagtgtatagcatggtgccttctttttactggggacatatcgagttaatgaatgaatgatgctattacagaggtacagtncgggaaggggagtgagtacattttagaaaggngataagtggattgtcagccttcatcattttcaatggaccaaattactaaaactttacagggttggnnggnntttnttcntttttcatttcctca

SEQ ID NO: 29375 - DNA, 465 bp, Homo sapiens
  misc_feature (1)...(465): n = a,t,c or g
cggacgcgtgggagacaactttttgaaagataaactacagtatggttaagaaattaactcattttccacttaccataagtatatggacaatttcatcttaaatattagcttttaacaagttttgcttgttgtttcctaccagtaatctttattgaaattctttcaaagcagctcttttatgagaatttcttatgtcaaatttgtcgttaatatgggtcagctcaattagaaatctacatacattaaatgtagatgtgcattttgtgggggagggggagtgggttataactttatatttatagtttcctttttattataggagaattcaagactccttcaagagcgtggcngtggcttatattaatgctgactcatctatagaaggtgaatatcgttggctcataagaaaagatgtgattaaactaggagcagcagtctagntaataaattatgcactaacaaggg

SEQ ID NO: 29376 - DNA, 448 bp, Homo sapiens
  misc_feature (1)...(448): n = a,t,c or g
cccacgcgtccgaaactagccaagatcactcannnnnnnnnnnnnnnnnnnnnnnnnnnnnnnnnnnnnnnnnnnnnnnnnnnnnnnnnnnnnnnnnnnnnnnnnnnnnnnnnnnnnnnnnnnnnnnnnnccttctgatgtagtttaatcagttgacattagacgcaaggtcaaaaatttacatcaggtatctgaatgtgtagcatatacaactgagtgttgaaagaagacaaaatcgttttcatcacgaagaatatgtgctcagtaagaatcagaatgttcaattgtgtgaaggtgggagatgggaagattggtattatggcctggatccagaaatcagtcttccactataggaaatgggaatttaaagatgatcagaagacagttgggagcagagtgagaatagaaccctcactgctgctaccttcagatcacgaagaagtttttt

SEQ ID NO: 29377 - DNA, 442 bp, Homo sapiens
  misc_feature (1)...(442): n = a,t,c or g
cccacgcgtccgagagaatccaaaggccctattgtgcctttaaatgtagctgacctaaagcttcttgaagctagtacacagtttcagaaaaaacaaggaaagaatactattgatgtctggtggctttttgatgatggaggtttgaccttattgataccttaccttctgacgaccaagaaaaaatggaaagactgtaagatcagagtattcattggtggaaagataaacagaatagaccatgaccggagagcgatggctactttgcttagcaagttccggatagacttttctgatatcatggttctaggagatatcnataccnnaccaaaganngaaaatattatagcttntgangaaatcattgagccatacagacttcatgaagatgataaagagcnagatattgcagatnngatgaaagaagatgaccatggcgantatc

SEQ ID NO: 29378 - DNA, 456 bp, Homo sapiens
  misc_feature (1)...(456): n = a,t,c or g
cttatgtctctgatatcacaggcttaaagaaaatgataaagacctaaaaagaaaagaaatatcccagcatgctgaaggaaagaaaagttccccaatacccttcctgcttatttttccaatatattacacagctgggtccaccttacctcgtcctgtttgattccagcgttaccaacttttctattggagccaaataagacatactgcaatcagtgatgaactgtctatatgccaagtgtatcccttgtgtaactgtgnaatggctgaaactgagaaattggggcgaagtatcaagnggcttaaaggattgccnaggatccnaaatttgancgattaccaaattaccncgcncagganggaatctatgcagatgactgcttatcacagagagttactcagcatangtgntgtagccacgaacctgggaccttaaaagaagaanctaagattcttggg

SEQ ID NO: 29379 - DNA, 484 bp, Homo sapiens
  misc_feature (1)...(484): n = a,t,c or g
cccacgcgtccggatctcgctgcctaaggaaatcggggagcttacccagcttaaagagctccacattcaggggaaccgcctcaccgttctgcccccagaactaggaaacttggatttaactggccagaagcaggtattcaaagcagagaacaatccctgggtgacccccattgcagaccagttccagcttggcgtgtcccatgtttttgagtatatccgttctgagacatacaaatacctctacggcagacacatgcaggccaacccagaaccaccgaagaagaataatgacaaatcgaaaaagatcagccggaaacccctggcagccaagaacagataaggaagggatnggcatcggctggccttccagcaccttctctctccaacacttcattctctcttgccctgnctctcaaataaacccaatgctgcgngtgaggccttttttatttntcttttcctctctttctaatgcttccccctt

SEQ ID NO: 29380 - DNA, 353 bp, Homo sapiens
  misc_feature (1)...(353): n = a,t,c or g
agattggctgagcatccaccgagacaccctcatcctcactccgattgtgtgtggcagattggggcccaccagcatcacagatgagggcactgaggggctccgggaggaaaagatgcacgtccaggatctcacagctggtcaaaggcacagccaggctctaatggtgttcccctgactccaggttcattgttctttcctggattcggtccagattaacccagcactggcttgtcagaaatcctcaagggcttctagttgcctggagctgaaacctgcaaacttttctgagcttgcatccctatgagtgaaactttctgcacgacaacacataataaaaanaaaaaaaaaaaaaa

SEQ ID NO: 29381 - DNA, 453 bp, Homo sapiens
  misc_feature (1)...(453): n = a,t,c or g
caaagatctaatgagtcacaggatgggggatgaaattgggaaaggtctggattagcagagttgctgcagaaagaggtacaggggaatatcttagaaggcacttggacagaatgggggtgatataaaagatgtnaaaatatancagaaagngagaatttgagccntacatcctgttctgcaccttantatggaagttngcctttccacacgantcttccttcacaattancctctaatttttttttngcngntttctccanattttggaanattncgacaannttcctaaangattanaacanatancccttttnanaancattnncntacgtgngggtagaantaaaatggctttntggtatantnctgttaangnttagnatgcagaaaaaaatganaaccccggaagtgacantaactgtgaaagaggcanatttncngntgngcttattg

SEQ ID NO: 29382 - DNA, 489 bp, Homo sapiens
  misc_feature (1)...(489): n = a,t,c or g
cggacgcgtgggccgaatttgaagatgacggctctgaaaaagtgttagatgaggaaggctctgagagagagtttgacgaagattcagatgaaaaggaagaagaggaggatacctatgaaaaagtctttgatgatgagtctgatgagaaagaggatgaagaatatgcagatgaaaaggggcttgaagctgctgataaaaaggcggaagaaggtgatgcagatgaaaagctgtttgaagagtcagatgacaaggaagatgaagatgcagatggaaaggaagttgaagatgctgacgaaaagttgttcgaagatgatgattccantgagaagttgtttgatgaggaggaanattccagtgagaagttgtttgacgattctgatgagagggggactttgggtgganttgggagtgttgaanaagggcccctatccctggcagcagctttattctcngtancngatgatgatgacnnatgatatttaatccctt

SEQ ID NO: 29383 - DNA, 492 bp, Homo sapiens
  misc_feature (1)...(492): n = a,t,c or g
ctttcttcctttccctgtggtttctcaatgtaaaacatcctataacctgagtcagacccaggagatacataaatgtgttgttagctttcagatttacagcgcaagtaacaacatacttagctaaattgccttgcaccctccttgtaaaatacctcttgttggagtggttgtggaatctgtcttatcccttcaaaagctgatgctgattggaaagagaggtctttgaaaccaggaggacatggtgtgaagccatctgtgccacttcaagctttattcaaannnnnnnnnnnnnnnnnnnnnnnnnnnnnnnnnnnnnnnnnnnnnnnnnnnnnnnnnnnnnnnnnnnnnnnnnnnnnnnnnnnnnnnnnnnnnnnnnnnnnnnnnnnnnnnnnnnnnnnnnnnnnnnnnnnnnnnnnnnnnnnnnnnnnnnnnnnnnnnnnnnnnnnnnnnnnnnnnnnnnnnnnnnnngagctgaagcaagagaattgcttg

SEQ ID NO: 29384 - DNA, 497 bp, Homo sapiens
  misc_feature (1)...(497): n = a,t,c or g
attttttggaaggatatacaccacatatcccatgggcaataaagcgcattcaatgtgtttataagccaaacagtcactttgtttaagcaaacacaagtacaaagtaaaatagaaccacaaaataatgaactgcatgttcataacatacaaaaatcgccgcctactcagtaggtaactacaacattccaactcctgaatatatttataaatttacattttcagttaaaaaaatagacttttgagagttcagattttgttttagattttgttttcttacattctggagaaccgaagctcagctcagccctcttccttattttgctcccaaagcctcccccaaatcatcactccctgccccccttaaggctagaggtgagcatgtccctcacaattgcacatgtcaagccatcagcaaggcgcatcacacaaaaggcaccaagacgtgaaactttttaaaccaaaaggacgaaganaaaacactttcaaaaaaaaaaaaa

SEQ ID NO: 29385 - DNA, 489 bp, Homo sapiens
cggacgcgtgggcaaacgcacaggcatccaggagatgcgagaggccctgcaggagaaggaagaacagaagaccatgaagtcaaaaatgcgagagaaagttcggcctaagatgggcaaaattgacatcgactaccagaaactgcatgatgccttcttcaagtggcagaccaagccaaagctgaccatccatggggacctgtactatgaggggaaggagttcgagacacgactgaaggagaagaagccaggagatctgtctgatgagctaaggatttccttggggatgccagtaggaccaaatgcccacaaggtccctcccccatggctgattgccatgcagcgatatggaccacccccatcgtatcccaacctgaaaatccctgggctgaactcgcccatccctgaaagctgttcctttgggtaccatgctggtggctggggcaaaccttcagtggatgagactgggaaaccgtctatggggacgtgttt

SEQ ID NO: 29386 - DNA, 489 bp, Homo sapiens
caagctctctcatggggccaggacgatacccgtggtcagcgatggaggttcctttatcttttaggcaaatctgttctcctggcagtctggattcttgagatattgctcacaggtttaaagcatccaggagccaggttagaatgataccacaaattctttttcattagaggtggtttgctgtagttctgtaaggtctgattgctttaaaagtcagaaacttaggctcaagtcccagctctgtcactgagccctcagtgtgactttggatcacactggaaattttatagctggaaaagaccatctaggtcttccctggacttccagaaaaggaaactgaggtttatagaggttaagcttgcccacttcagagctgggcagagagaattccagctttttgcttctaggcgaggggaccacaccatacctgctctgatcttcttcctcctcacttgggaaatgtggatgacagcctatgctcactttagcagt

SEQ ID NO: 29387 - DNA, 463 bp, Homo sapiens
  misc_feature (1)...(463): n = a,t,c or g
ggtgctcaacttggatggagtattcccacgcttccctcgaaatacccaaatactccacagtgcccctgcaaatcactatgacacgctggggtaccttggtacccagtttgggaaccatgtcttagttttagtgtttttcttttttttctttctactaaatggtttatttatgataaatgtctacgtttaggattatttggcttagaagtctgaccacattgtgtggctcttgataaaattatttttttctttggtttttttgtccctttctcctcttccttctccatctttcctccctctgttgcttcctccttttcatatctttcagcgtctactgtgtgcccagcactgctctcagtcattctgtttataggagaggggtggaaggacttcaccttttcatnnnnnnnnnnnnnnnnnnnnnnnnnnnnnnnnnnnnnnnnnnnnnnnnnnnnnnnnnnnn

SEQ ID NO: 29388 - DNA, 458 bp, Homo sapiens
tgctcacaaagcactaggaaatgtcatggggttcaaatatatatcctacacaactgggcaatacatttttgtttgatttttaggtctgtgtatacattaacagttcatgtaattaatacctgatcatttgggataatgaaagtgaagttagttgtagatgaagtaaagttataaaagagattaaaaatgcggtaactttttaagataataatcatacagaaggtatgaagttcattttcggtagtcttccaacctctcaggtgcctaataatttatgtttgaggataacaggtaacaaagatagtcgagataggagaacgtgtctattagtctttgcatctaaaaggcagtgagttacgttcctgccttccactgtgtttctgacatagcaatgtttgtttgatattggaacctggattcatattttatgtaaataatatcaagctgtatatttttca

SEQ ID NO: 29389 - DNA, 466 bp, Homo sapiens
cccacgcgtacgcggcatctgtcgatgttatttccccagcatggccgaaacagaagccctgtcgaagcttcgggaagacttcaggatgcagaataaatccgtctttattttgggcgccagcggagaaaccggcagagtgctcttaaaggaaatcctggagcagggcctgttttccaaagtcacgctcattgccggaggaagctcaccttcgacgaggaagcttataaaaatgtgaatcaagaagtggtggactttgaaaagttggatgactacgcctctgcctttcaaggtcatgatgttggattctgttgcctgggtaccaccagagggaaagctggggcggagggatttgttcgtgttgaccgagattatgtgctgaagtctgcagagctggcaaaagctggagggtgcaaacatttcaacttgctatcctctaaaggagctgataaatcaagcaattttttat

SEQ ID NO: 29390 - DNA, 493 bp, Homo sapiens
cgtccctcctcccctccggccacggccacggctggcacaaggttctctccctcccctgcttctaggattgggctgcttccccctcggcagcctctcaccaaggattacgggatttaaatgtctgatttagcaaggctgagcctccagggtggccatctgctccatcagaaagtggcaggatacctgggttcccaaggggaacaggggtgggtgctactggatggagagaggccagtgggaggcctgctagccagggtcccaggaaagtgggggcagctaaggtaagagtaggggtgtggggctaggtccttcccagcatcccctcatcctgggcctcatgccaggtagctgaatgaattgaagctttaaactctgcaggaaaacctttcaaagggcttcttgggatagggaggagagtcgggttgaggagctcagtaccgctgccatgctcctcagggctgctggctccagggaagggggctgggaacaagca

SEQ ID NO: 29391 - DNA, 504 bp, Homo sapiens
ctttgtattttatttcatgtggagatcatgaaagtaggaaatatacctttagaagtaactcgcacctttcttatgatgttaagagaaacactagtgtttagttttacagtaaccctcatattttaatggtgttacagcatttgcaaaaattattctgctaagtatttacaactctatttattattcactcaagtattaacattctctattaaataagaggaggtgttgtaaagagctgctagtaggttcgctttaaaccacatgagcttaaccaagaatatgttatgagaagttgctgattaaatcagtgctgtttttacaccacttctggccaactcagaataatttagattgttcttttaacaaaaaaggctttctatctcttttaaagtaagtcactttataagttggcagaagtgaatgacactttgagagtagtctttcaatctgaagatgtaagacttcctgaacaagtctcaagaagtctttacattatatttataa

SEQ ID NO: 29392 - DNA, 606 bp, Homo sapiens
  misc_feature (1)...(606): n = a,t,c or g
gnngnnnnnnttgnnnncccnnntttggnacanntatgacnnnnnnnnnnnnnnnnnnnnnnnnnnnnnnnnnnnnnnnnnnnnnnnnnnnnnnnnnnggcacgagctggaagagggtggaatgtgcaaaatccatccatcaatcaatcaatcaattttcagataatatctagtttaatcaaggaactcctgtagaattattgtggataatattattcatcacttaagagattttgaaagaaaagcaattcatcattaagtaattatagggaattcctaaaatgataaaatgagaaagtcccacatagtcttcttacgctcaacatcttgctttgtcattgcagtgccacttttttggatatttagaagtgttagatgtgtaactgcaccagaccagtctggttcaactttttttttttncttccaattttnatttnaggtncagggggtaaatgtncaggttngtnatgggggnaagttgtgtgncanggagggnntgggggccaaattnttccnttcctaggnantagccntacccctgataggnagtttttnaancctnccntcctccttccataggcttgggggctatggccctctttgggc

SEQ ID NO: 29393 - DNA, 601 bp, Homo sapiens
  misc_feature (1)...(601): n = a,t,c or g
ggtgnnnnnntttgaaacnccttgactgattacgaatttaatacnnnnnnnnnnnnnnnnnnnnnnnnnnnnnnnnnnnnnnnnnggcacgagcggcacgaggggaagaaagtaaaatgaaagcatttgattcatcaagaaccatgactgagctacttgcaacctgctgcagggctgggacaactcatttgagcttcccacaccgagttcctctcctttcgaagaagaggtaggctgactcctccagcgctaaatgtctgtgttgggaaatggacaggtctaggggagaagacagtacctgctggaacattccagaacatgctggaatatgctaggggcttgctgttttggcctatgttgtgctgaaaccctgttagtttcactagggaggtaacaagttcaagaggctgaagaagaaatgcagagctagcaaaggagacattgggtttgattcgggacttagacacaggggaaagagtgcaggtgctggtgggctggaaagggaaactgcagcccttgcaaacagcatgcagttattcagcattttcacttacaccctcccttacgacttcacctggcaaccntnatgtacctaaactca

SEQ ID NO: 29394 - DNA, 564 bp, Homo sapiens
  misc_feature (1)...(564): n = a,t,c or g
annttgntnnnnnnnnnnnnnnnnnnnnnnnnnnnnnnnnnnnnnnnnnnnnnnnnnnnnnnnnnnnnnnnnnnnnnnnggcacgaggttgcctcatcaccccactgaaatttacaatccctcactgctcccaaccctgacatattcctcattctctttagcacttaccaccagcaagctcaaaaagcgtaccatagatggaaattatggccaaaatgacttctagtaacagatgtactagattatcctgcttccacaggcttttccgtctcctaaagcctgaaaatactctgagctctcacatggcacattgttgcattcttgctgtattcggaatatgtgtgcttgtccctgctctgaaggcacttctgtgcatgtgtccaccacagagccctatgtgctaaggtcctttcgtgtctgacaaggaagggatgtggttttagtcaagtaaccaaagcagaggagtcaagatttttgctntccttttatccccttcttggcttgtacaaactttggatattatgggcaagctgatcactgcatcttaaaaatggaactacataa

SEQ ID NO: 29395 - DNA, 520 bp, Homo sapiens
  misc_feature (1)...(520): n = a,t,c or g
ttnnnnncttgnnanagctatgacnnnnnnnnnnnnnnnnnnnnnnnnnnnnnnnnnnnnnnnnnnnnnnnnnnnnnnnnnnggcacgagctctgaacattttctttttttttctctctcgctagaggtagctttgaaaagtctatgtcactgcatttcattttattcattcagcaagtatttgagtgcccattatgagccatcggctatgctaggcagtagagaatcaaattgagtaacacatggtttttatcctgaaagaggaaagtgggagaaaataagtaaacacatggtttcaaggcaatccttaatccagtctacggataagcacaagttttccaggtggcaaggtaaaagaatattccatgcagtggggatagtatacggaggctcagaaaatgcaaggcatttaaagaatggcaaatagtttagcccggctagtgcctttcccagtctttcctcttgccccactaccactctttcttttttcagatggctaatttaaatttttttttttttt

SEQ ID NO: 29396 - DNA, 549 bp, Homo sapiens
  misc_feature (1)...(549): n = a,t,c or g
nnnnnnnnnnnnnnnnnnnnnnnnnnnnnnnnnnnnnnnnnnnnnnnnnnnnnnnnnnnnnnnnnnnnnggcacgagnnnnnnnnnnnnnnnnnnnnnnnnnnnnnnnnnnnnnnnnnnnnnnnnnnnnnnnnnnnnnnnnnnnnnnnnnnnnnnnnnnnnnnnnnnnnnnnnnnnnnnnnnnnnnnnnnnnnnnnnnnnnnnnnnnnnnnnnnnnnnnnnnnnnnnnnnnnnnnnnnnnnnnnnnnnnnnnnnnnnnnnnnnnnnnnnnnnnnnnnnnnnnnnnnnnnnnnnnnnnnnnnngcagggatggtgggggaggtttaataggcatgtagcaataagcgacagcgtgaatggaccaccagatcataagtggtcaccagaaggcattaggcaggaatggaaaagaaggccctgcctgttttanaggtcttagcagaacagattatcattcttggctggcccagagctatgaaagcctgtgttgcagggaagggaatgcaatttgtcccagagggataaggcacagtggtccggtaatactcaa

SEQ ID NO: 29397 - DNA, 565 bp, Homo sapiens
  misc_feature (1)...(565): n = a,t,c or g
ttnnnnnntttgnnannnnnnnnnnnnnnnnnnnnnnnnnnnnnnnnnnnnnnnnnnnnnnnnnnnnnnnnnnnnnnnnnnnnnnggcacgannnnnnnnnnnnnnnnnnnnnnnnnnnnnnnnnnnnnnnnnnnnnnnnnnnnnnnnnnnnnnnnnnnnnnnnnnnnnnnnnnnnnnnnnnnnnnnnnnnnnnnnnnnnnnnnnnnnnnnnnnnnnnnnnnnnnnnnnncttttcaggtacagttccctgctttttaaaataacatttcaagtcagcatagtgtggtggttaagataagccaggggcttcggaatcgttgatccttggcttcatattctggttctgtcacttcctattaatagctgtgtgcccttggatgagtcacttcacctctccaagcctttgtctgtttatctctaaaacaggactagtaatttctatattgtagggttattttaatcagaatgagctatgtgcatactcaaactacagttgtgggcaaactgtaactttaaaatgattcaggatcataacttcagtatttttctgngctggtacgtaac

SEQ ID NO: 29398 - DNA, 555 bp, Homo sapiens
  misc_feature (1)...(555): n = a,t,c or g
cnnctnnnnnnnnnnnnnnnnnnnnnnnnnnnnnnnnnnnnnnnnnnnnnnnnnnnnnnnnnnnnnnnggcacgagagtgggcagtgatgagttccagatttccactctgcctccaggttgatggctttaaagtgatgtaggagatagaccttggtttctttataaaacaggcctgtgaacttgtttctagggcaagccaaaagagccacttattgaaaatgtttgatttcaggggataagtgagctggtttgaattattttgtgtacatctgatccaatttagttggtatttacagaagatggtgcaattcttgagggaaggtacggaagcctttttaaaaagctcaccaatatggaagactataatacctgcctgcgaccgagatctccaagacaggcccagcccaggaccgagatcctgcatactttatgccctaagaggactccatatatgagctgtgaaccagtcaggcagtgagctgggtgctcagggactgttttaggagaccatgtggttttgaacctctgaccgtataagttctcactgatgggtc

SEQ ID NO: 29399 - DNA, 549 bp, Homo sapiens
  misc_feature (1)...(549): n = a,t,c or g
cncnnnnnnnnnnnnnnnnnnnnnnnnnnnnnnnnnnnnnnnnnnnnnnnnnnnnnnnnnnnnnnnnnnggcacgagggaaaatcttaattggaatgtaagctccctgagggcagggaactgttggtggctgctgtttggtaactaaatgaacgaactgaatccagcctgcttttttcaccgtggaggtagctgctacccagtaaagttacgttggttgcttcaaatccacacttaggttgtaacagggctgagctaacagtcaggttttcctgttcctgtcttgtcctctgacgtggcttcagggccctggaaggttctctgctaagcacgcatccaaatgggtgcaatggcagcccgagcgtgtacacgcacacctcctgttctgggggagtggtttcttggcagcttctcaagggcaaagggtgagttttcggcatctggccttccttgctgctgtgggtcgggtcattctagcatcttgcatcttggatganctgnactgcatctcggcagccaccatgaactggcctgcantggttttctcgtt

SEQ ID NO: 29400 - DNA, 465 bp, Homo sapiens
  misc_feature (1)...(465): n = a,t,c or g
nnnnnnnnnnnnnnnnnnnnnnnnnnnnnnnnnnnnnnnnnnnnnnnnnnnnnnnnnnnnnnnnnnnnggcacgagtgaagaggaagatgatgatgatgataaaattcatgatgatgatacaatttctgactggaatctaagaaaatgttctgctgctgccctggatgttcttgcaaatgtgtatcgtgatgaactgctgccacatattttgccccttttgaaagaattactttttcatcatgaatgggttgttaaagaatcaggcattttggttttaggagcaattgctgaaggttgcatgcagggcatgattccatacttgcctgagcttattcctcaccttattcagtgcctctctgataaaaaggctcttgtgcgttccataacatgctggactcttagccgctatgcacactgggtggtcagccagccgccagacacgtacctgaagccattaatgacag

SEQ ID NO: 29401 - DNA, 478 bp, Homo sapiens
  misc_feature (1)...(478): n = a,t,c or g
aancccatnnnnnnnnnnnnnnnnnnnnnnnnnnnnnnnnnnnnnnnnnnnnnnnnnnnnnnnnnnnnnnnnnnnnnggcacgagcaccatgaaccctggactgtgtaagcggaggtgagactcccacaagcccagaaaggacacgatagcttgaaggttgaaggagcaagctgannnnnnnnnnnnnnnnnnnnnnnnnnnnnnnnnnnnnnnnnnnnnnnnnnnnnnnnnnnnnnnnnnnnnnnnnnnnnnnnnnnnnnnnnnnnnnnnnnnnnnnnnnnnnnnnnnnnnnnnnnnnnnnnnnnntagtcagatannnnnnnnnnnnnnnnnnnnnnnnnnnnnnnnnnnnnnnnnnnnnnnnnnnnnnnnnnnnnnnnnnnnnnnnnnnnnnnnnnnnnnnnnnnnnnnnnnnnnnnnnnnnnnnnnnnnnnnnnnnnnnnnnnnnnnnnnnnnnnnngagattttagctctcct

SEQ ID NO: 29402 - DNA, 555 bp, Homo sapiens
  misc_feature (1)...(555): n = a,t,c or g
tnnnnnnnnnnnnnnnnnnnnnnnnnnnnnnnnnnnnnnnnnnnnnnnnnnnnnnnnnnnnnnnnnnnnnnggcacgaggtgaaggtgtacaccatggaccgtggcctcatctcctacaaggggctgccccctgaagcctggcaggaggagtgcccgtctgactcagaagaggacgagggccggggcgagaggaccgcctttatcaaagaccagagcgccctctgatgagcccactgcccaccccctcaagccaatcccctccttgggcactttttaattcaccaaagtatttttttatcttgggactgggtttggaccccagctgggaggcaagaggggtggagactgtttcccatcctaccctcgggcccacctggccacctgaggtgggcccaggaccagctggggcgtggggagggccgtaccccaccctcagcaccccttccatgtggagaaaggagtgaaacctttagggcagcttgcccggcccggcccaccagagttctgcggagtgaanaggggcacccttgttgntgggattcctgaccagccga

SEQ ID NO: 29403 - DNA, 564 bp, Homo sapiens
  misc_feature (1)...(564): n = a,t,c or g
nnnnnnnnnnnnnnnnnnnnnnnnnnnnnnnnnnnnnnnnnnnnnnnnnnnnnnnnnnnnnnnnnnnnnggcacgagtgccagaatccattttaatttttaccttcttattttgaaatatttgagacacagaggaaagttataagaattgtacaaagaaatcgcatatactttttcctattaatagattcaacaatttttaatgtgttgtcatattggctttattctgtgtgcgtgtatgtatgtagtttttcctaccaattatcagtttgttagtttaacttaatatataatagtttaatctttcccttaaaatatacacaactattatttgtcaatttaaacaaatagtttaggctacnnnnnnnnnnnnnnnnnnnnnnnnnnnnnnnnngaggagaccatggcaggaagatcacttgattagctggacatgatgggtacctataggcccagttactcacnnnnnnnnnnnnnnnnnnnnnnnnnnnnnnnngttggaggctcagttagctatatgactgnactgnactccacccttggcccagggtaagaactagctctt

SEQ ID NO: 29404 - DNA, 573 bp, Homo sapiens
  misc_feature (1)...(573): n = a,t,c or g
ttnnnnnnnnnnnnnnnnnnnnnnnnnnnnnnnnnnnnnnnnnnnnnnnnnnnnnnnnnnnnnnnnnnnnnnnnnggcacgagctcttctccttctcctcctcatcctcctgcttctcctccctcatccccttctccctccagcatcccctcctcctccttctcttcctcttccttctcctgacttcccccctctatctccttgttcttctctttcccctttctcttctttttctcctcctcccagtcccccttctcctcctttctctcgggggccttctccatctgacaacttccattgatcattccttggggtctcatagcaaaaattcagaaacagtgtgatgcagtagttggggatgctggcctgggctcaaatcccagctccatcccttattttccatgtgaactttctatgcttccttttccctactggttaaaaaaaaaggaggggggggcacaatagtgtctatctcacagacctctttaaataattaaatgagatgatatataagacatttagaatagtacctagggataataaattgccataaatgcgagttttattatttta

SEQ ID NO: 29405 - DNA, 576 bp, Homo sapiens
  misc_feature (1)...(576): n = a,t,c or g
ttnnnaacagctnnnnnnnnnnnnnnnnnnnnnnnnnnnnnnnnnnnnnnnnnnnnnnnnnnnnnnnnnnnnnnnggcacgagaacagtacccaggtaaaaagggaaaggaaccaaggaaaatccacctactcaattcttaatagagaaatctaaagatgcaaaatggaacctatgcacagtgtaatatgaatgaaaggcagaaaaggaataccaagtcaaaaatttactccaaatactgaagaaatttttagatataaacttctgtagacctcagtgaagctaatgagaacacaaaatcttttaaaacaagatcacaaagaaaatcaccaaataaaaaatacnnnnnnnnnnnnnnnnnnnnnnnnnnnnnnnnnnnnnnnnnnnnnnnnnnnnnnnnnnnnnnnnnnnnnnnnnnnnnnnnnnnnnnnnnnnnnnnnnnnnnnnnnnnnnnnnnnnnnnnnnnnnnnnnnnnnnnnnnnnnnnnnnnnnnnnnnnnnnnnnnnnnnnnnnnnnnnnnnnnnnnnnnnnnnnnnnnnnnnnnnnnnnnnnnnnnnnnnnnnnnnnnnnnnnnncc

SEQ ID NO: 29406 - DNA, 446 bp, Homo sapiens
  misc_feature (1)...(446): n = a,t,c or g
ttgaancctaattgatatcntctgattaccccaagcttggcacgaggaggatgagggatggagagagtgagcaggggctggaagtagaaacaacagacacaggggaaggtggcgtcgccaggagagtggggctttgaggcaggagggtcagcctgagtgagggcctggcccacactgacggcctgcagctctggtgagcagcgcccgggaagcaggggctgagtctggaagaaaagctctcacagccgcctcacccgcccccagggtatctgtacggctccctggccacgctgctcatctgcctctgcgcggtctttggcctcctgctgctgacctgcactggctgcaggggggtcgcccactacatcctgcagaccttcctgagcctggcagtgggtgcactcactggggacgctgtcctgcatctgacgcccaaggacctggag

SEQ ID NO: 29407 - DNA, 562 bp, Homo sapiens
  misc_feature (1)...(562): n = a,t,c or g
acnnnnnnnnnnnnnnnnnnnnnnnnnnnnnnnnnnnnnnnnnnnnnnnnnnnnnnnnnnnnnnnnnnnnggcacgagcttcatctcaaaaaataaaaaaaaaataataataaagttggtattagagaatagtacatcctcctagggagctgcacactttcaaaaacttgctacttggggagatttggaaccccaagagttgagttagtgatcaaacaaatgactcttttttaggccaattttgatttcttttgggaaataattctctgaatacctttgtcgacttgtgggctttttgcttgcattcannnnnnnctgagtaaacaggnctaaagatttcttctagacatagttcctaaatcttctcatttantagtntacctgtttgcatttannggcccatcctttttccctccattttaatggnggttaccctgaggctagctaaaatcacaaactggagtcagaaggcaataccattaattcgatctttgcctgnnagctgnctgatgnttnggctgaaaagcctattgagagggcttatgaaaaatganacccttta

SEQ ID NO: 29408 - DNA, 566 bp, Homo sapiens
  misc_feature (1)...(566): n = a,t,c or g
acagctnnnnnnnnnnnnnnnnnnnnnnnnnnnnnnnnnnnnnnnnnnnnnnnnnnnnnnnnnnnnnnggcacgagatgagtataatcaaatattttcagtttaaaatgtgaggggtttaatgccctcatttctaatgtatttaataaaacaccatatagctttataggcagtagagatctatatgacacagtttagttgagcaaacatttattatgcatctgttgtatactgagtactctgaccctgggagtccattttgcttcttgaacaatgttttaataagttttccttttattttacacatattttggaaggtatagtacatgtagtaaaataagaaaataaaataatttgtatgaatattggaaaatacaagataatatctctttctgctgatggcttaaaaaaactactggagttaagagaattcagaatggtgggatacaagataattcagaaatcatagccattttctacttcagataaatggaaacaaacaaatatttcaattataatcatgataaaaatgacncaatttgaggaataagttcaccagaggctcat

SEQ ID NO: 29409 - DNA, 568 bp, Homo sapiens
  misc_feature (1)...(568): n = a,t,c or g
ttnnnnnnnnnnnnnnnnnnnnnnnnnnnnnnnnnnnnnnnnnnnnnnnnnnnnnnnnnnnnnnnnnnnnnnnnnggcacgagctggggttaggtggcacaaggccatttctatacccatcttgctgggcagcaaccagctcttaacctgaagtcctgcaatggcagctttaaatataggtaagatgtctggaaggtagaaccttaaaagcaatcaggttggaaccaggactgggcaagagctgctggttttaatggcaactatgtatttttcctagaatcctggcctattgcaactagaaggaataactagtctaataatcttatttttatagataaggaaacacatacccaagaatgttaagttgatattggagactgaaattctgatttcttagttgtgctttttgtgctacagagactatgttgacttctctttgggtanagaggggatttttctgtacttagcatttctctgntccaannnnnnnnnnnnnnnnnnnnnnnnnnnnnnnnnggctgaacaggaggatcactagacctaggagttcaggccccctgggcaacat

SEQ ID NO: 29410 - DNA, 476 bp, Homo sapiens
  misc_feature (1)...(476): n = a,t,c or g
ttgnnnnccnnttggnnnccnnnnnnnnnnnnnnnnnnnnnnnnnnnnnnnnnnnnnnnnnnnnnnnnnnnnnnnnnnnnnnnnnnnnnnnggcacgaggtaagccaaaaaaagaaaacaattttttttgtactagagatagtcccagttaaaatttagtagctatacataggtgtaaatatatataatttctaaaagaccaggaaagaagtaaaagcccttttcattcaacagcacattataaacatatataaacagcatattataaacccatgtcaacaaatggagcacttctcaaacttttttactgtcaggacccctttacatacttaaaaactgaattttttttttatgnnnnnnntatctgttaaattagatattaaaactgaggccaggcncaggggttacacctgnannncccagcacttncgggaagngangccggttggatcatttganggcnggaggtcnaaaca

SEQ ID NO: 29411 - DNA, 462 bp, Homo sapiens
  misc_feature (1)...(462): n = a,t,c or g
ttggnnnccannnnnnnnnnnnnnnnnnnnnnnnnnnnnnnnnnnnnnnnnnnnnnnnnnnnnnnnnnnnnnnnnnnnnnggcacgagnnnnnnnnnnnnnnnnnnnnnnnnnnnnnnnnnnnnnnnnnnnnnnnnnnnnnnnnncctgtgcggtgcagcaagaccccatctgtatggaaaaaaaaaggagaagaggttgatttaatgttacctggtggtagagaaaattagaaacattttgtttcaattcaggaacaggccatgaatgcctataatgacatttatttagtgggtgtcccagccaatacaggaagataagaagcgttaaactatgtataattattgnnnnnnnagaaaaaagtgcattttcanggtgacataattggcttcatagaaaatccaggatagctnccgacnggatctngaattaattaaagcctttcccttanttnctgggcccc

SEQ ID NO: 29412 - DNA, 442 bp, Homo sapiens
  misc_feature (1)...(442): n = a,t,c or g
nnnnnnnnnnnnnnnnnnnnnnnnnnnnnnnnnnnnnnnnnnnnnnnnnnnnnnnnnnnnnnnnnnnnggcacgaggctgaattgttttacttttgtgctacagagtcctaagtacctttgagtcttttggggattcacttgttttggatctgaaatgtaaaatgaaatagctctctgaccagggctgagcacggtttttcagttgggatagtaaaacgagaaatctttctgaacactttccaaggagtcccctataagagcaaggggtaggaagaaaggggtcttcagttcttgccaaatcaaggacatgattttctgtatagggctcagannnnnnnntgtgttgtcttgcttcaatgtcagatgagtgtcgagagcttcggnaagggctgctttttaaaacccccctntgnttttcgggcccnctaatggncttttggc

SEQ ID NO: 29413 - DNA, 471 bp, Homo sapiens
  misc_feature (1)...(471): n = a,t,c or g
ttgnannccaacttggtatgncatgattacgaatttaatacnnnnnnnnnnnnnnnnnnnnnnnnnnnnnnnnnnnnnnnnnggcacgagccgacttgatctcctcctgcctggacatcctggggtgccctgttgagaaacaatacactgcccccaggaatcccggaggaaatgaaggactccaggctcaattcacggattccagttcttgagcatatttggtgatgtgctggcatctgcaccataaatcctcgtgttaccttgagctgaactgtgagaccatctatatggaggcttgtcattacataaacatcttcctttacaaatgtcgttttctcagattctatgnnnnnnctattggagtaagcccttcctgctgttcatgctactcctaaatctttttttttttaccccagggaanagnnttctttgccaatgcgccccctaacccntgccaaggttaaatggaaa

SEQ ID NO: 29414 - DNA, 447 bp, Homo sapiens
  misc_feature (1)...(447): n = a,t,c or g
cnnnnnnnnnnnnnnnnnnnnnnnnnnnnnnnnnnnnnnnnnnnnnnnnnnnnnnnnnnnnnnnnnnnnnnnnnggcacgagctcattgacttcttcgataactttacaaggtaccacttgtaaagtggtaaactctctgaggcacagagaggttaagttgcctttttacggtcacactgcaggggagagcacagccaggttctgcatgcattttgacgccagaaagctgattccccaccactgtggcatcctgcctctctgtcgtttgcaacctggcccatgagagcatatgccttgacctatgtgtcctggtttgcccgggacccagctaagcacatggttggttgccctactcctgtggcctgtcatgcctgtctcannnnnnngaccaagcttctcttttcgtcaagccccaacaagcttgntngcnnaaattcnttaaggaa

SEQ ID NO: 29415 - DNA, 463 bp, Homo sapiens
  misc_feature (1)...(463): n = a,t,c or g
ttgnnnnccntttggnnnccnnnnnnnnnnnnnnnnnnnnnnnnnnnnnnnnnnnnnnnnnnnnnnnnnnnnnnnnnnnnnnnnnnnnnnnggcacgagctggttttttttttaaaaggacaatgtacataaaaattctctttaaaccataaaacagcagctgttactacaatggttattgacgttaaatgctatggagggccactgaaaaccctccagggataaagctggctaccgttctcataaatgttctcttaaatgaattcatataaagcacttaaaacaatgcctgggtctcagtaagccttctgtattagcagttattattattacagtcatactcaatgtcattgctattaccagcaagacatgcctggcttgaagtgctctgnnnnggtggcctggnttcccaggggggacnccatggattcctttcttaaaagcncttaaggcncttaaaacg

SEQ ID NO: 29416 - DNA, 461 bp, Homo sapiens
  misc_feature (1)...(461): n = a,t,c or g
ttgnnnncnnttggnnnccnnnnnnnnnnnnnnnnnnnnnnnnnnnnnnnnnnnnnnnnnnnnnnnnnnnnnnnnnnnnnnnnnnnnnnnggcacgagcagccatgggggagggataacaaaagctctttggctgcctgcagatgtgggcgccagaacagccccagactgagggcagaggtttgaattctacctgctgtgacttagctgtgcattgcagtcacttagtttctcactttttctataaaatgagggtaacaccctcattcaatgaagtactgaagcctaagtggaaaatggtgaatttttaaattgtgatgtttgctataagtaaaagctgtgtttgtggtagactataggttacggagcaggattaaatgagttccgtgagtcctgttgannnnnnnntgtcactattaaatggagtgagaatggtcngaaattnctnagggaanctgagtc

SEQ ID NO: 29417 - DNA, 457 bp, Homo sapiens
  misc_feature (1)...(457): n = a,t,c or g
annccanntnnnnnnnnnnnnnnnnnnnnnnnnnnnnnnnnnnnnnnnnnnnnnnnnnnnnnnnnnnnnnnnnnnnggcacgagggatttctgaatttggagcaacaagccttcagcaagctccttgatcagcacttctcggatgagagcctgggcgctgtcttctgtcatatcccccacctcagcagtcagggcaccaaactgccgtatgtgcctcaggcactcagtggtagtggtgacgatgaccatgttcttgaagcggtggttttcctttatcagggcttcgatttctgggcagttctggggcttgaattcattgtagccatcaagaaggaaaagaaccctctgccgcagcttcagcagcatgnnnnnnnnngtctgcttcctgattgtgccaggtatatccaggagttgatcacnagaagggtttnaaaagtncaccttggnccctgctgaa

SEQ ID NO: 29418 - DNA, 486 bp, Homo sapiens
  misc_feature (1)...(486): n = a,t,c or g
nnnnnnnnnnnnnnnnnnnnnnnnnnnnnnnnnnnnnnnnnnnnnnnnnnnnnnnnggcacgagctcacctgaaagaaggtttctggttttcaatggtgtgctgataagtgtaacactcatctctctgatagaaggaagaatccccaatttctaaagtttgctgatttccataaggatttagaagggtcttccactacaggaatagaaagggaagaggaagaagactacttagttttattcctggagatggcataatctggataagacagaggtgctgtttcaggtactgggaatatggcaaaagaacaaagcaaatgaaaatccctgctgtgatgatttgtggagcttgaggaactgaacaacaaataaggcctttggctttggctggcacaggggtgaaggagagccagcggcattgagtaaccaggcgaatgtgcccccaggagagttcattccaacccttccagttctactggtgggggggg

SEQ ID NO: 29419 - DNA, 483 bp, Homo sapiens
  misc_feature (1)...(483): n = a,t,c or g
nnnnnnnnnnnnnnnnnnnnnnnnnnnnnnnnnnnnnnnnnnnnnnnnnnnnnnnnggcacgagggcaaccagtgaacgccaagggaacaaattctatttctgttttctaacgtaacaggattagtggaggcgcatcaaaaattccattctaagtcagtgctgcgtcttgaagagaattgaaatggtctagtactaactttttaacattgactttgaatacacttttaataatccacatgtcagtcagcttactcttggtgttaaatgtcactcgagcaggaggaggcctcgatgggagcttctttttaatctccaatggatcctcagtgaagtccttagggatttcattttctgggtttcagaagtacacacacctgtcattagggcttcatatgcctagcgtgtgaccccctgcctacccttaagcctaaggcagcatatggnttttaatgggctatcctgccttgaaaccaaacctctcc

SEQ ID NO: 29420 - DNA, 441 bp, Homo sapiens
  misc_feature (1)...(441): n = a,t,c or g
cnnnnnnnnnnnnnnnnnnnnnnnnnnnnnnnnnnnnnnnnnnnnnnnnnnnnnnnnnnnnnnnnnnnnggcacgaggatacagtagtgaattctcactacaaacaactgtactgtgaagtattactatctctatttttataagtgaagaaacaagatgaagttggaatgacttaccatgtttacacaattggtaagaagtttgtaatggatgtcagaaccaagtctttttagctctagaagtcatgcttttgaccactgctctttgctactgtaggtcttgccaagaataatctagtaggcgtcttcaaggcctgaaatagatagttcaaggagaaggctcatctaaggaatggcataaacaccttctagataagaaattctgaggttccttgggatattaaatgaatccgtagccttcctgggtccactgggaaacctg

SEQ ID NO: 29421 - DNA, 549 bp, Homo sapiens
  misc_feature (1)...(549): n = a,t,c or g
gnnttnnnnnnnntttgnnnaacagcttgacnnnnnnnnnnnnnnnnnnnnnnnnnnnnnnnnnnnnnnnnnnnnnnnnnnnnnnnnnnggcacgagcggcacgagccaggcactgtctccttactgccagtggaggtagaagttcaggttccacttggccttcgctgacacctgggagtgggggctcctcgttgcttctggtggaggtggtagttttggctcttcacgcggcctccacaggcaccgcactggcgtgtcctctttattgcagggagatggtgaaagtcttgactctccttggcctcctctgacaccacctcagagggaggaagggagctccatatcgcctcctttctttctcttgcagcagaagtctaccagcctctccacttgctcatgctggcatgggtagagatgggaccacgtttttttctttagtgttaanccttgaatancagggttcttatctaaaacttttgtccttttaggcagcccttncctggcctttggnttttgnnggattcttttgggntgtacccattggattt

SEQ ID NO: 29422 - DNA, 554 bp, Homo sapiens
  misc_feature (1)...(554): n = a,t,c or g
ggnnttnnnnncnnttgnnncncagnttgacnnnnnnnnnnnnnnnnnnnnnnnnnnnnnnnnnnnnnnnnnnnnnnnnnnnnnnnnnnggcacgagagatgatgtgggatacctggccagtgtcctgctgagaactttacccatgggcaaagcccaggaaggctcaatagatgaagaggcatacatcacactggaaaaaatatccaaagccttccttcatagccctctctttccagagatgcagtcccttcattctgctttcttaacgtgcgtaaccacaagttgctccagcattctgtgttctggtgcccagcgtgactcaggtcttgtcagtcagcagcttccctggctttttgaaaaggaccacatggttgtgggtcattgggaaaacagatttgcaaaagctggacccgaaggtatagaacctagaggagaaattgcccagaacttactgtccctggtcaagagtgacttccctatccagctggagggaagagcagttggaaagcatcctggggcttttngaagtgattctgccttacagctggacagc

SEQ ID NO: 29423 - DNA, 553 bp, Homo sapiens
  misc_feature (1)...(553): n = a,t,c or g
gtgnnttgaancncagttnnnnnnnnnnnnnnnnnnnnnnnnnnnnnnnnnnnnnnnnnnnnnnnnnnnnnnnnnnnnnnggcacgaggggtgatggttttgaggatgtatttcttataagaatccattaaataacacatgtaccttgtgtgggttcctgaataatctgtgtttcattttataataagttttttttaaaaaaaaagatacaaaagaatgaaggcagagtagccagtatcacaaaaattagatatcccaagtttaacatatatataaaacatatgttaacatttaatatatatatgtatatgtgtttgtatatgtattctggatgtgttctaactccttcagctaataagtgagtacaggattattcaaaccgtgtgtgtccaacactagcgtaagcattttacatgcattattttattcaatcctcctaacaactccacgaggtaatattagcatcttctgtgtgagggaactggaggcgattgttaggatattttcaaaagcaatctagccatccatctgcagtgctatanggacnggttgg

SEQ ID NO: 29424 - DNA, 547 bp, Homo sapiens
  misc_feature (1)...(547): n = a,t,c or g
ggnnttgnnnancagtttgacnnnnnnnnnnnnnnnnnnnnnnnnnnnnnnnnnnnnnnnnnnnnnnnnnnnnnnnnnnggcacgannnnnnnnnnnnnnnnnnnnnnnnnnnnnnnnnnnnnnnnnnnnnnnnnnnnnnnnnnnnnnnnnnnnnnnnnnnnnnnnnnnnnnnnnnnnnnnnnnnnnnnnnnnnnnnnnnnnnnnnnnnnnnnnnnnnnnnnnnnnnnnnnnnnnnnnnnnnnnnnnnnnnnnnnngctctctcttattccccattcttcctatttccttatagtagtgtttcagatttttactttcttcttctcctgttgatgtctcttactctattcctgtctttccattccacaggcaccatccaagcacttttctttttctctctttaccttataactggataagtccttctcagctaaggttcatcataataaagccttaatgcccaaaggcatccgttttaagtagtgaattaacttctctagtactaactccgtacccgcctttgcgaaaaaaactgntcattcaaatca

SEQ ID NO: 29425 - DNA, 475 bp, Homo sapiens
  misc_feature (1)...(475): n = a,t,c or g
ttgannccattgannccannnnnnnnnnnnnnnnnnnnnnnnnnnnnnnnnnnnnnnnnnnnnnnnnnnnnnnnnnnnnnnnnnnnnnggcacgagttagctcccacttataaggtnnnnnnnnnnnnnnnnnnnnnnnnnnnnnnnnnnnnnnnnnnnnnnnnnnnnnnnnnnnnnnnnnnnnnnnnnnnnnnnnnnnnnnnnnnnnnnnnnnnnnnnnnnnnnnnnnnnnnnnnnnnnnnnnnnnnnnnnnnnnnnnnnnnnnnnnnnnnnnnnnnnnnnnnnnnnnnnnnnnnnnnnnnnnnnnnnnnnnnnnnnnnnnnnnnnnnnnnnnnnnnnnnnnnnnnnnnnnnnnnnnnnnnnnnnnnnnnnnnncctttgggnaatccccagccttaaaatggtgnncnaacgggangtcnggcctttaggccttncaanaatnccgcctgtcttccacaangngngaatttat

SEQ ID NO: 29426 - DNA, 475 bp, Homo sapiens
  misc_feature (1)...(475): n = a,t,c or g
ggannccaattnnnnnnnnnnnnnnnnnnnnnnnnnnnnnnnnnnnnnnnnnnnnnnnnnnnnnnnnnnnnnnnnnnnggcacgagagaaatcggacagaaaagagaaagtagccaagattatttcctctagagatgggaaaatgtacaagttctccaaggatctatgacacaacaagagaaagaagtggagataacaagaataaaactgaatgctctagagacacaaaagggaaatactgaagataggtaagctctcttcagtatcttctttgtttttaagtttattcctaggtaagctatcttcagtgtaaggtagactacgtaagataggtaagctgtcttcagtataaggtannnnngataccannttncaaaanagggnactaagtcaaaggatggaatatcaanaatgngatagancctggatgtggccttttacatcctaaatgaanccntacttaataagtggatat

SEQ ID NO: 29427 - DNA, 491 bp, Homo sapiens
  misc_feature (1)...(491): n = a,t,c or g
ttggnnnccnnttggannccatnnnnnnnnnnnnnnnnnnnnnnnnnnnnnnnnnnnnnnnnnnnnnnnnnnnnnnnnnnnnnnnnnnnnnggcacgagaacctataggagagagatgcaggccatagagatggtcttgctgaaggtcttatagctaaattagttcagatccaggaaccagattctggaactgattgcacctatattatgttgtgtgtcagacactcccaggacctgtttggtaataattaggacagctgacatacttgttgctaattttgagatctgggcaacaactgtgtaggctgttctttcaacctctttcttcttacttctttacttttccttcagagaggagaaagccacccctgnnnnntagccnccgttccanttnnnnctttagganggcntnaaacnnactgngctattattgnatcaacacataaatcctgncatttgggnattattctttagagaactagagattacct

SEQ ID NO: 29428 - DNA, 468 bp, Homo sapiens
  misc_feature (1)...(468): n = a,t,c or g
tnnnnnnnnnnnnnnnnnnnnnnnnnnnnnnnnnnnnnnnnnnnnnnnnnnnnnnnnnnnnnnnnnnnggcacgaggatgcccctgcctctgccctctgggacatcatgcgttgctgggagaaggaatgtccggtgaaacgggagcgactatcagagactagcccagcgttccgcattctcagtgtggagcccaggctgcaggccaacttcaccatccgggaagatgccaaccccagctcccgacagcgaggactcaagcgcttccaggctaacccggaggccaactggggtccccggcctcgtgcccggccagggggcaaggcggccgacgaagctatggaggagagacgcaggctgcttcannnnnnnggaaggacccgccgaaagtgtggccacgggcttgccggnttaaganatttccttgcagaggttaaagagggccctgttaacccgggaccaatgcttgt

SEQ ID NO: 29429 - DNA, 585 bp, Homo sapiens
  misc_feature (1)...(585): n = a,t,c or g
gnnnaannnnggnannnncnannnnnnnanannnnnnannnnanaagnaaanannnannagnngnnnntnnanannantntttgaancctntgaaacccncngatatgcnnnnnnnnnnnnnnnnnnnnnnnnnnnnnnnnnnnnnnnnnnnnnnnnnnnnnnnnnnnnnggcacgaggtctcggcgccgggaagaggcggtggcgctgcccgcggtggcgggggttggcgacggagcgcgttggtgccaggaccggggtccgaggcgcgctctccgcccacagaaatgagccgtcagactgctacagcattacctaccggtacctcgaagtgtccaccatcccagagggtgcctgccctgactggcacaactgcatccaacaatgacttggcgagtctttttgagtgtccagtctgctntgactatgngttaccgcccattcttcaanggcaanagnggccatcttgttngaagnaccgnggnnccnaaattnanagggnggccaaaantggccgggggccccttnggaanccattggnaanntgggnnnttngggaaaanggggtaaaatccgggncctttcg

SEQ ID NO: 29430 - DNA, 490 bp, Homo sapiens
  misc_feature (1)...(490): n = a,t,c or g
tntngaaccctttgaaaccccnnnnnnnnnnnnnnnnnnnnnnnnnnnnnnnnnnnnnnnnnnnnnnnnnnnnnnnnnnnnnnnnnnnnnggcacgaggggggagccaaggcacaaaggagctgtacctttgcacatttgcttctttattcattcattcatttgttcgtttgttcattcatcactcaccacacgtgactgagcggttcctatttgccagacacagtgaatatgcactcagttctggcccaaatcgctggcaggacaagggggcaagactgtgaagaaagagcatgggcagtgggacgaacaacctgggccttgttgtactgttaaaacactatacaacgtgattttgcaacgtgcttttttcattcattatgggttttgnnnnnnnnnggagangnacttttaaanagttnccanttcccnaaagacanntancccgggggnnntnnttttnaggncccctttgnnaagggggggaacct

SEQ ID NO: 29431 - DNA, 488 bp, Homo sapiens
  misc_feature (1)...(488): n = a,t,c or g
nnnnnnnnnnnnnnnnnnnnnnnnnnnnnnnnnnnnnnnnnnnnnnnnnnnnnnnggcacgaggtgtttgattcacatgaagtatttcacattttatctaaggaaatgcatcctgagacaattatcttaaagctaaacaagagcattggcaaacaaaccattttattacattcggcaggttttctccatgtcattagtggaagttaaatggaaaaagaatgcaagaaaaaggaacaaaaccttgagctaaagggaagacaaccctgtagagttccattcaaactgcttaggtctgcccaccgccagtagcccatctagttggtgaagtaacaacaggtacatccaagctactgctgttgctgccaacagaccatgcctccgccagggcaccattcctaattctctttccaaatccaaatgtaccggcctgaatgcactctgaaaatgctcacagtganggggagtgaaattgagcntttangncctgg

SEQ ID NO: 29432 - DNA, 485 bp, Homo sapiens
  misc_feature (1)...(485): n = a,t,c or g
nnnnnnnnnnnnnnnnnnnnnnnnnnnnnnnnnnnnnnnnnnnnnnnnnnnnnnnnnnnnnnnnnggcacgagctgacgtccacctcccgtttgaggaccttgcccaatagcaaacgtactaagcacttaaccagtgaacggtgtgaaggatgcaaacatggatgatgaaggaatggctcctccaaaatttacgatcttgggagaagtgaggcgagtatagaatctcagaacacgctgtaggattgagttcgatcccagttgaggaagtttgggtttggggaggaaataggttattttggagaaacggtattcaaaacctaccataaatagcagtacagcccgttgactaataatgcttagcccaacccccgtaaaaagcccctggccacatccgtctcctgagattcccacttctctgnggcatctcccttctgctataanaacctactttgccttcgtaaacacttctttaaattctggcatc

SEQ ID NO: 29433 - DNA, 248 bp, Homo sapiens
  misc_feature (1)...(248): n = a,t,c or g
tntttggannccatttgattccatnnnnnnnnnnnnnnnnnnnnnnnnnnnnnnnnnnnnnnnnnnnnnnnnnnnnnnnnnnnnnnnnnnnnnggcacgaggaacatcaaaacattcaactttcaagtaaatgtcttggaagtaaacatttaaaatttataggacttcctctggcatgtaggtatgatattagaagagtttcctttgacaaaggacaatgacccaagaagtaggtttttttttttttt

SEQ ID NO: 29434 - DNA, 434 bp, Homo sapiens
  misc_feature (1)...(434): n = a,t,c or g
ccnnnnnnnnnnnnnnnnnnnnnnnnnnnnnnnnnnnnnnnnnnnnnnnnnnnnnnnnnnnnnnnnnnnnnnnnggcacgagnnnnnnnnnnnnnnnnnnnnnnnnnnnnnnnnnnnnnnnnnnnnnnnnnnnnnnnnnnnnnnnnnnnnnnnnnnnnnnnnnnnnnnnnnnnnnnnnnnnnnnnnnnnntacttctatatttttgtctaaaagttttaaattttgcctttcacatgtaagtacatttaagtatttaattctaagttgaattttttccgttatgaataactggttgtcttggctctatttattgtagactatccttctctcagtgacctacagtgtcatttctgtcatatatcagaattccctatgtgcctgggttggcctgggttctctgttctacttaattcatcactttgtctatctctgg

SEQ ID NO: 29435 - DNA, 464 bp, Homo sapiens
  misc_feature (1)...(464): n = a,t,c or g
tnttgncttccatactngatcactttgaactaccnnnnnnnnnnnnnnnnnnnnnnnnnnnnnnnnnnnnnnnnnnnnnnnnnnnnnnnnnnnnnggcacgagcggcacgaggtgaagatgaaatgaagtaaattacgatgcttggcatgtagtaaaccctcagtgaaaggtggtcgttactaataaacacatcatgtttctttattagtcatctttaagaaagtttaaagaaactgtcatttagtgccttgtgatagaagtgattagaagtagccacaggcctcctgagatagactaggattcaggagatcaatattagagtccagaacttactaactagtgtgtgacttgggcaagtcataaagcctgagggtttctgattttatcatctctccatttctacttgtcatgggtcgtgaattacggagtcaaatcattatgaaaatatatgtgacgcgatttg

SEQ ID NO: 29436 - DNA, 503 bp, Homo sapiens
  misc_feature (1)...(503): n = a,t,c or g
tnnnnnttgaaaccgnttgacnnnnnnnnnnnnnnnnnnnnnnnnnnnnnnnnnnnnnnnnnnnnnnnnnnnnnnnnnnggcacgagggcggcacaagtcgagcgcccccaaacgctcgatcccccttgagagctgcttcaacatcaacaagcgggctgactccaagaacaagcacctggtggctctctacacccgggacgagcactttgccatcgcggcggacagcgaggccgagcaagacagctggtaccaggctctcctacagctgcacaaccgtgctaagggccaccacgacggagctgcggccctcggggcgggaggtggtgggggcagctgcagcggcagctccggccttggtgaggctggggaggacttgagctacggtgacgtgcccccaggacccgcattcaaagaggtctggcaagtgatcctgaagcccaagggcctgggtcagacaaagaacctgattggtatctaccgctttgctgacagcaagaccatc

SEQ ID NO: 29437 - DNA, 485 bp, Homo sapiens
  misc_feature (1)...(485): n = a,t,c or g
tttntnnnnnnnnnnnnnnnnnnnnnnnnnnnnnnnnnnnnnnnnnnnnnnnnnnnnnnnnnnnnnnnnnnnnnnnnggcacgaggccaaggcatgggcgtcgagggacaggagcacttgatggattgagtggaggaggatgaccccgccaaggagactgagaagaagaccaaggagttaagaggcaaaccaggagagtatggtgtcaagggagccaaagaagttagggtttgaagaatgcagtaatcaagaggtctaagaaaatgaataccgaaaaaaaaactggccttcaaattttaagacatggagatcatagcacagacattgtgttttggggagatgttgggggcagagatagtaaaagccagatttgaccaaatgttggatgaagtgagtatgaatgccatnatggcnncataacactcttatggnanaanaggcttgntccntncatggngnctnatcctgtaatcccatnaactttg

SEQ ID NO: 29438 - DNA, 503 bp, Homo sapiens
  misc_feature (1)...(503): n = a,t,c or g
ctttgaannnnnnnnnnnnnnnnnnnnnnnnnnnnnnnnnnnnnnnnnnnnnnnnnnnnnnnnnnnnnnnnnnnnnnnnggcacgagaattaagttaggggactgttggccctgcttcatcagggcaaagtcaacagtgtcacatgggtgcaaacggagtcctagggcagttgatccacagggatccatgtgtcaaactcagcgaaacttgcttggcagttgtggcaagtagctatgggaacagctgaggtacaggcccctcccttggtggggaaatcggtttccactcctttcccctggacctctgggctgacccctgtactacttcctcttggctgaggcatgtgaggggcttgtgaccatccacacccagccctttacagaggggcagcactccagtcagcattgtcattcacagagccgagaacatggctttccagcgtctgagaactcagatggtgacaagaaagcaacagcccaaaggtaaccatctgctggggaag

SEQ ID NO: 29439 - DNA, 542 bp, Homo sapiens
  misc_feature (1)...(542): n = a,t,c or g
gtgggnttnnnttnnnntangnagattcnntgactgatcacgaatttaatacgactcnnnnnnnnnnnnnnnnnnnnnnnnnnnnnnnnnnggcacgagtaggaactcaaaatatgagatgataacagtgcctattattgattactgagagaactgttagacatttagttgaagattttctacacaggaactgagaataggagattatgtttggccctcatattctctcctatcctccttgcctcattctatgtctaatatattctcaatcaaataaggttagcataatcaggaaatcgaccaaataccaatataaaaccagatgtctatccttaagattttcaaatagaaaacaaattaacagactatacactagttgaaagtaattgtttatactgattataatggttgggtccttttgaaatgagaaaattcaataaacgtgactttgatttttttatgtggttaatcttcccatagtgnctaattgctgncaaatcttttagctcattctggacctatgnactcnggggttacccaag

SEQ ID NO: 29440 - DNA, 546 bp, Homo sapiens
  misc_feature (1)...(546): n = a,t,c or g
gtaggnttnnnttntnntatnnagtntcatatgccnnnnnnnnnnnnnnnnnnnnnnnnnnnnnnnnnnnnnnnnnnnnnnnnnnnnnnnnnnggcacgagagtagctgaatatacctgaactgtgatgtggaaaaatcaaataggtggatctaaaagtatataaaaattgaggatgagggaaatgttttttcagtagcttttttcctcagttaaaaattacaaaatgacttgtaaaaattataatgtataacattttaacatcatttcaagcactgaagaaatgaaatattcacagtttaaggcatctattcactttctactgagagagaaaatagataggttttaatgtttgtgaaaaaagttttggatatggaatagatgtgtaaaattttattctgaaggaattattnctttcttacctaccatgagaaagtagtagggggaggcccctacctttgagaccgtggaactgtttattggcctaaacatacattatgnngngctattgtaanaggaganaccnanntaacctttctttttcccc

SEQ ID NO: 29441 - DNA, 497 bp, Homo sapiens
  misc_feature (1)...(497): n = a,t,c or g
ggtgnntnnattgaancctttgacnnnnnnnnnnnnnnnnnnnnnnnnnnnnnnnnnnnnnnnnnnnnnnnnnnnnnnnnnnggcacgagctcaaggacagtggagatgagagaattggaatatcgcataatgtctcatctgttttatctcttgctacaaacatcacaatctcaaaataacaatggcagtacaactgccacctatatcattactgaaaacagtgaagatattttttgcctaagtcttcccattctgtgtagttatgcagggtctcaactacagagtgtgtagccattacgtactacagatgcttcgcaactcaggacacggccacgtccgataaacccatcaaagtcgaaaatgcacttaatacctgatgggagcnnnnnnnnnnnnnnnnnnnnnnnnnnnnnnnnnnnnnnnnnnnnnnnnnnnnnnnnnnnnnnnnnnnnnnnnnnnnnnnnnnnnnnnnnnnnnnnnnnnnnnnnnnnnnnnn

SEQ ID NO: 29442 - DNA, 506 bp, Homo sapiens
  misc_feature (1)...(506): n = a,t,c or g
ggngnnnnnntttgannncctttgaaaanccctnnnnnnnnnnnnnnnnnnnnnnnnnnnnnnnnnnnnnnnnnnnnnnnnnnnnnnnnnnnnnnnnnggcacgaggctgtgtgcatcagtaaacaattcctttttgtttctgagaagtcctcccccatgtggggagcaccacatgctgttcattcacccactgagggacagctcggctgctggtggtgacacaagagcgtgtataaacttgtgcatgtccgtctgtgtggactggtgttttcctttctcttgagtccatgtcttatgtcagattgctaagctgtgcgctaagtttatgtttcaccgttgtttcactgtgttacgttttcaccggtgccatggctccagcagccccatgtcctcgccagcacttgatgttgtcttgatctcgggtgcccagccatgtgtggtaggaagtcactgtggacttggcatatgtttccctgaccgctcgtgatgttgggcatctttcctt

SEQ ID NO: 29443 - DNA, 488 bp, Homo sapiens
  misc_feature (1)...(488): n = a,t,c or g
gagtgnntnnatttganncctntgganacccnnnnnnnnnnnnnnnnnnnnnnnnnnnnnnnnnnnnnnnnnnnnnnnnnnnnnnnnnnnnnnnnnnggcacgagggcattttagagctctagaaagaggtaccttagaaatcctttagtttgtttttatgannnnnnnnnnnnnnnnnnnnnnnnnnnnnnnnnnnnnnnnnnnnnnnnnnnnnnnnnnnnnnnnnnnnnnnnnnnnnnnnnnnnnnnnnnnnnnnnnnnnnnnnnnnnnnnnnnnnnnnnnnnnnnnnnnnnnnnnnnnnnnnnnnnnnnnnnnnnnnnnnnnnnnnnnnnnnnnnnnnnnnnnnnnnnnnnnnnnnnnnnnnnnnnnnnnnnnnnnnnnnnnnnnnnnnnnnnnnnnnnnnnnnnnnnnnnnnnnnnnnnnnnnnnnnnnnnnnnnnnnnnaggttggtcttgaactcatggctnangcagtcctcctacctcgg

SEQ ID NO: 29444 - DNA, 492 bp, Homo sapiens
  misc_feature (1)...(492): n = a,t,c or g
gngtgnnnnnnatttgaaccnttnnnnnnnnnnnnnnnnnnnnnnnnnnnnnnnnnnnnnnnnnnnnnnnnnnnnnnnnnnnnnnnggcacgagtgatcttaaaagcacaaataaaactttttttctaagttcaatttggctgtcaatgaagtgtatgtaatttttctaaaattcnnnnnnnnnnnnnnnnnnnnnnnnnnnnnnnnnnnnnnnnnnnnnnnnnnnnnnnnnnnnnnnnnnnnnnnnnnnnnnnnnnnnnnnnnnnnnnnnnnnnnnnnnnnnnnnnnnnnnnnnnnnnnnnnnnnnnnnnnnnnnnnnnnnnnnnnnnnnttcnnnnnnnnnnnnnnnnnnnnnnnnnnnnnnnnnnnnnnnnnnnnnnnnnnnnnnnnnnnnnnnnnnnnnnnnnnnnnnnnnnnnnnnnnnntgctgagattataggtgtgaagcaccactccagggcaatttttctaaaattcaatgaagagtcaatt

SEQ ID NO: 29445 - DNA, 379 bp, Homo sapiens
  misc_feature (1)...(379): n = a,t,c or g
ggtgnntnnnttganncttgnaancnttgactgattnnnnnnnnnnnnnnnnnnnnnnnnnnnnnnnnnnnnnnnnnnnnnnnnnnnnggcacgaggagcatggaaggaaattgtttaaagtgtgtcatctgtgggcacagtttctaaggtagatacctgtgaggatgtataggcatgctttagacatggacagaatgagttatgtacttagtaactcaaaactctgctgagctcattgtggacagctcttacagataaactaaaatgcagcttcttaaaaaatgagaggacatttgcagaaagcattcttactgctttcagcaaatctatgtgccttatgtttttatatagcagtcattttctcaaaaaaaaaaaaaa

SEQ ID NO: 29446 - DNA, 501 bp, Homo sapiens
  misc_feature (1)...(501): n = a,t,c or g
gtgtgnnttnnatttgnannctctgaaancccttnnnnnnnnnnnnnnnnnnnnnnnnnnnnnnnnnnnnnnnnnnnnnnnnnnnnnnnnnnnnnnnnggcacgagggaaaattaatttctccaaaattcattggcttaaataagatagaagtgagtaggtggctctgctccaaggatccagctggtggaacattccatggccatctgtaggtctaaggtggctgcccaagttgtcatccttttccagcaagggtaaaaagggggaaagtatggagagcaagcaacttccctatttaaaagaagggaagaaaagctggatgttgcacacatcagtttacatagtccacaggtcaagtcacatggccacacccacccataaggaagctgggaaatggaggaggaaatgggaaccatttggggtttttattaaggaaaaatggggagaatgggatactagagaacaagtagaaatttaccttacacaatttgacaatgcctga

SEQ ID NO: 29447 - DNA, 494 bp, Homo sapiens
  misc_feature (1)...(494): n = a,t,c or g
gngtgtnnnnatnctgaanccttnnnnnnnnnnnnnnnnnnnnnnnnnnnnnnnnnnnnnnnnnnnnnnnnnnnnnnnnnnnnnnnggcacgagaggcaactccgccaactcctcttctttgtttatctcagcctaaagcttactccttctaggaagtgattctaaacttccctctcatctggaataggaactgtaagactttctataaaaaaaaaaaannnnnnnnnnaatntgtcgcccaggctggagngcaacggcncttntnannnnnnnnnnnnnnnnnnnnnnnnnnnnnnnnnnnnnnnnnnnnnnnnnnnnnnnnnnnnnnnnnnnnnnnnnnnnnnnnnnnnnnnnnnnnnnnnnnnnnnnnnnnnnnnnnnnnnnnnnnnnnnnnnnnnnnnnnnnnnnnnnnnnnatcccnttnggctcacaaagggctgaaaccataggcgtgagccactgnncccaggctacttaaatatttatttaaaaa

SEQ ID NO: 29448 - DNA, 488 bp, Homo sapiens
  misc_feature (1)...(488): n = a,t,c or g
ggtgtnnnnatctgaacctttgacnnnnnnnnnnnnnnnnnnnnnnnnnnnnnnnnnnnnnnnnnnnnnnnnnnnnnnnnnnggcacgagccattctgtagtgaagtttgcaaattcctctctgcccgtgactttggagaacgatggggaaactactgtaagatgtgcagctactgttcacagacatccccaaatttggtagaaaatcgattggagggcaagttagaagagttttgttgtgaagattgtatgtccaaatttacagttctgttttatcagatggccaagtgtgatggttgtaaacgacagggtaaactaagcgagtccataaagtggcgaggcaacattaaacatttctgtaacctattttgtgtcttggagttttgtcatcagcaaattatgaatgactgtcttccacaaaataaagtaaatatttctaaagcaaaaactgctgtgacggagctccttctgcaaggacagatcaacac

SEQ ID NO: 29449 - DNA, 493 bp, Homo sapiens
  misc_feature (1)...(493): n = a,t,c or g
ggtgnntnnattgaancctctgaaanccttnnnnnnnnnnnnnnnnnnnnnnnnnnnnnnnnnnnnnnnnnnnnnnnnnnnnnnnnnnnnnnnggcacgaggggcacatgaagattctattccaggccccagggcaaatacacagagaagcccacctgagcccctccttgccccagaatggggacagacttcactgttccttggcactgagacttgtgagaaggccagactcacatgccagcaaggccaaatggccacataggtaacagacatggggaaaatgggctggagtccccatagggagtggtgggggctacagtagcctaaagggtggagccccatccaaaggagtggctgacctcagctccagcagacactgccatgtgggaatatagattatcaagagaagcgggaccaccggggtttctatgtgagatatctaagtttttgagtgttggccattttaaaacaccgcgtgggtgtgctctttgaa

SEQ ID NO: 29450 - DNA, 490 bp, Homo sapiens
  misc_feature (1)...(490): n = a,t,c or g
ggtgtnntnatctgaatccttttgactgcctnnnnnnnnnnnnnnnnnnnnnnnnnnnnnnnnnnnnnnnnnnnnnnnnnnnnnggcacgaggaattatgatgattaggataaataagtaggtcaggataaaaattttgagaccttcaaaaaattatcttaaccatggggtaacaacaactcaatggacataagaaatagagtgtttggagcatttgcagtctaaatagagttatcacaatgatgctctgattctatcagtattgctggtctcttttcttttcaagttaaatcgtcaagtactttgcattaatcaatggtgagagtgaggaaaaggataaagcatatttaattatttaaaatcaaactcacagaagaacagctcttattaattctgaaaattgagatgattgctggatgtccatgaagctctgccctgcagaaggtatcatgaaggctgagacatgcatacagcaagagattcctatcct

SEQ ID NO: 29451 - DNA, 494 bp, Homo sapiens
  misc_feature (1)...(494): n = a,t,c or g
ggggnnntnnatttgaatccataggnaancccttnnnnnnnnnnnnnnnnnnnnnnnnnnnnnnnnnnnnnnnnnnnnnnnnnnnnnnnnnnnnnnnggcacgagtgacatttttgaacaatttaatagaatatttctcactttggggttgtctgatgtctcttcctagttagctactgacaatgcattctttggtggaatatcacatacataagtgatgtgttcttttaaaatatccacaacctgaggcccatgatgtttatatatgtctcatttatgatgctaattttgatcacctggtcaaggtgnnnnnnnnnnnnnnnnnnnnnnnnnnnnnnnnnnnnnnnnnnnnnnnnnnataaatatatatatacatatatacatttttttaaagacaggatatctcacttggctaacttnnnnnnnnnnnnnnnnnnnnnnnnnnnnnnnnnnnnnnnnnnnnnnnnnnnnnnnnnnnnagttcangcaagcaa

SEQ ID NO: 29452 - DNA, 489 bp, Homo sapiens
  misc_feature (1)...(489): n = a,t,c or g
ggtgnnnnatntgaaccctttgannnnnnnnnnnnnnnnnnnnnnnnnnnnnnnnnnnnnnnnnnnnnnnnnnnnnnnnnnnggcacgagctgggactgggctgtgatcccgaggccgcagctccgctctcggcccgccacctcccccgggcccacctgctccctcagccacaggccatctcggggctctgggactggacgactgcagcctcttccctctgcccccgggaacggctccactccgtcccctgcagcgcctgcagccgcggccccctcagcagctgtgtctcctggcgcctcctcgccatacccagcagagcagttggagcagacagccaggctgcccggaggagtttttggtggggtttctgcactgaggtggaaacccagcagaacctgccttcttccctcccctgctccgcaaggcagcccaccccgaccttgagatcccaggtttggagaatcctgctgagagcgaacagtaggagg

SEQ ID NO: 29453 - DNA, 451 bp, Homo sapiens
  misc_feature (1)...(451): n = a,t,c or g
nnnnnnnnnnnnnnnnnnnnnnnnnnnnnnnnnnnnnnnnggcacgagctgagatggtggcagagcaattactgatgtcggcagccgaaccccccacggccctgctgaggctcttggccttctactacggcccccgtgatgggaggcagcagagagcacagactatggtcagttcctggcatggagccctgactgcttggtgagcaagacgaaagaaagtcaagaaatttccattccgcccatttgggtttgagtgaaatcgagtgtaaactcggccgctgcctagctccctctctcaggggccagtgcttacccgtttctgggggnnnnnnnnnnnnnnnnnnnnnnnnnnnnnaagtatgaaaaaaaantnannatnnnananantnnnntnnnnnaaaaaangngttttaaaaanggngcgngnnttattcttttnggggggggaaat

SEQ ID NO: 29454 - DNA, 453 bp, Homo sapiens
  misc_feature (1)...(453): n = a,t,c or g
nnnnnnnnnnnnnnnnnnnnnnnnnnnnnnnnnnnnnnnnnnggcacgagccgcgctttcattgagatggtgaaaatgagatactattttactacatatggagagatgatttgcagtttatttgaattagataacaaatgaaattgaaagggcccagaagaaagttgagactccaccatatggagaaactcttgtgcagtctgaagggcttctgagatcttaacagagaagagaaccgagccacctagatctggcactgnnnnnnnnnnnnnnnnnnnnnnnnctgccccatanggaccttcctcactgaaggcacaggtgacagngnctgcagatgtttcggctgcactacttgggggngaggntggaggccagggatgcttatccgtccacaggatggtccacacanggactnaccnagccngantgncncagtgccactgttgnaaactt

SEQ ID NO: 29455 - DNA, 550 bp, Homo sapiens
  misc_feature (1)...(550): n = a,t,c or g
gnnnnnnnnnttnnnntnttgnnntttgaaaaccnnnnnnnnnnnnnnnnnnnnnnnnnnnnnnnnnnnnnnnnnnnnnnnnnnnnnnnnnnnnnnnnnnggcacgaggaggatatgaaggccccaggagagggagagagacannnnnnnnnnnnnnnnnnnnnnnnnnnnnnnnnnnnnnnnnnnnnnnnnnnnnnnnnnnnnnnnnnnnnnnnnnnnnnnnnnnnnnnnnnnnnnnnnnnnnnnnnnnnannnnnnnnnnnnnnnnnnnnnnnnnnnnnnnnnnnnnnnnnnnnnnnnnnnnnnnggatgtgaagtgagcacctgctgttgtaaaaacagcagcagtagacttgcacagggttgccacaaaccctcgatttgtaagaaaatgcagtgtctgtgaattaaacgaggtgtgcctgtatttgaggtgggctcagtttgccagtgagggaaangcaccagcntatatcaaacaccttgcattccntgggttctgccttngtgcctactnatgngtnttacnaangactttaattnnncgggc

SEQ ID NO: 29456 - DNA, 554 bp, Homo sapiens
  misc_feature (1)...(554): n = a,t,c or g
gntnnnnnnnnttntnntttgnanntatggagacnctnnnnnnnnnnnnnnnnnnnnnnnnnnnnnnnnnnnnnnnnnnnnnnnnnnnnnnnnnnnnnnnnnggcacgagtttttatcagttcttcctgggaaatcaggtataaaccagtggaatgtattctcaagttcctgatgatttttttttaactttaattcatagtcattaaagcttgccatggccaatctttcccatgctgtctccctagctactacattgttggttggcgtggtgtttctgtaaacgctataagggtccttgatccaggattcctttttgccttgtgtctctcagatgaggagattacttttaagcaaaccagataatgaattgtagcttggcttgctacaatgttacgaatgcaatttttaattcccattttttataatatgagcatatattttatgctagtactcattggaacacaaatttgattctccacacatctctgtgttaggctcattggtgtttaactgtttaggacatacggctacagtagctgagaaaggatcacct

SEQ ID NO: 29457 - DNA, 553 bp, Homo sapiens
  misc_feature (1)...(553): n = a,t,c or g
ggtgtnnnnnctttaaacccnnnnnnnnnnnnnnnnnnnnnnnnnnnnnnnnnnnnnnnnnnnnnnnnnnnnnnnnnnnnnnnnnnggcacgagnnnnnnnnnnnnnnnnnnnnnnnnnnnnnnnnnnnnnnnnnnnnnnnnnnnnnnnnnnnnnnnnnnnnnnnnnnnnnnnnnnnnnnnnnnnnnnnnnnnnnnnnnnnnnnacaagcacaaccctccctcaaggaacagcccttctcatggggtcacgtgactggagagatgctgagatgtttgcggtagatgcaggacgcttgtccgaatcgttttcagcattcataagaaggagatagctagccaggaacagaggcagcttcctcatctggtagagaaaagtgtctgcggaaaaaagcaacagtgtgctcatggttgaaagcgtgagggtgccgctcactgccatctgttcctggaccagatgtgggagggggcgtggagatcagacattcgcttttagatttgtcagaactacttcgtagagataaaatcacttaaccatacggcagcctagttaga

SEQ ID NO: 29458 - DNA, 537 bp, Homo sapiens
  misc_feature (1)...(537): n = a,t,c or g
ggtgnnnnnnntttgaannttgganancnnnnnnnnnnnnnnnnnnnnnnnnnnnnnnnnnnnnnnnnnnnnnnnnnnnnnnnnnnnnnnnnnnnggcacgagagaagaactcccctggcttggacagtattactcatatttgcagtacaggttgagctgcaccaacctgaggcccgagggatagaggtgcttgtatgaatttgaacaaattgatttgtatgtgcgtatctgttataagctgggccctctgtggcatgagttccaaggaagcccccactccataccttaccccagcctaagggcaatattgcttctttacctccatctttggaccccacacggtctctgatatttgttttgtaatagcagagacttgttcatttcacacaactagtgagtggcagagctgaaactggattctagagctttcagcatctaggacaacactctccccatttatggtctagtggtatgtggactttgatttcggcctgtggaacangattctaagggcnngctgngctnnatgcnntttg

SEQ ID NO: 29459 - DNA, 555 bp, Homo sapiens
  misc_feature (1)...(555): n = a,t,c or g
ggtgntnnnnntttganntttganancnnnnnnnnnnnnnnnnnnnnnnnnnnnnnnnnnnnnnnnnnnnnnnnnnnnnnnnnnnnnnnnnnnnggcacgagcaacaagccagtaagccctaatgatggctgtcttctcagaggggtcctgaaccccccagttctcaacatcccactagggtcaactttactcactatcattgcctgcctaagtgcctgtcagtgctttagtgttttttaacatattacagtgggaaaaatgcaagtgagtatccttggacagtatcaataataactaatatcaattattaaaatagagtaggaaccaaagccagtagtcactcaggcttctgtcatgcagtttaggagttaactacgtaatctttctttccatgctaataccacagttgaatgggaaaacatccaaatacagtggccacggatacccctgtgaacagtctccaagaaagtgatgtctggcnnnnnnnnnnnnnnnnnnnnnnnnnnnnnnnnnnnnnnnnnnnnnnnnnnnnnnnnnnnnnnnnnnnnnnnnnn

SEQ ID NO: 29460 - DNA, 553 bp, Homo sapiens
  misc_feature (1)...(553): n = a,t,c or g
ngtgtcnccctatgaaactnnnnnnnnnnnnnnnnnnnnnnnnnnnnnnnnnnnnnnnnnnnnnnnnnnnnnnnnnnnnnnnnnnggcacgagtttgagactgcatagggctcggcgtggctgttgttctagctacttgagagactagcaggaaaatcactcgnnnnnnnnnnnnnnnnnnnnnnnnnnnnnnnnnnnnnnnnnnnnnnnnnnnnnnnnnnnnnnnnnnnnnnnnnnnnnnnnnnnnnnnnnnnnnnnnnnnnnnnngactgtgacaatatcaaagtccccaataatattgactacgacaatatcaaagtccctaaccctatctgtaagtattttttaagattggttcttnnnnnnnnnnnnnnnnnnnnnnnnnnnnnnnnnnnnnnnnnnnnnnnnnnnnnnnnnnnnnnnnnnnnnnnnnnnnnnnnnnnnnnnnnnnnnnnnnnnnnnnnnnnnnnnnnnnnnnnnnnnnnnnnnnnnnnnnnnnnnnnnnnnnnnnnnnnnnnnnnnnnnnnnnnnnnnnnnnnnnnnnnntgccacg

SEQ ID NO: 29461 - DNA, 551 bp, Homo sapiens
  misc_feature (1)...(551): n = a,t,c or g
ggtgtnnnnntttgaaccnnnnnnnnnnnnnnnnnnnnnnnnnnnnnnnnnnnnnnnnnnnnnnnnnnnnnnnnnnnnnnnnnnggcacgaggtcctaggattagaacacttacctaccagtctcagagatttgtgggttagagatctgcagggccttatcagtcctcatacattcactggctgtctgagattttgcttttctgtacagttgcctagatacccctagtgtcctactggcctgtggcctcatgtttccctccaaacttctccagccaagaccctacttccttagtacctaggaattcttccaggatttctgagggcatttcctatccaatcagacagaagggagcaaataggtttctttttgatcaaactctcctcatttggccctctttgatctcctgtctggtcctgcttcctcctcagctcctccatcaccaccctgggctttcttacagtgcatcgctgtgcatttctctttctccctacctgccctttgtgttaggctattcttgngttgctgtaaagaaataccacccgggcgcgg

SEQ ID NO: 29462 - DNA, 544 bp, Homo sapiens
  misc_feature (1)...(544): n = a,t,c or g
ggtgtnttcctttgaacnctnnnnnnnnnnnnnnnnnnnnnnnnnnnnnnnnnnnnnnnnnnnnnnnnnnnnnnnnnnnnnnnnnggcacgagggaagatggttaattccatcagctccttctggccggcagcaggaagagtggccctgtgtgtgccaggccctgcagtctctcctctcagctggtgtctccagtgagggacctgagtcatcgcacacatgagcctgtgctcagcctgcacatctcccgcctcccaccagctgctcctcaactgccagggccagactgtggcaaaatctcactcctctgccgatgctggggtttccctcgtgtctgnnnnnnngtgtgcttggtggcctgagcnctgcagtgaatccatgtttccctcccagcacccttgttctgtcctccaacttggccgacngctntggccagggacgcagnccanctggtgcccacccccgcactntgncatttcataanagcccttgntttcttanttcntnanattttgncnaatnaatnntnctgntttgntcttaaa

SEQ ID NO: 29463 - DNA, 554 bp, Homo sapiens
  misc_feature (1)...(554): n = a,t,c or g
ggtgttncctttgaacccctnnnnnnnnnnnnnnnnnnnnnnnnnnnnnnnnnnnnnnnnnnnnnnnnnnnnnnnnnnnnnnnggcacgagagcttcaataccctgtcttccacaaggatattaaaactcaccacgcaccgcgcgctctgagcgcagagctcctcccggtctatcctgcccgcggtgaccaagctgccgctgcgcgggttcagagagaaaagctgcgtcctacctctggagactatgcggactccgcgctccgccagctcccggggcgccagacccaagtccttggagatgttgcccacgaaagagcctttctctaattcctcaggaattgagtaggagatctgccgggctccagcctcccatggaatcccgaagaaaaggcagagcaggaccagcccgctgcaatcctttgattcctttgagcgattcctttgagcggccattgnaagtctgggtacagaattctgcaaagtcctcactggacacgttgngtgtttcaaccggtcctttgtctttctggggcttaanggtgtctcttgaaccg

SEQ ID NO: 29464 - DNA, 554 bp, Homo sapiens
  misc_feature (1)...(554): n = a,t,c or g
gngntnnnntnnnnntttgaanattngggntnccnnnnnnnnnnnnnnnnnnnnnnnnnnnnnnnnnnnnnnnnnnnnnnnnnnnnnnnnnnnnnnnnnnggcacgagaactggggattggaggtacaggggattgtttgactacaaaggggtagcacgaggaaatgttctttgagggtggggtaagagaactgttccacatcttgattgtggcagnnnnnnnnnnnnnnnnnnnnnnnnnnnnnnnnnnnnnnnnnnnnnnnnnnnnnnnnnnnnnnnnnnnnnnnnnnnnnnnnnnnnnnnctatgtggtagcggttaatccaggcatttgccaaaattcacagaaaggtacaccaaaaagagtacattttactggatgtgaattannnnnatttaaggtattanaaaatttatttttccatatccaagcatntttgatgacntattagctngacattatcccccnagaanttatcactantcatcttggaatnantgncgacattttaanantntgnnnnggnttntccncattatntttnttggggcctg

SEQ ID NO: 29465 - DNA, 459 bp, Homo sapiens
  misc_feature (1)...(459): n = a,t,c or g
tttgagaccctnnnnnnnnnnnnnnnnnnnnnnnnnnnnnnnnnnnnnnnnnnnnnnnnnnnnnnnnnnnnnnnnnggcacgagggccacagcgctggtgcacacgctggacggctggtccgtggggcagacaatggtcgtgtccaccaaaacgccggacaggaagctcatctttggcaaagggaactttgagcacctgacagaaaagatccgagggtctccagacgtcacgtgcgtcttcctgaacgtggagaggatggctgccccgaccaagaaagaactggaagccgcctggggcgtnnnnnnnnngannngttttatagtatttctgnanatccacattctggtantnctgnnttnntantanntctgtattaaatanntttttnaatcnattnnctgnntatnttttcttnntttcttttttnanttttntcttatnanatttagtntntttac

SEQ ID NO: 29466 - DNA, 458 bp, Homo sapiens
  misc_feature (1)...(458): n = a,t,c or g
tttgnanaccctnnnnnnnnnnnnnnnnnnnnnnnnnnnnnnnnnnnnnnnnnnnnnnnnnnnnnnnnnnnnnnnnnggcacgagaactgggacaagtgccaaaactgagaattagatggtagtacggtatcaatgttaatttcctcactttgataccacattgtggttgtgcaggagaatcaccttgtttgcagtagtcgacgtagttgactgacgtagtcgaggttgagatcagtaacttattcccaaattgtgcagaagaaaaaattatttgcagtgcaattacaacttttctgtaactttgatattggttaaaatctttctaaagctttttttaaatctttaaaaaatactcagatttaattggatgtagggtgagagtctagggtgactttcaggcttctagcattagtaagtgagtgggtacaaatgcccttcaacaagaccgtggatagaa

SEQ ID NO: 29467 - DNA, 455 bp, Homo sapiens
  misc_feature (1)...(455): n = a,t,c or g
tgnanacccttnnnnnnnnnnnnnnnnnnnnnnnnnnnnnnnnnnnnnnnnnnnnnnnnnnnnnnnnnnnnnnggcacgaggttaataaatgtttctaaaatctttactacagaagggccaatcaacaaatgtatccctattacattgataggcatgcagaagatgaaacatcatgatggttgtaaaatatgtggctttgttttaattctgaaatattcctgaaagtgaatatctttttaacattaaaataatggctggtgataaataatattatgaaagtttttatatgtcaatgactgcttttacttgagctattaaaactatagcctttgatgaaatactttttttggtgttttgggggtttnnnnnnnnnnnnaantgtnttttggccangtgcggngnntnacacntgnnatnccannantttnngangntgangcntgcnagnncctga

SEQ ID NO: 29468 - DNA, 463 bp, Homo sapiens
  misc_feature (1)...(463): n = a,t,c or g
nnnnnnnnnnnnnnnnnnnnnnnnnnnnnnnnnnnnnnnnnnnnggcacgagtggtgtggacactgcaagaaacttgcccccgagtatgagaaggccgccaaggagctcagcaagcgttctcctccaattcccctggcaaaggtcgacgccaccgcagaaacagacctggccaagaggtttgatgtctctggctatcccaccctgaaaattttccgcaaaggaaggccttatgactacaacggcccacgagaaaaatatggaatcgttgattacatgatcgagcagtccgggcctccctccaaggagattctgaccctgaagcaggtccaggagttcctgaaggatggagacgatgtcatcatcatcggggtctttaagggggagagtgacccagcctaccagcaataccaggatgccgntacaacctgagagannattnccaanttcncnaacttttagtca

SEQ ID NO: 29469 - DNA, 410 bp, Homo sapiens
  misc_feature (1)...(410): n = a,t,c or g
nnnnnnnnnnnnnnnnnnnnnnnnnnnnnnnnnnggcacgagagaatatccgttgaaagaaatacatgaatttttgttctaattatttgaaaatccctcctccaatgttttcatatttattgcatacatcacagagtaataaattatttgccaggacttgaactgcagaacaaaaatgacaaacaaaaattttatgcatactaactttagcacctgccatgtaagactttgcagtattttctccctaaacacacatcacagttactcagaattctagcagatttcagtttgatactctgcagctctgaggactggttcagatgtgtgcgtgtcactctatttggaagnnnncnancatanggattgnnacgggannngannanngangangccnnnnnnnnnncnngctt

SEQ ID NO: 29470 - DNA, 516 bp, Homo sapiens
  misc_feature (1)...(516): n = a,t,c or g
tttgaaancccntnnnnnnnnnnnnnnnnnnnnnnnnnnnnnnnnnnnnnnnnnnnnnnnnnnnnnnnnnnnnnnnnnnnnnnggcacgaggtatgttcagtgtaaagtgtatgtgcaattgcggaagagactcaaggcctataatagagtgatctatgttaaaaactgtccataaacaagcaaaaagaatatttttgaaaaatctccactaacagagcccaactttgaaaataaacatggatatggaatctgtcattccgacacaaactcttcttgttgcacanagcctgaagacnctggancangaaatcattcacgtctgattgtgtgcgggttgnnattttcctggacatccatgaagagctgaaggaaattgtttactgcaattgtatacctttcttatgcctttaatagcatagactggcaggtgactatttatagtggcttctctttttctaaacccttcttagtctcctagaaaccttctgtggccaggcatgcctgggtcctgcctc

SEQ ID NO: 29471 - DNA, 445 bp, Homo sapiens
  misc_feature (1)...(445): n = a,t,c or g
tttggaanccatnnnnnnnnnnnnnnnnnnnnnnnnnnnnnnnnnnnnnnnnnnnnnnnnnnnnnnnnnnnnnnnnnnnnnggcacgaggtcttttgtctttcaaggtgaagctattaaatttgttctcagctaccctccatgtcctagcagatagaggacttggtctgaccttcagggttgtgatggggcaggttgggaggtgggcggggagtctctgtggtctgggnnnnnnggttgaccngncggncacgcaaacanantnaccttcncattnnaccttgatntctntatcnagnnccacacnagncntgcntgaannncgcnnacgttaatcnnntattatntnctncgtagannccntatatacactcttaaaaattactgngncnccaaananctgtngtttatgcantatncncctnccttnngnnnatttgancttc

SEQ ID NO: 29472 - DNA, 644 bp, Homo sapiens
  misc_feature (1)...(644): n = a,t,c or g
gattgnnaacagntnnnnnnnnnnnnnnnnnnnnnnnnnnnnnnnnnnnnnnnnnnnnnnnnnnnnnnnnnnnnnnggcacgagagaattttgcctttttggagttccgctcagtggacgagactacccaggctatggcctttgatggcatcatcttccagggccagtcactaaagatccgcaggcctcacgactaccagccgcttcctggcatgtcagagaacccctccgtctatgtgcctgaggttgtgtccactgtggtccccgactctgcccacaagctgttcatcgggggcttacccaactacctgaacgatgaccaggtcaaagagctgctgacatcctttgggcccctcaaggccttcaacctggtcaaggacagtgccacggggctctccaagggctacgcccttntggnatacgtggacatcaacgtcacggatcaagccanttgcgggctgaacggcatgcannttggggattagaagcttgtggccaaagggccaatgtgganccagaatgccncctgggacccccgacaccatcatcaaancctgganccnttnaggcccgggttgagacnnccanggcaangggggcccnnnnntggncnggcttnaaanntgggggcnnagnctnngaaa

SEQ ID NO: 29473 - DNA, 640 bp, Homo sapiens
  misc_feature (1)...(640): n = a,t,c or g
atgantganaccgtttgactnatacnaattaatacactnnnnnnnnnnnnnnnnnnnnnnnnnnnnnnnnnnnggcacgaggagttttgaatggccagatttcaaactgaatatgggtccccaaatgttcccagagggtcctccacaccctctgccgactaccacggtgtggattcagctcccaaatgacaaacccagcccttcccagtatacttgaaaagctttcttgttaaaataaaaggtgtcactgtggtaggcatttggcatattttgtggactcagtcaagcaaccacagtctgttaatcatttctctatgctcagatgtcagatcctcttgttattagnnnnncttgttctgcacagagcaaggagactttattcctttggaaaattcactggtccacaaacagcaggctgaatggccttgnctntanatngacgnggtcctatnnnntttnaactcttntgnttctntntcannncatngttgnnttatatntnatntttcanatnnnncaatnctnannttcntgngtnnnnctnnacncnntagnnanatncctntnttatnnganagtngctnnttnngttnacntntttcactnttcntttnnncntanngtnttgngtannntttta

SEQ ID NO: 29474 - DNA, 671 bp, Homo sapiens
  misc_feature (1)...(671): n = a,t,c or g
gtagttnnnnccntttnnnnnnnnnnnnnnnnnnnnnnnnnnnnnnnnnnnnnnnnnnnnnnnnnnnnnnnnnnnnnnnnnnnnnnnnggcacgaggaccttctgnnnnnnnnnnnnnnnnnnnnnnnnnnnnnnnnnnnnnnnnnnnnnnnnngaactctgtctcaaacaaaacaaaacaaaaaaattattttcctcttgtggtgaggtggaagtagcctagtactgaagaagaggtgtgatttggcttctcatgggcaagtttttccaagtctttgtaccctcaattttccttagctattattgagcgaggataatgatgagttttatagttctaaatgtaaatattagggcaaaaagggttaaaatttcatgatttaagcttctatctcatgatgctaggaaaaagaacccanaggaagtaggagagaactaatagcgttaagaacagaaactaatgaaaaaagntttnnncccgtggntcaccttgnaaccccanacttttgggagggccaaggnnancgggnnattttnggggnnnngganttganaccancntgggccnanntnggggaaaccccntttttnnnggnnanncccnannnnnnnnnnngggggggggggcccgnnccnnnggannnnnnnnnnnnngnngnncnnnnnnnnnaaaa

SEQ ID NO: 29475 - DNA, 407 bp, Homo sapiens
  misc_feature (1)...(407): n = a,t,c or g
nnnnnnnnnnnnnnnnnnnnnnnnnnnnnnnnnnggcacgagcattcacgtacagatttttgtgtgaacataaacttcttcttatattaccaggttgcccatcaacatggttctctcactttgtctcattatcaatgaatgaaatagctcatttcacttgcttgctgaatgttttatattcataattattaaacttcttaattgggcatggcactactattatctccattttatagatggggaaaattgaggctcatgnnnnancattttcccaaggtcacatgntaagtcacaaagaagagcctggaatccaagataataaggctttttccaccacagctgacttttcaggtggaggcctttctacacttcactaaggttgctgaaaaganggtgtgggtgctcta

SEQ ID NO: 29476 - DNA, 453 bp, Homo sapiens
  misc_feature (1)...(453): n = a,t,c or g
nnnnnnnnnnnnnnnnnnnnnnnnnnnnnnnnnnnnnnnnnnnnnggcacgaggatcgccggcggaacgctccgagccagatgaggacggggacttggttgccttttccagtgacgaggaattgacaatggccatgtcctacgtgaaggatgacatcttccgaatctacattaaagagaaaaaagagtgccggcgggaccaccgcccaccgtgtgctcaagaggcgccccgctacatggtgcaccccaatgtgatctgcgatggctgcnnnnacctgtgntncgaacccgcttcnagncntnngtttgtccaactccacttgnnnannttnttntnnggnnacggngnntncttttnnnnnncctntntcnnntnncnnnntctcttntgtttctgnnccttttgntcnnttcnttnnttnttttnnnnnncagnngttttnnntttgtgtcc

SEQ ID NO: 29477 - DNA, 454 bp, Homo sapiens
  misc_feature (1)...(454): n = a,t,c or g
gctatngggaatttggccctcnaggcccctaattcggcacgagttattgatgatgatagataatagatattggatgactgatagctaacgggtttgtggaagcctttttaaaacgaataaaatcgaggtctgaatcaactgaagggataattagtggattaagaacttgagggaaagccctctacattcatctaacatgctgctactaggctattcacctatgtttgcttaggatgcaaatatacacactaagttcattcaaatctttctgtgcttcctctttcnnnnancaatcatttactgagcaactatgtgctagactctattctaaaatttctgngatttgcctaagtgcaangnctcatgcctgtaatcctantattttgagaggctnancnggaggatcctggagctnatgnntttnanaccgnccnngcaanctngngaaccctgg

SEQ ID NO: 29478 - DNA, 447 bp, Homo sapiens
  misc_feature (1)...(447): n = a,t,c or g
nnnnnnnnnnnnnnnnnnnnnnnnnnnnnnnnnnnnnnnnnnnnnggcacgagaggatctcaaatatcccttcgacgggtacctaatagctgtttttgattcctgagatacttggttttatctctcctttagaaacaaaaattatgctcagctgtaacctcgtccagctctaccaactcagatattcacaggctgatttcacgctccnnnnnananagtncantcacgnntacctttntatcccnaccnacttgtagccntgttncctccctaggnctgctttctcagancaccncnnggnatcacaantatttacnaaactctatccttanancnntgngaaatgccttgncncttancagngcgggggnnnntnnnnttnnananntntnncggnnctcntnnnnttnngggctcnnnnnnannttggcnnnnnnnnancccccc

SEQ ID NO: 29479 - DNA, 169 bp, Homo sapiens
  misc_feature (1)...(169): n = a,t,c or g
tttggannntttgaanncccatnnnnnnnnnnnnnnnnnnnnnnnnnnnnnnnnnnnnnnnnnnnnnnnnnnnnnnnnnnnnnnnnnnnnnggcacgaggcatgctttttataattctaattttatttctatcctcggtttgctgactgtatatctttttttttttttt

SEQ ID NO: 29480 - DNA, 395 bp, Homo sapiens
  misc_feature (1)...(395): n = a,t,c or g
aattcggcacgagaactggaagtatagttacaaacaaaccattaagagataaaagtgcatgtcttaggcctggtgcccagcttatcccatgaaagccacggctttgacccatggagatattgcgtgctgtgcacacggaggtggggggccacagaaagggggcagtgagaaatgagtccaaggcagctgggctgagtgtgtgacaaagaatgtcacacaaaagagtttacaggtatggtatggtattaagtaccccttcctctatttctaggtcccaccattatttttaataaaattatcaaataacttggcattattaaattctagtaagaactctttactgnnnnnnnnnnnnnnacttaaaatggncactggaaattatgatattttctgac

SEQ ID NO: 29481 - DNA, 500 bp, Homo sapiens
  misc_feature (1)...(500): n = a,t,c or g
nnnnnnnnnnnnnnnnnnnnnnnnnnnnnnnnnnnnnnnnnnnnnnnnnnnnnnnnnnnnnnnnnnnnggcacgagggaggggatttgggagatgctagagacatgcttcagtgcacttgcttaccttcctgaaattggaaatttcaacggttccttggtcctcgaggcactcacaataacttcaaacaatgtggatctgtggagattacccaataggagaactccagttactggtaagtgatccagctttttcttctctatcagaataagaagattatttcattttatttgagattattatcacacgtagaactacagaagaaagcataaattcactagataactatatatacacgtatcaaagtaaatatggaaacaatttgctaaatataatgncagtggaaacttctcacattatcagaaacataaggaaatcattagaatgggttcattttaaaagnctactataatggctgctatattttaatatacaaaaata

SEQ ID NO: 29482 - DNA, 393 bp, Homo sapiens
  misc_feature (1)...(393): n = a,t,c or g
aattcggcacgagaaacattatttgaaatgcctactatatgctaggcactatgcctcggccacgggttcagacgtgatcgagacagcctgccttctctgagtgtatggcctgggaaagggggcagctgagagacagatgcatggcgatgtgccggataacagacgtagaaggcagaggcaggggagctgtctggggagaggcaaagatggggattcatcagagaaggctttgaaggacatgatgcctaacctggatgtcgaaagggattttgccaggagcacagggcactggtggagggagccctgcggggcagtcctcaaggcctccggatgggtgtgagaggcaccggggctgaagcagcatctgggttttgaggaancacagccccttgg

SEQ ID NO: 29483 - DNA, 510 bp, Homo sapiens
  misc_feature (1)...(510): n = a,t,c or g
annccttnnnnnnnnnnnnnnnnnnnnnnnnnnnnnnnnnnnnnnnnnnnnnnnnnnnnnnnnnnnnnnnnnnnnnggcacgagggggcctgggtcacaggctttcttccaaatggggcatcttcaaagagataaagcacctcccaaacccagaatagtgttctgccaaagagaattcggatatatatttttactaggtttatgttttactgnnncggagttttaggnntattaacttgggtctacctttgatcactcatttatttggttgtttgtttgtttgttttannnnnnnnnnnnnnnnnnnnnnnnnnnnnnnnnnnnnnnnnnnnnnnnnnnnnnnnnnnnnnnnnnnnnnnnnnnnnnnnnnnnnnnnnnnnnnnntagctactgngctcggcgnattntntaattctttttctgagacagannctgctctgtcacccagctggagtacngtggtgcatcttanctttgggctctnggttcaagcattcctcctgcctcacc

SEQ ID NO: 29484 - DNA, 391 bp, Homo sapiens
  misc_feature (1)...(391): n = a,t,c or g
aattcggcacgagaaaagagttttaaggccatccattttacaggaaacgtgaaaaaattaactgctttgggattgggagtttagagaacctgcctggaccaagagaggaaattttcaacagacggttctgttggtcgaatccttatttcacagataaagattctgttgtgagaggttatctcttaccacctggttttcccactttgccatggaataatcattggtctgggtctaattctctatctatctatctatctatcnnnnnnnnnnnnnnnnnnnnnnnnnnnnnnnnnnnnnnnnnnnnnnnnnnnnnnnnnnnnnnnnnnnnnnnnnnnnnnnnnnnnnnnnnnnnnnnnnggctcaacctcctgagnggctgggactacaggcc

SEQ ID NO: 29485 - DNA, 390 bp, Homo sapiens
aattcggcacgagctccacgaccaaaacgggccctggaagtgggtggacgggacggactacgagacgggcttcaagaactggaggccggagcagccggacgactggtacggccacgggctcggaggaggcgaggactgtgcccacttcaccgacgacggccgctggaacgacgacgtctgccagaggccctaccgctgggtctgcgagacagagctggacaaggccagccaggagccacctctcctttaatttatttcttcaatgcctcgacctgccgcaggggtccgggattgggaatccgcccatctgggggcctcttctgctttctcgggaattttcatctaggattttaagggaaggggaaaggataggtgatgttccgaaggtga

SEQ ID NO: 29486 - DNA, 392 bp, Homo sapiens
aattcggcacgaggtggctgaagcagcgaggcgggagtggaggtgcgcggagtcaggcagacagacagacacagccagccagccaggtcggcagtatagtccgaactgcaaatcttattttcttttcaccttctctctaactgcccagagctagcgcctgtggctcccgggctggtgtttcgggagtgtccagagagcctggtctccagccgcccccgggaggagagccctgctgcccaggcgctgttgacagcggcggaaagcagcggtacccacgcgcccgccgggggaagtcggcgagcggctgcagcagcaaagaactttcccggctgggaggaccggagacaagtggcagagtccggagcgaacttttgcaagcctttcctgcgtct

SEQ ID NO: 29487 - DNA, 390 bp, Homo sapiens
  misc_feature (1)...(390): n = a,t,c or g
aggccaagaattcggcacgagagacaaaggagtggcaccagaaagaaggctttcctcttcagcatttctcctttataagaaatnnnnnnnnnnnnnnnnnnnnnnnnnnnnnnnnnnnnnnnnnnnnnnnnnnnnnnnnnnnnnnnnnnnnnnnnnnnnnnnnnnnnnnnnnnnnnnnnnnnnnnnnnnnnnnnnnnnnnnnnnnnnnnnnnnnnnnnnnnnnnnnnnnnnnnnnnnnnnnnnnnnnnnnnnnnnnnnnnnnnnnnnnnnnnnnnnnnnnnnnnnnnnnnnnnnnnnnnnnnnnnnnnnnnnnnnnnnnnnnnnnnnnnnnnnnnnnnnnnnnnnnnnnnnnnnnagtgagactgctcaaaaaaagaaaaaaaaaaaaaa

SEQ ID NO: 29488 - DNA, 392 bp, Homo sapiens
aattcggcacgagactaaaaacaggactaagaatatctgtcattcattatgttctttaaaattatgattgactactcactaccctcacaatggaatgattcattaggataagctaactgctgtaacacacatccttaaaattccactggcttaattacttgctcatgctgtagactgacacggtgagacacttctccttgccgtcactcagggatccaggtcctttcatcttgttccactactatcttccaattctagacttcaagattgctgtggaaggaagagagcatatagggaaggcaaacaactcttaactgtcttgtccttcacatcagccacgttccattgtcagagctaggaaatgttcgaccttgcttcaaggaaaaggaagt

SEQ ID NO: 29489 - DNA, 394 bp, Homo sapiens
  misc_feature (1)...(394): n = a,t,c or g
aattcggcacgaggcgtggcggggatggccggggtggccacagctggcgcgggggcgtggacacagccgcagctccggccggtggagctcccccagcgcacgcgccaggtccgggcagagacgccgcgtctgcggccagggggtcacgaatgcggccgcacatattcaccctcagcgtgcctttcccgacccccttggaggcggaaatcgcccatgggtccctggcaccagatgccgagccccaccaaagggtggttgggaaggatctcacagtgagtggcaggatcctggtcgtccgctggaaagctgaagactgtcgcctgtccgaatttccgtcatcaactttcttgaccagcttttcctggnggtgcggaccattgcaccgctttgggcc

SEQ ID NO: 29490 - DNA, 554 bp, Homo sapiens
  misc_feature (1)...(554): n = a,t,c or g
gngtnnttnnnnnccnntttgannnncnnnnnnnnnnnnnnnnnnnnnnnnnnnnnnnnnnnnnnnnnnnnnnnnnnnnnnnnnnnnnnnnnnnnnggcacgagcgttctttttctcctgcccctcaccagttccagggtggcaagaggctgcagagtgtggaggttaagagcgcgggaccctggctggggttgtagccccaccacctccnnnnnnnnnnnnnnnnnnnnnnnnnnnnnnnnnnnnnnnnnnnnnnnnnnnnnnnnnnnncgaatagagatctgtcccctgtggggctcgtggctcagatagagactaagtgagcgatggtggcagagctcagccaggaataaaagaaacttccaactgggcgttgggtgtgtgccaggcactgtacattcatatctgctgtcatcttccctggctcccttccgtggtggggcatcaacccatctcacagcanaggaggcaggctctgcagcacccacttgcccaaagtctcccaacnnnggaggtggccaagccnnggttgagtccatctctggcccttattc

SEQ ID NO: 29491 - DNA, 522 bp, Homo sapiens
  misc_feature (1)...(522): n = a,t,c or g
tnnnnttnnnnnntttgnanccannnnnnnnnnnnnnnnnnnnnnnnnnnnnnnnnnnnnnnnnnnnnnnnnnnnnnnnnnnnnnnnnnnnnnggcacgaggaccatttcatctaaacccctcattttgtgtcagaagaaactgacttgccctggcttgaggagccagttaatggcaaagctggggctgacgtccaggtcatctgcttcccggcagagggtttccttctgccctgccgtgtcatggtgttgtgaggtgctgaaattttatcaccagtctgaaacataaatccaaaacaatacactggagaattttgaaaactaattacttagagcccatttggttttgcaaaaatatacttcctggtatagttttagagccttaacactcttttgagaggccagggatctaatgaggggccgtggtgggaaacanaatgccttgngaatggagntgctgncnncccatnccactgcanncanngancttntnttacttngacttctncatannatnnnattt

SEQ ID NO: 29492 - DNA, 456 bp, Homo sapiens
  misc_feature (1)...(456): n = a,t,c or g
nccnnnnnnnnnnnnnnnnnnnnnnnnnnnnnnnnnnnnnnnnnnnnnnnnnnnnnnnnnnnnnnnnnnnnnnnggcacgagcacagataaatttgatacatcttgttgcagtcattattctaccataagtttttttcagagaaatctatgtcttagggaaacaaacacacttggtttgcgagttttactaaaattttaaatataaatgggagacttccagaaaatttcttgcttgcagaggtgactttgaattttacccttagactccctttccatggcagtctccagagtgggatttttcagaggaaaaccttanaagcgtcactctttgctaccacagggatcttttgaaacttcaccttgagctttctgtanctgatctgatccccaaaagcagagtttaaaacattgcagagaggctgggattataggcgtgagcccccgnaccctgcttg

SEQ ID NO: 29493 - DNA, 466 bp, Homo sapiens
  misc_feature (1)...(466): n = a,t,c or g
tcnnttggannctttgannccannnnnnnnnnnnnnnnnnnnnnnnnnnnnnnnnnnnnnnnnnnnnnnnnnnnnnnnnnnnnnnnnnnnnnggcacgagcgcctaagtttccagaagactttgacgatggagagcatgcaaagcagaaatcagtcatctcctggctggtgaaccacgatccagcaaaacgggccacagccacagaactgctcaagagtgagctgctgcccccaccccagatggaggagtcnnnnntgcatgaagtgctgcaccacncgctgaccaacgtggatggnaaggcctanngcnccttgannngccagatcttntngcngggnatttcccctgncttcgttacncctntganagnnactnctgaagggnanctttcantccnngcagccatnnnncnnnnncttgtgnntcaanccntgntccgnatctnnanaagacatnggnnttgtc

SEQ ID NO: 29494 - DNA, 474 bp, Homo sapiens
  misc_feature (1)...(474): n = a,t,c or g
tnnnttnnnnnnnttgnannccnnnnnnnnnnnnnnnnnnnnnnnnnnnnnnnnnnnnnnnnnnnnnnnnnnnnnnnnnnnnnnnnnnnnnnnggcacgagcggcacgagggtcaagctgacggcggagctgatcgagcaggcggcgcagtacaccaacgcggtgcgcgaccgggagctggacctgcgggggtataaaattcccgtcattgaaaatctaggtgctacgttagaccagtttgatgctattgatttttctgacaatgagatcaggaaactggatggttttcctttgttgagaagactgaaaacattgttagtgaacaacaacagaatatgccgtataggtgagggacttgatcaggctctgccctgtctgacagaactcattctcaccaataatagtctcgtggaactgggtgatctggaccctctggcatctctcaaatcgctgacttacctaagtatcctaaga

SEQ ID NO: 29495 - DNA, 470 bp, Homo sapiens
  misc_feature (1)...(470): n = a,t,c or g
tnnnttgnnnncttgannccannnnnnnnnnnnnnnnnnnnnnnnnnnnnnnnnnnnnnnnnnnnnnnnnnnnnnnnnnnnnnnnnnnnnnggcacgagctccccaatccagggagggaaggattctttcacaaaaggcatgaaaacagttgcttccatgtttggaagcagnnnnnnnnnnnnnnnnnnnnnnnnnnnnnnnnnnnnnnnnnnnnnnnnnnnnnnnnnnnnnnnnnnnnnnnnnnnnnnnnnnnnnnnnnnnnnnnnnnnnnnnnnnnnnnnnnnnnnnnnnnnnnnnnnnnnnnnnnnnnnnnnnnnnnnnnnnnnnnnnnnnnnnnnnnnnnnnnnnnnnttaattgtttatnganatggcttnttgnggcacgccanngcctnacacnttgtnnncccannngctttnnangccnnntggatnaggggnnttttaggcntnnnntnctannacctaa

SEQ ID NO: 29496 - DNA, 469 bp, Homo sapiens
  misc_feature (1)...(469): n = a,t,c or g
aatttntcnactcctataannnnnnnnnnnnnnnnnnnnnnnnnnnggcacgaggaattgtgtttcgatggagcattctgctggcagcatgcaggacagactcaaggaagacaagtaaggaagtcctcagtcagtttactaatttatagtgtactggcagtctggttactacaggttgctgagtgatgaaaggggagggaatgaagggacagagcagagactactcttttgagaagaattgaaatgaaaagtcaaggagagaaagaaggtaattaaatgggagcactatgcccaagatggattttgtcttgtttgtttttgaaatgagagagatgagcannnntataggttgaagatnatgatnntgattatnatannatanctaacnctgattangactttatttgncnctnnatattatnctcntatggncntnganncnttntnnnntnttccnctnnnnanactg

SEQ ID NO: 29497 - DNA, 413 bp, Homo sapiens
  misc_feature (1)...(413): n = a,t,c or g
nnnnnnnnnnnnnnnnnnnnnnnnnnnnnnnnnnnnnnnnnnnnnnnnnnggcacgagnnnnnnnnnnnnnnnnnnnnnnnnnnnnnnnnnnnnnnnnnnnnnnnnnnnnnnnnnnnnnnnnnnnnnnnnnnnnnnnnnnnnnnnnnnnnnnnnnnnnnnnnnnnnnnnnnnnnnnnnnnncctggcctgctttctaatctcatataggttcattttgtttccccatccattaggggaaactctgtgagtagccactgtgactctacttttgtgtccaaaaatagccattgtgtacttgaatgaatgaggttcaagagcttannnngnataacctattaatannaggcatanancttttantanctanacttggnaatccgacatanttgttcccntactggcnatnnnatag

SEQ ID NO: 29498 - DNA, 442 bp, Homo sapiens
  misc_feature (1)...(442): n = a,t,c or g
gaatttggccctcgaggccaanaattcggcacgagcattgctcggtattcaacactcaagtgttttgtggcaaaaacttcaatggctctgttttcttcaaagggtgagtgacagtatactttcatcttttatgatttttggaacaccaaatttatttgacactgttcctaataggacagatacttaaagaccacagtttgataacccaaatnnnngnccnttgaganactccctttnaaaggaanacaggcccancnaaaacctgccnatantgnacatggcacnnnnnancntcngnangnnnatcatnctntactngggcanccncancatcannncntntttgcccaaantnnnanccatncccnantnnnnnactnaaanncancacnccnncanncatanncctcncnnntannnnnttanatannacnnanaacct

SEQ ID NO: 29499 - DNA, 410 bp, Homo sapiens
  misc_feature (1)...(410): n = a,t,c or g
atttggccctcgaggccaanaattcggcacgaggggccgagtgggagccgctccagccaggcctgggcagtgacctctttctcttgccccccagccacgaccagcgcttcttcctgaagacccaggggcgccaagaggtgcaggctctgctcgcccacctgccccgctacgtgcagcacctgcagcggcacccgcactcgctgctggcgcggttgctgggagtgcacagtctgcggatggaccggggaaagaagacgtacttcatnnnnatgnanagcgtgttntaccccgnaggncgcatgtncgagaggnatgacatcaaaggctgcnaggngaaccggtgggnggatccnnncntgagggcnnncnnnttgttntggngctgannanctngnnttnnngnnnnacat

SEQ ID NO: 29500 - DNA, 451 bp, Homo sapiens
  misc_feature (1)...(451): n = a,t,c or g
nnnnnnnnnnnnnnnnnnnnnnnnnnnnnnnnnnnnnggcacgaggtctgagatttctgaagcgtggggcttgtgatgttaggtgaggcagggcactagagaaagtcgcatcacagagcccggaggtcatttctgccgtccctccttcccacctgtctctgcagtgctggggcttcagtttggcctggtgtcttactttgcaccttgtcagcgcttgtcagccttgttctaagggagaggagagtttgcctgggcaggcagcagggtagagctgcaaccgaatacagtagttnnnnncncattgcattggacaactaccattttacttntgccaggtaattcttgntttcnangtntgngananataataggtgncgnnntnnttnngnnngtntttatgtcncnttnatnntcttnanannaattatngnnnantnnngtntnntngtgt

SEQ ID NO: 29501 - DNA, 442 bp, Homo sapiens
  misc_feature (1)...(442): n = a,t,c or g
nnnnnnnnnnnnnnnnnnnnnnnnnnnnnnnnnnnnnnnnnnnnnnnnnggcacgaggtttgaaagaatattgagccaaagcccaggctccctttgggaatcatgttagcccatcagaatgttgaaggattgaagagttctaagcataaaataagtggcattttctgacttcttcctcctcctccttccctgactcacagaaggaatgcaatcacccagcaagtcctacctgttacgcaattttttatctcaaaatgccnnnngagaaaactgtncattttntngatanccnaganaggaanctgncctnagcannntgntgaatnctcntatnntctngctntatcnngnnctnnnttattatntcnnnnnggnctggaccttctcncggtnnntcncnggctnctncnctcttntcntncnnnctnnctnnttnntcccc

SEQ ID NO: 29502 - DNA, 548 bp, Homo sapiens
  misc_feature (1)...(548): n = a,t,c or g
gnnnnnnngnnnnnnttnnnttnttnnctcngaancntgagtncnnnnnnnnnnnnnnnnnnnnnnnnnnnnnnnnnnnnnnnnnnnnnnnnnnnnnnnnnnnnnnnnnnnnnggcacgagattacnnnnnnnnnnnnnnnnnnnnnnnnnnnnnnnnnnnnnnnnnnnnnnnnnnnnnnnnnnnnnnnnnnnnnnnnnnnnnnnnnnnnnnnnnnnnnnnnnnnnnnnnnnnnnnnnnnnnnnnnnnnnnnnnnnnnnnnnnnnnnnnnnnnnnnnnnnnnnnnnnnnnnnnnnnnnnnnnnnnnnnnnnnnnnnnnnnnnnnnnnnnnnnnnnnnnnnnnnnnnnnnnnnnnnnnnnnnnnnnnnnnnnnnnnnnnnnnnnnnnnnnnnnnnnnnnnnnnnnnnnnnnnnnnnnnngaaaattatatcatagtttttctangagaatcaagaaatgnattttcatctctgtattttgttacttgcatgcntacaaggcaagaagcttcntantaaagaaggctccgggaatcttggttttaccgga

SEQ ID NO: 29503 - DNA, 516 bp, Homo sapiens
  misc_feature (1)...(516): n = a,t,c or g
ccnnnnnnnnnnnnnnnnnnnnnnnnnnnnnnnnnnnnnnnnnnnnnnnnnnnnnnnnnnnnnnnnnnnnnnnggcacgagcggcacgagcaataccctgggaacacaggggaagaatgagtcatggctctgccttcatggaagatacctgctgcctatggaaaaagacaaataacaagaaccaaaggaattatgactgtgatagagacatagacaaatgactatatacaagccactcttctggctactcttgatttagaaattatcctctttatgtagaccacttcctctgctggtagcacacttaatagatgacgtggactatgtcaggtctataagctacaacccatggccaaatctggcctgccacctgttttggtacagcctgcaagctaagaatgatttttacacttttaaagcattaggaaaaaaaatcaacagaagaataatatgtgaaattcaaatttcagggtcttaaatagttggattggacacagccacactcactcatttatg

SEQ ID NO: 29504 - DNA, 506 bp, Homo sapiens
  misc_feature (1)...(506): n = a,t,c or g
ttggaanncctnnnnnnnnnnnnnnnnnnnnnnnnnnnnnnnnnnnnnnnnnnnnnnnnnnnnnnnnnnnnnnnnnnnggcacgagctggaatatccataaaactatgaaactataccaacagtaattgattctgggactgtttgggagaaaaaggtaatttagcttcattcattcattcattcattcatccnnnnnnnnnnnnnnnnnnnnnnnnnnnnnnnnnnnnnnnnnnnnnnnnnnnnnnnnnnnnnnnnnnnnnnnnnnnnnnnnnnnnnnnnnnnnnnnnnnnnnnnnnnnnnnnnnnnnnnnnnnnnnnnnnnnnnnnnnnnnnnnnnnnnnnnnnnnnnnnnnnnnnnnnnnnnnnnnnnnnnnnnnnnnnnncgtcttactacattgcccagctagtnnnnnnnnnnnnnnnnnnnnnnnnnnnnnnnnnnnnnnnnnnnnnnnnnnnnnnnnnnnnnnnnnnnaccccgnattcagccatttacattctaaatg

SEQ ID NO: 29505 - DNA, 495 bp, Homo sapiens
  misc_feature (1)...(495): n = a,t,c or g
nnnnnnnnnnnnnnnnnnnnnnnnnnnnnnnnnnnnnnnnnnnnnnnnnnnnnnnnnnnnnnnnnnnnggcacgagtgcttgaattatcccatcttttgccagaaggaaacttgtcaagttgtctcctgactcttttatatactgtttgatactatttgatagctctcttggatttttgcaatttcaacatgttccaggttcatcttatatattttttgccccaaatatggaatcagctagttcttctaggttcctgggctccttttattgggaaatggtatttagagaccataatcagaacactagagtgctcagtgctactaggttggtcaccctttctagtctttttggtatagagaggcaggaactacctttttaaaaannnnnnnnnnnnnnnnnnnnnnnnnnnnnnnnnnnnnnnnnnnnnnnnnnnnnnnnnnnnnnnnnnnnnnnnnnnnnnnnnnnnnnnnnnnnnnnnnnnnnnnnnnnnnncc

SEQ ID NO: 29506 - DNA, 186 bp, Homo sapiens
  misc_feature (1)...(186): n = a,t,c or g
ttnnnntnnncnctttggaanacctgctatgacnnnnnnnnnnnnnnnnnnnnnnnnnnnnnnnnnnnnnnnnnnnnnnnnnnnnnnnnnnggcacgagggattaaaggatggtttctgtgcaactgaaacatatgcacagaatgacaatagtcgtgatactttctttattctttttttttttttt

SEQ ID NO: 29507 - DNA, 513 bp, Homo sapiens
  misc_feature (1)...(513): n = a,t,c or g
tnnnctttganncttggantcnnnnnnnnnnnnnnnnnnnnnnnnnnnnnnnnnnnnnnnnnnnnnnnnnnnnnnnnnnnnnnnnnnnnnggcacgagcaatctctaccacagcagtgctaggcgattattaacaaccaggggaggttgcagggcttgtcctggaaagaaccctggagttgggctgcgggcagacccggtgtgaatcccagttcataaaagctgtgtgacttcgggctagacctttgagctttgggctctctcgccctgtaaaatggggaaagccaggatctgccctaaaagaatcatacacacatggaacgaactcacatttgtcatatttcttgagcctggtagagcaaaagtgatgggtgatcagtgcacagaagctatcagtggacaatggtaatgactgctgttgctgggggctgacccaacacggcctgggagagagaagccacttgccaccactnacacctnaggtcccgcaagggaactttatgccccccattgt

SEQ ID NO: 29508 - DNA, 505 bp, Homo sapiens
  misc_feature (1)...(505): n = a,t,c or g
ttggnnnacnnnnnnnnnnnnnnnnnnnnnnnnnnnnnnnnnnnnnnnnnnnnnnnnnnnnnnnnnnnnnnnnnnnnnggcacgagtgccttgatattcgcatctacatattttatacagacatttcataacattaaagttaataaaactttatagtaaaccagatctttatatgaacagttacagtagttactgtctgcctgatggacagctaattgcactgcacttcgacctctattgttggttcgcacctttgtatttttctaggttggttgtaaagtcttcttgaggatgattcttaaaatttcttaaggcacttactccctttgtttcccacctcattttatcatctcttccagtccccaaagcagtgttttgtgttgctcagtataggtttttgaggcaagggctgtttttataatgctgattcacagtcatacaaatcttggcttttgagtcatgnaaaacttggcttanntcntgaaagaaanagactctcaaataa

SEQ ID NO: 29509 - DNA, 502 bp, Homo sapiens
  misc_feature (1)...(502): n = a,t,c or g
nnnnnnnnnnnnnnnnnnnnnnnnnnnnnnnnnnnnnnnnnnnnnnnnnnnnnnnnnnnnnnnnnnnnnnnnggcacgagcatctgtggattcagccacagatcaaaaatatccttgggaaaaaaaaataggaggtttgcatcctattttacagatgctaacatctgtattgaacatgtacagacttttcttctcattattctaaaccatacagtatgaaaattattagcatagcatataagataatttataaagaatctagaatcnnnnnnnnnnnnnnnnnnnnnnnnnnnnnnnnnnnnnnnnnnnnnnnnnnnnnnnnnnnnnnnnnnnnnnnnnnnnnnnnnnnnnnntcaggggggttctggaacaaatctggatactgagggatggctctacagcctttcagaattaaattttctatgantttaatgggtctttcaagaccntggacaggaatcactgacncctgtggccttacaaantgnttggacaagaaaaa

SEQ ID NO: 29510 - DNA, 470 bp, Homo sapiens
  misc_feature (1)...(470): n = a,t,c or g
anncctttngntccnnnnnnnnnnnnnnnnnnnnnnnnnnnnnnnnnnnnnnnnnnnnnnnnnnnnnnnnnnnnnnnnnnnnnnnggcacgagccataaaccctgagcccagagagcttgggtcactgtcacctgagtgcagatgggctgcctcaggcagcttggagtgccagccattcctgcaagcaccgtttcagctcttggggccaaccccaggacctttggctctgtccatcaccagcaaccaatccaccaacagaatgtggtttctgccatcctgggcagaagctgaaggccagcttcacatttctgctgagagaaggtgacttaacgccttttccggccctagctccaggcgttttgaggcgtctggtgcctgatggtaggtatggtgnnnntgttctgncccccaggggctggagtcaccnggngccatgnnngacacatttttggctgnnaaaggattggca

SEQ ID NO: 29511 - DNA, 459 bp, Homo sapiens
  misc_feature (1)...(459): n = a,t,c or g
cnnnnnnnnnnnnnnnnnnnnnnnnnnnnnnnnnnnnnnnnnnnnnnnnnnnnnnnnnnnnnnnnnnnnnnnnggcacgagctttattgtcttcaaatggaaagtttgtttattgatttgagacatttatcctttctttaatataggcatttataacataaattgttcgttaagtgctgttttagctgcatcccataagttttgctatgttgtgctttcgttttcattcatttcattattttctaattttgctagtgatttttttccttaatgcatttattatttagaagtgtgttaatttccacatttgtaaatttccttaatttatttcgattactgacttctgttgtggttagagaacatacttcgtatgatttcaattttaaatttattatggctcatcttatggcccatgagggcaacaaactaaaccatggacgagctagaagttaacagaga

SEQ ID NO: 29512 - DNA, 467 bp, Homo sapiens
  misc_feature (1)...(467): n = a,t,c or g
ccaannnnnnnnnnnnnnnnnnnnnnnnnnnnnnnnnnnnnnnnnnnnnnnnnnnnnnnnnnnnnnnnnnnnggcacgannnnnnnnnnnnnnnnnnnnnnnnnnnnnnnnnnnnnnnnnnnnnnnnnnnnnnnnnnnnnnnnnnnnnnnnnnnnnnnnnnatcttcatcttctttacttgaacttaattctttttcatgcatcttcccttctttcctcttttctcctccacccaaatgtcttaactgttaacattcccaggtgtttggtcctgggcctctggaggttgtgaaggagcactgctcagtcctcccttcaagaaagcagcttcaaggagttcaattacaaaagctcctggcattggggacctgccgccatgttcctgcccagggcatgctggtcctggctgtcaccaagcacagtggaggncaagngctangccatttctgnccgaacangcctcctct

SEQ ID NO: 29513 - DNA, 478 bp, Homo sapiens
  misc_feature (1)...(478): n = a,t,c or g
ttgnnnncnttnnnnnccnnnnnnnnnnnnnnnnnnnnnnnnnnnnnnnnnnnnnnnnnnnnnnnnnnnnnnnnnnnnnnnnnnnnnnnggcacgaggaagaaagcatccttgaagaagttttagaagctttaacttcagctggtgaagaaaaaaaaattgacagatttttttgtattgtggaaggcctccggcacaattcagttcaactgcaagtagcttgtatgcagctcatcaatgccctggttacatctcctgatgatttggatttcaggcttcacatcataaatgaatttatgcgttgtggattgaaagagatattgccaaatttaaaatgcnnnnnnaatgatggcctggatatccaacttaaagtctttgatgagcataaagaanaagatttgtttgagttatcccatngccttgaanatattagagctgaacttgatgaagcatatgatgtntacaacatggggtggagc

SEQ ID NO: 29514 - DNA, 570 bp, Homo sapiens
  misc_feature (1)...(570): n = a,t,c or g
gtgnnnntnnttgaaaccnttgaaaccccttgacnnnnnnnnnnnnnnnnnnnnnnnnnnnnnnnnnnnnnnnnnnnnnnnnnnnnnnnnnnggcacgagctttttttggtggataataaagaaaagactcccaggaaggactgtccttccattcctggtaagtggtggctcaggttcgtttttggtgctagtcctggcaaaacaagatgctataagtcaccattgctcacaccatctatatcactttgccaatcagagaaaattcagtttgctaatgcctcccctgtgatcttgctgtcttatggttgcagccgtcatttcttctgctttctaaacaccacatgccctgtagcatcagcttcaccctgcactaagcattaagtgctttcgcataaaatgggacttggaatgaaatgtttcattgctgtcatgtatgtctatagttaataacctgcagctcttaagactgagagcattttgaacagtaatgtgaggtaggtatcaatgcttcctttcaatgggatcctctgagtaaagccagttctaagaatctaagaaggaaagtatta

SEQ ID NO: 29515 - DNA, 573 bp, Homo sapiens
  misc_feature (1)...(573): n = a,t,c or g
tgnnnnanatttgaaaccctttgactgannacgaatttaatacgactcnnnnnnnnnnnnnnnnnnnnnnnnnnnnnnnnnnggcacgaggtagactatatttaaatgtgatatattactttttctagccacatactcttttagccttcaatatagcagaatcaaagtatgttattccatttgttccaaatttctctccattttctatccagatggctgctgactcaaatgtatatgataatacatttacattttttcagttaaggctgataaatccattttaatgctattgaattgcttaatgaataaaagatttaaatgtgtccgtcagtgcttatgtttctgtaaagtgaagtatcctgaaagcgctagtagtgctgataaagtttccagattgtgatttaagaacttttctgttttgcagttctgntattactgggtctatacttaccaggngacagagcatttgaaagttctcagttgcaaggatctcaaccttgcaaagaatatatatattgggcatgtaatacagtccaatctaaagtaactgctganatgcctangngggaactt

SEQ ID NO: 29516 - DNA, 578 bp, Homo sapiens
  misc_feature (1)...(578): n = a,t,c or g
ggtgnnnnntnnttgaaanccntttgaaaaaccnnnnnnnnnnnnnnnnnnnnnnnnnnnnnnnnnnnnnnnnnnnnnnnnnnnnnnnnnnnnnnnnnnggcacgagggtcacccgtttttttgggtgcatttctctgggctcccgcctcagccccgccctctcctcccagccctcctgcctcaaagctcacccttccccaccagacctgttgtggcccagccctggttaaatatttgccaaccgagaagagttttcaaggcagccttgtgaaaaaccccagctgactcctggctctgttgggcctgacctgcctctgtgatgagacccagacggcctgtgccctcagactgagtccctgcccaccatggcctccctggtgacctgtttggcgcctgaggctgggtgacctaacacttgttcggcacttgtttatcaagcacccccctgggcctggcgggagctgggtgctggggagacagcggagagcagtctcagtccggggagcgtctcagatgaggcattaactgtggttgaagggagtgccggggagcaagccaggggctgtgggantggagc

SEQ ID NO: 29517 - DNA, 565 bp, Homo sapiens
  misc_feature (1)...(565): n = a,t,c or g
gtgnnnntnattgaaccctttgaatgacacgaatttaatacgactcnnnnnnnnnnnnnnnnnnnnnnnnnnnnnnnnnnggcacgagctaattagaacctagttttatttattttattgttattattaattattattttttgagacacccnnnnnnnnnnnnnnnnnnnnnnnnnnnnnnnnnnnnnnnnnnnnnnnnnnnnnnnnnnnnnnnnnnnnnnnnnnnnnnnnnnnnnnnnnnnnnnnnnnnnnnnnnnnnnnnnnnnnnnnnnnnnnnnnnnnnnnnnnnnnnnnnnnnnnnnnnnnnnnnnnnnnnnnnnnnnnnnnnnnnnnnnnnnnnnnnnnnnnnnnnnnnnnnnnnnnnnnnnnnnnnnnnnnnnnnnnnnnnnnnnnnnnnnnnnnnnnnnnnnnnnnnnnnnnnnnnnnnnnngaatctagtttgatgtanaaaattcaaattcaaattgtgcattcttcaccaagtgtgctaaacttgcatctgggtgtggggctgtggntacggatatanaaaacttcatttaatgagaatgatattgcattaccc

SEQ ID NO: 29518 - DNA, 571 bp, Homo sapiens
  misc_feature (1)...(571): n = a,t,c or g
gtnnnnnnnnntttnnnnnnnnnnnnnnnnnnnnnnnnnnnnnnnnnnnnnnnnnnnnnnnnnnnnnnnnnnnnnnnnnnnnnnnnnggcacgagcaacccactgtccaaatggataaagcaactatgatataatcccaaactgctgatatacataacaacatggatagacctccaaaggaatatgctaagtgaaataaatcagannnnnnnnnnnnnnnnnnnnnnnnnnnnnnnnnnnnnnnnnnnnnnnnnnnnnnnnnnnnnnnnnnnnnnnnnnnnnnnnnnnnnnnnnnnnnnnnnnnnnnnnnnnnnnnnnnnnnnnnnnnnnngatcaaaaaattaatcaaatgtgacacagannnnnnnnnnnnnnnnnnnnnnnnnnnnnnnnnnnnnnnnnnnnnnnnnnnnnnnnnnnnnnnnnnnnnnnnnnnnnnnnnnnnnnnnnnnnnnnnnnnnnnnnnnnnnnnnnnnnnnnnnnnnnnnnnnnnnnnnnnnnnnnnnnnnnnnnnnnnnnnnnnnnnnnnnnnnnnnnnnnnaaggtangcagatcatgangtcaggagata

SEQ ID NO: 29519 - DNA, 566 bp, Homo sapiens
  misc_feature (1)...(566): n = a,t,c or g
gntgntnnnnattgaacccnttgacatgacnnnnnnnnnnnnnnnnnnnnnnnnnnnnnnnnnnnnnnnnnnnnnnnnnnnnnggcacgagattaaggcacataacacaaattatcagtgtggttcgttctttttctaccctgtctcccagtttttggtaacacaacaagtatcttttagaggtttgggctgtggtcatgtttcttctgtgagtattcatttaaatatgaacctttaactacaggagatcatgaaacctggatttcagaatcagtcttcaaattccacagaaatagataaatatataaggcaatcaaatattctatgtttgtaaatgccacgttatcctatgcattttaatttttcacaggccagaaacttgtagtgaataaattgggagtaggcagaattggatttcattatgatatggccggcctccctcccttccttccttccttttttccttccttnttncttccttccttntttnnnnnnnnnnnnnnnnnnnnnnnnnnnnnnnnnnnnnnnnnnnnnnnnnnnnttctttctctctctttctttcaaga

SEQ ID NO: 29520 - DNA, 574 bp, Homo sapiens
  misc_feature (1)...(574): n = a,t,c or g
gntgnnnnntnntttgaaanccttttgaaanccctnnnnnnnnnnnnnnnnnnnnnnnnnnnnnnnnnnnnnnnnnnnnnnnnnnnnnnnnnnnnnnnggcacgaggagttttctaggtattccaggtcttggaaaactccttacttggaaggagattggggtggaggagaataagcaaggtgagagaagctcaacagccaggaacaggcctgtcaaggctggtgcctagacccaggcttcttggatacagtcgcttgctgttgagaacaatgctcaaagcaggaagctggctggtggaggctcaagcggcctcctctgcgtcttcatttcatatccttattgctctgcatctgggactgggatacctgttggctactggactaggctgtcttccttccctggctgctgggcccttggcatcctctgtgacttggcacaagggtgctggcaggaaccagctgattgcacaagaccctttctagcttcaggtttctcagttttagctttggggttgtgtggagccaccctgtgtaggtactttcttcttgtgggtgcctgtccccaagtgaggac

SEQ ID NO: 29521 - DNA, 580 bp, Homo sapiens
  misc_feature (1)...(580): n = a,t,c or g
gtgnattgaancctttgaaagcctcgaatttaatacgactcnnnnnnnnnnnnnnnnnnnnnnnnnnnnnnnnnnggcacgagaacgaagtatatagatatactttgtgcagctttttcattgatctaaaccttgcttgcaaaattttcaagatagaaagttaaaaacaaagatatttcacttgcattatttcatcttaaggacttaaagctaacaaatccatgtaatcttatatgtaagccagcatgcctttgcctttgcagcccctgcccctcaatattttattcacactatgcatatggtaggctggaacttaaaatcaggatacatcaaaaaaagaagataacctattcaaaagaaccagattgtactgtggaaaaaggcagaatagtgcttacaatagtcaaaataataggtatctttacagaaatccatgaacttgagcttgaagcaccttggaggacattgggataaggataaaaagggggaaggagctaaagtgattttgaacacttttgaagcccttttcaaacactcggagataggttgatgncacagcttcctctgaaacctggaggca

SEQ ID NO: 29522 - DNA, 584 bp, Homo sapiens
  misc_feature (1)...(584): n = a,t,c or g
gtgnntttaaacactttgacatgantacnaanatnattccaaatnnnnnnnnnnnnnnnnnnnnnnnnnnnnnnnnnnnggcacgaggaaacaatagttattgaccacagtataccaaatggaagagaccagcagctgggcgtggacccaacagagcatttatttgagaatggcagtgagtttccctcagagctggaggacggggacgacccagcagcctacgtcaccaacctgtcatattaccacctggtccccttcgagacagacatttgggactgaacctctctatcaggcctcccccgcctcagctgttcactgccagctctgatgctgtccactgtgctggcccccatggtcacagctgctgccccagctctggaactcccagacgtcccaggccccactgacgccaggaggcctgggtgtcctgcaagtggagcagcaggggctcctantgggccaggctgaccgcagagtctccagcaagctgaggtcacagccggaggccacagggcctgtgtctgaggncttnnttcctgcttgggcccacaaggcttgncactgcanggcanggacagntctgt

SEQ ID NO: 29523 - DNA, 582 bp, Homo sapiens
  misc_feature (1)...(582): n = a,t,c or g
ggngtnntttgannccntttgaaanccnnnnnnnnnnnnnnnnnnnnnnnnnnnnnnnnnnnnnnnnnnnnnnnnnnnnnnnnnnnnnnnnnnggcacgagcttatctctctgctcttacnnnnnnnnnnnnnnnnnnnnnnnnnnnnnnnnnnnnnnnnnnnnnnnnnnnnnnnnnnnnnnnnnnnnnnnnnnnnnnnnnnnnnnnnnnnnnnnnnnnnnnnnnnnnnnnnnnnnnnnnnnnnnnnnnnnnnnnnnnnnnnnnnnnnnnnnnnnnnnnnnnnnnnnnnnnnnnnnnnnnnnnnnnnnnnnnnnnnnnnnnnnnnnnnnnnnnnnnnnnnnnnnnnnnnnnnnnnnnnnnnnnnnnnnnnnnnnnnnnnnnnnnnnnnnnnnnnnnnnnnnnnnnnnnnnnnnnnnnaaccattgaactattttaaatagttnggcttttagtnctttgnaaacatntaangggttnaagcatgattncagggtgaatataacancgttagtgtccattcctttcagtacctataantgaaatgtgntgnacggatatttggcaaaggtattgttncagtat

SEQ ID NO: 29524 - DNA, 611 bp, Homo sapiens
  misc_feature (1)...(611): n = a,t,c or g
gtgnnnnnntttgaattcccttntcctgaacccctttnnnnnnnnnnnnnnnnnnnnnnnnnnnnnnnnnnnnnnnnnnnnnnnnnnnnnnnnnnnnnnggcacgagcgnnnnnnnnnnnnnnnnnnnnnnnnnnnnnnnnnnnnnnnnnnnnnnnnnnnnnnnnnnnnnnnnnnnnnnnnnnnnnnnnnnnnnnnnnnnnnnnnnnnnnnnnnnnnnnnnnnnnnnnnnnnnnnnnnnnnnnnnnnnnnnnnnnnnnnnnnnnnnnnnnnnnnnnnnnnacannnnnnnnnnnnnnnnnnnnnnnnnnnnnnnnnnnnnnnnnnnnnnnnnnnnnnnnnnnnnnnnnnnngaggtatatgtagccttttactaatattctcatttctagataggttttatattaggaaaataatcagacaagttcataagcatgttcagaggagatgttctcacagcatttttaaaaatatgaaacactggaagcaaccaatactttgcacaattcaaactatggccagatctacactgctcacataaacggatccctaaacatatttaatgtgaaaataagtantatagtaagatgcattttaataaaaatcntggttt

SEQ ID NO: 29525 - DNA, 487 bp, Homo sapiens
  misc_feature (1)...(487): n = a,t,c or g
tnnnnnnnnnnnnatttgganaccnnnnnnnnnnnnnnnnnnnnnnnnnnnnnnnnnnnnnnnnnnnnnnnnnnnnnnnnnnnnnnnnnnnggcacgagggagtccatgtgaagcttccttccccagcaatgaaatgtagcaatatgtgtgcaatgtttctgtttaggaaggccattagaaatttaacactctnnnnnnnnnnnnnnnnnnnnnnnnnnnnnnnnnnnnnnnnnnnnnnnnnnnnnnnnnnnnnnnnnnnnnnnnnnnnnnnnnnnnnnnnnnnnnnnnnnnnnnnnnngacccagtctctgcnnnnnnnnnnnnnnnnnnnnnnnnnnnnnnnnnnnnnnnnnnnnnnnnnnnnnnnnnnnnttgnnnnnnnnnnnnnnnnnnnnnnnnnnnnnnnnnnnnnnnnnnnnnnnnnnnnnnnnnnnnnnnnnnnnnnnnnnnnnnnnnnnnnnnnnnnnnnnnnnnnnnnnnnnnnnn

SEQ ID NO: 29526 - DNA, 572 bp, Homo sapiens
  misc_feature (1)...(572): n = a,t,c or g
tnnnattgaanntctgaaancctttgacnnnnnnnnnnnnnnnnnnnnnnnnnnnnnnnnnnnnnnnnnnnnnnnnnnnnnnnnnnggcacgagnnnnnnnnnnnnnnnnnnnnnnnnnnnnnnnnnnnnnnnnnnnnnnacttgcagacaaactgcgtaccacagaaatatttttaaaaattaagaaaaaggtatgcnnnnnnnnnnnnnnnnnnnnnnnnnnnnnnnnnnnaaaaaatttttttttaattagtcaggcatggaaaccaagaagcagggagctaaggtgggaagattgnnnnnnnnnnnnnnnnnnnnnnnnnnnnnnnnnnnnnnnnnnnnnnnnnnnnnnnnnnnnnnnnnnnnnnactgtaggaaaggaaaggaataaggaaaaaggaagggaaggggaaaggaaagaggaaagggaaggaaaaaggaaaggcgaaaagaaaaaggaaaggaaaggaagaaaaaaantaaaagaaaatgtggcttttatatggatgcaggattgctttaagaaaggcatagcgctgggcgcagtgctcaatttttctattttttggaa

SEQ ID NO: 29527 - DNA, 578 bp, Homo sapiens
  misc_feature (1)...(578): n = a,t,c or g
tnnnntntnnnatttgaaancnttatganccnnnnnnnnnnnnnnnnnnnnnnnnnnnnnnnnnnnnnnnnnnnnnnnnnnnnnnnnnggcacgagggttttctgataaggatgagataaggtcaggtaaataacttctgataatagatgatgggatttccttttcattcttacctttctttcttttctgtcacatcttgttaggtaattaagacctggattgannnnnnnnnnnnnnnnnnnnnnnnnnnnnnnnnnnnnnnnnnnnnnnnnnnnnnnnnnnnnnnnnnnnnnnnnnnnnnnnnnnnnnnnnnnnnnnnnnnnnnnnnnnnnnnnnnnnnnnnnnnnnnnnnnnnnnnnnnnnnnnnnnnnnnnnnnnnnnnnnnnnnnnnnnnnnnnnnnnnnnnnnnnnnnnnnnnnnnnnnnnnnnnnnnnnnnnnnnnnnnnnnnnnnnnnnnctcttgccactgcactccacctggcgacagagcgagactcaatcttgaaacctggattgagaatggagaacagatccgaaattaaatgtatgcatgtttctggatacataaggnactttt

SEQ ID NO: 29528 - DNA, 475 bp, Homo sapiens
  misc_feature (1)...(475): n = a,t,c or g
nttganncttnnnnnnnnnnnnnnnnnnnnnnnnnnnnnnnnnnnnnnnnnnnnnnnnnnnnnnnnnnnnnnnnnnnnnggcacgagctggaagaattattaaagactcactgtgtcatcaacccttcagctatttttgcttttgaggacacagtgggtctttgatttacaattgtttcctctcaagcctaggccaggctgggcccactctgctttgggtttcaataaccacagggccaacctttaacagatcacctttgtagaacacttccaaaatcaaagaggaaaacagtctaatcattaaacagtgtccagctcttgttgcctactctgttcttcccgccagacctggcccaagcttactgtgagctgttggtctggatctctgtagcttcctgtctcagggcacgaatgagcactgtgtacacggnacaggtcaggcttacacctggtgccaggtggaggggactgttga

SEQ ID NO: 29529 - DNA, 515 bp, Homo sapiens
  misc_feature (1)...(515): n = a,t,c or g
gattagcngntcnnnnnnnnnnnnnnnnnnnnnnnnnnnnnnnnnnnnnnnnnnnnnnnnnnnnnnnnnnnnnnnggcacgaggcctgtgaacaaacagggtctgcagcttggcttcagcttctctttcccttgtcaccagacgggcttggacaggagcaccctcatttcctggaccaaaggttttaggtgcagtggtgtggaaggccaggatgtggtccagctgctgagagatgccattcggaggcagggggcctacaacatcgacgtggttgctgtggtgaacgacacagtgggcaccatgatgggctgtgagccgggggtcaggccgtgtgaggttgggctagttgtagacacgggcaccaacgcnnnnnnnnngnagnangcacggcatgtggcantgctggacgaaaccgnggccgcgtctgcgnnagcgntnntgnggctccttnancgatnatagggcctgngaccaangctgacaccttngaccatnccctggccattaagccctga

SEQ ID NO: 29530 - DNA, 271 bp, Homo sapiens
  misc_feature (1)...(271): n = a,t,c or g
gngnngntnnnttnnnnttnnnttggtcctggcgaccnnnnnnnnnnnnnnnnnnnnnnnnnnnnnnnnnnnnnnnnnnnnnnnnnnnnnnnnnnnnnnnnnnnnggcacgaggctccttcctgtgtactgtcttataactcccttgcctaagctgctcttggtcaaaggaattgggagctcccaggctcctggcctggcagtcagccacctacagtggtagacaagtggccagcccaatatttttttcagnnnnnncactactgggtagg

SEQ ID NO: 29531 - DNA, 458 bp, Homo sapiens
  misc_feature (1)...(458): n = a,t,c or g
anncccactttgnnnnnnnnnnnnnnnnnnnnnnnnnnnnnnnnnnnnnnnnnnnnnnnnnnnnnnnnnnnnnnnnnnggcacgagctgtgcttcatttttcttcacagcactggtcagggattgctgttttagatctgtttatggatgtgccctcctaggaaggaagctctctgagggcacagacattgtccgtctgggtccctgctgtatacnnnnnnnnnnnnnnnnnnnnnnnnnnnnnnnnnnnnnnnnnnnnnnnnngnnnnngaatgaatggcattnccctacccgcagcctcttgctgctatctgaactcactggngactgntactatgccnagnacnttantatatactacttcatttaaccctnccntaaccttatgggatanatactntacctccatncnacngnngaagaanctgnccaccncnangnnnncntnntngnttatag

SEQ ID NO: 29532 - DNA, 500 bp, Homo sapiens
  misc_feature (1)...(500): n = a,t,c or g
tnnnnnnnnttggttgccgaccgnnnnnnnnnnnnnnnnnnnnnnnnnnnnnnnnnnnnnnnnnnnnnnnnnnnnnnnnnnnnnnnnnggcacgagaaaacatctccaaagctgcaaaattcatagtcctttttgataaccactttaagtttattcagcctacgttttgtgcagttaaccaaactcagttcattttaagccagttttctttcatacaggaaatgaggcttgttcagagaatgccttaggggttactggcgactcgtgtgggtagtagagtaaaaactttgggcaactggttaattttatggaaagcaagtcaggattaaacaacatccactaaagatttctttgagatgtttcacatatataccttgagacatttcacacgtataatttacaacaaaaggacgtacagtcttgtaaatagagttgttaattattagtctcctaaaattatatttggcttataattaggttttacatgatactccttgaag

SEQ ID NO: 29533 - DNA, 523 bp, Homo sapiens
  misc_feature (1)...(523): n = a,t,c or g
gnnnnngnnnntnnnnnnnnnttgnttgnannnnnnnnnnnnnnnnnnnnnnnnnnnnnnnnnnnnnnnnnnnnnnnnnnnnnnnnnnnnnnnnnnnnnnnggcacgagataggctatcaatactttcttgacaaatgtggtcttgtctttaggcctaagtttagctttaaaatcagatagaaacatggttcttttatttaccagtctgtttcctggaatgggtccctaattttaaatctccaatccttgcattctgttccccttgtgagagctcaattctcactnnnnnnnnnggaggcagntgctntgngtggtgcaccgancctnatgganggntntagtnagctnaccccggactgccnttnctgntgnttagggcctgntagagctgctnacccaggccnnngtnnnagggtgaaatgacttatcnngacncatacctnttanntgcccgttctgngcangccccannnnggctganttngnnngggcnctnncnnaangggnctgcntnnnanctta

SEQ ID NO: 29534 - DNA, 356 bp, Homo sapiens
  misc_feature (1)...(356): n = a,t,c or g
gnnnntnnnnnnnnnnntttgattnnnnnnnnnnnnnnnnnnnnnnnnnnnnnnnnnnnnnnnnnnnnnnnnnnnnnnnnnnnnnnnnnnnnnnggcacgagattctgttccacccctaaaagttagcatcactacttctgaaaaaactaccaaatggttatgcatctttagtgataaaaagtgaattcctggtatttcttggagaaaaagatattagataatatcccttgactcattatcatcatacaaggaagaaaaagaatctatgtgatcacattgaatatataatctcaaagatactggttttgtttgcttgcttgtttnnnnnnnanatgganncttgntntgnnaccca

SEQ ID NO: 29535 - DNA, 502 bp, Homo sapiens
  misc_feature (1)...(502): n = a,t,c or g
tnnntntnnnnnnatttgnttancnnnnnnnnnnnnnnnnnnnnnnnnnnnnnnnnnnnnnnnnnnnnnnnnnnnnnnnnnnnnnnnnnnnnggcacgagatctaaattcacaaaactgacagcagtcttgcaagtagagaccctgaagctattgttgaagagtcaggatgttgactgagggaagtagtggtcttgaagggcagtcatttcattagtgtttttaataatatctgtggcatagcttatgatattttagagaatgctgtcttatgtgccggactctgagcataactttttacacagatgctatgtaatatttagcatgattataatgttacctacattaaatctcatatgaggaaaccaaggattaattatataattagccaagggtcacatctattagactgtctgactcangagcccaagagttaacctntatgccntattgtgattcancncanacntggncntataattgatntancccactnttntatg

SEQ ID NO: 29536 - DNA, 535 bp, Homo sapiens
  misc_feature (1)...(535): n = a,t,c or g
gngnngntnnttnnnntnnnttgtttgcgaccgtnnnnnnnnnnnnnnnnnnnnnnnnnnnnnnnnnnnnnnnnnnnnnnnnnnnnnnnnnnnnnnnnnggcacgagcgggagttagagcaggcagaaaaatagaccacactgcatgtttccccttgtcctcaatttgtcacttttcagaagaaacttatcacatacctgctgagaaggcagacaggctttagtcaaggagaggtaggtcatacagaagctgttattccaagtaagccggtcatgttggagttctggggtactgctgtctaataagagatttctccaagatggacatgttttatatgtgtaccattcactgcannnnnnnnnnnnnnnnnnnnnnnnnnnnnnnnnnnnnnnnnnnnnnnnnnnnnnnnnnnnnnnnnnnnnnncttaattttaagtagacacttctggccagtgactaccacattggacaggacaatcgggaacaaatttnaccagacccantattttnaaatngggcctatttccggaaatta

SEQ ID NO: 29537 - DNA, 353 bp, Homo sapiens
  misc_feature (1)...(353): n = a,t,c or g
tttgaaancctnnnnnnnnnnnnnnnnnnnnnnnnnnnnnnnnnnnnnnnnnnnnnnnnnnnnnnnnnnnnnnnnnnnnnnnnnnnnnnnnnnnnnnnnnnnnnnnnnnnnnnnnnnnnnnnnnnnnnnnnnnnnnnnnnnnnnnnnnnnnnnnnnnnnnnnnnnnnnnnnnnnnnnnnnnnnnnnnnnnnnnnnnnnnnnnnnnnnnnnnnnnnnnnnnnngtgtgtacacaaggaaggaaatggcaggctgttcatatgcagcaagatccacacttggccaaacctggggtcacagagatggacatggaatcgagggcagaagatctgggtttgagnnnnnnantgcttta

SEQ ID NO: 29538 - DNA, 416 bp, Homo sapiens
  misc_feature (1)...(416): n = a,t,c or g
tnnnttggnnncctttgnannccnnnnnnnnnnnnnnnnnnnnnnnnnnnnnnnnnnnnnnnnnnnnnnnnnnnnnnnnnnnnnnnnnnnnnnggcacgagctcataatgaacatgtaatgaaattcagtaattaacttacttaatttatgtattcatttaatgtgtgcccttaatatctgccttatgatctaagaaaatctctacagttctgttgtttttgattgtaagattctagaagacagggattatgcctaagtagttctatttaccattcactgtgtcacattaataaaactaaatcaggttataattcagaggaatgtaattcttatacaggagattttaacagtttgtaagtactaacatagtttanaaagttctganttnggagcanagngctatagnnctttgggg

SEQ ID NO: 29539 - DNA, 361 bp, Homo sapiens
  misc_feature (1)...(361): n = a,t,c or g
ttgaanncnatnnnnnnnnnnnnnnnnnnnnnnnnnnnnnnnnnnnnnnnnnnnnnnnnnnnnnnnnnnnnnnnnnnnnggcacgaggtgtgatcctagcatccgtggttcaggagatcctgctacattttcctgactgccttgctctgcccgggaatacctggcttatcagcagaatacaggcctctgcttaactgaatttggtcctgtagtgaggactaagaagtgatgtactcagttacatgataattctaaaaaataaaaaaaaagccttttttttttttnnnnnnnccccntnnnaggggnaaantttnaannnngcntnnaaaggggntngnnnggnnnnnaaaannnggggccc

SEQ ID NO: 29540 - DNA, 494 bp, Homo sapiens
  misc_feature (1)...(494): n = a,t,c or g
anncccntttggannccannnnnnnnnnnnnnnnnnnnnnnnnnnnnnnnnnnnnnnnnnnnnnnnnnnnnnnnnnnnnnnnnnnnnnggcacgagaactggaagaatttaagagcaaaaaggggaaaacctgttccccgcccctctctgctccctcattatcttatccatatttagcatgccatagcatttaaaatataaacatgtattcaacacttcctaggtatcagggagtaagctagcactttttacacatattaattcattccatcctcacaacagctgcttgcagtaggttataatattctactttacagatgtggttaagagggtcatgcacaaagccctttcaagtcagcgttggtccttctcacaccactctctccctctgccactaacacataatacataatagcataatgtagtagagttggctgtgtagtgactgcctctgtcctagaatatgagctctccacaggtaggaacagngttta

SEQ ID NO: 29541 - DNA, 449 bp, Homo sapiens
  misc_feature (1)...(449): n = a,t,c or g
ctttgnnnnccnnnnnnnnnnnnnnnnnnnnnnnnnnnnnnnnnnnnnnnnnnnnnnnnnnnnnnnnnnnnnnnnnnnnnnnggcacgagcggcacgagtgacaggactacaactaaaacataaacaacattaatgatgaccataaaaagtcacaaaattgctaaatgttataatttagagttgacataaaaattgnnnnnnnnnnnnnnnnnnnnnnnnnnnnnnnnnnnnnnnnnnnnnnnnnnnnnnnnnnnnnnnnnnnnnnnnnnnnnnnnnnnnnnnnnnnnnnnnnnnnnnnnnnnnnnnnnnnnnnnnnnnnnnnnnnnnnnnnnnnnnnnnnnnnnnnnnnnnnnnnnnnnncccagctactcgtgaggccaaggcaggagaattgcttgagcctgcagcagctgcagtaagccaagatcatgctgtgcctcaaggaaaa

SEQ ID NO: 29542 - DNA, 496 bp, Homo sapiens
  misc_feature (1)...(496): n = a,t,c or g
atttgannccnnnnnnnnnnnnnnnnnnnnnnnnnnnnnnnnnnnnnnnnnnnnnnnnnnnnnnnnnnnnnnnnnnnnnnggcacgaggaaagtgtttgaagtaacttgatgtacttctcaaccagaggatagacttgcggttagccacacaaagctgtcagcttcaaagggcagtgtgtgaagcccactagggagtggttctagcaaactagggagaaacagctttggcagaacctgacattcttcaaacagccttttctctaaaatccttgtgcatggaataccttgagctccttagaggaaagcttgataatgatctaacaaataaatcaagacataccttacccctctccctacaacattaatttaatttaaaactagcatgtctaataggcagcacttttaaagtgcatttctggaatttgtggtttggatctcagtctcctgaaaataatttattttctatctactccatatgtttggacctcagcttgt

SEQ ID NO: 29543 - DNA, 355 bp, Homo sapiens
  misc_feature (1)...(355): n = a,t,c or g
cannnnnnnnnnnnnnnnnnnnnnnnnnnnnnnnnnnnnnnnnnnnnnnnnnnnnnnnnnnnnnnnnnnnnnggcacgagccacagactcagagagaacccaccatggtgctgtctcctgccgacaagaccaacgtcaaggccgcctggggtaaggtcggcgcgcacgctggcgagtatggtgcggaggccctggagaggatgttcctgtccttccccaccaccaagacctacttcccgcacttcgacctgagccacggctctgcccaggttaagggccacggcaagaaggtggccgacgcgctgaccaacnnnnnggngcacgtggacnacatgcccaacgcgctgnncncctg

SEQ ID NO: 29544 - DNA, 495 bp, Homo sapiens
  misc_feature (1)...(495): n = a,t,c or g
nnnnnnnnnnnnnnnnnnnnnnnnnnnnnnnnnnnnnnnnnnnnnnnnnnnnnnnnnnnnnnnnnnnnnnnnggcacgagagatgagcctagaggttcataccgtcaggggctgacacgtggcggtacctccagcgggagccctggatttttaccccctggtctgtctcattccagactctaggacgtttcttcttgcacacctcacttttgacgtgtccttttgtgtctacaaaattagtatgttttatgttcattttcatacttgaaannnnncacatttgtcttaatnctcaaaccacancccaaaactataaacnnaaaannnttncaannncnanattanaaccntttntnaganctnagttncggatngacccntnangggggcngtgntcnnnattgactcnngaagggntggnaagaggnacctgctgnnattgcggntgnngntacagggttttgtgagctncaaggnagacntttccntgnctgg

SEQ ID NO: 29545 - DNA, 445 bp, Homo sapiens
  misc_feature (1)...(445): n = a,t,c or g
cnnnnnnnnnnnnnnnnnnnnnnnnnnnnnnnnnnnnnnnnnnnnnnnnnnnnnnnnnnnnnnnnnnnnnnnggcacgagtatgaactaaactgnnnnnnnnnnnnnnnnnnnnnnnnnnnnnnnnnnnnnnnnnnnnnnnnnnnnnnnnnnnnnnnnnnnnnnnnnnnnnnnnnnnnnnnnnnnnnnnnnnnnnnnnnnnnnnnnnnnnnnnnnnnnnnnnnnnnnnnnnnnnnnnnnnnnnnnnnnnnnnnnnnnnnnnnnnnnnnnnnnnnnnnnnnnnnnnnnnnnnnnnnnnnnnnnnnnnnnnnnnnnnnnnnnnnnnnnnnnnnnnnnnnnnnnnnnnnnnnnnnnnnnnnnnnnnnnnnnnnnnnnnnnnnnnnnnnnnganatnaancnggnggggancangtnnttnaggttggaccccancantttgggagccc

SEQ ID NO: 29546 - DNA, 457 bp, Homo sapiens
  misc_feature (1)...(457): n = a,t,c or g
tttgantgccattnnnnnnnnnnnnnnnnnnnnnnnnnnnnnnnnnnnnnnnnnnnnnnnnnnnnnnnnnnnnnnnnnnnggcacgaggacctctgggtgcctgcaggggagctgctccagccgggccgccgggagcggtggggagagcatcgcggagccgcccctccacgcgcccgcccagccgcgctcgcccactgggctctcccggctgcagtgccagggcgcaggacgcggccgatctcccgctcccgccacctccgccaccatgctgctcccccagntntgctggctgccgctgctcgctgggctggtccgccggtgcccgctnanaaagtttcggngctcacgtttttgaaagtggatcaagattaagacaaggattgtaacttggactgngccggntttccccaaaaacctttttggccttttnacgaangaccttcntttccgtgggaa

SEQ ID NO: 29547 - DNA, 410 bp, Homo sapiens
  misc_feature (1)...(410): n = a,t,c or g
antcccntatttgatnccnnnnnnnnnnnnnnnnnnnnnnnnnnnnnnnnnnnnnnnnnnnnnnnnnnnnnnnnnnnnnnnnnnnnnnnggcacgagaaatgataggtatcccgagatacgaaataggggggatttagagttgagggccagggaagtgttcccagtgaaaaggatgtgtgagcagagatctgagggcccaggaggagtacccaggtacagaggcagnnnnnnnnntttacatttantcntnnctccttttnttttaatgtngnatactatttannantttattnaccttgntggnnaacngatggtanngatccttangactggagnngccgaanntncngnctctggatnnttgnatntcacnttnggtcattccnnggttgnctgggnnncnngggcc

SEQ ID NO: 29548 - DNA, 506 bp, Homo sapiens
  misc_feature (1)...(506): n = a,t,c or g
ttatnttntnatatnngnattnnattcccttgnnnnnnnnnnnnnnnnnnnnnnnnnnnnnnnnnnnnnnnnnnnnnnnnnnnnnnnnnnnnnnnnnnggcacgagggaacgtggtctttagtaataacggcattatttcttagattggaatatccttgaaggtggtggatatggggcaggtttggggtggtgtcttacctgggtattcccaggaatatgaccatgtgactatgcatacatcaaggatgtgccctaaatttcccaaaacttagacattttaaatttttctttcaaaaaacataattgaaccatttttaaatttatttatttgcagtaattagaatcaatcacttccattcatttgttgaaaagtattagacataaataattgccaggtagaacaatagtaaatgtggtttttatgcagctatcgaaatgatcatagctttgtatttattatcttatttgttaaaatcagatttttttccttcacgggtattaatcc

SEQ ID NO: 29549 - DNA, 502 bp, Homo sapiens
  misc_feature (1)...(502): n = a,t,c or g
tntttgatttnaatccctnnnnnnnnnnnnnnnnnnnnnnnnnnnnnnnnnnnnnnnnnnnnnnnnnnnnnnnnnnnnnnnnnnnggcacgagcggcacgagctatttggcactttatctcagagcaagaagagaaagagcaggctgtctctttgagaagacccttgtccttcgtgctaaagttagcatgtgctgcctcttcctgtctggatataagactaagctttatttcaaaactgaaccctctagcagctgcataccagtttaccttaatatccttagtacttggtgtcttaacatcctcatactaccttgctcctttggcctcaaagtaagcatattggctggcttatatttcttaacaaaattagcagtacacaaattgaagaattttcatctttgattacaaaagtctgcgcatgtgcttgtactctgagatggtaatagattcttctgataaagttattgctgcctttccacagttcctgttcatttggatggc

SEQ ID NO: 29550 - DNA, 515 bp, Homo sapiens
  misc_feature (1)...(515): n = a,t,c or g
gnnggaatttntgttntaacnncantagattnctttccatacncnnnnnnnnnnnnnnnnnnnnnnnnnnnnnnnnnnnnnnnnnnnnnnnnnnnnnnnnnggcacgagcacgtttgctgtcctcgtttgaatatggaatatattttgtcagattaaagcagtgaggatgtttctgatctgttctttaagatgccataactgcttctcttccagagcttttcttcatggaggtgtctcatttcattatctgtgaagaactctagcaattaaggcatttgtccaagtgatgagctttatgtttctcctgtctggggtgcttgcctctttggtatccatgtgctctgatggttctgttcctggttccattgctcctttatcctgattaaaacctaaggttccagggagtcnaagttcaagttcatacacagataagagcttggaagggctgcttgtttgactacagcctgctcctttctcctttctcggaccttggaaagggtccagntaacacaga

SEQ ID NO: 29551 - DNA, 514 bp, Homo sapiens
  misc_feature (1)...(514): n = a,t,c or g
tnnnntnnnntatttgatntnatnccntnnnnnnnnnnnnnnnnnnnnnnnnnnnnnnnnnnnnnnnnnnnnnnnnnnnnnnnnnnnnnnnnnnnggcacgagtataattctgttcctataacatgaccagagtgggtagctctatagagacagtagagtggtgttccgctaggactgggagtttggagtcatggagactgtgaatgggtatgaggtttccttttgggatgatgaaaatattctaagatcatggtgatggttgcacagttctattcaagtgtatactttcaatggatggagtttatggttatgtgattatatgtcaataaagatgttagaaaaatagactgcataagccactatgaacaacgctccatttttaggtattttgtagttctgagcatttcataaaatgacatatatatgtgtatcagagatgctcaaaacacttcaaatgaaaactggctgctttaggagttttccatatagtgtggaatccctgctttctcaggc

SEQ ID NO: 29552 - DNA, 512 bp, Homo sapiens
  misc_feature (1)...(512): n = a,t,c or g
tnnnnttnnnntntttgatacnngantcccntnnnnnnnnnnnnnnnnnnnnnnnnnnnnnnnnnnnnnnnnnnnnnnnnnnnnnnnnnnnnnnnnnnnggcacgagaccacagtgtgtccacttacctgttgatgaccctttagatttttgtaagatgccgagagagttagaagtatgagatttatgagagagaagaccttgaaagaaaccaggagagtgaggaggccgggcagggaaggttgccagaactacaggtgaggacgacgcagctctgggagcgttggccagcgcagcgggacattctagccttgtgttgggttgtgaaggccagaccctaggccccggccagggagagcacgggctgcccaagtgctgcgcagatcccagcagtactccacagggctgtcagctcagcggcaactcctgggaggtccttgcttgaagggaggtttgagtggtgggcctcctggctgccaagaagaaagctacagtaaacgtgtgtgtaggctg

SEQ ID NO: 29553 - DNA, 505 bp, Homo sapiens
  misc_feature (1)...(505): n = a,t,c or g
tnnnnnntttgaattcgatnccctgctatgacnnnnnnnnnnnnnnnnnnnnnnnnnnnnnnnnnnnnnnnnnnnnnnnnnnnnnnnnnnggcacgagnnnnnnnnnnnnnnnnnnnnnnnnnnnnnnnnnnnnnnnnnnnnnnnnnnnnnnnnnnnnnnnnnnnnnnnnnnnnnnnnnnnnnnnnnnnnnnnnnnnnnnnnnnnnnnnnnnnnnnnnnnnnnnnnnnnnnatcatcgttattttatacactgggagaggagatgatgccctcttgtcttgccgtttttttcaactatttagtaaagttgtaggtaaaataaaaagtatacttggttagtattttacgtaatttaaatactggatgtaggcatctgttctagtattaaagttttaggtatgttagtaacaagaaagttttcccaatatttttattagtctttttttttttttnngnnggcnagtttngttttgccccnaggntgaagtgcaggggccaatntggg

SEQ ID NO: 29554 - DNA, 512 bp, Homo sapiens
  misc_feature (1)...(512): n = a,t,c or g
tnnnntnnnnnnatttgaantccangccnnnnnnnnnnnnnnnnnnnnnnnnnnnnnnnnnnnnnnnnnnnnnnnnnnnnnnnnnnnnnnnnggnnnnnnnnnnnnnnnnnnnnnnnnnnnnnnnnnnnnnnnnnnnnnnnnnnnnnnnnnnnnnnnnnnnnnnnnnnnnnnnnnnnnnnnnnnnnnnnnnnnnnnnnnnnnnnnnnnnnnnnnnnnnnnnnnnnnnnnnnnnnnnnnnnnnnnnnnnnnnnnnnnnnnnnnnnnnnnnnnnnnnnnnnnnnnnnnnnnnnnnnnnnnnnnnnnnnnnnnnnnnnnnnnnnnnnnnnnnnnnnnnnnnnnnnnnnnnnnnnnnnnnnnnnnnnnnnnnnnnnaggctgtttattattattatttgctaattatttatacctatgtttncttttaaaattttacagntttaattcctttttttaaatttttgttagnnngtttgntgtttattttgagacaggatctcactctgcatccaggc

SEQ ID NO: 29555 - DNA, 515 bp, Homo sapiens
  misc_feature (1)...(515): n = a,t,c or g
tnnnnntnntttgaatttnaatncccctnnnnnnnnnnnnnnnnnnnnnnnnnnnnnnnnnnnnnnnnnnnnnnnnnnnnnnnnnnnnnnnnnnnggcacgagtagggctcggcgtggggaacgcgcaacaatgagcagaaaaggtttcttcctcacctctcccaaaacattcatggaaatggagtctgaagaggtgtggagcacagatcagataaactaaaagtatccttaaggaactggagcacacagtgactccagcgcagatgccaaatgcagacaatgggctggcaaggctgggaaggagctggccacgaacactccgagggaaccagaggtgattacccatgcacttggggaatttggagaagcaggacaaagaaagcactacaaagccagttgcttccttgaaattttgtcaaaacatccatgtggaagccaaggcctacactattctaagtttgttctttccaagcttaaaaaagtgaaacaagcaaaagctagagtcaaaacaaat

SEQ ID NO: 29556 - DNA, 510 bp, Homo sapiens
  misc_feature (1)...(510): n = a,t,c or g
tnnnnttnnnaaatnttgatttccatnccntnnnnnnnnnnnnnnnnnnnnnnnnnnnnnnnnnnnnnnnnnnnnnnnnnnnnnnnnnnnnnnggcacgagacacaaaatcagggttgtctgcgccaccgaagggcagcccagcgcctgctgtgttggcagaagaggccagagcagaggggcagctgcaagccagtcctcctggggcggcagaggggcatctggaaaaacccgtgccagagccccagcgcaaggcggcccctcccctgcccagaaaggaaacctcagggacgcagggaatagaaggccacctgaagggtggacaggcaatcgtggaagatcagataccaccaagcaatttggagacagttcctgttgagaataaccacggtttccatgaaaagacagcagcgctgaagcttgaggccgagggcgaggccatggaagatgcagcccgcgccaggggacgaccgaggcggcacacaggagccagccccagtgcctgttagcc

SEQ ID NO: 29557 - DNA, 504 bp, Homo sapiens
  misc_feature (1)...(504): n = a,t,c or g
nntnnnaatattngattngattccnntnnnnnnnnnnnnnnnnnnnnnnnnnnnnnnnnnnnnnnnnnnnnnnnnnnnnnnnnnnnnnnnnnnnggcacgannnnnnnnnnnnnnnnnnnnnnnnnnnnnnnnnnnnnnnnnnnnnnnnnnnnnnnnnnnnnnnnnnnnnnnnnnnnnnnnnnnnnnnnnnnnnnnnnnnnnnnngtttatgtaattatgctgtctcatgttttatctgagaccaaaaatgtttaaattttttcatttatgttgacttttgttttcatagggtatttaaaataatttccatttaaagtcttaaaaatttacacttatataattattttaaacttatttgagttaaataagcttaaagattaaatatcttttccttaccgtttggcctaagatgaagcctagtgtcannggttnttagtanaaagtgangaatatggcgaaaagaanagaattanccattaccacttangatattgtcagggaac

SEQ ID NO: 29558 - DNA, 507 bp, Homo sapiens
  misc_feature (1)...(507): n = a,t,c or g
tnnnnttnnnnnatttgatttccattncccnnnnnnnnnnnnnnnnnnnnnnnnnnnnnnnnnnnnnnnnnnnnnnnnnnnnnnnnnnnnnnnnnnnnggcacgagatttaatctaagcggtcagcaagacttcttataaaagctggtctacgtacactgagatcaaaccccacaatcccatggtgtttctgctcctgccctagcaagcctgggtcgacttgtcccggggcagccgcggcagcgcagcgtggacgggcccggacacccggtgcctgcccagccagcgacgctgaaggcacatttcaagagggaaatagttcagtcctcggtaatttgtcaacctcgtgctggctttaaaattctcctcccaccttctagtcctgactgagggggcccaaaagcaaactccccgggggcttaaacgctcggattcctgagaaacggcaagtgagaaaggagttgcagttgtcgaagaaggagcgaggaaaaggtgtttgtggagggac

SEQ ID NO: 29559 - DNA, 509 bp, Homo sapiens
  misc_feature (1)...(509): n = a,t,c or g
tnnnntnnnnnnatttggattccangcccnnnnnnnnnnnnnnnnnnnnnnnnnnnnnnnnnnnnnnnnnnnnnnnnnnnnnnnnnnnnnnnggcacgagaaaaattattcactcatttcttcatgtttgttgcctatcatgtgccagaaagtgttctaattgctggtgaaacagaagtaatgagacagacgatgtttctgtcctcgtggaacttacattatttaaggaaagctggtttagcaaataaataaatgagaacatgaacctagaacacaagaacatgaacatgaataagaacaggaacatgggnnnnnnnnnnnnnnnnnnnnnnnnnnnnnnnnnnnnnnnnnnnnnnnnnnnnnnnnnnnnnnnnnnnnnnnnnnnnnnnnnnnnnnnnnnnnnnnnnnnnnnnnnnnnnnnnnnnnnnnnnnnnnnnnnnnnnnnnnnnnnnnnnnnnnnnnnnnnnnnnnnnnnnnnnnnnnnnnnnnnnnnnnnnnnnnnnnnnnnn

SEQ ID NO: 29560 - DNA, 525 bp, Homo sapiens
  misc_feature (1)...(525): n = a,t,c or g
tnnnntntttgntttgannccttnnnnnnnnnnnnnnnnnnnnnnnnnnnnnnnnnnnnnnnnnnnnnnnnnnnnnnnnnnnnnnnnnnnnggcacgaggggattaggcatgaactaccatgcccaggggggtattctctttcaataaagctcctcttttccaaggaagccacaccagaacagagatgaagaccagtgggaaaacatgggagcaactccgtgggcaggccagcggggaggccatgctgcaaagctgccgtgattccctggtgatctctcagcaggccaaggccagacatgtgagaaaggccttgaggacttcattctgtgcctctccttggatggaagggggtgctttagtgtggcactcctgacttttcaattgactggagaagaggcccttgtgtgcacctcactatgtctgcctaggtcatgggggctccctggccaagaatgacgtggttccccctttcatcagtccgattcgcagtttgcttaactgtagtggtatagccagacaagaaa

SEQ ID NO: 29561 - DNA, 470 bp, Homo sapiens
  misc_feature (1)...(470): n = a,t,c or g
tnnnnnntttganttcgannccnnnnnnnnnnnnnnnnnnnnnnnnnnnnnnnnnnnnnnnnnnnnnnnnnnnnnnnnnnnnnnnnnnnnnnnggcacgagagaagttaaggtgataatattctgactttggatataaacactcaaacatgagctctgctactggaaagtaaaaaataaaattagtgttaagttgagatgagtcaacttgttgatcatctgcctagcctactgtgataggaatggttgtaagacttggaagtttttccttcctaagttgataagcatttgagtggaaagaaagtcacttttctcttgatgttttttcactttggaattttcagactgtttaaagtcttttaaaattttctgagtcacttctttattttctaggctgctcatattannagaagnattgcctttttatcctttanaatgnannaccctnatntttannggnngccctgctta

SEQ ID NO: 29562 - DNA, 529 bp, Homo sapiens
  misc_feature (1)...(529): n = a,t,c or g
tnntnttccctctttgantcnnnataccctttnnnnnnnnnnnnnnnnnnnnnnnnnnnnnnnnnnnnnnnnnnnnnnnnnnnnnnnnnnnnnnggcacgagaaagggagtgagggaggagagatgagtggctattccagaacgacataaagaatttccagccttggacggacagctgggaacgtcttccaatttggactggtgtttacaagcgggaagctaggtggaccttggattttggcgggtgaagaggctaggttgtttaaggaggtggggcgcgtttcagtggctctctttgaaaaagcccagcaagatgtcagacctgctctcagtcttcctccacctcctccttctcttcaagttggttgccccggtgacctttngccaccaccgntatgatgatcttgtgcggacgctgtacaaggtgcaaaacgaatgccccggcatnacncgggtctacagcattgggcgcantgtggaggggagacacctctacgtgctggagttcagngaccaccctggaatccac

SEQ ID NO: 29563 - DNA, 524 bp, Homo sapiens
  misc_feature (1)...(524): n = a,t,c or g
tnntntnttgatttgantccatnnnnnnnnnnnnnnnnnnnnnnnnnnnnnnnnnnnnnnnnnnnnnnnnnnnnnnnnnnnnnnnnnnnnggcacgagaagtttgaagggatgaagaaaagcgctaatgggagagaccctatacttacaaacccaccttgaaggggttaggggttacttcccacctgccagcaccttccctgctctgaggaaacaggaaacctgatggctgggggcttcagggctctggggacagctaccgtttgcggcctgtctgcctggctgatgtctgtgcctgtctgcagctgaaggcccacttaggacaacaaaatccagccaagccggntggctggngctgantggggccttttggcttcaggtgactttgtggcttcggccttgggtaaagggagtggngggccatgtgtggagccctctggaaggtctggactcctgcttttccttgnctcttctngttctncaaccacccccaaggttcagcaaantcttgggcgcgtttactcc

SEQ ID NO: 29564 - DNA, 522 bp, Homo sapiens
  misc_feature (1)...(522): n = a,t,c or g
tttggantccgatnacnnnnnnnnnnnnnnnnnnnnnnnnnnnnnnnnnnnnnnnnnnnnnnnnnnnnnnnnnnnnnnnnnnggcacgagctagatgttgtatgggaagagggaggtagaaaagttaaggaatcctcattattaaggcaaaacaaatttaagagtttttttgtttctttgatgggaagaaaagcttaaagattgtttttagtataatagtgatactcattgacttatcagaagcattaaatatcaacagttatgatactgctgtgagaaaaactaattccatgaaataattgccaaggatataactggtgaggctaattgtagctgtggttaataagagaaagcataaacctagggcattgtgagagctcagaaacaggaagatgtttgcattagtgttatgcaagttcaaaatgaggaatcatttttttttctgtatagaacaatatgtttgtgtagcaccctacctctctactttttctcttggtattcctaaacatgtcctgcccctta

SEQ ID NO: 29565 - DNA, 478 bp, Homo sapiens
  misc_feature (1)...(478): n = a,t,c or g
tttgaanccctntttgaancccctnnnnnnnnnnnnnnnnnnnnnnnnnnnnnnnnnnnnnnnnnnnnnnnnnnnnnnnnnnnnnnnnnnnggcacgaggaagactgtaaggcctgcggtgggccgtcggcctagagctcctcctcgggcagccgctcagcgaggccagagtgaagagcggcatttgggctggcgagtcggtagaggaaatgcaggtggagcgggtgtgtggctcggccttggcaggaggcgtgggggcagtgagcacagggacaggaagctggcagggagctaggagacccgcacggtggcacctttggnnnnnnnccacggaccccgagaaaacctttcagcacaaaaacagcttcgtccaaccttgtgccggaaacaggccaactccagtaaggntttcagtgcccgaaggccgtngccaggaaaacccanncacccttaaganncccgcttaaaacttgcgggg

SEQ ID NO: 29566 - DNA, 467 bp, Homo sapiens
  misc_feature (1)...(467): n = a,t,c or g
anncccnattgganncccnnnnnnnnnnnnnnnnnnnnnnnnnnnnnnnnnnnnnnnnnnnnnnnnnnnnnnnnnnnnnnnnnnnnnnnnnnnnnnnnnnnnnnnnnnnnnnnnnnnnnnnnnnnnnnnnnnnnnnnnnnnnnnnnnnnnnnnnnnnnnnnnnnnnnnnnnnnnnnnnnnnnnnnnnnnnnnnnnnnnnnnnnnnnnnnnnnnnnnnnnnnnnnnnnnnnnnnnnnnnnnnnnnnnnnnnnnnnnnnnnnnnnnnnnnnnnnnnnnnnnnnnnnnnnnnnnnnnntannnnnnngaaaaaaagcaaagaatgagactttggagttagacaacttggatttgaactctngcttttgcccttgaaaagtgggggaactttggctagtatttggncctttgagttaagttcctntctggtaaaaaggggataatttaagacccacatncataggggctgg

SEQ ID NO: 29567 - DNA, 491 bp, Homo sapiens
  misc_feature (1)...(491): n = a,t,c or g
gaanncccagttnnnnnnnnnnnnnnnnnnnnnnnnnnnnnnnnnnnnnnnnnnnnnnnnnnnnnnnnnnnnnnnnggcacgaggactgcacaagtgctttttttggaaacaaccatcatacttcagtatgtaacagaggtgctttatgtgtacatctcattttgtcgtgcagaatattaaaaagacaggtaccaaagggtcaagatttaatataattttactgctttttcaaggacactgttaagtagaaacagctcttttcccactgtgaatgcatggtagtaaagaatacagtgacttaccactcagtttgtaactactggtttttgattcatgcnnnnnngtgccgagctacaagttttccctaccattggctttgcacccttagtccaaatgggaacntttgtggaaaaggcaaatgataactttaanattgctatgaaantcggtttgacctcttgaaacccctgaaaanaatttgggaaacccc

SEQ ID NO: 29568 - DNA, 467 bp, Homo sapiens
  misc_feature (1)...(467): n = a,t,c or g
ttgnantcccttntttganncnctnnnnnnnnnnnnnnnnnnnnnnnnnnnnnnnnnnnnnnnnnnnnnnnnnnnnnnnnnnnnnnnnnnnggcacgagcggcacgagnnnnnnnnnnnnnnnnnnnnnnnnnnnnnnnnnnnnnnnnnnnnnnnnnnnnnnnnnnnnnnnnnnnnnnnnnnnnnnnnnnnnnnnnnnnnnnnnnnnnnnnnnnnnnnnnnnnnnnnnnnnnnnnnnnnnnnnnnnnnnnnnnnnnnnnnnnnnnnnnnnnnnnnnnnnnnnnnnnnnnnnnnnnnnnnnnnnnnnnnnnnnnnnnnnnnnnnnnnnnnnnnnnnnnnnnnnnnnnnnnnnncctggccgttaaancagaattcattttcaaaaaaccacntttccttnttaaaatnncctantnttttgntggganattcnttttnaaancccattaaannntggggnaagggatt

SEQ ID NO: 29569 - DNA, 465 bp, Homo sapiens
  misc_feature (1)...(465): n = a,t,c or g
tttganncccnnnnnnnnnnnnnnnnnnnnnnnnnnnnnnnnnnnnnnnnnnnnnnnnnnnnnnnnnnnnnnnnnnnnggcacgannnnnnnnnnnnnnnnnnnnnnnnnnnnnnnnnnnnnnnnnnnnnnnnnnnnnnnnnnnnnnnnnnnnnnnnnnnnnnnnnnnnnnnnnnnnnnnnnnnnnnnnnnnnnnnnnnnnnnnnnnnnnnnnnnnnnnnnnngaaggggggaaaataaaagataattcttgagataagaaattatttagtcattcaggccttttggttccatataggtaaactgtaaatcatggtaaattaagattagcatgggaactttatttattcacacacatttctggcctgtacaatgtgctgggccacagccctagnaagccatgggggaagtaggcacttaggcctccgnttttactanntttttggccaaagggaagnttgggggt

SEQ ID NO: 29570 - DNA, 426 bp, Homo sapiens
  misc_feature (1)...(426): n = a,t,c or g
ccnncnnnnnnnnnnnnnnnnnnnnnnnnnnnnnnnnnnnnnnnnnnnnnnnnnnnnnnnnnnnnnnnnnnnnnnnggcacgagctggtctctaaggtctcttccaataagtggaaataaaatgatgctctagccaaggaaatcatgagagtatttgagtagagatccccatatctacaaatcacctgtgtatagtccagcgaatttagcagatgcaagctgaagggaagaacaagataaacttcccaactggatcacagaagcaggagcccagtggcccagcactgattacaatataggcctgagtggtagtgtctacagaatcnnnnnnnnnnnnnnnnnnnnnnnnnnnnnnnnnnnnnnnnnnnnnnnnnnnnnnnnnnnnnnnnnnnnnnnnnnnnnncgaggttttgcttaaaaaaaaaa

SEQ ID NO: 29571 - DNA, 470 bp, Homo sapiens
  misc_feature (1)...(470): n = a,t,c or g
ttgaatccntnatttganccccnnnnnnnnnnnnnnnnnnnnnnnnnnnnnnnnnnnnnnnnnnnnnnnnnnnnnnnnnnnnnnnnnnnnggcacgagaagtcatgaacacgttccctggcttcagttcccctctctgtataatgagggttagactagacaaaagtctgtttgttccctcgcatggtgggagccatcccagcatacacccgcaaaacccagcacctcgtgcgtgcaaattgaggagcgtccttcgccagaggacttaagatgttctcccaaatagtggttattaagaaacagaaagaaaatctgtttctttagtaaatatttaaataaatcatcttgagtgggtagttaaactananatatattcagttactgctcatggaaccatttaacgttccatggatctgagtcttgctggtcnantattaaacnttttggggctccaaagnggataaaagggga

SEQ ID NO: 29572 - DNA, 538 bp, Homo sapiens
  misc_feature (1)...(538): n = a,t,c or g
gnnnnntnnnnnttnnnnnttggaaattcganacngcttgacnnnnnnnnnnnnnnnnnnnnnnnnnnnnnnnnnnnnnnnnnnnnnnnnnnnnnnnnnnggcacgaggtagatgaacatgaatgtactaatataccatttcaatttaatacattctaatttttaagacatttaaaaatattgtattctgttattgatctagttatttgaaaattgggcagaagttgaagcagtttttggctcaccaagaaaatgtcctaagaatcaactagtgagattaaaatatgcaaggtgcaggtctagcttgatacatctgtttcaaaattctcacctagtatgatttaaagggatgcctatgtagaaagttttcactcccattctgaagtatcattcacaatcattattttgtgttactgttgctcttctcagacattttctttaaattatgaaaactctctggtgtgggaaatgctatgggcaggggagcagtaacagttgagttagtcttagtgacagatggcttttttttttcgtccca

SEQ ID NO: 29573 - DNA, 537 bp, Homo sapiens
  misc_feature (1)...(537): n = a,t,c or g
ttnnnnnnnnaaatttgaanaccgntnnnnnnnnnnnnnnnnnnnnnnnnnnnnnnnnnnnnnnnnnnnnnnnnnnnnnnnnnnnnnnnggcacgagaaaataagacaataatagttaatttttaggtccaaaatgtatttattttccatatgcttaaaggcagtgtatttcctaaaagactagtttcaaaccagtgtattaagacacattggcatatgaattagtgggagaatcaagatttggaacattgtaggcaactcgagcttgtcacatgatagctggtggccccacagtcatgccatgtgataaatccatgtaggcaacaacaacaaaaaaacccatacggcctgcattctgcctcttgacatccacaaagcacttggatattggaacactgctaacaaaaacctgtgggtctacataggcttgccaacagaagcagcagaagtagccagagtataacctctgccttacttccttctacctttctcttcttgcattctactgtctgaatctaagtcagtgtgggaactctc

SEQ ID NO: 29574 - DNA, 411 bp, Homo sapiens
  misc_feature (1)...(411): n = a,t,c or g
tnnttnctnttgganctctgnntccncnnnnnnnnnnnnnnnnnnnnnnnnnnnnnnnnnnnnnnnnnnnnnnnnnnnnnnnnnnggcacgagaagataactcatgaaaacacatgcaaaattcctcaacaaaagagtagcaaattgaattcagcaatataaaaaaatcataacaaatggggtttatcctgggagtacaaatctatttcaacttttgaaaaatcaatttaattcagcttatcaacagcgtaaagaaaaaaaaagacatttgatcatcttaatagatgcagaacaaacatttgacaaaatttaacatccagttttgataaaatctctctgcaatctaggaaaaaacaaaaggaactttctctgcctgacaaagggcatctataaaaacaaaacagaaaaact

SEQ ID NO: 29575 - DNA, 397 bp, Homo sapiens
  misc_feature (1)...(397): n = a,t,c or g
ntttgganccttggctncnnnnnnnnnnnnnnnnnnnnnnnnnnnnnnnnnnnnnnnnnnnnnnnnnnnnnnnnnnnnnnggcacgagtgtcagacagtgttggctgtaggcagagcgggcctcctgtcttgcagtcgggccgcgtggatctgattgtcttgctcaggagagagagaagattgccgtccctagcatgcacttgagtcaagcctctggaatttcaactcctgctccctgctctattccaactgcttcccccaggaaggggggacgaggcggaggaagtcgctctcttgacacccctagaacataaggcatnnnnnnnnnnnnnnnnnnnnnnnnnnnnnnnnnnnnnnnnnnnnnnnnnnnnnnnnnnnnnnnnnnnnnnnnnnnnnn

SEQ ID NO: 29576 - DNA, 392 bp, Homo sapiens
  misc_feature (1)...(392): n = a,t,c or g
cctttgaancnttgactccnctgattacgaatttaatacgactcnnnnnnnnnnnnnnnnnnnnnnnnnnnnnnnnnnggcacgagcggcacgagggtggcacacgcctatagtcccagctannnnnnnnnnnnnnnnnnnnnnnnnnnnnnnnnnnnnnnnnnnnnnnnnnnnnnnnnnnnnnnnnnnnnnnnnnnnnnnnnnnnnnnnnnnnnnnnnnnnnnnnnnnnnnnnnnnnnnnnnnnnnnnnnnncaatacaatttacaatagcttcataaaagactagtccctaagaataaatcttatgaaagtttgtaggacctctatactagaagctgtcagaagttgggaaaaaataaagatgacctaaattaatggaaaaatacacaat

SEQ ID NO: 29577 - DNA, 405 bp, Homo sapiens
  misc_feature (1)...(405): n = a,t,c or g
tnncttttgaanctnttgaanccctnnnnnnnnnnnnnnnnnnnnnnnnnnnnnnnnnnnnnnnnnnnnnnnnnnnnnnnnnnnnnnnnnnnnnggcacgagctgggaagaggatcccttggctggtataattccacgtacccttcatcaaatttttgagaaacttactgataatggtactgaattttcagtcaaagtgtctctgttggagatctataatgaagagctttttgatcttcttaatccatcatctgatgtttctgagagactacagatgtttgatgatccccgtaacaagagaggagtgataattaaaggtttagaagaaattacagtacacaacaaggatgaagtctatcaaattttagaaaagggggcagcaaaaaggacaactgcagctactct

SEQ ID NO: 29578 - DNA, 408 bp, Homo sapiens
  misc_feature (1)...(408): n = a,t,c or g
tnnnnnnnttncctttgaancnccngaancccttnnnnnnnnnnnnnnnnnnnnnnnnnnnnnnnnnnnnnnnnnnnnnnnnnnnnnnnnnnnnnnnnnnnnggcacgagtagccatattttctttctcaagacctacatcaatatctcaaattgttctttttttcatgtcctcagaatacttttacctggcagcaaagcactttatgaggatttagaatgagcaagatgtgttgtggccagagaagcagatctcagccactgcctcacaaaaataattttaaggcaatgtagacctggaggctgaaaatggatttctttaaaaccgtcagtactcaggcctcacgtgcgtctagcggtactcccctgtttggagactgctgtcttagggtaatcagaggcatgattg

SEQ ID NO: 29579 - DNA, 403 bp, Homo sapiens
  misc_feature (1)...(403): n = a,t,c or g
atnnnccttttgaancnttgactcccncnnnnnnnnnnnnnnnnnnnnnnnnnnnnnnnnnnnnnnnnnnnnnnnnnnnnnnnnnnggcacgaggttacaggagtctctttcccccatgaggtaagaaactatggagcagtcctgtaatgtaagcacaggcggtgttgataaccgaccctggcattggaataaagagaaaactgacttccacagggagatgacgtgctgcgctgtggcagcagatcttgtgcagaatccgccgtcagcagggaccacctggtctctcggttacaggacctacagcagcaggtcagagtggcccagaagcttctcagagatggtgaactaggtgagactggctccctgctttggtcctccagccccttcccttttatttgttct

SEQ ID NO: 29580 - DNA, 394 bp, Homo sapiens
  misc_feature (1)...(394): n = a,t,c or g
ctttgaanccttngctccnacnnnnnnnnnnnnnnnnnnnnnnnnnnnnnnnnnnnnnnnnnnnnnnnnnnnnnnnnnnggcacgagattaaatacgttgataatgttgtgcagccatcatccgtctccataactcttttcatcttgtaaagctggaggtttttacctgttaaacaataactccacttctcccagccctgggcatccattattctacttnnnnnnnnnnnnnnnnnnnnnnnnnnnnnnnnnnnnnnnnnnnnnnnnnnnnnnnnnnnnnnnnnnnnnnnnnnnnnnnnnnnnnnnnnnnnnnnnnnnnnnnnnnnnnnnnnnnnnnnnnnnnnnnnnnnnnnnnnnnnnnnnnnnnnnnnnnnnnnnnctcatcatatggctg

SEQ ID NO: 29581 - DNA, 496 bp, Homo sapiens
  misc_feature (1)...(496): n = a,t,c or g
ttttgannccntttgaatccatnnnnnnnnnnnnnnnnnnnnnnnnnnnnnnnnnnnnnnnnnnnnnnnnnnnnnnnnnnnnnnnnnnnnggcacgagctggaagcagccacatggagacccctgggaaaaggaattcatggtgctgtcatagccacagggccacggggagctgtggggcctatcagtcacctgccctgccaagatggatgacagattgggggtccacacgggggctgctccaggtgagcacatggtctccctgtcacagagcccaggtgcaggctgattaagacatgggctgcaggggcctgtctcatcccaccacgcttgtctagggagatctctgagtgcaggagagatggcggggacagcccaagatagtgctggggtcaggggaagcggagcaggtaagcagagaggaggctagccctctgcacaaggctgtcagatcctttccttacccagagacacgacacgtccatgcctgccccggg

SEQ ID NO: 29582 - DNA, 530 bp, Homo sapiens
  misc_feature (1)...(530): n = a,t,c or g
tntntnctnttanancccttnnnnnnnnnnnnnnnnnnnnnnnnnnnnnnnnnnnnnnnnnnnnnnnnnnnnnnnnnnnnnnnnnnggcacgaggagagagctagcaccaagcttaataccctgatatttttgaagaatagatgatttagaaaagagagaagagagcttcagacaaatgattggaaacgtttttaggaatttcccaaatgtcatatttaacgctatattacaacttatgacatttccatactctttctttaataaaataaaactttatttaaacatccactttaagtattaatgattcaaaaataactcagaagatatgagacagagaataccaatgaagtcaatagcaaaactcagaagatatgagacaaagaataccaacgaagtcaatagcaaaactcagtcaaccccagtagtccctagccacatccatgctgatcttaatcttcacttttaaaaattatgcagaccagagactgtcaatttaagtcagatctggggctagggttgtagtgaatgg

SEQ ID NO: 29583 - DNA, 528 bp, Homo sapiens
  misc_feature (1)...(528): n = a,t,c or g
annncanctnnnnnnnnnnnnnnnnnnnnnnnnnnnnnnnnnnnnnnnnnnnnnnnnnnnnnnnnnnnnnnnggcacgagtcagaatgggttgatagtgatttgtcattctaacaaaattctagcaggtgtaggaatttgaatatgtgaaaatcttctggaattcatcatataaacaatgtttgaatacttgctgacttaaattgttatgacactctactaggtaggcccgctgagaaaatggaagtagcagtcctttttccctgacagtcaaatttaggagaaatgaatcagtacaggatttcttgactctccgaacctaaactgcagactgctcctctccgctttgtccccgtggctccagccacattcttcatgtccctcagacatgttaggtatgtaccaccttaagtcattcgccgttctctgtgcttggaacactgttaactaaaatatccgtgagactgaccccttccacatctgngcttacatgtgacccacctgggtggcagccaaggcccatcctgct

SEQ ID NO: 29584 - DNA, 529 bp, Homo sapiens
  misc_feature (1)...(529): n = a,t,c or g
accntctatgactttganaccccnnnnnnnnnnnnnnnnnnnnnnnnnnnnnnnnnnnnnnnnnnnnnnnnnnnnnnnnnnnnnnnnnnnnggcacgagcgtgaggaacagtacccgtgcacccgcctctactccatacacaggccttgcaaacagtgtctcaacgaggtctgcttctacagcctccgccgtgtgtacgtcattaacaaggagatctgtgttcgtacagtgtgtgcccatgaggagctcctccgagctgacctctgtcgggacaagttctccaaatgtggcgtgatggccagcagcggcctgtgccaatccgtggcggcctcctgtgccaggagctgtgggagctgctagggtggtgctggcatcctgagtcctggccctcctgggatctggggccctcgggccctgcctgacctggtgcttttttccccatccccatgttccttttattctgtaaaaagttagtggactgcagccctgggggttgcaggctgcggtgcctangcccctccttancctg

SEQ ID NO: 29585 - DNA, 484 bp, Homo sapiens
  misc_feature (1)...(484): n = a,t,c or g
anncccatnnnnnnnnnnnnnnnnnnnnnnnnnnnnnnnnnnnnnnnnnnnnnnnnnnnnnnnnnnnnnnnnnnnnnggcacgaggaactttgttcctctaagatttgtaggacatggcaaataaaagataccaccctttgaggaatttggttaggaaggaagacgtgagtttaggagacacatgtagagccccagagtgtttttcactaagtacaagtaggcagattatgttgtattagatatgatgcaattgcatcgggagggtttaagtaatctgatacggactcttaactcttaggttgtttactaatttagatataaaatttagggaaacaactttagcattgttctttagtctcaatggaaaggttatggtataagaatgttagcttttcagtgtaatgaaaaagtctcttatgagtaaaattagaatctagttttgctaatatcatacttggtgnatatttgatattcacagtgagg

SEQ ID NO: 29586 - DNA, 534 bp, Homo sapiens
  misc_feature (1)...(534): n = a,t,c or g
ttaanccctnnnnnnnnnnnnnnnnnnnnnnnnnnnnnnnnnnnnnnnnnnnnnnnnnnnnnnnnnnnnnnnnnnggcacgagctggaaacaagtaacctctctatagcagtgcagattggattttaagaaatgtggaatttaggtctacatccagcataaaacccaaagaccatgttatactccccaaattatagctggttcatgatggtaaaatatttttttttttttnnnnnnnnnnnncnnaagggntttaaagtnntnagcccnnntttnanaanctttnagtnttanccncntttcccaaaanccntaaantngcaanctactnttnanangtnancnttttaangttaaaaaaaancctaannganagncccnttnttccangtttnccagngagngntgnanggggnnaaaaangccctccatcntcccntgaagcntttgcngggtntnaaatcccacngccctcntgcaaaaangccctccatcctcccttgaancctttgttgggctgaaaacccnctgcccc

SEQ ID NO: 29587 - DNA, 425 bp, Homo sapiens
  misc_feature (1)...(425): n = a,t,c or g
tttgaatccaattngaatccctnnnnnnnnnnnnnnnnnnnnnnnnnnnnnnnnnnnnnnnnnnnnnnnnnnnnnnnnnnggcacgaggccaaactccacggcccttgtcctggagctatgtccagatgctgacgctccctctcagggtttcttcacacgcttccttcagctccattcctcacatccacctagatggcagggtgtgacaaggacagtgtctgcggactaggcctgtcactcatggcgtgtctgtcacatcagctttcttgggggcgacccattccttgaggccgcctcccatagagccactccgcacgcgtgggggtgtgggcacggcctaccctgctggccacaggacagagtgctgggcacatctcctcagccgcgctcgcagacagctgtcttcaagttcagggtgggaccg

SEQ ID NO: 29588 - DNA, 509 bp, Homo sapiens
  misc_feature (1)...(509): n = a,t,c or g
tnntttgnanacctttgaanccntnnnnnnnnnnnnnnnnnnnnnnnnnnnnnnnnnnnnnnnnnnnnnnnnnnnnnnnnnnnnnnnnnnnggcacgagatgatgtacaatttggccagtttggagatgacccaaaggaggaagtaatggttctggagagaatcttactgcataccatcaagtttgatttacaggtaaaacatccataccannnnnnactaanatatgcaaagcaactnaaaggtaanaagaangntttcagaagaattttttcattctgaaatcangtctttataatttgatgacactcaaattacgcttctcaaancgcggaaaacaaagtttgatgtgtgaaataccaanggcatggcttgctcagtcanttcagcattgcagctgntaangctgtttccttttatgtntaaacaggctctgtnatccagntgccaantgatgggagaggcagganaatgaggcaaanntttttaaatggactaatanacttagcc

SEQ ID NO: 29589 - DNA, 503 bp, Homo sapiens
  misc_feature (1)...(503): n = a,t,c or g
tttgaanccttgannnnnnnnnnnnnnnnnnnnnnnnnnnnnnnnnnnnnnnnnnnnnnnnnnnnnnnnnnnnnnnnggcacgagcctccaagactacggctgataacaaaggagacaaagaattgataggtcacatcataactatctaattagcagcaaacgtaagacattctactttgtaaacagctctccaaaaggttcaggacaaatgagagcatatattctgggaattcagttactctgggagttagaatttgagaagaagattaaaaataacataaccaaaaggttaaagtccttgattaactatcaagtaaactgtatataaaacgttcaattgtacaacgcctgctgtcctgtttggggattaaaatcccaaacacaaaataaatcccttccatggctaaaactttacttaagaatatataatctggccaggcacaatggctcacacctatgatccnnnnnnnnnnnnnnnnnnnnnnnnnnnnnnnnnnnnnnt

SEQ ID NO: 29590 - DNA, 523 bp, Homo sapiens
  misc_feature (1)...(523): n = a,t,c or g
tnnnnnnnnntnatttgaannnccttnnnnnnnnnnnnnnnnnnnnnnnnnnnnnnnnnnnnnnnnnnnnnnnnnnnnnnnnnnnnnnnnnnggcacgagtttttttttcatgnnnnnnnnnnnnnnnnnnnnnnnnnnnnnnnnnnnnnnnnnnnnnnnnnnnnnnnnnnnnnnnnnnnnnnnnnnnnnnnnnnnnnnnnnnnnnnngcatgagccaccatgctgggccaacctgtgggatgtgttctaatcaactgcttttgaagttaaaggcaaagaacataaattgtttctgaaatacaacgaatgattctgcatacagtaaggaaggccagcatccactgcacatttgccatgtgtcccaccttgttagctttctgttcattcctttgcttagtcgtcaagcactatgacaaggaagccaagattctggtggaccaggcacttttggtgtgtgaggaatctggcagatggcagacccaggatgtgcttcatcaccgggaaaccatgtccgttacgtaa

SEQ ID NO: 29591 - DNA, 489 bp, Homo sapiens
  misc_feature (1)...(489): n = a,t,c or g
tttgaancctttattcnnnnnnnnnnnnnnnnnnnnnnnnnnnnnnnnnnnnnnnnnnnnnnnnnnnnnnnnnnnnnnnggcacgaggcgagggatgaatgcggcgtggagcatgtggttgatctagggggtgaaacactgggggaggtagatgggcaggatgtgaagtcctgtgaagaattggcctcctaagcacaaaaggtgaattggaacccaataggtcgcggcccccaacctggagcttctcctgggtctggggatagattgtggctccacctagtgtccttcggtggtaactgcaccctggctgttcacctggacacaccaggccagccatagaccctcctggtggctggtcctcccaggcacaaggaaggatcctaaagttcagcaatggctgtgcnccaggcaccaggcctgtgctnagggctctgcnagcacttntcaggcactctgcacaaggtcaggatgacaactgttgtcccattt

SEQ ID NO: 29592 - DNA, 496 bp, Homo sapiens
  misc_feature (1)...(496): n = a,t,c or g
tttgaanccctttnngaatcccntnnnnnnnnnnnnnnnnnnnnnnnnnnnnnnnnnnnnnnnnnnnnnnnnnnnnnnnnnnnnnnnnnnnnnggcacgagcggcacgaggtgtgtactcagagttggaaagtggggtctggagacaatagcactggccgtaggagagaggcaggaactggagtgaagataggttagagccagcactcactggggcttgatgccattgcgaagctttcagtttatgcatcagggaatgtgtggtcctggggtccacagcttggtttaaagatctaatttgggtatcttctcagctttctgtgactctggctgagcagcagagaggaattttgttttggcttttatttgatatgctatctgtcatctacctaaaggagcctgcccacctcctgggttcatacagaggagaggtaccactatagtgggaagctttatgaccccactcctccagacaggtggttttataggtgattgcg

SEQ ID NO: 29593 - DNA, 533 bp, Homo sapiens
  misc_feature (1)...(533): n = a,t,c or g
tnnnnnnnccccctttgaanccatnnnnnnnnnnnnnnnnnnnnnnnnnnnnnnnnnnnnnnnnnnnnnnnnnnnnnnnnnnnnnnnnnnnnggcacgaggtatcaccttcttgaaggacttcacctacagcaaggacgacttccaccgtgcaggcctgcaggtggagttcatcaaccccatcttcgagttctcgcgggccatgcggcggctgggcctggacgacgctgagtacgccctgctcatcgccatcaacatcttctcggccgaccggcccaacgtgcaggagccgggccgcgtggaggcgttgcagcagccctacgtggaggcgctgctgtcctacacgcgcatcaagaggccgcaggaccagctgcgcttcccgcgcatgctcatgaagctggtgagcctgcgcacgctgagctctgtgcactcggagcaggtcttcgccttgcggtccaggacaagaagctgccgctctgctgtcggagatctgggacgtccacgagtgaggggctggcacccagccccacagcc

SEQ ID NO: 29594 - DNA, 535 bp, Homo sapiens
  misc_feature (1)...(535): n = a,t,c or g
tnnnnttnntccctctngaancncttgatatcncnnnnnnnnnnnnnnnnnnnnnnnnnnnnnnnnnnnnnnnnnnnnnnnnnnnnnnnnnnnggcacgaggtcaatatagctgaacattcatcagtcagagcacattaagatgaaacagcaggacatgtnnnnnnnnnnnnnnnnnnnnnnnnnnnnnnnnnnnnnnnnnnnnnnnnnnnnnnnnnnnnnnnnnnnnnnnnnnnnnnnnnnnnnnnnnnnnnnnnnnnnnnnnnnnnnnnnnnnnnnnnnnnnnnnnnnnnnnnnnnnnnnnnnnnnnnnnnnnnnnnnnnnnnnnnnnnnnnnnnnnnnnnnnnnnnnnnnnnnnnnnnnnnnnnnnnnnnnnnnnnnnnnnnnnnnnnnnnnnnnnnnnnnnnnnnnnnnnnnnnnnnnnnnnnnnnnnnnnnaaataactcagaaacaaagtnnnnnnnnnnnnnnnnnnnnnnnnnnnnnnnnnnnnnnnnnnnnnnnnnnnnnnnnnnncagcatgggttaatagacac

SEQ ID NO: 29595 - DNA, 498 bp, Homo sapiens
  misc_feature (1)...(498): n = a,t,c or g
tttgaaannccctttgtatgacatgattacgaatttaatacnnnnnnnnnnnnnnnnnnnnnnnnnnnnnnnnnnnnnnnnnggcacgagaatatatccaatttcaacatgggcaaacatgggcaattctgatttacctttataataatcttgtgtgatatgttcagtatttggtatatggagtcagagagtcagagtatacctccaatctaacttttgatttataagtgaaataggaatataatgttagtttgaagtattaaccattcacacttttttacatgagtatcaacttacgaatactaagctaaacacctttatgtattgcttttaaatgtatacttannnnnnnnnnnnnnnnnnnnnnnnnnnnnnnnnnnnnnnnnnnnnnnnnnnnnnnnnnnnnnnnnnnnnnnnnnnnnnnnnnnnnnnnnnnnnnnnnnnnnnnnnnnnnnnnnnnnnncatcccagccaccccaggaggctgaggngggagga

SEQ ID NO: 29596 - DNA, 514 bp, Homo sapiens
  misc_feature (1)...(514): n = a,t,c or g
tngnntnaatnatttgatnccnnntnatccctttgnnnnnnnnnnnnnnnnnnnnnnnnnnnnnnnnnnnnnnnnnnnnnnnnnnnnnnnnnnnnnnnnggcacgagggattctgaagttttaaatgtaagaggcttcttggaccaaaacatttgagcccctctggcctagaagtgacactgcttacctgggggaggagccctgggcttgttcgctgctccatctgcagctggcagcccagcacctggcatggagaagacacgcaataagtgaacggtgaatcagaagggaccactgggttcactcagccgggttctgagggccttctgtgtacttgacaccacagagtgtgggacctggagttcgtcctccgggatagaccacaccgtttaagctccatcggctagagagtaataataacaaccaacacaaactcaagcatttgtgctgttctacgtgctttacatttgttaacttgtttatcccccctacccttccaggtaggaattgcttt

SEQ ID NO: 29597 - DNA, 540 bp, Homo sapiens
  misc_feature (1)...(540): n = a,t,c or g
tttaaacagggtcggggaggagaggatgctcacagctggagtcagaggggtaggcaggagtttgttttttatttgaagagcaggaggaattggtgacaggctgtacatccctcctcttcatcagagcatgacaaatgtgaaccatcttgatgatttgagattcttactctataggttgatacagtaatacagtatgagtagatatacttaggacacaggcaggatgggaaaaaataatacctacccccttgcacccaatattcccagacccttatggatgatggctgtanctctcagctgngactgntctgcagggacctncatctntacccgtcagacagcgactgaaggtggcttacagagcatgaagacggcgtttaantggcactctgnggcanaactgttccaaancattgngngttaggctggtctgataaactgcncgaactgncccttntgttggaaaagaancactggtctgatggcccagttcaagccctntagactgttangagtncacgtgtgtggcttgttngaagg

SEQ ID NO: 29598 - DNA, 485 bp, Homo sapiens
  misc_feature (1)...(485): n = a,t,c or g
tntgaancccatnnnnnnnnnnnnnnnnnnnnnnnnnnnnnnnnnnnnnnnnnnnnnnnnnnnnnnnnnnnnnnnnnnnnnggcacgagcagttatccaagagtacagcattgagtttaaatgattgatgctttttgcttctcctagtaacttttgattgtcttcctcagtggaggagaacgatataaacatgaaaaactataagaaattcaaaatttctccttttaagacctgaaatatgcatgaatattttgctgttgcttggtacatttatcggagagaagccgtttcttccagtagtctcaaagatagcacttttctatgttaaaggtattttcagaaccagtaacactgaatctcctgtagaactagccagaatctttactgatggtaaatagatcatcaaccacaagctgcattggtaagttaaactaaaatgacaccagaaacaaaaagccatttcttgagatctttgaataaaagca

SEQ ID NO: 29599 - DNA, 494 bp, Homo sapiens
  misc_feature (1)...(494): n = a,t,c or g
atncccattcctgatncccntnnnnnnnnnnnnnnnnnnnnnnnnnnnnnnnnnnnnnnnnnnnnnnnnnnnnnnnnnnnnnnnnnnnnnggcacgagaggcgcatatgaggagcacttctcaggagtgctattctcatcttgtttttcctgaaattgtgcagttcacagcttgcacaactgtccatagactccctgattttggagggagatacctgactagtgcccctgtttttgtagggaaatacctggacagtgcctgccatcattagctaccatgttaaagatgaagatacaggagtggcccacatnnnnnnnnttatgagacatggaagaagaagacccagagtgttgttctgttttttttttngttcttttgntctgntttgttnctnttngttttgcatccgctggcccatcccatactcnatccnctatcanagatattgctccattcagacaattttccttcttattttccacactgngagcctg

SEQ ID NO: 29600 - DNA, 498 bp, Homo sapiens
  misc_feature (1)...(498): n = a,t,c or g
ttgaancccatcntnnnnnnnnnnnnnnnnnnnnnnnnnnnnnnnnnnnnnnnnnnnnnnnnnnnnnnnnnnnnnnnnnnggcacgaggccatgtcacccaatcagaactaagtgagtttcaatccttcatttgcataaatatacctgattgggaccctaggtgggatttttgctgtaaaaccctagacttccttttgttctctggaaaatacctttgtttcacactgaaggctggtgcaaattattcactggaataaaatctctttcttccagattccttttcggagaacttttgttcacatttatagtgtcagaagcggaataagaaaagaatcctgatttttctcccagcacagtccttaacaaactcatttgtgcctccaagaagtccttgagctcagttgtcttaaataatttcaaggaacagtactcactgttattttagagtattttgatatttcatttcatgcatgtaaatacacagacacacaaacagg

SEQ ID NO: 29601 - DNA, 511 bp, Homo sapiens
  misc_feature (1)...(511): n = a,t,c or g
nnnnnnnnnnnnnnnnnnnnnnnnnnnnnnnnnnnnnnnnnnnnnnnnnnnnnnnnnnnnnnnnnnnnggcacgagaaaatgtttttcagtatattacattagatgatttaatctcctaatttaatcttctcccccaccatactccatccttccagaaacatttcttctagagccttctcgtcttctcctccaactcagagtgattattttctagtccccttgcatatttatttgccatcatggtatttccagtatctctctctactgtgggttctgaattcctcagatcttctgccttcctcttggaagcctcctgtccttctgtgccacgactgcctgtgccaaaatatgttgtgagttctcttcttcacatatctaagtctcttcagctatgagcctctgaaggccaaggattgagtatacttgcacctttttgagtattttaagtgcctgacatagaaccttgcaattaactgtcattaaaaaatgactggggaccangtgtggggg

SEQ ID NO: 29602 - DNA, 526 bp, Homo sapiens
  misc_feature (1)...(526): n = a,t,c or g
ttgcccccccccctttgaccccnnnnnnnnnnnnnnnnnnnnnnnnnnnnnnnnnnnnnnnnnnnnnnnnnnnnnnnnnnnnnnnnnnnnnggcacgagaactggaagtccttgccagagcagtcaggcaagaaaagggaacaaaaggcatccaaataggacaaaaaaaattcaaactctctctcttcatgacaatataattctacaactagaaaaccctaaagactcctccaaaaggctcctgtgactgattaaatgacttcagtacagtttcgggatataaaattgatgtataaaaatcagtagcatttccaaacaacaaccttcaagttcatatccaaatcaagaaagcaattccttttacaatatccatgctcaaggattggaagaatcaatattattttaatggccatactgcccaaagcaatccacagattccatactattcctacaaaactacgaatgtgatttttcacagaactanaaaaaaactatactaaaatacatacggaaccaaaacnagagc

SEQ ID NO: 29603 - DNA, 512 bp, Homo sapiens
  misc_feature (1)...(512): n = a,t,c or g
cnnnnnnnnnnnnnnnnnnnnnnnnnnnnnnnnnnnnnnnnnnnnnnnnnnnnnnnnnnnnnnnnnnnnggcacgagctccaagagagtgatggtggtaagggggacggatcatagggcagattcatttaccgactataggcagtttagttttgaaatttcaacagctttcttttttgaattataaaaacaattttaagattttttttgaaagaatagtctttcacaattgagttaaggtgaaacccattagaatttcttgagaaaataaatctatattatttattgttcttttgaagagcaaaagaatagaagaatacaactaggaaaaaatgtgtttctttctttcnnnnnnnnnnnnnnnnnnnnnnnnnnnnnnnnnnnnnnnnnnnnnnnnnnnnnnnnnggctgttggcaagngtgatcatgctggccanagcctcaaattccnggcctccagngatncnctagtagctgggaccacaggggnatgccatnaagcctggntttggg

SEQ ID NO: 29604 - DNA, 513 bp, Homo sapiens
  misc_feature (1)...(513): n = a,t,c or g
cnnnnnnnnnnnnnnnnnnnnnnnnnnnnnnnnnnnnnnnnnnnnnnnnnnnnnnnnnnnnnnnnnnnnnnnggcacgagctggaagtgagttaatctatgtgaagcacttagaacaatgcatcgaacatagtaaatgctatataaatggtagctgttcacagcaaaagtaaaaaacaaaacagatgcgaaactcaagttaaagcctatctaaaactacatcacctcccacatttcctacccattttcatgcttcattttagtcctcagcactttaacatcctctacattttacatgtctgtgtttcttcttatctgtctcctgcactaaaatggtatctccatgaggacaagggtttccatgccctggcaagtagttggcacacaataggctgtactacagggttagcgatcgngtccctagctggagatgaagctcactctcccagactcgttcctagccttgcaccacctgaaacagnggccagctgtccagccaggnaagccggaaccc

SEQ ID NO: 29605 - DNA, 511 bp, Homo sapiens
  misc_feature (1)...(511): n = a,t,c or g
ttggannacnnnnnnnnnnnnnnnnnnnnnnnnnnnnnnnnnnnnnnnnnnnnnnnnnnnnnnnnnnnnnnnnnnnnnggcacgagaaaagagattggggtctatggaatcagagctgtgcttcaggggatattaacctactctttgtttaacataaacggaatgataatctggagacacagaaatctttaggagattttgacagtggcccagaaaagtggtagggagggtctggattaaggcagatggaaatggagatggagatgctagaggtattttagaggtaaaatcagtagacttgcaactgatttgatatgagagtannnnnnggagccanngcnnnnnnnnnnnnnnnnnnnnnnnnnnnnnnnnnnnnnnnnnnnnnnnnnnnnnnnnnnnnnnnnnnnnnnnnnnnnnnnnnnnnnnnnnnnnnnnnnnntaggaccttgtctctaaaaataaaaattagcaagncatgatggcatgcgcccgtagtcctagctactcagga

SEQ ID NO: 29606 - DNA, 513 bp, Homo sapiens
  misc_feature (1)...(513): n = a,t,c or g
tnnnntttgnnnttgaannaccanctatgacnnnnnnnnnnnnnnnnnnnnnnnnnnnnnnnnnnnnnnnnnnnnnnnnnnnnnnnnnnggcacgagtacagtcagccaccaagtccttcccattcaacctctgaaatatcttgtagttttttttgtttttttgtgggnnnnnnnnnnnnnnnnnnnnnnnnnnnnnnnnnnnnnnnnnnnnnnnnnnnnnnnnnnnnnnnnnnnnnnnnnnnnnnnnnnnnnnnnnnnnnnnnnnnnnnnnnnnnnnnnnnnnnnnnnnnnnnnnnnnnnnnnnnnnnnnnnnnnnnnnnnnnnnnnnnnaacagcaacgatatatagaccacctgggataaaatgactatttgtcctattattttgggaagagattctaaaaggattcacgttgtgtgtgtacaggaaagagtaaaatcctgtgtgtgtagacatgtccctgggtatgggagacaaagctaagagatagtagaaatgattaattcaaccgt

SEQ ID NO: 29607 - DNA, 535 bp, Homo sapiens
  misc_feature (1)...(535): n = a,t,c or g
ggncncccttcgatgacnnnnnnnnnnnnnnnnnnnnnnnnnnnnnnnnnnnnnnnnnnnnnnnnnnnnnnnnnnnnnnnnnnnnnnggcacgannnnnnnnnnnnnnnnnnnnnnnnnnnnnnnnnnnnnnnnnnnnnnnnnnnnnnnnnnnnnnnnnnnnnnnnnnnnnnnnnnnnnnnnnnnnnnnnnnnnnnnnnnnnnnnnnnnnnnnnnnnnnnnnnnnnnnnnnnnnnnnnnnnnnnnnnnnnnnnnnnnnnnnnnnnnnnnnnnnnnnnnnnnnnnnnnnnnnnnnnnnnnnnnnnnnnnnnnnnnnnnnnnnnnnnnnnnnnnnnnnnnnnnnnnnnnnnnnnnnnnnnnnnnnnnnnnnnnnnnnnnnnnnnnngcaccagctgcattacccctacagtanagtctgccnggnctatgaaagcttttgaaccaggccttgatttcatanctgnatctaggaaagtcctaaaangcatcttcttgcaatagaagntggtttggcnaccnttaaaaactaatggggg

SEQ ID NO: 29608 - DNA, 538 bp, Homo sapiens
  misc_feature (1)...(538): n = a,t,c or g
ttgganccccttngaancccnnnnnnnnnnnnnnnnnnnnnnnnnnnnnnnnnnnnnnnnnnnnnnnnnnnnnnnnnnnnnnnnnnnnnggcacgagaaaggggggaattataggtaacaagactttcctgtcgtatatttaaaatcaaggtgatagatttattctgtgtatttgagggagttgaacgatttacatacatgtcgccagctatctgaagaggaaaaatgtggattaactggcactgtaagccacatttattctagtgatgtcttaggacttcttatagataaggattatcagacagccgcctgcctagattcccccttgacctctatctggtggtaactgcacttcctttctttgtactgaagacattttatatattggtaaaacaagggggaaatggtgcttttttaaaaatgttatcggaaangaaaannactccctccctccttttntataaanncaatttggggnganaaaataacggggnaacaagggtggccnttttgaattggaannngaaaaaaaaaatcc

SEQ ID NO: 29609 - DNA, 527 bp, Homo sapiens
  misc_feature (1)...(527): n = a,t,c or g
ttngnnnnccnttgggnnncnnnnnnnnnnnnnnnnnnnnnnnnnnnnnnnnnnnnnnnnnnnnnnnnnnnnnnnnnnnnnnnnnnnnnnnggcacgaggctgaaggggaaggaagccaacacttattagatagagtccgaacttaccccacagcccctatgaggaggtattatttccccatttaacagatgagggaactggtgctttgagaagttaacttacttgagatcacatgcttggtaagtggcaaagctgggatttgatcccaggtatgtctgactcactgtttcaaattagtatggattgttcctacttttgtgccaggccctgtgctcgccaccttttatcattcggccacaccaacttgtgatgtagataatatcccattatccagttgaggaaacaggctaaagggccgtgtgtnaagaaggngtnaantgaaaatgaacccctggnttnaaacccnngcttttccncggaaaaccctttggnaataaacggcccaacttnttcctttangnggggg

SEQ ID NO: 29610 - DNA, 520 bp, Homo sapiens
  misc_feature (1)...(520): n = a,t,c or g
nccnnnnnnnnnnnnnnnnnnnnnnnnnnnnnnnnnnnnnnnnnnnnnnnnnnnnnnnnnnnnnnnnnnnnnggcacgagctagtttgtaaatcagctgggatttcttcctttttatttcattcttttaaaaaatttattttaaggtagtacatgtagttggaagaactactataaaaacaatatatgtgggaaaacttccagccctctgttaattgagtgtctcaaatttgttctggaaaagaaagggggaaagtctatgaacgacttttcaacctggcaattccatatacaatgttaaacttgattcttatgacatattcctatgaaaataataaatactggcacttttccttgcagaaagcactcagacctgaatcagagaaaatcatatgccaaagccactgccagngttaaacctctttttccataaagagtaaangggatngctacacnanggggttnttggnaaaatttaaanggngttnaaaggttnaaactaagnttggaaacccttttta

SEQ ID NO: 29611 - DNA, 612 bp, Homo sapiens
  misc_feature (1)...(612): n = a,t,c or g
ggnngcgncnnnnnnacntncnnntncccnnatatnncnnnnnggnnaanncccnanncttccacccctcttggacccttnganncnagctagactgatacgaannnnnnnnnnnnnnnnnnnnnnnnnnnnnnnnnnnnnnnnnnnnnnnggcacgagtaaaactctgatgaaagaaaatcaaagatctgaataaatggagagatagtcccttttcatggatagatgggttcaatatttagatgtcacttcttcctaagttgatatgtannnnnnnnnnnntcccagtcaaaatcccagcnagttattttgagggnattgacaaactaattcatgagtttatttggaaaggaagaggcccacattanccaacataatattgnggaagaaaaagaaaatcggaggactgacagtctccaattttaagacttantatnnagctnngnnnatcaagatantaagggaattgngnaaagaccctttggataattgaanccgnnngaanaaaacntcaaaaaaanggccccccccnaanannagcccanttcatncttaannaaggngcnaagancaattcnagggaagaaaagggacaggcctttcnacaaataa

SEQ ID NO: 29612 - DNA, 511 bp, Homo sapiens
  misc_feature (1)...(511): n = a,t,c or g
anncnnnnnnnnnnnnnnnnnnnnnnnnnnnnnnnnnnnnnnnnnnnnnnnnnnnnnnnnnnnnnnnnnnnnnnnggcacgagatttggcatttggagcatatttttgtacttcacgtaattaaatatttactgtgtgccaaggtcagtgtgtgacagagcactgtaggggaggcaaaaatgaaccaactctggaccttgccctgcagaagctctgtctactggcatgaggtaagacaggtccacagataacttacataagagagactgcaatctggacaagacagcctcagtgggagagggaaggagaaccctgtagatttgggtgcggggaggctgtggggagagcacagcctttcaggtaaagggacaaggttaggaaagcaagaaggtgtagcttgtgctcgtggagcccaggaaactccttgggctagaaaagatttggtggcactctatacagtgtatgngctgctgctatctaacatgaatggactatttctctaatggggggc

SEQ ID NO: 29613 - DNA, 505 bp, Homo sapiens
  misc_feature (1)...(505): n = a,t,c or g
nnnnnnnnnnnnnnnnnnnnnnnnnnnnnnnnnnnnnnnnnnnnnnnnnnnnnnnnnnnnnnnnnnnggcacgaggatccccaaaggacagagacacatccacctaaggccaagacccaaatgagccaaggcatggggcagtgttcctttttatagaagaagagacatgaagaggaactggaggaggtggttgtggggaaggaagtgatggattaataccaggccacgagggactcagtgtactcaggagaggcctgggtcagcacaaaaaggagacactggtgctgttcagggatcaggttggctgggcctggctcaagctatccactgccctggtgaaaggaggaaaactggacttggttggcattccctaaggcttgcttgcctgacttgaaaagaatgggcaatggcctggccctnggccaacanaacttgggtggctgcatnttggcatgaagagctgaactgtgactgaatggtggnccaagaancctgggtttccttt

SEQ ID NO: 29614 - DNA, 468 bp, Homo sapiens
  misc_feature (1)...(468): n = a,t,c or g
ggccctcgaggccaagaattcggcacgagccgtcaagttcaagtggtggggcctgcagaacaaaggggagaacttcatccataagcaagagaggcgtctgtttacaaacttccacaggcagctgttctgttggctcgataagtgggttgacctgaccatggacgacattctaaggatggaagaagagacgaagagacagctggatgaaatgagacaaaaggacccagtgaaaggaatgacagcagatgactaaagccgcttttcccctctgtactttttgcaagacagtgnnnnnnnnnnnnnnnccnncattttcnccttccaagnggcnaggccntttnggnaccagccgttttngccctttttnaggaactttcaacccttnngggngttaatttaaagccctttaatattnggacaaaatagaccnnttggggncanaagccnnnntgncnagaccntgtcctc

SEQ ID NO: 29615 - DNA, 517 bp, Homo sapiens
  misc_feature (1)...(517): n = a,t,c or g
ttgganncccttnnnnnnnnnnnnnnnnnnnnnnnnnnnnnnnnnnnnnnnnnnnnnnnnnnnnnnnnnnnnnnnnnnggcacgagcacgtgagagagatataattattatcctcattttacagagaggttaagtggtgaaaccatggtttaaacccaggcagtctgactccaataattctcaattgtaaaactttggaacagttcagagtcaagttcataaaaattatgtcataaaactggggcattaagaaggctgactgttgaaaggaaagtaggtatgcacaaagcctttatttgtatttgactcaaatttgtgatgtgttgggtattggtaaggcatgattcgtcttctggctataccacagttcagtaaaaatttgccataatacatttgcattttttatcatgtgattcccattaaaaatattacaatgtaccccacactggattttcaaantgtgactaaattagacacttatatttcttantttgggnganctttatggcattaatga

SEQ ID NO: 29616 - DNA, 426 bp, Homo sapiens
  misc_feature (1)...(426): n = a,t,c or g
nnnnnnnnnnnnnnnnnnnnnnnnnnnnnnnnnnnnnnnnnnnnnnnnnnnnnnnnnggcacgaggctagcaccatgacttcaataccctgacgatacattgcctgatattaagtaagcatttaatacatgtttgttgaatgatgaaggcaggatgacaatgttacttagatgagagtttatagttctgagaattttaaggcatcctacactttagaaaatattttctataagccttggagacatttatctccaattcctctctgtttgaaaattaaaattttatagctgtaatatacagctgacatatacatatatatttatatatacatacatgatatatgttatacagcttatatgtacatacatatttcattagttatagcatattaaataccataggatgggaattttttccagaaaacta

SEQ ID NO: 29617 - DNA, 449 bp, Homo sapiens
  misc_feature (1)...(449): n = a,t,c or g
ttgannccnatnnnnnnnnnnnnnnnnnnnnnnnnnnnnnnnnnnnnnnnnnnnnnnnnnnnnnnnnnnnnnnnnnnnnggcacgagggaggccagagggaggctgcattttattctgactgcagtgggatgatggagggcttcatgggcctgacatctgattgcgggggcagcagcccgtcttagctccagagtggaactcacattcacaggcacttgcaggctcacagggaagactggctatgagggggtaggaggaccacttcgcagggcctggcccatgggagctccacatctgaagtgcccttcccagtggcccactggtgtgacctcatggggaccttggggatcccatggctgacaaggacatggcttgtgtctgtgtgatactggcacagtacgcacccanaagtgcgnctgaaagggttcctgttgttaactgggcctgg

SEQ ID NO: 29618 - DNA, 469 bp, Homo sapiens
  misc_feature (1)...(469): n = a,t,c or g
tnnnnnntnaaanntgaatccctttgantcccnnnnnnnnnnnnnnnnnnnnnnnnnnnnnnnnnnnnnnnnnnnnnnnnnnnnnnnnnnnnnnnnnnnnnnnggcacgaggctatctcaataatattggcaaaaggaaccaacctaggatcacccattattcccagttgtcatgaatctctagcctccttcaatctggaacagtttcttcactctttctttgactttcatgactgtggtatctttagagatcacaggccagacctgtccagaaagattttgtagaatatttctaaatttgtggttgtcccaggtgtcctcactgtaatccccatatgatgcatttttgaccacagtatcacagaagttatgctgtgttcttcccattgcatcctgtcaggcaccacacaatgtcaatttgttccattatttctattaaagggagaaaggaagaagggggtatgggaaa

SEQ ID NO: 29619 - DNA, 458 bp, Homo sapiens
  misc_feature (1)...(458): n = a,t,c or g
nttnnnnncnattgnnnncnnnnnnnnnnnnnnnnnnnnnnnnnnnnnnnnnnnnnnnnnnnnnnnnnnnnnnnnnnnnnnnnnnnnnnnnggcacgagctcttgtgaaaatgctaagtattactgtttctaccttactgccctgcactttaccccatcatctcccctccttagaaaatgatttcataggaaaattggcatggagagcagatagtagagtgtagacctgaaatacatgaggcaaaggcagtcttccagcattctatggtcccaccaggtgggtaggtgactaggaattcaggccaggtcctagagagtagtgagaagttttccagtttgcagtttcctctgtgctgtatgtacagccatacagcctatggaacctgacattgcagtgggcagcaggacacggtcaaggctcctagctgcctctccatctatggaactatgaaatttcc

SEQ ID NO: 29620 - DNA, 454 bp, Homo sapiens
  misc_feature (1)...(454): n = a,t,c or g
ttgnnnncnattngnnnccnnnnnnnnnnnnnnnnnnnnnnnnnnnnnnnnnnnnnnnnnnnnnnnnnnnnnnnnnnnnnnnnnnnnnnnggcacgagctctttgcaaatgtcattccaaaggtgggatttacaaatataagtcacatgttaacacccaagggtcgagtgtatgctgagctgactgtttctcaccaatctcctggggagcttcttttaattactggctnnnnnnnnnnnnnnnnnnnncttaganggattgaagannaancagccaaaggtggatntgatgtnganattanaaacntaactgangagcttggagttcttggagttgctgggccacaggcaagaanggtccttcagaaactgacctctgaagatcttagtgatgatgttnncaagtttcttcaanccantnccttaaaggnttccaacattcctgtnactgctat

SEQ ID NO: 29621 - DNA, 433 bp, Homo sapiens
  misc_feature (1)...(433): n = a,t,c or g
annctttgaanaccgtttnnnnnnnnnnnnnnnnnnnnnnnnnnnnnnnnnnnnnnnnnnnnnnnnnnnnnnnnnnnnnnnggcacgagccaccatggtgctgtctcctgccgacaagaccaacgtcaaggccgcctggggtaaggtcggcgcgcacgctggcgagtatggtgcggaggccctggagaggatgttcctgtccttccccaccaccaagacctacttcccgcacttcgacctgagccacggctctgcccaggttaagggccacggcaagaaggtggccgacgcgctgaccaacgccgtggcgcacgtggacgacatgcccaacgcgctgtccgccctgagcgacctgcacgcgcacaagcttcgggtggacccggtcaacttcaagctcctaagccactgcctgctggtgaccctggccgccacc

SEQ ID NO: 29622 - DNA, 430 bp, Homo sapiens
  misc_feature (1)...(430): n = a,t,c or g
tttgaannacnnnnnnnnnnnnnnnnnnnnnnnnnnnnnnnnnnnnnnnnnnnnnnnnnnnnnnnnnnnnnnnnnnnnnggcacgagtgggccttttgtatcagaattacctggggacttgttaaaaatctctatttcttggtccaccttctgtttcagtttattgtgaggacaacactaaagaagatgcattttcacaagctctctgggtgattctttcagacacggatgtttgagaatttaaacccagacagaaactctgttgcaaacctctctgcgtggccagcatccagctcaatggtcggccatgggcagctcagcttgttgctcttcttcccctctgctctgttctttgagcacccgtgggccttcttgactgttgctgcatgagtgcccagcccttgtgtcaacataagacatgttttttttc

SEQ ID NO: 29623 - DNA, 434 bp, Homo sapiens
  misc_feature (1)...(434): n = a,t,c or g
tttgaanaccttttgannnnnnnnnnnnnnnnnnnnnnnnnnnnnnnnnnnnnnnnnnnnnnnnnnnnnnnnnnnggcacgagcacagactcagagagaacccaccatggtgctgtctcctgccgacaagaccaacgtcaaggccgcctggggtaaggtcggcgcgcacgctggcgagtatggtgcggaggccctggagaggatgttcctgtccttccccaccaccaagacctacttcccgcacttcgacctgagccacggctctgcccaggttaagggccacggcaagaaggtggccgacgcgctgaccaacgccgtggcgcacgtggacgacatgcccaacgcgctgtccgccctgagcgacctgcacgcgcacaagcttcgggtggacccggtcaacttcaagctcctaagccactgcctgctggtgaccc

SEQ ID NO: 29624 - DNA, 437 bp, Homo sapiens
  misc_feature (1)...(437): n = a,t,c or g
ttgaanncctttgaanaccatnnnnnnnnnnnnnnnnnnnnnnnnnnnnnnnnnnnnnnnnnnnnnnnnnnnnnnnnnnnnnnnnnnggcacgagtaggatgtgcagggcattacacaagcagtgccaatagcagcaaagttcttgagagtgctagtaattcaaatggcaggaagagaaggaataaatggtaaggctacctacagttcacagagagctccatcctcactgtggctttggattttgtcctgtgtgaaagagaagtgactgtgaactgacatgctgtgtttggtgttttagaaagatggctgcagcagcggtttggggaatggactgcaggagtggcattggaaacaggaaggttcatgactattgccagagacagaggatgaagcaggagcaaggaagattcaggacaggggactccggggctgatca

SEQ ID NO: 29625 - DNA, 437 bp, Homo sapiens
  misc_feature (1)...(437): n = a,t,c or g
tgaanacttgannnnnnnnnnnnnnnnnnnnnnnnnnnnnnnnnnnnnnnnnnnnnnnnnnnnnnnnnnnnnnnnnnnnnnnnggcacgagccacagactcagagagaacccaccatggtgctgtctcctgccgacaagaccaacgtcaaggccgcctggggtaaggtcggcgcgcacgctggcgagtatggtgcggaggccctggagaggatgttcctgtccttccccaccaccaagacctacttcccgcacttcgacctgagccacggctctgcccaggttaagggccacggcaagaaggtggccgacgcgctgaccaacgccgtggcgcacgtggacgacatgcccaacgcgctgtccgccctgagcgacctgcacgcgcacaagcttcgggtggacccggtcaacttcaagctcctaagccactgcctgctgg

SEQ ID NO: 29626 - DNA, 439 bp, Homo sapiens
  misc_feature (1)...(439): n = a,t,c or g
tttgaanacccttgnnnnnnnnnnnnnnnnnnnnnnnnnnnnnnnnnnnnnnnnnnnnnnnnnnnnnnnnnnnnnnnnggcacgagaccctgtctcagaggcccttcaaatcaacctgtcctaaattgaactgaaagccttccttctccattgctgtccttcctacattccataaaaggcaccaccatgcccatgcacccagttacattggccagaaacctaaaggcactgtagacatttccccaccgtgtccaggattcctcctgcatgtaccttgaagcccttcagcctttcttcttgatccttaccctatggggcaggccctcacctctgcaaagcactgcaataaatgctgtacctccaacctatttcccacagtaccactggaagaaagctctccaaaagccctcttattataagactctacatgatcatatgc

SEQ ID NO: 29627 - DNA, 374 bp, Homo sapiens
  misc_feature (1)...(374): n = a,t,c or g
ggccctcgaggccaagaattcggcacgagcaagactacaataatcaataatacaccgtatcaaatattttataaaccacagctatctgtctgcaatccccattctggaaaggagtattttcgtgttccagacagtgctacttttagcatttgcccaggtggagagcagcctgctatgaaatccagctcccttccttgctgggacttgatgcctgacatcagtcagtcagtactggatgcatccctgcttcagaaacagatcatgctgggcttttctcctgccccaggtgctgacagctcacagtgctggagcctgccagctatagttagaccatagtttcccaaacagagtgtggcantacccctcgggaattt

SEQ ID NO: 29628 - DNA, 475 bp, Homo sapiens
  misc_feature (1)...(475): n = a,t,c or g
anntccaatntgannccntnnnnnnnnnnnnnnnnnnnnnnnnnnnnnnnnnnnnnnnnnnnnnnnnnnnnnnnnnnnnnnnnnnnnnggcacgagtttgtacagatgatgactgcaaagtgaaggccccccgggcagctggcgatgcccgttctcttgatctctctcttctcgcgcgcgcactctctcttcaacactcccctgcgtaccccggttctagcaaacaccaattgattgactgagaatctgataaagcaacaaaagatttgtcccaagctgcatgattgctctttctccttcttccctgagtctctctccatgcccctcatctcttccttttgccctcgcctcttccatccatgtcttccaaggcctgatgcattcataagttgaagccctccccagatccccttgggngagcctctgnctccttcannccggatggctctcctccattttggntngnttnctcttg

SEQ ID NO: 29629 - DNA, 500 bp, Homo sapiens
  misc_feature (1)...(500): n = a,t,c or g
aannatnnnnnnnnnnnnnnnnnnnnnnnnnnnnnnnnnnnnnnnnnnnnnnnnnnnnnnnnnnnnnnnnnnnnnggcacgagggacggcccaggcggcaggatgtcctggtctggccttctccatggcctcaacacgtccctaacttgtggcccagctctggttccccggctctgggccacctgctccatggctaccctgaaccagatgcaccgcctggggccccccaagcggccgcctcggaagctgggccccacggaaggccggccgcagctgaagggtgtggtcctgtgcacgtttacccgcaagccgaagaagcccaactcagccaatcgcaagtgctgtcgagtgcggctcagcactggccgcgaggccgtctgcttcatccctggggagggccacaccctgcaggagcaccagattgtccttgtggagggcggccgacccaggacctgcaggcgtnaagctcaccgttgtgcgtggcaagtacnantgtggcc

SEQ ID NO: 29630 - DNA, 490 bp, Homo sapiens
  misc_feature (1)...(490): n = a,t,c or g
nnnnnnnnnnnnnnnnnnnnnnnnnnnnnnnnnnnnnnnnnnnnnnnnnnnnnnnnnnnnnnnnnnnnnggcacgagtagaaaagagtgaggtgtgtaataaagacatcggggccacagtagatacgtgggtgggctgaggttcagagatggcctcttggaggaggtggcatttaaactgagaactgaatggcgagaaggattcagcccagggatgggaacaatattcccagtagacaaacccacacagagggtgcagcagaaacagtgggggaagccaggcgaggcaggaggagagagggcgggccccgaggttcgctggtgggtgagctggaccacgccagccttgcaggctgggtcagctttggattttgttctcagagcagtaaaaagccttggaaacagatgtttcccaagctagggactagcacaatttgatatatagttcgcattttttggatccttctgctgtgtgtgaaagtgaattgcaa

SEQ ID NO: 29631 - DNA, 520 bp, Homo sapiens
  misc_feature (1)...(520): n = a,t,c or g
tnnnnnnnnnnnnatttgaaanccttnnnnnnnnnnnnnnnnnnnnnnnnnnnnnnnnnnnnnnnnnnnnnnnnnnnnnnnnnnnnnnnnnnnnggcacgagcacgtggcctgcgataggcatggtggtgtgtgcttatgnnnnnnnnnnnnnnnnnnnnnnnnnnnnnnnnnnnnnnnnnnnnnnnnnnnnnnnnnnnnnnnnnnnnnnnnnnnnnnnnnnnnnnnnnnnnnnnnnnnnnnnnnnnnnnnnnnnnnnnnnnnnnnnnnnncaaaacaaaacaaaaatgctgcaacattgcctgtgctgcctgggggctcaggggattgatgagtaagatgtgttctttcattcggcagctctctgctgagccccagtggtgtgcctggctctgggcaaggttgcacagagcaatccttatggggtgcccagtcaggagcagagaaacatgattgggatggcagatggaaggcaggtaaatgtgggggcctganagaatgacaggaganagatnaccttc

SEQ ID NO: 29632 - DNA, 520 bp, Homo sapiens
  misc_feature (1)...(520): n = a,t,c or g
tnnnnnntnnnnattggaancttggctannacgcgnnnnnnnnnnnnnnnnnnnnnnnnnnnnnnnnnnnnnnnnnnnnnnnnnnnnnnnnnnnnnnnnggcacgagaactggataatttgtaaagaaaaatgaaatattaaaaataatttataaacactnnnnnnnnnnnnnnnnnnnnnnnnnnnnnnnnnnnnnnnnnnnnnnnnnnnnnnnnnnnnnnnnnnnnnnnnnnnnnnnnnnnnnnnnnnnnnnnnnnnnnnnnnnnnnnnnnnnnnnnnnnnnnnnnnnnnnnnnnnnngaagatgaaggggaagctggcatgtcacatggctggagtaacaataannnnnnnnnnnnnnnnnnnnnnnnnnnnnnnnnnnnnnnnnnnnnnnnnnnnnnnnnnnnnnnnnnnnnnnnnnnnnnnnnnnnnnnnnnnnnnnnnnnnnnnnnnnnnnnnnnnnnngtaatccagcacttccacctggccccttctccatattaggataccatttgcctgg

SEQ ID NO: 29633 - DNA, 478 bp, Homo sapiens
  misc_feature (1)...(478): n = a,t,c or g
ttgaatcctatntgatnccnnnnnnnnnnnnnnnnnnnnnnnnnnnnnnnnnnnnnnnnnnnnnnnnnnnnnnnnnnnnnnnnnnnnnnggcacgagcggcacgagacattcctctgaatatattcctgttattttataatcacattaatattacatactgttacgtttgttttatatgtgagtctggcattataaatgctggctgaatgaattgggctaagacaactacaacagatgtgatcaagaaaccgatagtgattaccagaaattatatttggcgcttactctgatgatgctcttaagttttttacagactatatgaactcctttaattttcacaaccaccctttgaggtagatacatttctaatccccatgtacaaatgagacaaaggcacagaggttagttcacatagctatgaggcacaggcagaattcaaacacaggcagtttggcttcagagaccatgatcttaact

SEQ ID NO: 29634 - DNA, 472 bp, Homo sapiens
  misc_feature (1)...(472): n = a,t,c or g
annccanatnnnnnnnnnnnnnnnnnnnnnnnnnnnnnnnnnnnnnnnnnnnnnnnnnnnnnnnnnnnnnnnnnnggcacgagggtccttccagctttcagggttcattatttttgcttattaatacgttgaagatnnnnnnnnnnnnnnnnnnnnnnnnnnnnnnnnnnnnnnnnnnnnnnnnnnnnnnnnnnnnnnnnnnnnnnnnnnnnnnnnnnnnnnnnnnnnnnnnnnnnnnnnnnnnnnnnnnnnnnnnnnnnnnnnnnnnnnnnnnnnnnnnnnnnnnnnnnnnnnnnnnnnnttnnnnnnnnnnnnnnnnnnnnnnnnnnnnnnnnnnnnnnnnnnnnnnnnnnnnnnnnnnnnnnnnnnnnnnnnnnnnnnnnnnnnnnnnnnnnnnnnnnnnnnnnnnnnnnnnnnnnnnnnnnnnnnnnnnnnnnnnnnngatgttgaagatgatgatttgcccttttaa

SEQ ID NO: 29635 - DNA, 501 bp, Homo sapiens
  misc_feature (1)...(501): n = a,t,c or g
tnnnnttttgannnttgaannncnnnnnnnnnnnnnnnnnnnnnnnnnnnnnnnnnnnnnnnnnnnnnnnnnnnnnnnnnnnnnnnnnnnnnggcacgagcaggcatgaaccactgcgcccggcctgggagatgctaattttctccggttgaatagaatgtgcctatctgctcagagaggcagctctccttctgacaggagcattttctttttcgagatgggnnnnnngnnnnnnnnnnnnnnnnnnnnnnnnnnnnnnnnnnnnnnnnnnnnnnnnnnnnnnnnnnnnnnnnnnnnnnnnnnnnnnnnnnnnnnnnnnnnnnnnnnnnnnnnnnnnnnnnnnnnnnnnnnnnnnnnnnnnnnncctgacagtctctttttcgtttgtgttcnnnnnnnnnnnnnnnnnnnnnnnnnnnnnnnnnnnnnnnnnnnnnnnnnnnnnnnnnnnnnnnnnnnnnnnnnnnnnnnnnangngatctnccnactnantnanccttc

SEQ ID NO: 29636 - DNA, 500 bp, Homo sapiens
  misc_feature (1)...(500): n = a,t,c or g
nnttgaannnnnnnnnnnnnnnnnnnnnnnnnnnnnnnnnnnnnnnnnnnnnnnnnnnnnnnnnnnnnnnnnnnnnnnnnggcacgagctgggctgtcgctctcctctgtgtcctccccgcctgaactgtcaccttcttcctcgttgctctcagggtcactggcttccttgctttgctcttcctggacatcttcctcgacattcatctttccatctttgtaggaaagcaaacgcctgtcatctttatctagcacgaagccatcattcagatcatctgctgacatatgttttggtttcttaacattttcatcctcatcctttccaagcattcttcgaagtctctcagcctccagcttcctgaggtgctcctgctcttcctttgccaattctgcctccgtcttcatcctgttagagggctgcgccttcatttcaaagccaagctcgcgaaccatcatgcatatgcatcggcctaaaggagacaggcagaaaaccgtcnaccc

SEQ ID NO: 29637 - DNA, 505 bp, Homo sapiens
  misc_feature (1)...(505): n = a,t,c or g
anncttggantnccnnnnnnnnnnnnnnnnnnnnnnnnnnnnnnnnnnnnnnnnnnnnnnnnnnnnnnnnnnnnnnnnnnnnggcacgagaagggtctgaagctcaggacagacctcagatctcatggaagcatgagatcatcatccttgaattggaagtggttgagatttatttgaaataacaagagaaaaataaatcttgatgtggatatggactggaagagtaaacttcacagaccatttgagtgtatttttaactttcttagaaaaaaagtctttgaagaccagaatgtggtggtgctccacaaatagctcaaaattagcacatctagaataagctagaaaataaatctaagcagtttcaatagaatgctgttatcttgatctggctctatttgttttttttcctatcaggttaaaatctgtttcttcaatcattttgtttattccttttgataagagacttcagaggactgacagggactagctggntatgttttgaaag

SEQ ID NO: 29638 - DNA, 507 bp, Homo sapiens
  misc_feature (1)...(507): n = a,t,c or g
tttgaaannnctannnnnnnnnnnnnnnnnnnnnnnnnnnnnnnnnnnnnnnnnnnnnnnnnnnnnnnnnnnnnnnnnnnggcacgaggaagattttgctaagtctcgtgccaagtgtgatgttgatgaaacagtttcttcagctacactttctgaagaaactgaaaaaccaaagcttaaagctacaggccacgtattccaggcattacagtacttacgtaaactgtgcaaccatccagcattagtcttaacacctcaacatccagaattcaagaccactgccgaaaaactggcagttcagaattcttctctacatgatattcaacatgcccctaagctctcagctttgaaacaattgctgttggactgcggtttgggaaatggcagcacttccgagagtggcacagagtctgttgtggcccagcacaggatactgatattctgtcagctgaaaagcatgcttgatatagtagagcatgatctcctcaaacctacttgccctctgca

SEQ ID NO: 29639 - DNA, 504 bp, Homo sapiens
  misc_feature (1)...(504): n = a,t,c or g
attgaantntgaatnccctgctatgacnnnnnnnnnnnnnnnnnnnnnnnnnnnnnnnnnnnnnnnnnnnnnnnnnnnnnnnnnnggcacgaggaaacaacagctccattttatttccagttacttgcctgcattccaaaatgactttgaaaacctcagtactgaagaaaaatccattataaaagaagaaatgttgcttgaagttaataggtttgcccttgcatctcatttcctctggggactgtggtccattgtacaagccaagatttcatctattgaatttgggtacatgtacccgaatgtggtgacctggtggcatcaggacagtgtggctcagcccaggaagccgggggagaagccgctgtcactgatgctgtggttgcctttggaggttgccctcacttccaggccagctgaccttgcctcccctgcttcagagaagtgcctgcaatcctgatggggaatgcagcatctgcaccctcgaagtccactnttgactaagac

SEQ ID NO: 29640 - DNA, 510 bp, Homo sapiens
  misc_feature (1)...(510): n = a,t,c or g
tnnnntttggannnttggaatnccnnnnnnnnnnnnnnnnnnnnnnnnnnnnnnnnnnnnnnnnnnnnnnnnnnnnnnnnnnnnnnnnnnnnnggcacgagacttccagatcttccttgttacaaatnnnnnnnnnnnnnnnnnnnnnnnnnnnnnnnnnnnnntttataaatgctaaaatacataggtacacatgtacatatgtaaatttttctcacagaaatgggcttacccgatactcttctgtacattgcttattcgctttattttatcataatatgtcagtacctagagatttaactcatttttaaacagattaataactgtcagttcatttatttcataatttaatttcttcttgatggacatttaggggttttttggtcaaaaaatacacacaatatttactgcaaacagtgttgcagtaaaatctttgngcttattttatggagcattcgtccaggtatttctgtacagtaaattccagaagtgaattaccgggcaaatgcc

SEQ ID NO: 29641 - DNA, 504 bp, Homo sapiens
  misc_feature (1)...(504): n = a,t,c or g
ttnnnnnnnnnnnnnnnnnnnnnnnnnnnnnnnnnnnnnnnnnnnnnnnnnnnnnnnnnnnnnnnnnnnnnnnnnnggcacgagtgcattctcaccagttttatttttctgtctgtacctacttgaagacaaaaacttcaaagatgcaaatatataaatatgataaaattggtatgactggccctaaaagagtctaagaaaatacttgtttagctctcaagctcttcattcagactatggtttatggtgaccaacattgctagagtgattaatagctaaaatctctctgtactaggcagccaaaggtacaggtgactgtctggctgaactgggacccagtagagcttggggccagttggtcatgcttgttgcatattcattttgtacagatgctcaaacctccttggagcaatcagtagggaacagtagagggggctgatctccagtgaacccttaaaaatatagtaggttactcaaggaaagaaagtgacttcagcctatttt

SEQ ID NO: 29642 - DNA, 514 bp, Homo sapiens
  misc_feature (1)...(514): n = a,t,c or g
tnnnnntttnnnattggannacnnnnnnnnnnnnnnnnnnnnnnnnnnnnnnnnnnnnnnnnnnnnnnnnnnnnnnnnnnnnnnnnnnnnnggcacgagaaaaaatggtataaacattatgcaaataccacgtaataatagaagtaagtgaataaagcagactgtttccttttgtcttcttagggagaaaaatgttgaaataattatccatctattgggaactccaattagattaggctgaaactaggttaaatacaaagatttatagattctatcaaaaattgtttagtgccaatttttaaaatttaaacacttaacagttaaaatgacagtatgttctagtttctctgaattaaagacatattatacctgagctcggaatgttggcaaatgctcttctcctcgtctggcaaagtcttcatacccaaaaccagggtcttcaatatatcgagagacatcagatgttataatcatgtcatcctcaaaatctaaggacaataatgacaatctagtg

SEQ ID NO: 29643 - DNA, 495 bp, Homo sapiens
  misc_feature (1)...(495): n = a,t,c or g
nnnnnnnnnnnnnnnnnnnnnnnnnnnnnnnnnnnnnnnnnnnnnnnnnnnnnnnnnnnnnnnnnnnnggcacgagactgagccctcatatgaccaattttaaaagtctataccaactgattttgcccagcctgacacccagacacaatggtgagggtgtcttggacatgtcaccatcagccagtccaagggctggaaggaaacaatgcatgatttattgtgtctggcgcccatgcagtaaaaaagcccactgccatgttgcaagctgccctgtgaagaggcctccatgacaaagaactgtagggtcccctggacaacagccagcaaggcaatgagacccttagtccaacagcccacgaggaactgaatcttgccaagaaccacatggatgaggttgcaagtaggtccttcccaagtgtaccctggacgacattgttacatgtgctttccaaatccacggacttctggctgatccggggttgcaatatgcctgcc

SEQ ID NO: 29644 - DNA, 515 bp, Homo sapiens
  misc_feature (1)...(515): n = a,t,c or g
tnnnnnnnnnnatttgannacagctnnnnnnnnnnnnnnnnnnnnnnnnnnnnnnnnnnnnnnnnnnnnnnnnnnnnnnnnnnnnnnnggcacgagataggnnnnnnnnnnnnnnnnnnnnnnnnnnnnnnnnnnnnnnnnnnnnnnnnnnnnnnnnnnnnnnnnnnnnnnnnnnnnnnnnnnnnnnnnnnnnnnnnnnnnnnnnnnnnnnnnnnnnnnnnnnnnnnnnnnnnnnnnnnnnnnnnnnnnnnnnnnnnnnnnnnttcagattctgtctttctgctctaccttcttagcttgttaacttttcattctgaggcttgtcaccttatgattacaatttggctgccaaagactccatatatcacattacatacttaaggatggaagaaagagagtatatatacaaacaaaagtttctattccttttatgagagaagctacttttttttccccctgtagaggcttccagaagatttctggntatatcacattaccagaactaaatcacacag

SEQ ID NO: 29645 - DNA, 427 bp, Homo sapiens
  misc_feature (1)...(427): n = a,t,c or g
ttnannacnnnnnnnnnnnnnnnnnnnnnnnnnnnnnnnnnnnnnnnnnnnnnnnnnnnnnnnnnnnnnnnnnnnnnggcacgagaactggattttgtcaattttaccctctatggtttgtactgtgcaaaactaggcttcactttattttccaaacaaaaaatactattactggtatgttttctcaaattaccaccccactgcccaaaaaatgacacctgccacactcaagattatggtggcccccaggaggtgtgcccatcccagccctcactgggtgcaagctctctctttcttctatcatccttctgcagagaaggatttgtaattgnnnntgctttgttttaaagngggaaagaanaatattgcgaacttanaactcgacatanacnganacnttgggcannnccanacctaannntttttt

SEQ ID NO: 29646 - DNA, 500 bp, Homo sapiens
  misc_feature (1)...(500): n = a,t,c or g
annatnnnnnnnnnnnnnnnnnnnnnnnnnnnnnnnnnnnnnnnnnnnnnnnnnnnnnnnnnnnnnnnnnnnnnggcacgaggttctgctctgcccccagccctccctggaggcccctggttattcagccaccagagaaggatgcagggaatacttctcccttctcctgggcctgcccacaccacttctgctactgtcctttgtcacacacgtgtctcttagattccctttggttttgaaaccacttttagcttttctttcctaaagccaccgcgcccagccgtcaatctagttttaatatgggaaatccagacccaatgtttgaagacatttatcttcttttctccaaaacatatatgtatatgaattaaaatgtctatcaataaaaggaaacaatgattggttccaacaatcaataaaattgcaattcagaagaagtaaaggtcatggaaggctgtagtttttggattangctttgagaaatgacaagcanacaggaa

SEQ ID NO: 29647 - DNA, 299 bp, Homo sapiens
  misc_feature (1)...(299): n = a,t,c or g
tnnnnntttannntttgaanncnnnnnnnnnnnnnnnnnnnnnnnnnnnnnnnnnnnnnnnnnnnnnnnnnnnnnnnnnnnnnnnnnnnnnggcacgagtgcacaccaggatttacattcagaggcttggttcttgtttttgacaacgtcccgctggttccgccgtccgtctggatgccatctgtgccatgtttgtcatcatcgttgcctttgggtccctgattctggcaaaaactctggatgccgggcaggttggtttggcactgtcctatgccctcacgctcatggggatgnnnnnn

SEQ ID NO: 29648 - DNA, 513 bp, Homo sapiens
  misc_feature (1)...(513): n = a,t,c or g
tnnnnntttgannnntganncccntnnnnnnnnnnnnnnnnnnnnnnnnnnnnnnnnnnnnnnnnnnnnnnnnnnnnnnnnnnnnnnnnnnggcacgagctggaagaattaactatttttggagtagagaaaggattgctgttgggcatcttagtctctctcttcttttgtttccatgatattagctttctcatgttgcaagtccttagctcacaagattgttgtaagaatgattgagaagatgtgtatgaatgtgccctgtaagcggtgaaagtaatgtctctaagcttctttgtgtttaggatgtcacttgtgctgaactgtaacacccaatgttgtattttgggttgtaacttgtgctgaagtacaacatccagtgtttgtattttctataaatgactatgcattcataggaaagagaaacttaatcagtggctttattaagactcatttcgcacatatgtaatttagaaaaagaaaactgactctgtttcactgagattaatatagttc

SEQ ID NO: 29649 - DNA, 508 bp, Homo sapiens
  misc_feature (1)...(508): n = a,t,c or g
antttgantnccnnnnnnnnnnnnnnnnnnnnnnnnnnnnnnnnnnnnnnnnnnnnnnnnnnnnnnnnnnnnnnnnnnnnnggcacgaggaggtgggctgaattcagggctgactgtgttttttggcagtgtcgatttggtgttcagttttcagaggcattccgttaagccatttggaggcagtattttaagtgagaatgtggctataggggtgggcagataagcttgtgactgattcggtcagggtgttggtaggcagacctagccctggtggtcgccgtaccggtggtgctcagtatccgtggaggtctgccagcatcctagaagccctgggggttggctgtgccatcagccctgtgcagacagctgcaaagcatgacttggggcacaaggggccaccttgttatgnaggagggtgaaggtttgctgacagtgccaccanctnganatnnaganacngtgnggntaanggaattnattcagttgtcgcntgnngcananantaaac

SEQ ID NO: 29650 - DNA, 517 bp, Homo sapiens
  misc_feature (1)...(517): n = a,t,c or g
tnnnnnnnnnnnatttgannacnnnnnnnnnnnnnnnnnnnnnnnnnnnnnnnnnnnnnnnnnnnnnnnnnnnnnnnnnnnnnnnnnnnnnggcacgagcggcacgagcattcttaggaaagaagcaaccaagcctaagagccctgcatgcccttgcctaccttatgtcccattccctgtacccctgtgcgacagatacactgggcacaatagccttctctccatcctatgaagatgccacattccctctcaccattggacctttgcacatggtcttggaaccctcttctcttccttcttcatctagttaactcctcatatgtcagttcagtctcacctgaatactgcgcgccctgatctccatgactggggcaaatcaccttatcataacactcaccacaattttaatgttttagtgccatttgtctgattcatttggttaatatctgtccctcttgctggactataagctctagaaagttgagcccatgctgnttttactcaccaatgctctacc

SEQ ID NO: 29651 - DNA, 430 bp, Homo sapiens
  misc_feature (1)...(430): n = a,t,c or g
tnnnnnttttaanatttgaatcccntnnnnnnnnnnnnnnnnnnnnnnnnnnnnnnnnnnnnnnnnnnnnnnnnnnnnnnnnnnnnnnnnnnggcacgaggagagctagcaccatgacttcaataccctgaatttcaaactcatgtatgcttatacttgtttcattcattcattcattattcattcatttgatcattattttggcaaatattcaaaatattacaattcaaacacttttgtgggtatttagttttgaataagccaggcaaggtctccacacacagttccctttttctgaaatatttctgaaaaaatgagtcaatatatgtgtttttgtgtttgtatgtatgtgtatatatatgtatatgtgtgtgtanagaatgatgnatacnttnatntggananttnganggccatttgaannatcatg

SEQ ID NO: 29652 - DNA, 501 bp, Homo sapiens
  misc_feature (1)...(501): n = a,t,c or g
ttttggnnnccnattgaannccanagctnnnnnnnnnnnnnnnnnnnnnnnnnnnnnnnnnnnnnnnnnnnnnnnnnnnnnnnnnnnnnnnggcacgagaaaaattgttgtcgggtccatgaggctgttgccaggaagagcacacacaccattcttcatggcaactgcagtgagggagcagtcaggaggaagagtcctgtggcttctcagtccctgtggaggctaacgcaaagctctgtagaacaagccttagagtgcatgctctatggtctaatgagaaacttgtgtttgtgcttgcacacgtttcaatgttccctacaggatattttacaaaggtatgaaaataatggccaaccagaagctagtatcagtttggggcctaaatgcancaggtgtncctgatangcanatangcagancttttcctgcaataccccnggtctcnccangtgacangggngntaatcaaaatctcctggaancccttgagtgggnaaagct

SEQ ID NO: 29653 - DNA, 489 bp, Homo sapiens
  misc_feature (1)...(489): n = a,t,c or g
tttgaatccnttttnnnnnnnnnnnnnnnnnnnnnnnnnnnnnnnnnnnnnnnnnnnnnnnnnnnnnnnnnnnnnnnnnggcacgagcacagagggagaaggccatgagacacagtggcagagactggagcactgcggctagaagccagggaagaccagggattgctggccaccaccagaagctaggaaggggcaaagatgtattctctcctacaggtttcagagggaacatggtgctgtagacaccctgattttagacttctagcctctaggactgtgagacaatacatttctcttgtttcaagtcccccagtttgtggtgctttgtgatagcagccctanaactgagtagatctttaatcnccattgngaaagtgaaaaatttgaagctcccaacgncctttttttacagccccaactttttatnatacacnntagaggcanagagtttttcgaaggaatgccaaaaaaatgntgngctnnagaaag

SEQ ID NO: 29654 - DNA, 480 bp, Homo sapiens
  misc_feature (1)...(480): n = a,t,c or g
annccnnnnnnnnnnnnnnnnnnnnnnnnnnnnnnnnnnnnnnnnnnnnnnnnnnnnnnnnnnnnnnnnnnnnnnnggcacgagggtagtcatagcccatccaactaacataccgcctccctgcatgtcaaacataggatgctattctagttacctaccactgctgtattttgccaatgaatctgcaatatgggtagggctcagcagggacagctcacttctactcccaaaggggtggactgtggggagctggaggatccactttcaagatggctgtctcacatagctctcaatgctatcagtttttctnnnnntgggcctttacacagggnagtttgggcttcctcacagnntcccannaaacccaggaggaanattatncatataacctancntnanttccangggaagggaantagttccccctttcnccggnaanagtctngaattcccctgaaaaaaaacatgggggatgngaaa

SEQ ID NO: 29655 - DNA, 489 bp, Homo sapiens
  misc_feature (1)...(489): n = a,t,c or g
tttgaatccntnttnnnnnnnnnnnnnnnnnnnnnnnnnnnnnnnnnnnnnnnnnnnnnnnnnnnnnnnnnnnnnnnnnnnnnnnnnnnnnnnnnnnnnnnnnnnnnnnnnnnnnnnnnnnnnnnnnnnnnnnnnnnnnnnnnnnnnnnnnnnnnnnnnnnnnnnnnnnnnnnnnnngctaatttttatatttatttattttttttaagacagagnnnnnnnnnnnnnnnnnnnnnnnnnnnnnnnnnnnnnnnnnnnnnnnnnnnnnnnnnnnnnnnnnnnnnnnnnnnnnnnnnnnnnnnnnnnnnnnnnnnnnnnnnnnnnnnnnnnnnnnnnnnnnnnnnnnnnnnnnnnnnnncacacggnggcgcacacttgtagtcttaagtctcccaagtagctanggactacaggnggcaccaccacgcctggatgatttttttattttttagaacagagcttaccgggtgcctaagctggcttgaaatc

SEQ ID NO: 29656 - DNA, 489 bp, Homo sapiens
  misc_feature (1)...(489): n = a,t,c or g
ntttgannccnnnnnnnnnnnnnnnnnnnnnnnnnnnnnnnnnnnnnnnnnnnnnnnnnnnnnnnnnnnnnnnnnnnnnnnggcacgagttttttttcaactgctttagtaattatctggtagtgtcatcttaaatttgaatagaaaagataagtacgctcttgttaggcactttatattaacaacaacaaaattctagctctgtccattgaaaaagcctagaaacaaagatcaacccaatactgatgaatattactagcaggcagattgtggttctgaaatatcatttcccactaaaagaaaccagagcggtnnnnnnnnnnnnnnnnnnnnnnnnnnnnnnnnnnnnnnnnnnnnnnnnnnnnnnnnnnnnnnnnnnnnnnnnnnnnnnnnnnnnnnnnnnnnnnnnnnnnnnnnnnnnnnnnnnnnnnnnnnnnnnnnnnnnnnnnnnnnnnnnnnnnnnnnnnnnnnnnnnnnnnnnnnnnnnnn

SEQ ID NO: 29657 - DNA, 482 bp, Homo sapiens
  misc_feature (1)...(482): n = a,t,c or g
attnnnnnnnnnnnnnnnnnnnnnnnnnnnnnnnnnnnnnnnnnnnnnnnnnnnnnnnnnnnnnnnnnggcacgagcaaactcctgtgttcttccagtagacctgggagcgaagagaagcaagacattgctgtggaggcgaagtctccgtattaagatcttgctggttttttaagttttcttggcacatactagggcaaattcagactcttgtcgtgatacaagggtcgttggcgtgattttgctgcgactagagcaatttacgttcttgcnnnnntgcgcaaatttttgcaaatgnctgggctgctgangctctgactcaacttntacagcaatgggtcncaattgggtgnatatcnaaacaccnnggntgaaaccnttattnatnaannaataaaaccgangnccttntttnaggcgacctnttaaancnaaattgggccgggcttaacacgggnntttttaaaaacccttnggggcctt

SEQ ID NO: 29658 - DNA, 493 bp, Homo sapiens
  misc_feature (1)...(493): n = a,t,c or g
nnttggannccanntttgaanccnnnnnnnnnnnnnnnnnnnnnnnnnnnnnnnnnnnnnnnnnnnnnnnnnnnnnnnnnnnnnnnnnnnnnnggcacgagagttctcctaccaggagatgatcgccaacctgcctctctgcagccaccccaacccgcgaaaggtgctgatcatcgggggcggagatggaggtgtcctgcgggaggtggtgaagcacccctccgtggagtccgtggtccagtgtgagatcgacgaggatgtcatccaagtctccaagaagttcctgccaggcatggcattggctactctagctcgaagctgaccctacatgtnnnngacggttttgagttcatgaaacagaatcaggatgcttcacgtgatcattactgattctcaaacccattgggncccgccaaagnctnttcaagggncctantaccagntatgaanaaagcctnaaggaaaaaggggccnctgttgcangcnanngcca

SEQ ID NO: 29659 - DNA, 491 bp, Homo sapiens
  misc_feature (1)...(491): n = a,t,c or g
annccanattnnnnnnnnnnnnnnnnnnnnnnnnnnnnnnnnnnnnnnnnnnnnnnnnnnnnnnnnnnnnnnnnnggcacgagactaaacatacattacttttcaaattcaaattttatatatctggaatagttacaaatttctaattgatattaatatgagagtcnnnnncaaaacttgngatttcttttatgttgatttagagtttaacgttatccagttagatntaccaggtgaaataactgatttgtgttaaaatgtttgntctctagaaacaactatattntgncttttaccatagatactttggcttgctgctttctgaatgggangaatgtctctttttcaaaccaacataataactgactgtagaaattnacttgctataatatatggcaaacattaataccactcaaaaatttactgnttnttttagaagntttcatttganattatggggcttgncttgtangtatatgactgnngactcc

SEQ ID NO: 29660 - DNA, 486 bp, Homo sapiens
  misc_feature (1)...(486): n = a,t,c or g
nccnattgaanccacagctnnnnnnnnnnnnnnnnnnnnnnnnnnnnnnnnnnnnnnnnnnnnnnnnnnnnnnnnnnnnnnnggcacgaggacggaatagtggggaggttgggggaaggtattctagctcccccaccacccgcctctccagaaggcagcccctccttgcctgtgcacgtgcccacgtccacgcgtggatgcgcggtgggtgcgctcgacctgacccagctctcccgggatgcggcagatgagccggggttgcgtggaggctttcggtaccacnnnnnnnggaacggagaaaaacgagcatatcttattgtacctgaacactctatgatatggactaaatantatgactactcggggccttgcaataattggttcacccacacagncatttaatctgccagctgntcgttttaccaattctacaatcntttaaaaattcttcaatgcggaaaantgctngctggccncaaaatcatt

SEQ ID NO: 29661 - DNA, 485 bp, Homo sapiens
  misc_feature (1)...(485): n = a,t,c or g
ttgaanccctattgaatccatnnnnnnnnnnnnnnnnnnnnnnnnnnnnnnnnnnnnnnnnnnnnnnnnnnnnnnnnnnnnnnnnnnnnnggcacgagcggcacgagggccacggagttacagtgtccggactccatgccctgtcacaaccagcaagtaaactctgcctcaaccccaagtcccgagcagctgcgacctggcgatctgatcctggaccacgcagggggaaacagagcctccagggccaaggtgattctcctcacggggtacgcccattctagcctgccggccgagctggactctggggcctgcggcggctccagcctcaactcatagggcaacagtggtagtggtgacagtagcagctatgacgcaccagctggcaactccttcctagaggactgcgaactctcccggcagatcggggcgcagcttaactgctgctatgaatgatcaagatcnggagctacagaccatnattccgg

SEQ ID NO: 29662 - DNA, 210 bp, Homo sapiens
  misc_feature (1)...(210): n = a,t,c or g
ttgaanccanattnatgacnnnnnnnnnnnnnnnnnnnnnnnnnnnnnnnnnnnnnnnnnnnnnnnnnnnnnnnnnnggcacgagcttgattggtgctaagtccttggatggttcccttggcctcagtgactctgagagagccatcactgcaggtgtgatcagtgccagggtcttcctttcttccttctctctcactttttttttttttt

SEQ ID NO: 29663 - DNA, 486 bp, Homo sapiens
  misc_feature (1)...(486): n = a,t,c or g
ttgaanccanatnttgacnnnnnnnnnnnnnnnnnnnnnnnnnnnnnnnnnnnnnnnnnnnnnnnnnnnnnnnnnnggcacgaggtgaatttgaatgaaatcacaatcctaggagattggttttcttttgggtgtaaattagtaagttcagaaacagtattttgccttcatatgatttagggttaaagtaattattgtaactctaaaataataattttttttttgaaaaccatacactctgctatggattttttttcttacattgttcaaaannnnnnngatgangtanctctggggtataagggncncggatgcccaaagcncctcacnagncngtgaantnanctttttggtttanttgccnnggggcttacnaaaanntngggangctnntttaaaanaaacctttcctggttaagngtnanngaaggtnaccngtttaanaaaganagcnnatgggcntggtccccaattcnggnccctttc

SEQ ID NO: 29664 - DNA, 480 bp, Homo sapiens
  misc_feature (1)...(480): n = a,t,c or g
annccnattgaanccannnnnnnnnnnnnnnnnnnnnnnnnnnnnnnnnnnnnnnnnnnnnnnnnnnnnnnnnnnnnnnnnnnnnggcacgaggttcccagagagaggcaggggtgacaggttgtctcaaatgctaggcagacatctggagtggtaaccactacatctgttcacagtgagcacatccttgcagggaaactgggttaatcatctctattattgaaactcagacgtatagtgtttcttcataggagttttctttccttatttnnnnnnnnnnnnnnnnnnnnnnnnnnnnnnnnnnnnnnnnnnnnnnnnnnncttggntnantgnagcntcccntcccaagttnangnaattttctnacntaagcnngnaataacnnggannccnggntggggcccnatgcctgggtnaatttgnntntttcngaaaacaaaanttnccntattggcccgntnggtttgaccccccgaccc

SEQ ID NO: 29665 - DNA, 552 bp, Homo sapiens
  misc_feature (1)...(552): n = a,t,c or g
gnnnnnngnnnnnttnnnnttnaaaattgaaatcngaaacccgttatgacnnnnnnnnnnnnnnnnnnnnnnnnnnnnnnnnnnnnnnnnnnnnnnnnnnnnnnnnnnggcacgagccattcaggtggttggggggtaccttagaattttatttttggtttacagtaggcagaggaggataaagagaaagatggagagaaagataaagaacagtcagaatcatcagtcaacataaaatattttctctctccaaagatcatgttgaccagaaagaggtggacagagttggcagaacatatagtcaacagggttttgagaagagaggtttcagtcaactgagaggttcttatgggagaagcaagaataagtacagaaaacagagagaactaattcttacaaatatttttctgaaaatggtccaagtggtattagacaggtttggacacaggaatcttttagacataattngaaacctccaccatggaaatattctttatttctctctgagagattggttaattatcatctaaggagtgaagcctttgggggctt

SEQ ID NO: 29666 - DNA, 540 bp, Homo sapiens
  misc_feature (1)...(540): n = a,t,c or g
gnnnnnttnnnnnnnnnnnatttgaanaccgctatcacnnnnnnnnnnnnnnnnnnnnnnnnnnnnnnnnnnnnnnnnnnnnnnnnnnnnnnnnnnggcacgagggatcctgatgggccgtgatgggctgtgatggaccctggtgggctctgatggtccatgatgggccatggtggacactgatgggccgtaatgggccatgatggaccgtgatgggccgtaacgggccgtgatggaccctgatgggctgtgatggtccgtgatgggccatgatggacactgatgggccatgatgggccctgatggaccctgatggaccctgatgggccgtgatggaccctgatgggctgtgatgggccgtgatggaccctgatgggccatgatggacactgatgggccgtgatgggccctgatgggccctgatggaccctgatgggctatgggggtggatagaacacattccggaaatgagaggagctgaaagttgaatgtgtaatccacgtttttgaaatggtgaggagttcattttgattgctcttc

SEQ ID NO: 29667 - DNA, 485 bp, Homo sapiens
  misc_feature (1)...(485): n = a,t,c or g
gannccntatttgaanncatnnnnnnnnnnnnnnnnnnnnnnnnnnnnnnnnnnnnnnnnnnnnnnnnnnnnnnnnnnnnnnnnnnnnnggcacgagtgaccaccaaggagtatatgcagtgtgtgaccgctgtggacggggagtggctggcggagctgggccccatgttctatagcgtgaaacaggcgggcaagtcacggcaggagaaccgtcgtcgggccaaagaggaagcctctgccatggaggaggagatggcgctggccgaggagcagctgcgagcccggcggcaggagcaggagaagcgcagccccctgggcagtgtcaggtctacgaagatctacactccaggccggaaagagcaaggggagcccatgacccctcgccgcacgccagcccgctttggtctgtgagctgaggctgtcccagagaggatggcagcaggtattgggtcctgaccttctgcgggaaccctgangctgcggac

SEQ ID NO: 29668 - DNA, 553 bp, Homo sapiens
  misc_feature (1)...(553): n = a,t,c or g
gnnnngnnnnnnttnnnnttnnanaatttganancgctatcacnnnnnnnnnnnnnnnnnnnnnnnnnnnnnnnnnnnnnnnnnnnnnnnnnnnnnnnnnnggcacgagagagatcctttaagttctaaactagacttttctaagtagaagcttaaacttaaaattcaataacattcaaaaaagatattgaggtatactttaattttcaaaaatatgattgtaatgtttattggaatgctcagaggatattttgtaaaaagcaaagatataaaaaaaacaaaggaataactggattaagcatcaagcctaattgggagctgctgggtaaggaggccatgagagattgctctggagtagctttgtctttcaggagaaggaagttatagaacaatgattaatncttgaaattgatagaaaaatatatttaaatatgntttaaaatgtgagnagaattctcataatgctggnttggatatatattgatacattcaattaaaaaaactggtactacctcctaaaattgaacctatgcatacttccaaaggacagagc

SEQ ID NO: 29669 - DNA, 543 bp, Homo sapiens
  misc_feature (1)...(543): n = a,t,c or g
ggnnnntnnnnntnnnnntttgaattcganaccgcttgacnnnnnnnnnnnnnnnnnnnnnnnnnnnnnnnnnnnnnnnnnnnnnnnnnnnnnnnnnnggcacgagggcctgaaagtgcaaaagtagtaatgctggcaatttggatatatccaagataagccaaatatatgccaaagagaagttgttnnnnnnnnnnnnnnnnnnnnnnnnnnnnnnnnnnnnnnnnnnnnnnnnnnnnnngtatgtatgaaaaaacaatatgtatagggttcaggccannnnnnnnnnnnnnnnnnnnnnnnnnnnnnnnnnnnnnnnncctctgataaggggggactgctctagctctttaaccatagttgtgtttctgatactgtcactttagtgtgaacaatgtgattactttttcttgagtggaaattagagaacaattggaaaatctaggatcctaaaagagcccaaattgtgggaagcactcacagctgtaaatttgcagttttccctacagagcaagcaaatctgtatgccttttttttaagtat

SEQ ID NO: 29670 - DNA, 543 bp, Homo sapiens
  misc_feature (1)...(543): n = a,t,c or g
gaggnnnntnnnnttnaaatntgaatcngatncccnnnnnnnnnnnnnnnnnnnnnnnnnnnnnnnnnnnnnnnnnnnnnnnnnnnnnnnnnnggcacgagtgtgtgcaacctcaagagcaccttactagatgtctttaccaataagcccagtgcttactagagagcccagtgagttatcacagggcatctaccttgttttaaacttttcctccacttccgccgcctcactgagtactgctgcatcaaccactcaccacagctgggatttctcaaactgtaaaagccgtgtactgttcttgaagtgggagaggatgacctcactctcctctttatataaatctctcagaggagtacaaagaagatattacactgcataccaatgtcttacaaagccttttgtgaaaataggtctttttatttttattcctatcctcctttctccttaatatccagagatgagaggggctgggtcggggacacagaagagtgacagagtctccacccttccatactaaggctttgatgcanggccaagcttgct

SEQ ID NO: 29671 - DNA, 453 bp, Homo sapiens
  misc_feature (1)...(453): n = a,t,c or g
tnttgannnccattgaatcctnnnnnnnnnnnnnnnnnnnnnnnnnnnnnnnnnnnnnnnnnnnnnnnnnnnnnnnnnnnnnnnnnnnnnnnggcacgaggcgccgtgtccaacaggagatcgacgacgtgatagggcaggtgcggcgaccagagatgggtgaccaggctcacatgccctacaccactgccgtgattcatgaggtgcagcgctttggggacatcgtccccctgggtgtgacccatatgacatcccgtgacatcgaagtacagggcttccgcatccctaagggaacgacactcatcaccaacctgtcatcggtgctgaaggatgaggccgtctgggagaagcccttccgcttccaccccgaacacttcctggatgcccagggccactttgtgaagccggaggccttcctgcctttctcagcaggccgccgtgcatgcctcgggg

SEQ ID NO: 29672 - DNA, 452 bp, Homo sapiens
  misc_feature (1)...(452): n = a,t,c or g
ttgannccnatttgaatcctnnnnnnnnnnnnnnnnnnnnnnnnnnnnnnnnnnnnnnnnnnnnnnnnnnnnnnnnnnnnnnnnnnnnnnnggcacgagcccacctctttgcctactgtttccttcccagtgcttaatgtgtgcagtgaatgtgtaagccagtaccccttcattacaacagaaaccacattctgagcagttcagaagcaatacattcaggtttggagggcacaaaagccaacaaagttgtttccttacttaggctttcttttagttaatgttttaagaaaaaattggcatccccaagtatacatcaaattatgttggtagaagggtatactgtagaggaaaaagcttgtggttttaaaatttcttacagattaaccacacccagggcacacggtgttaccttcccttttgaaagctatagtattgacctaagtgtttctatt

SEQ ID NO: 29673 - DNA, 452 bp, Homo sapiens
  misc_feature (1)...(452): n = a,t,c or g
ttgannnccanttgaatcctatnnnnnnnnnnnnnnnnnnnnnnnnnnnnnnnnnnnnnnnnnnnnnnnnnnnnnnnnnnnnnnnnnnnnnggcacgagcatttagcattgttaaaaatctaaggcaaggggattgcttagttgaatgaacggtggtgtatgcatgaacagaatacaatgttgaaatgtgcatatgttgtcctgtggaagcatgttattagtatgattgcatttttgtgaactagaaaaaaagtaaggctnnnnnnnnnnnnnnnnnnnnnnnnnnnnnnnnnnnnnnnnnnnnnnnnnnnnnnnnnnnnnnnnnnnnnnnnnnnnnnnnnnnnnnnnnnnnnnnnnatcctatctgtatttaaaattttttttaaaagaaagaaaaaaagctctataggtagtcactgtacagattattttagttttcttccttggtttta

SEQ ID NO: 29674 - DNA, 449 bp, Homo sapiens
  misc_feature (1)...(449): n = a,t,c or g
ttgantcctattngntaccacatgattacnaatttaatatnnnnnnnnnnnnnnnnnnnnnnnnnnnnnnnnnnnnnnnnnggcacgaggatcctttttgctgatcagtgctaaagagtaataagtactcagttactgttagttactgttttgttagttagttgcctatgtaagtgtcaaaaaaacaaaaaacctattttgaatactccgtgttccaaaatgtaacaatggtaagaatttgttttgcttgaaagtgttcttttttgagggggaggatggtcacaaggtttttttaaattagaaaaacccaaacttttggaggagtccagtctcagatctgggagtattcttgatagcatgtcacataaaagcaagtgaccttcaagtaggaattggtcagatgagattttctagcttgctaactgtgctgagcagttatgggcaggtgg

SEQ ID NO: 29675 - DNA, 452 bp, Homo sapiens
  misc_feature (1)...(452): n = a,t,c or g
gannnccantttgaantcctnnnnnnnnnnnnnnnnnnnnnnnnnnnnnnnnnnnnnnnnnnnnnnnnnnnnnnnnnnnnnnnnnnnnnnnggcacgagcctggaggacctttttctttctgaaagggaaagatgaatggaaacatgcctcatcaccaccagcggaaccagtatccaaactcccaannnnnnnnnnnnnnnnnnnnnnnnnnnnnnnnnnnnnnnnnnnnnnnnnnnnnnnnnnnnnnnnnnnnnnnnnnnnnnnnnnnnnnnnnnnnnnnnnnnnnnnnnnnnnnnnnnnnnnnnnnnnnnnnnnnnnnnnnnnnnnnnnnnnnnnnnnnnnnnnnnnnnnncaaacccccaactgttgactcattcaattacttctgtgtccactgtgtggcaggcacctatccacagaaggtgtactgtctcccaggggtggttcccct

SEQ ID NO: 29676 - DNA, 537 bp, Homo sapiens
  misc_feature (1)...(537): n = a,t,c or g
tctnatcanactgatctcttngaancccctnnnnnnnnnnnnnnnnnnnnnnnnnnnnnnnnnnnnnnnnnnnnnnnnnnnnnnnnnnnnnnnnnggcacgaggttaagtgttgagataacctcttaaaattcttgacattttgatctttactggtagtgtctgaagattaatttgaaaggtaattatctgatgtctaacctgctttgatattagaatgtacaggatgtttagttttctagaagaaggggtttcttgcttaatagtgatcagaattgcagggcagaaatggttggcttgtagtcctttctataagttggataccatttttatgttttggaatcttgccttttaaatttcaagatttttaaatcactgtttctagaaagtaattatatattgaattactactacatgctcagcattatgctgaggtgtaataatagagatgagacactgaacatacttaactggtgcacctagttgaattacatttatttacgtatttttttcttagctgaaaatactccttgatcaa

SEQ ID NO: 29677 - DNA, 530 bp, Homo sapiens
  misc_feature (1)...(530): n = a,t,c or g
ctttgatacnttgngaccnnnnnnnnnnnnnnnnnnnnnnnnnnnnnnnnnnnnnnnnnnnnnnnnnnnnnnnnnggcacgagaactggaagagtttcccttcctgagcttcagtggaagcaacaggagggtgggccacgtccaggacagtgggagagcaaggatggaccctctgtgtccacctccagtgtgtggcactgttttccatctcatcttggacatatcatggggctacagcatgcctcagaagcctgccagaacctagtgatggtttccagcatctgggtttggggaggactgtggtgatgcgctagggatagccatctggaaggggtggggcagagacagcaggagccgtagtcgtctcaggagcctactctgattagcttataagttggcctcttttcatgatttctgggtcattggtgagtggataggagttataggatcctttgtgggtgagtagaagatactgtggcagataggttttactgaacccacctgccatgtaaatcttttctttttaaagg

SEQ ID NO: 29678 - DNA, 536 bp, Homo sapiens
  misc_feature (1)...(536): n = a,t,c or g
tnntttgannnccnttggannacnnnnnnnnnnnnnnnnnnnnnnnnnnnnnnnnnnnnnnnnnnnnnnnnnnnnnnnnnnnnnnnnnnnnnggcacgaggcaacaaagaaacacacatttagtctgtgttagtatatgtgcctgtgtttacagatcattttacaggtccccactccataatttgagtgaatttgtatcattttctttttgttcaccattgtgatctctgtgcctttactacttaaatattgatttgctgtggacaactgcccaatccggttacaacctggcaaatcttatccagatttaagaaaatgactctgtaactttagtcttgttgctattgagagtcaaatgactgagcttatcttcattgcctttttctttcttgggtagcttttaagtcaagttttttgtttaagtagcttttaagtttgaagaataaactcattagcaaacacttagaataatccaaagtaatagatgatattttggcaccagttttgttttgtatggattattcacacgtttccct

SEQ ID NO: 29679 - DNA, 536 bp, Homo sapiens
  misc_feature (1)...(536): n = a,t,c or g
tcctttgaatacccttngaancccctnnnnnnnnnnnnnnnnnnnnnnnnnnnnnnnnnnnnnnnnnnnnnnnnnnnnnnnnnnnnnnnnnnggcacgagcggcacgagcggcacgagcggcacgagagtttttgaagaaaaacacagcaaacatatctctccctttaactgagctgagtttaattgagcgagaatgaactctggcattctccttttccttcagcaaatgaaatgcagatttttagtttgctctgtaggtgggtgctggtgggattctcttctgttctacttccttccacaacactgccactctgagaagttcgggcaactcaggacactcttgtattaactatgttttcttaagacttgatgactaagacctctgacatttctagaaccttttgtgaatgttacactttgtgcttattttcctgttaggtcaacaggttaattgtggcaggatatctaaatatgtggatttcagtgttgagaaggaactctgggtacccaggaacaaacagcttgtactttagga

SEQ ID NO: 29680 - DNA, 545 bp, Homo sapiens
  misc_feature (1)...(545): n = a,t,c or g
tnnnnnnnnnnnntttgaannaccnnttntgacnnnnnnnnnnnnnnnnnnnnnnnnnnnnnnnnnnnnnnnnnnnnnnnnnnnnnnnnnnggcacgagcgggcaaataaggtgattagcaagagcagagtaaaattattaggaagtgctgatgaagggacattgtgggtgttcacccgtgaaggagggacaaagctctggtttatagagtttgagtgttaagcagaggaatgaaagtatccatagacctgtggtgcttaacagcctaaatgttcatcaaatttaaccaaacctagtttaactaaggttaactttgttgcagtactaccacaggatggactagtgtggaaccatgacagaaagaaaaaagagctttatatattgactatgaaagatacacttatagtattaacttttaaactaatgtatataatatggtcctgtttaagtaagaaagaaggtggtagggcaaaggataggcatgcttatttggtatttaaaactttggaaaaaaaataaccaaattattatctgggattctagct

SEQ ID NO: 29681 - DNA, 529 bp, Homo sapiens
  misc_feature (1)...(529): n = a,t,c or g
nnnnttggnnncctttggnnnncnnnnnnnnnnnnnnnnnnnnnnnnnnnnnnnnnnnnnnnnnnnnnnnnnnnnnnnnnnnnnnnnnnnnnggcacgagcagaaacctacagattgaaaaagctgaatgaagctcaaatatgataaactcaaagaagttcacacagagacacatcacagtcagatttctgaacactgcagacaaaaaatgaagatctcgaaattagcaagaaatgaccttacctaagcaatttgaatgacagcagatttcccatcagagatcataaaggtcagaaggaaggggtacatacaacattttttctagtgctgaaagacaaaaactcnnnnnnnnnnnnnnnnnnnnnnnnnnnnnnnnnnnnnnnnnnnnnnnnnnnnnnnnnnnnnnnnnnnnnnnnnnnnnnnnnnnnnnnnnnnnnnnnnnnnnnnnnnnnnnnnnnnnnnnnnnnnnnnnnnnnnnnnnnnnnnnnnnnnnnnnnnnnnnnnnnnnnnnnnnnnnnnnnnnnnnnnn

SEQ ID NO: 29682 - DNA, 537 bp, Homo sapiens
  misc_feature (1)...(537): n = a,t,c or g
tnnnnnnnnnnnntttgnannacntnnnnnnnnnnnnnnnnnnnnnnnnnnnnnnnnnnnnnnnnnnnnnnnnnnnnnnnnnnnnnnnnnnggcacgaggccagctaannnnnnnnnnnnnnnnnnnnnnnnnnnnnnnnnnnnnnnnnnnnnnnnnnnnnnnnnnnnnnnnnnnnnnnnnnnnnnnnnnnnnnnnnnnnnnnnnnnnnnnnnnnnnnnnnnnnnnnnnnnnnnnnnnnnnnnctttctttttgaataatatttaacagttcaaactattcagcagttcagacttgcctttgcctcagtcagattaatgaatgccctggagtattctagacagtgtcctcaagatgagcaaggtaaactttcaaaacagaaaaatattaaatgctaggcctaggcaagcagtaacataattggttgaggctttttgacctaatcacaatctgngtatcagcctctatctccgttatctcaacagagtgttttgttttcaggaaaattcctaaaaaccttggtgaaagattgaatctc

SEQ ID NO: 29683 - DNA, 458 bp, Homo sapiens
  misc_feature (1)...(458): n = a,t,c or g
tnnnntttnanatttgaanccnttnnnnnnnnnnnnnnnnnnnnnnnnnnnnnnnnnnnnnnnnnnnnnnnnnnnnnnnnnnnnnnnnnnnnnnnggcacgagtgggactcctctggaatcctgtttttcagggagccacaacagaactgacaatgctgctgcccctttctccttgtcttggaaagcatcttaatcgtcttctgttttgcccagaaataagcctgatttctcagtggttttctttctcctgttacttgcagtatgaataaaggtggaaagtgaatttttttaatggaaagcagcaggtcagatttactttctgactgcgactggcttagcagaggttagggcaggactgctgaggcagcacatgccctgagtatggcaaacagacttttgtcaaagaccagaagaaagtgtttttaaacaaaagcccagtagttcctaaagttgggcg

SEQ ID NO: 29684 - DNA, 417 bp, Homo sapiens
  misc_feature (1)...(417): n = a,t,c or g
nnnnnnnnnnnnnnnnnnnnnnnnnnnnnnnnnnnnnnnnnnnnnnnnnnggcacgagggttatgaatggaaccaagttactgagttagagcattttctaattaaatatgaaataggagctgaaggcataatttattgattagaatgacagaaaatgtttttatgctgtacatgccttttgaacatttttcaaaatacttgtaactttgaagaaagtgtgtatattgttagaaggctgtaaggagagcaggtctctgctctggtggtgattttactcaagaggggatgtgaatatttatatttttgtgtggatttctgtgtaggagtttttgtatgtatggaagaaagagaagaaaatactcaaatacctgaggataatttgctcaggagtcaaagtgataaactagtttaatgaat

SEQ ID NO: 29685 - DNA, 449 bp, Homo sapiens
  misc_feature (1)...(449): n = a,t,c or g
attgaancccttnnnnnnnnnnnnnnnnnnnnnnnnnnnnnnnnnnnnnnnnnnnnnnnnnnnnnnnnnnnnnnnnnnnnnnnggcacgagaaaataaatgatcttggttgcagccacactgagacactggtgggccatggagaggagagctgatgctcacctggagggtcctgcggagttcagctctgcttagcagttgggtatctcacctggaaagcctgagattcttgttcttctgaggcttaacacatgggagaaaaggaaggttggatcagaactttcagcaacaggctctggtttccagcacaaagtggggctgtctcctatgctgggcaagttttcacacagaatttcagnnnnnnnnnnnnnnnnnnnnnnnnnnnnnnnnnnnnnnnnntatgctgattctttataatatgggtttttagtaaaattctggagatagtac

SEQ ID NO: 29686 - DNA, 453 bp, Homo sapiens
  misc_feature (1)...(453): n = a,t,c or g
atttganntntgaanccttatnnnnnnnnnnnnnnnnnnnnnnnnnnnnnnnnnnnnnnnnnnnnnnnnnnnnnnnnnnnnnnnnnnnnnggcacgaggtacaattgggtgtgtcagtgtcactcctgagttctgggatattcagaaaggtattcttgcctgtggatagttgctagttggatttccgtgtgggggtgtggagctggagaaattctattctgccaccttgtgaagtcattctctggaataattttagatttacatagagttgcaaagatggttaaagacagttcctatacactcttcacttagtttcttctgatgttaacctcttacgttaccatggcacatttattaaaaacgagaaattaacattgtacaatactattacctaaatgacaggctatatttaaccactgcattccagcctggtggatataaaaataataatag

SEQ ID NO: 29687 - DNA, 471 bp, Homo sapiens
  misc_feature (1)...(471): n = a,t,c or g
tgaatccaaattgnnnnnnnnnnnnnnnnnnnnnnnnnnnnnnnnnnnnnnnnnnnnnnnnnnnnnnnnnnnnnnnnggcacgaggaaagcgttcaagctcaacaacgccctgggagaagaggtggaggctcnnnnnnnnnnnnnnnnnnnnnnnnnnnnnnnnnnnnnnnnnnnnnnnnnnnnnnnnnnnnnnnnaccataccatctttctttttcattgctctcatgaattctccaataatttctcctaatacattgcattaaaaggaaagaggtcctttttcaaatagattttaaaaggattagaaaaagtctggatcctaaacatttaggaaagtgactcagcatttaggaactctgcagcgccactctcagcatcttcctcgtgtaaatgtgctgagtcagcttccttatctagaaatagtctgatactacctaactcagaagtgngcctgcctcctttcttccac

SEQ ID NO: 29688 - DNA, 468 bp, Homo sapiens
  misc_feature (1)...(468): n = a,t,c or g
ttgnnnnnnnnnnnnnnnnnnnnnnnnnnnnnnnnnnnnnnnnnnnnnnnnnnnnnnnnnnnnnnnnnnnnggcacgagctagcaccatgattcaaacnnnnnnnnnnnnnnnnnnnnnnnnnnnnnnnnnnnnnnnnnnnnnnnnnnnnnnnnnnnnnnnnnnnnnnnnnnnnnnnnnnnnnnnnnnnnnnnnnnnnnnnnnnnnnnnnnnnnnnnnnnnnnnnnnnnnnnnnnnnnnnnnnnnnnnnnnnnnnnnnnnnnnnnnnnnnnnnnnnnnnaaaaagagtgaaactccgtctcaaaaaataaataagtaccaggaacccaccttaacttaaaaaaagaaaatgtattggcatatgtcactggaagcccaagggctagatccaaggggtcatacaatgncattgagacctacctntgnggaccnnnttttganatgacttcaggcntaccanacaggcttt

SEQ ID NO: 29689 - DNA, 468 bp, Homo sapiens
  misc_feature (1)...(468): n = a,t,c or g
ncnnnnnnnnnnnnnnnnnnnnnnnnnnnnnnnnnnnnnnnnnnnnnnnnnnnnnnnnnnnnnnnnnnnnnnnggcacgagagcccagggacagaaaggagcccacctggggctttggtcttcacctccagactcagagaggcagcttggagcagcaggtggagaactggaccacacatgtggggtttctgtagtcacagctttgtgggtgacatgaaatgttattcagtagctgcatatatacaaacaggtcaaaacagagctgctctgactgaagcagggtggggggcttatctgtggcctttcttttgtctcccccacccccatataaccttgaggcatccataggattcagttggaagagctctacaggtccttccagctctgatgctgtgactccctgatactctttggaagcnaacccaagggtcccaaccttntggganccttatttgggggcattgaaac

SEQ ID NO: 29690 - DNA, 474 bp, Homo sapiens
  misc_feature (1)...(474): n = a,t,c or g
ttganncttnnnnnnnnnnnnnnnnnnnnnnnnnnnnnnnnnnnnnnnnnnnnnnnnnnnnnnnnnnnnnnnnnnnnggcacgaggaatatcccattgccattatctctcactttgggcactcagctgagaccagatcagtactgtggggccatctgtttgccaggacccatttgggctgattcaagagggaattaaataatgagtgttttgaatgaaaagagaggttagaacagttttaaatttttctccaaattgaaataaatagtttcagtttggcttttaagcttaacactgacatatataaaagcaactagctgtacattaaggcaaatacttgacccagctgctctgggtctgacagtgtaagaatagaagaattgagtcctggataatctggcttgctgtgttcactttggttgcaatatcgaaacagggactagaccccaggagtcccactctgacccaggctctt

SEQ ID NO: 29691 - DNA, 491 bp, Homo sapiens
  misc_feature (1)...(491): n = a,t,c or g
tnnnntnttnnntcngaanctnnngntccnnnnnnnnnnnnnnnnnnnnnnnnnnnnnnnnnnnnnnnnnnnnnnnnnnnnnnnnnnnnnnggcacgagctggactacagtaaccaagaacctttcttctgtgttattaagacacaaaaggcaagatttcagctcatactcttttaaccaagccagaattaactttttgttataactgaagaagcaataaacctcaaggcttggatagtccctatctgtttgcatttactcttcaatttcctgcctgaatcacacctccaccttcccttaaaggtgaaagcctnnnnnnnnnnnnnnnnnnnnnnnnnnnnnnnnnnnnnnnnnnnnnnnnnnnnnnnnnnnnnnnnnnnnnnnnnnnnnnnnnnnnnnnnnnnnnnnnnnnnnnnnnnnnnnnnnnnnnnnnnnnnnnnnnnnnnnnnnnnnnnnnnnnnnnnnnnnnnnnnnnnnnnnactcaggaagg

SEQ ID NO: 29692 - DNA, 492 bp, Homo sapiens
  misc_feature (1)...(492): n = a,t,c or g
gggnnnnntgtnganttntttttaancnctgatctctttnnnnnnnnnnnnnnnnnnnnnnnnnnnnnnnnnnnnnnnnnnnnnnnnnnnnnnnnnnggcacgagccggatgatggcggccggcgcggccctagccctggccttgtggctactaatgccaccagtggaggtgggaggggcggggcccccgccaatccaggacggtgagttcacgttcctgttgccggcggggaggaagcagtgtttctaccagtccgcgccggccaacgcaagcctcgagaccgaataccaggtgatcggaggtgctggactggacgtggacttcacgctggagagccctcagggcgtgctgttggtcagcgagtcccgcaaggctgatggggtacacacggtggagccaacggaggccggggactacaagctgtgctttgacaacttctttagcaccattttcgaaaacttggggtctttgaactgatctttgacaagcct

SEQ ID NO: 29693 - DNA, 480 bp, Homo sapiens
  misc_feature (1)...(480): n = a,t,c or g
tnnnntttgannatntgaanccntnnnnnnnnnnnnnnnnnnnnnnnnnnnnnnnnnnnnnnnnnnnnnnnnnnnnnnnnnnnnnnnnnnnggcacgaggtttcttttgttttgtaaatgagacaagggcccagagatgtactggggctggaatttgaaaccaggcagcttgctgctagagcctgtactctttgaactattatgtcgtaatagatgacaggcctggttgtccgtttagaaaaactgtagaacattatcctttacagcagatatgaaatgtagaaagatgtggttttgttatacagaagtaagattttatggagatggcttgttatttattattataaatgtttatgctttgacaaactgtcactactcacaatttgcaggttttaaaatgatgtcatgttgtgtatcacatctaaaattttaatggcaagccttaaaaggctttggaagnattttaagtatctaattctg

SEQ ID NO: 29694 - DNA, 471 bp, Homo sapiens
  misc_feature (1)...(471): n = a,t,c or g
annncntnnnnnnnnnnnnnnnnnnnnnnnnnnnnnnnnnnnnnnnnnnnnnnnnnnnnnnnnnnnnnnnnnnnnnggcacgagctctctaccttgtatgtgccttcacctttcccctcctcctctgcctcacctagtccccatctctctctctgctcattgaaatcctaccatcattttcactccagataagatccaccttctccctcttgaagctcccagactcctgtttgttacagcagtcagtcatatgggccttgctcatttagtgaacatgtaacctcttcctctgccaggcctcttttacgctgtctgatagttattttccaggtatgagcctagtcttaaggagatcaagaccacagtttatgtttttactccatgcacgataccttgcataaaataggtgcccattaagcatgcagatactctctttcacattggcctgcanaagggggttggccttctcag

SEQ ID NO: 29695 - DNA, 470 bp, Homo sapiens
  misc_feature (1)...(470): n = a,t,c or g
tttgaanccttnnnnnnnnnnnnnnnnnnnnnnnnnnnnnnnnnnnnnnnnnnnnnnnnnnnnnnnnnnnnnnnnnnnnggcacgaggggtcttcatcataagttcctttgtggcaactgacatgattgccgctgcaccggctttctgctgatctaagatgtttcaaaatctgaacataatcacagcaaaagccagtatcttagaggaggtcccgtcatcaggagctagtcaccgcagcgtcagtgccatccttgtttcagcagcttctagtgcctcttgagcattcttgatatccccattctgaattcacgtagtccagctaactatcagtgactgtctctttcctgtgaccagctgagaaaacctggccaggaaatcaacatcatcttcgtggncaatgctgaaaaaccagcagactgnagtacttggttaaaaagaatctactggntggccccggnggntacaactg

SEQ ID NO: 29696 - DNA, 480 bp, Homo sapiens
  misc_feature (1)...(480): n = a,t,c or g
tnnnnnnnnnnnattganncntnnnnnnnnnnnnnnnnnnnnnnnnnnnnnnnnnnnnnnnnnnnnnnnnnnnnnnnnnnnnnnnnnnnnnggcacgaggattttggtattcaagcgagatgcttgaaccaatcacccatggatatctagggacagttatacaatggtgttgaagaactgacaaaacctggcagtttgacacagacatatgggaaaaattgaaggagtcaaaaggtcacttagttcatatcagaaatgaagtaaggaaggatgttgatttttggggaacctgaagagttgaggtagtctaggtttgaagtaatgtaaggatagcctagttaaagaattcttcagggatttttagcgatatggttgtggtaattgagctaaatattctgcaaaacagccatgctgttgttttgacaacctcttttaaaacaatttttttttttggnttcatttttccccaagtaacctggg

SEQ ID NO: 29697 - DNA, 474 bp, Homo sapiens
  misc_feature (1)...(474): n = a,t,c or g
gaanncttnnnnnnnnnnnnnnnnnnnnnnnnnnnnnnnnnnnnnnnnnnnnnnnnnnnnnnnnnnnnnnnnnnnnggcacgagcatggatgtggtggagcagcagacagagaacctggagctgcacaccaatgccctgcagatcctcctgggtgagccacccctgccagccaggccctcctcctgcctcctcccctctgttgcacagcccggcccctcccagacaggtcaagcggcacccttaccttccctctctcctcttcctcttcattcttcatggccttctcactgcctggctgttaaagctcaggtcgaaagcctacattgtaaggtgcccaagggcgcagatgttcgtggatgtttcttggtttctggtctttaccctgctcccctagggagcttcatganaatgtctagagctgcacctggtgcttggtagacgttccataggtgtttgttggaggaaggaatgga

SEQ ID NO: 29698 - DNA, 462 bp, Homo sapiens
  misc_feature (1)...(462): n = a,t,c or g
nnnnnnnnnnnnnnnnnnnnnnnnnnnnnnnnnnnnnnnnnnnnnnnnnnnnnnnnnnnnnnnnnnnnnggcacgagcagggaacatcaacacaaataattcagaattacaggtaatccaaaaatgtcttttgaaactggaatatgtcttggtatttatttaatatgactgggcagctttcaaatacagttgacccttgaccaacacagagggttagggatgccagcaccctaaacagtcaaaaatctgcgtataacannnnnnnnnnnnnnnnnnnnnnnnnnnnnnnnnnnnnnnnnnnnnnnnnnnnnnnnnnnnnnnnnnnnnnnnnnnnnnnnnnnnnnnnnnnnnnnnnnnnnnnnnnnnnnnnnnnnnnnnnnnnnnnnnnnnnnnnnnnnnnnnnnnnnnnnnnnnnnnnnnnnnnnnnnnnnnnnnnnnnnnnnnnnnnnnnnnnnnnnnnng

SEQ ID NO: 29699 - DNA, 486 bp, Homo sapiens
  misc_feature (1)...(486): n = a,t,c or g
tggncttcganacccnnnnnnnnnnnnnnnnnnnnnnnnnnnnnnnnnnnnnnnnnnnnnnnnnnnnnnnnnnnnnnnnnnnnnnnggcacgagaaatgatacgaaataatttattgttcatatgttaggcatgactatggcattatgggtatatgtgggtgagtccttaagtgttagagattcatactgaggtatttaaggctgaaatgttatgcctgtgatttacttttagatacttaaaagcgaaaggtggaaggnnnnnntnaggntnncnnnnnncatagcngggataggtnnanggccagccttangtncgngnanttatanttcantnntntaatccgngaggnggcananaaanctanngnnanctatntanggctanntangcntnntcngtcttncntcatgccctttnctttcntccccttnntcnnngnggnnntnanngnctggagggnntacctgnngnnncncccntgttt

SEQ ID NO: 29700 - DNA, 508 bp, Homo sapiens
  misc_feature (1)...(508): n = a,t,c or g
actccnnnnnnnnnnnnnnnnnnnnnnnnnnnnnnnnnnnnnnnnnnnnnnnnnnnnnnnnnnnnnnnnnnnnnnggcacgaggaaaaatgtgacaaagaaataatgaaatctcttttctttataatttgatacttttcaaagctcaaggggcttgttgaaagttgaaagtaattatgggttttttttgaacnnnnttgctnnnantcccgcngctncaatncctncntcccanactttnacctgagccacnnancnctctngnncaangcccgantnccttctgtncccnnggcgcncaccngngccttatntngcgaaaancctgccttgccccnttgccgncctnagcncacnncanactcctttttggacagttncccattgngntacagctaccgattttnttnncngnggtcgaccnnttaccgccaactacncctctngatnacccctnnnnggctnncctccnngacnncccttgtnacttagnacacccnnnagcctct

SEQ ID NO: 29701 - DNA, 526 bp, Homo sapiens
  misc_feature (1)...(526): n = a,t,c or g
tnnnntnnccccttggactccattnccnnnnnnnnnnnnnnnnnnnnnnnnnnnnnnnnnnnnnnnnnnnnnnnnnnnnnnnnnnnnnnnnggcacgagggaaaaattacacagctcatatgtggcaaaccaagatttgaatctaagaagtcaatctccagagcctatgctcttaacaactaaactgcttttcccaaattgctgctatggatgagaagacagggcaggagtccttgaccttggtgtagccaaaataacctaactggaagtagagatggttcaaatgtacaaagtgaaggtcactcaaattccctggagatcatgaaaatcaggagaagtagaatttggggacagctatttagggcaatttcattgatgcccactctctagacagctctgcctatggccgctgcactcatttgaggcccaattcccaatgtactttttatgcttttttttcccctggcagttattatttagtagcaagagagtagtgccagctcagagatgaccaagagaaatgtct

SEQ ID NO: 29702 - DNA, 478 bp, Homo sapiens
  misc_feature (1)...(478): n = a,t,c or g
ttggannatnnnnnnnnnnnnnnnnnnnnnnnnnnnnnnnnnnnnnnnnnnnnnnnnnnnnnnnnnnnnnnnnnnnnnggcacgaggaaagacatggctccatcccaggttccctgatcccaaatctccccctcattgcaatgtaccaagctgcctccaataagatcaagagtcttgacgatccccaagctagtccactcagtccagttttcctgccagactatagctgttttgcattccttatcttgtgttgaagcaaaccgggtaaggaaactccccaccttttttattaatgactcattttcagccaaaacacattgcagccacatcaggtacatgtgcccactcagcaaagacgtactgtgagaaagtaacatctaagttacttggtccaaagcccttctacatcaatcatcaagcaaccaaccctnctttgctgaaatctccaggggactagnccnttggngggggaaaaagg

SEQ ID NO: 29703 - DNA, 514 bp, Homo sapiens
  misc_feature (1)...(514): n = a,t,c or g
cttgacttcgaanaccaatnnnnnnnnnnnnnnnnnnnnnnnnnnnnnnnnnnnnnnnnnnnnnnnnnnnnnnnnnnnnnnnnnnnnggcacgagaaaaataaagaccctattcccaaacaaggtcacatttttttaactgaatcacctaaaaataaagaccctattcccaaacaaggtcacattctagggaataggagattaggattccaatatttccttttttgagagaatgcaattcagcccataaagctccccaagggcagagactcctggctctgtcttctctgtgccccagtgccagtgctgttggaggctctcagtgacctcaggcagctcacacaaatgaagggagaaaaactttgggagcatgtgcatattcttttgataaatgtgaatgtgtatttgcctcagaaacactggggagaggaagtagaacacaaaggttaagagcaagactctggagccggagtgcctagacttgaattctgactcactgtgcaaccttaccaggt

SEQ ID NO: 29704 - DNA, 523 bp, Homo sapiens
  misc_feature (1)...(523): n = a,t,c or g
tnnnntnccccctttgactccatnannnnnnnnnnnnnnnnnnnnnnnnnnnnnnnnnnnnnnnnnnnnnnnnnnnnnnnnnnnnnnnnnnnggcacgagcatgtggctgagatgagtttgacccccgcctgtgggcctggacgtgggcgtgagatgtgttcctgtctcccagagtcatggcctccagaaggagccatgtggaggcccagcacctggagcagttctgaatgcctggcttcttggaggccaaggttctaggcaaggtgggtatccaggctgggttggggcagtgcctctcagaattggggctggagttttctgctttctgcctcagcagggatcactttgatctgaaaacctcctctctcctggcctttgaaagatgctgactagagcacactctcctgcctttgctgggtgcttagaagaaaggccttgaggtaaccctgttccagcctccccacaggcccctgcagccacgtggactgaccagagctccacacacgggcaggtgtggcctga

SEQ ID NO: 29705 - DNA, 516 bp, Homo sapiens
  misc_feature (1)...(516): n = a,t,c or g
ttggactccatacnnnnnnnnnnnnnnnnnnnnnnnnnnnnnnnnnnnnnnnnnnnnnnnnnnnnnnnnnnnnnnnnnnggcacgagctgcagaggaactgggtttgaggcctgatgaaaagagcaccctgacgcagtcttagagaggtggcagctgacctccacgggctaaaaggtttccagcaggacatgcccagggcagtaggccggggcaccactggctgacatcttgggtcttccgcatttttggctggagatgcactcaggtggtggcaatggtattctgcttgtacagggcaggttcctgccaggtcaccaaagtcccaagaaggggtttatcaacctttttgcacccaaaccaaaccaccctgaaactccaccataattacttcatgtgacttcctaaaaatgaaaccatgtcccttagatctaatatctggattccaattatgatttcttttttcttcttctttcttccttcttcntccttctccttctccttctccttctncttct

SEQ ID NO: 29706 - DNA, 524 bp, Homo sapiens
  misc_feature (1)...(524): n = a,t,c or g
tcccccctttgnctttgatacccantnnnnnnnnnnnnnnnnnnnnnnnnnnnnnnnnnnnnnnnnnnnnnnnnnnnnnnnnnnnnnnnnnnnnggcacgagctggaaagggagacagaaacttgcctgaagcgatgagggaaggacctttcccaccatacaccctatatttttaaagcacaagtacaaatcttttagctgctctgccctgccaagaaaccctgactcaccttttctgccccgatccatctcctaggaaaagataatatttattgattatttcctatgtgcatgtgttgtgataatcatggttaataagtttgtgtgcgccaaactgaatgccactttttcagatgcggaagctcgatttatcccaagtaacagcttaagagaaggaatgcagttgacccagattgcttttctgctaaacccatgctctttaaatctaacaagagatccaaaactgtgatggtggntgacaggttaacaggaagggntatgtgattcagctggaggttgcccac

SEQ ID NO: 29707 - DNA, 511 bp, Homo sapiens
  misc_feature (1)...(511): n = a,t,c or g
annnncnnnnnnnnnnnnnnnnnnnnnnnnnnnnnnnnnnnnnnnnnnnnnnnnnnnnnnnnnnnnnnnnnnnnnggcacgagcccaaagataaacaatgggagaaaatggaatttcagtgtttcatgcaaaaagttcctatcacaagggaatcgcagttttcattctttgggtaggtaggtagatttctccatgttctgtgaaactgtgttgttgcggggaaggaagcaaaagaacaaatcaatagctgaggatgggggcatattaggnnnnnnnnnnnnnnnnnnnnnnnnnnnnnnnnnnnnnnnnnnnnnnnnnnnnnnnnnnnnnnnnntcttnnnnnnnnnnnnnnnnnnnnnnnnnnnnnnnnnnnnnnnnnnnnnnnnnnnnnnnnnnnnnnnnnnnnnnnnnnnnnnnnnnnnnnnnnnnnnnnnnnnnnnnnnnnnnnnnnnnnnnnnnnnnnnnnnnnnnnnnnnnnnnnnnnnnnnnnnnnnnnnnnnnnnnnnagggg

SEQ ID NO: 29708 - DNA, 518 bp, Homo sapiens
  misc_feature (1)...(518): n = a,t,c or g
ttgaanncccnnnnnnnnnnnnnnnnnnnnnnnnnnnnnnnnnnnnnnnnnnnnnnnnnnnnnnnnnnnnnnnnnnnnggcacgagtagggctcggcgtgggcctatatgtaaggcaggtttgaaaaaaatctttgattaagtaactatagcatgaatcaatacggtgcatgaatatacatagtattccttaaactgtgcagacacggtttatctgtaatttcccattacaaatactggggaatacaaccgaatgttaatgaacatcacatccttcaaaaatttataccaattggaaaatataaggctctctttactcacatttacctgctgcagggctgtatttacactgactatggcttaagaaataaaccataagatcaataaaaacagcaagtaattgcagcatcaaatcggaattgtcaaaatttcttcaatgttagcggttcacaattaagtggttcggtacatctgngttgnaattaacctgcattaccatcaaatatgtacgggttttta

SEQ ID NO: 29709 - DNA, 514 bp, Homo sapiens
  misc_feature (1)...(514): n = a,t,c or g
ttgaanncccatnnnnnnnnnnnnnnnnnnnnnnnnnnnnnnnnnnnnnnnnnnnnnnnnnnnnnnnnnnnnnnnnnnggcacgaggaagatagtccagaaatagaaccacatagtagatttttcaagaaggtaccaaattattctgatgggaaaaacaagattttttaacaaattatgctgaaataattttttgtttgtgtggaaataaatgagccttgaccccttttcattgcatacacaaaaattaagatagatcataatgtaaaactggaaatattcttaacccccatttcactggatgagaatttaattggttagcttcaagggaaagtaaccctaaattgctaggcttttatcgaacaggagaaacagtggatacccatagttgacttttctgtttatttttgcaagaaaaccttatttatgttaaattattttttctttacatatattgccctaatatttaagaaagcttttgggttatagaagaaccnatggacntttccaattag

SEQ ID NO: 29710 - DNA, 489 bp, Homo sapiens
  misc_feature (1)...(489): n = a,t,c or g
nattnnnnnnnnnnnnnnnnnnnnnnnnnnnnnnnnnnnnnnnnnnnnnnnnnnnnnnnnnnnnnnnnnnnnggcacgagaatagacgaatcaatgaattgatacttaaagggaaaacagttgtctctagtcaaaaaagagctacacttagaaaagagaaaatagggcacacacacacacgcgcacacacacagtggcctgagggaaatgaggaaaacccaagctacaaatgcctttctggaatcatagaaagccagggaaacattcagagtgtgtcctcacacaagttctttatctcactgcctgactgtgtagctcccaccctcagggcagaacttagagaattttccaggtaccaccttctggaagtaaatttcaagtgttatagtcagttctatcctaagataatgagttgtggactttctaatctggggctaattcaggcattntaagcctaaaaatatgccctgganatnttnaagantcccc

SEQ ID NO: 29711 - DNA, 526 bp, Homo sapiens
  misc_feature (1)...(526): n = a,t,c or g
nnnnnnnnnnnnnnnnnnnnnnnnnnnnnnnnnnnnnnnnnnnnnnnnnnnnnnnnnnnnnnnnnnnnnnnggcacgaggtggtacagtggctgatcacatatgtggagctgcctcagtatgaggagaccttccggaagctgcagctcagtggccatgccatgccaaggctggctgtcaccaacaccaccatgacagggactgtgctgaagatgacagaccggagtcatcggcagaagctgcagctgaaggctctggatacagtgctctttgggcctcctctcttgactcgccataatcacctcaaggacttcatgctggtggtgtctatcgttattggtgtgggcggctgctggtttgcctatatccagaaccgttactccaaggagcacatgaagaagatgatgaaggacttggaggggttacaccgagctgagcanagtctgcatgaccttcaggaaaggctgccaaggcccaggaggagcaccgcacagtggaggtggaaaaagtncatctggaaaaaaact

SEQ ID NO: 29712 - DNA, 508 bp, Homo sapiens
  misc_feature (1)...(508): n = a,t,c or g
nnnnnnnnnnnnnnnnnnnnnnnnnnnnnnnnnnnnnnnnnnnnnnnnnnnnnnnnnnnnnnnnnnnnggcacgagcggcacgannnnnnnnnnnnnnnnnnnnnnnnnnnnnnnnnnnnnnnnnnnnnnnnnnnnnnnnnnnnnnnnnnnnnnnnnnnnnnnnnnnnnnnnnnnnnnnnnnnnnnnnnnnnnnnnnnnnnnnnnnnnnnnnnnnnnnnnnnnnnnnnnntgatatattctttttatttttttccaccatatcttgtgtggattttctctttttttattatttttcattcannnnnnnnnnnnnnnnnnnnnnnnnnnnnnnnnnnnnnnnnnnnnnnnnnnnnnnnnnnnnnnnnnnnnnnnnnnnnnnnnnnnnnnnnnnnnnnnnnnnnnnnnnnnnnnnnnnnnnnnnnnnnnnnnnnnnnnnnnnnnnnnnnnnnnnnnnnnnnnnnnnnnnnnnncctggctaatttctgnatttcttttttagagacgggg

SEQ ID NO: 29713 - DNA, 521 bp, Homo sapiens
  misc_feature (1)...(521): n = a,t,c or g
cccnnnnnnnnnnnnnnnnnnnnnnnnnnnnnnnnnnnnnnnnnnnnnnnnnnnnnnnnnnnnnnnnnnnnnnggcacgagagcttacaaaatccagaacttggtacccttaacgtcatttatgttagacagtggtttaagtgaaaagagcactggactcagaatcagcaaaggttagtgttaggctcacttcataggagagagggtaagtggcttgcctaagtcattaagtgggttctgtgcttggctctgctatctttatatgtgtgattttgggcaagtcatttttaaaaaaagaagagatttaggcagnatttcttaacaatgttgctgttgcatgtttaggtgaanagttcttgttgtgagggatgcatttcagaatgtttggcttccttggaccctgggcattaaataccagtagcataccccaatcattgtaataattagtctcccttccacattttcatatggcccctagaatacgtagagcactcccaattagngcttctaaacatagaatg

SEQ ID NO: 29714 - DNA, 539 bp, Homo sapiens
  misc_feature (1)...(539): n = a,t,c or g
ttgnnnnccncccccttggccnccannnnnnnnnnnnnnnnnnnnnnnnnnnnnnnnnnnnnnnnnnnnnnnnnnnnnnnnnnnnnnnnnnnnnnggcacgagggatttgaaagcaaataaaaatggaggcattttaaatatagagttgaaaagagttagaaactgatgatgaggaaacagtcatgaaggatgacccaacctagtgattagatataaagatagcacattacaaataaaaccaggaaagtaagagtgagttgctggtgaaaagtagtgttagaagaaggtgagcttggttttagatagttaatttgataggcttgagacattatactgtaattatttaacaaatgtgataatgtacttggaaaataaactgaagannnnnnnnnnnnnnnnnnnnnnnnnnnnnnnnnnnnnnnnnnnnnnnnnnnnnnnnnnnnnnnnnnnnnnnnnnnnnnnnnnnnnnnnnnnnnnnnnnnnnncgnnnnnnnnnnnnnnnnnnnnnnnnnnnnnnnnnnnnnnnncccccactaca

SEQ ID NO: 29715 - DNA, 524 bp, Homo sapiens
  misc_feature (1)...(524): n = a,t,c or g
aatnnnnnnnnnnnnnnnnnnnnnnnnnnnnnnnnnnnnnnnnnnnnnnnnnnnnnnnnnnnnnnnnnnnnggcacgaggaattgtgagaatattttttatttctcctgagcaaaatagaactctgagtttccaactcatggtccatttctgtgcatgtatacatacatgcacagacaaaaataaaagcatagaatacatttataatgagttattaaatgggtgacagagttttattccacctggataatcccttaagaaaaggctaattgatacatatgaaggagttttgattactttataaactgtctcttagttttagggttacaaacctattgtatatgaaagggtgaaaataaagtgggtttttttgttgttgncagtttagtcactttctataagttgacagtaatagtaccttctggcaaagtctagtattcgctgcatgaactgcggacagagcccatggaaaagatgtggcattccttgcaattacccattgtttgtgggtaaaattcagaacct

SEQ ID NO: 29716 - DNA, 521 bp, Homo sapiens
  misc_feature (1)...(521): n = a,t,c or g
aatnnnnnnnnnnnnnnnnnnnnnnnnnnnnnnnnnnnnnnnnnnnnnnnnnnnnnnnnnnnnnnnnnnnggcacgagcatcagtatgtgtcccataacatcatgttgtaaacctcaaatactctaattttttaaagatatttaaaaacattataccaaggaatagcatgggacctagtagacagaaacaaagatattaatgaaaataatttatatgtgaggaaaatgatttaatagcaggctagagaaaggatgagtggttcggaaagaaccaccttggaagtcgctgcagttgtccagacagaaggtgagcagaactcacactggagctgtggcantgcanctgaaatacttncaggaagtggnacccctaattgctgnctggggctctatttcttcttctatcatggntnttatgggaaattatgttttaanacatacagacaggagggactcatctgcctggaganagctctcacactgctctagctctggaggatttangaatcacagaatcttac

SEQ ID NO: 29717 - DNA, 522 bp, Homo sapiens
  misc_feature (1)...(522): n = a,t,c or g
accnccnnnnnnnnnnnnnnnnnnnnnnnnnnnnnnnnnnnnnnnnnnnnnnnnnnnnnnnnnnnnnnnnnnnnnnnggcacgnnnnnnnnnnnnnnnnnnnnnnnnnnnnnnnnnnnnnnnnnnnnnnnnnnnnnnnnnnnnnnnnnnnnnnnnnnnnnnnnnnnnnnnnnnnnnnnnnnnttgagcacaggcacagtagatatagcataattacgaaggacgctcatattttttgnnnnnnnnnnnnnnnnnnnnnnnnnnnnnnnnnnnnnnnnnnnnnnnnnnnnnnnnnnnnnnnnnnnnnnnnnnnnnnnnnnnnnnnnnnnnnnnnnnnnnnnnnnnnnnnnnnnnnnnnnnnnnnnnnnnnnnnnnnnnnnnnnnnnnnnnnnnnntgctatgttaaaaatctgttatttagtgtagccccgnnnnnnnnnnnnnnnnnnnnnnnnnnnnnnnnnnnnnnnnnnnnnnnnnnnnnnnnnnnnnnnnnnnnnncctttacacttttctggtacag

SEQ ID NO: 29718 - DNA, 514 bp, Homo sapiens
  misc_feature (1)...(514): n = a,t,c or g
nnnnnnnnnnnnnnnnnnnnnnnnnnnnnnnnnnnnnnnnnnnnnnnnnnnnnnnnnnnnnnnnnnnnggcacgagtgtaagtaatatgttcactgagtgagcagaaatatgtacaggattcacaggtaagatgttaacttctggattttagtatagatcttttgttcatggagctatgttaataatacctgatactggtattatacctgtaaatttaaaaatttaaaagttactctgaaggctgtagaaatacagattaatgattcccaaacttgtctggatgtgggaatcacctggagagcttacaaaaaattattgatgcctgtgtcttaacctgggactgtaatctgggctttggaaattttaggaagatcctaatgtaagacaagtttggaaacttttgaattcacggaataaaaataatctcanaattaanatggctaggggnnnnnnnnnnnnnnnnnnnnnnnnnnnnnnnnnnnnnnnnnnnnnnnnnnnnnnnnnnnnnnnnnn

SEQ ID NO: 29719 - DNA, 456 bp, Homo sapiens
  misc_feature (1)...(456): n = a,t,c or g
nnnnnnnnnnnnnnnnnnnnnnnnnnnnnnnnnnnnnnnnnnnnnnnnnnnnnnnnnnnnnnnnnnnnggcacgaggtgtcaagtaattctgtattatatcctggccattttgaacataatgctatacagcctcaatgattccagctgcagttcagttttcaatgccttttctatggtaccttgggtctgtcccgcagatgtccagctcaggaaactcacatttgtgtagttcatacacaaaattaatgaaacccttccctaggtttaccctctcctggattcccctacactctcagactagctggggctcctctgcccagttctgnnnnaaaccaatcncttggnnanaaaatggctggcttgggccccccaaagattttaaacnnggganaacctttgaaaaaaagggggaanttaaanangggttttttnttccccccccctnaaanttttta

SEQ ID NO: 29720 - DNA, 472 bp, Homo sapiens
  misc_feature (1)...(472): n = a,t,c or g
nnccngctatgnttngattnctagctnnnnnnnnnnnnnnnnnnnnnnnnnnnnnnnnnnnnnnnnnnnnnnnnnnnnnnnnnnnnnnnggcacgagcggcacgagctacccttcatgtccagcttgtgccttgttggccagctgttttctgtgtagctgtatgctcagagagccccagacctctgctaaaccataatcaactacaacattcatgagggcccccgttcccttctccagtgaaaagtttagggaagggcgtgtgacccagtctagctaatgaggggtggggtggaggggagattatttcttnnnnntaatnagattccnnntaagaaaacccttttttttttangtngtntanaattttggnttncnaaatcccnaacnggggaanggggttttttanaancnggtnntttnttnantgtannctnnaaantttttttccnnacgggggtttncaanntttgg

SEQ ID NO: 29721 - DNA, 464 bp, Homo sapiens
  misc_feature (1)...(464): n = a,t,c or g
nnnnnnnnnnnnnnnnnnnnnnnnnnnnnnnnnnnnnnnnnnnnnnnnnnnnnnnnnnnnnnnnnnnnnggcacgagtaccttccttctgcgcagagattgcctgttggggatgaatcgcttagcgagacccagccatagctggctacgctgagttccggcccgggaccgcgcggagaggcaagatctattcccgaccctctcatctggcagacagaacccaggcttcaggaagagaagcggctttcgcagtttcacgctaggacgggctgagctgggaatcgatcccaaattccacagtcccagtcctctcctnnnncctgctttcntnatngggttaaagccccaaggnaatggggnnctnagggttagggaatggcaaacctggaaaaaagggttccgttaataccctnggntttgccaaacttaacattttgaaatccnttcccaaangggtatgngtct

SEQ ID NO: 29722 - DNA, 488 bp, Homo sapiens
  misc_feature (1)...(488): n = a,t,c or g
acagcttgattgattacnaatttaataccgactcnnnnnnnnnnnnnnnnnnnnnnnnnnnnnnnnnnggcacgagcaacatgatggacacgatactattataaaattagactttttctctgtacataaaattgttttgttttttattcccactgagaattaagaaaagagaatattttaagaaagaccattatacagaggatagttcaaaattcatgctgaagagctattgcttttcaagtagattgagcaagtttagcnnnnnngaaaagcncagtttcggaacacctcangaaaccaagggcaaaagngttntgtaaaaccnaaaaagggncctttnttttgggaaanccccannnggggccntaaaacccggggggaaaaaaccnttttnanaananggggggggggcccccccttttttttgggggaantnaaaanaaaggnttngggtnggaantttttttagnnaggcnttttttttaaaa

SEQ ID NO: 29723 - DNA, 476 bp, Homo sapiens
  misc_feature (1)...(476): n = a,t,c or g
cagctatgantgattacgaatttaatacgactcnnnnnnnnnnnnnnnnnnnnnnnnnnnnnnnnnnggcacgaggtttcaatagttatttatttactctctcttcttgcctgccattctttcctcataaaattagccctgtacacaagaaccctttttaaggggaaaaaaatacattaaatggcctatgtaattctcctgagtatagagaagttattaggaactgnnnnngatttgtgtggaacgtctctggaggaggcatgctttgggganaatttganananaangcttagctttaagggatcggccnttcntttnggnncccaaggnnggcntttcttngggcccaccaaagggtttgcnccncnngganaaaaaaaaaccccccnggnngaaaaaaaaaaggggggngtgaaaanaaaccnttttttttnggaaaanaaanncangnggnnttttttttnttttttttttt

SEQ ID NO: 29724 - DNA, 515 bp, Homo sapiens
  misc_feature (1)...(515): n = a,t,c or g
tnnnntttgantttgaanccattnnnnnnnnnnnnnnnnnnnnnnnnnnnnnnnnnnnnnnnnnnnnnnnnnnnnnnnnnnnnnnnnggcacgagggttggaggggaaggttgggaaaggaagcggtgcggaggtcccttgtggagcgagactgcatattcagggtgtgtggtggtgggtgggcaccaagtcctgttttaggcnnnnnnnggtgnacagganaaggnctctgctgnccnaggnctcaccttntatagggagccgatggncaantaaaccaacagaccttgnatgagcgctnangcnatgagtgnttggatgantgcccagggcctccaaggagggganaaggcccacaaanagangnccaaccagccagcccccaggccgtccgccagggacccaccaatgatgcncagatggcagccgttccngactagccggttggagcatagcangccccnnccttgggccccacatttggattanccaaccgaaacccggngaaaaaagaa

SEQ ID NO: 29725 - DNA, 520 bp, Homo sapiens
  misc_feature (1)...(520): n = a,t,c or g
tnnnnnttgganntttgaatnccagtnnnnnnnnnnnnnnnnnnnnnnnnnnnnnnnnnnnnnnnnnnnnnnnnnnnnnnnnnnnnnnnnnnggcacgagataaaacctggtctgtctgaatccagagctactcttgtcactggtacttgactgcctctatgagttttgaccatctctgtctcatcccaccaccatcccaaagatgcttgtttagaagcattatacatattataaaaataaaacagacactatatacagtaaaagtgttaaaaacaagaccaatgaaaattgaatttctagaggcaaattttacagaaacctgtaaactttgtaataaaaccctctcctcaatgtgtgtgtaacatcaccttgtaccttttgcctggacttcagaacttcattccccacagagcagtgggtatatataagctagtccacagcagcctacccatgttgaagctgccatgtttgatttcaaaattttaagtctgaatactttctatatttataagtaggggg

SEQ ID NO: 29726 - DNA, 517 bp, Homo sapiens
  misc_feature (1)...(517): n = a,t,c or g
gtntanttnatnttttganantntgatcttcttngnatgaccnnnnnnnnnnnnnnnnnnnnnnnnnnnnnnnnnnnnnnnnnnnnnnnnnnnnnggcacgagcacatattaagaaaagtatatatctcaagtgacagtttggtgaatttgtcacaaattgaacacatccgtgtaaacaacacccagataaaggcccagagcaagctttcatagtcttttgattctgtgtcataataaaaaattctcgttaaaactgtagattgataggaacatattcacacagagttgttgactgagggaaatttcaaatgaggtgctgcttacttctctcctgccaataatttaatgaaagaaagaacatcatcttatttttaatggttgtgtggggaactgggttcagcatttttgcttgacagccttgagataaaataaatccataaggaaaaagcccacttctgtttcttttcatcccagagagattaatggcaatatatgagtgtaaagatctggaaaagc

SEQ ID NO: 29727 - DNA, 501 bp, Homo sapiens
  misc_feature (1)...(501): n = a,t,c or g
ttgaaatttgantccattnnnnnnnnnnnnnnnnnnnnnnnnnnnnnnnnnnnnnnnnnnnnnnnnnnnnnnnnnnnnnnnnnnnnggcacgagatgaaagtgtgcttaaagtctacaagcagtattgtaatttcactcagatgtttcctggacccaaaatactttaagtatctcacaattatgatgcttatagatactgaatttgttgctgtggcaggattttgtgagtgtcttcattttgctttctggtcttttgggacactttctaagcacacggcgctcctgtgagtcagttgggcatggtggccggtcggcagtgctcgtccctgtgtgccttntgtgtgctgcattcttcacagaagngattgttttcagatacagttgcagctctgaagaaattcaggngggaacccttntaggcaaagaccacttcattttnattccctntcttagnatattatcatataattattaaattattatcttgaaaaaagaaggct

SEQ ID NO: 29728 - DNA, 508 bp, Homo sapiens
  misc_feature (1)...(508): n = a,t,c or g
tnnnntntttgaatttganncccatnnnnnnnnnnnnnnnnnnnnnnnnnnnnnnnnnnnnnnnnnnnnnnnnnnnnnnnnnnnnnnnnnnnnnggcacgagacaacaataataataaaaactagcttttattgagttcactttgctctatcctaaatatacctttttgccaaattatgttcatatattttgtttgcgtgtgttgtttggttttgtaaattaatgttatttttagttgacaagtcataattatacatatttcttcatatattgtttttatataatcttcatagaggcatgaatttattcaatatttatgttcataattattcccatattacttttaaaaattatctgntttattaactatcctctgggatagtcaatgtcttaagaataccttgtggttgacaagtggattgtctcacaataagnatttactaatagatccaaaactttgctagactttatggnaaaaatgttaatangaagaataccagaaggagag

SEQ ID NO: 29729 - DNA, 496 bp, Homo sapiens
  misc_feature (1)...(496): n = a,t,c or g
tttgaatncaatannnnnnnnnnnnnnnnnnnnnnnnnnnnnnnnnnnnnnnnnnnnnnnnnnnnnnnnnnnnnnnnnnnggcacgaggtatagcatagaaagtataaatactataatccttcattgcagcccatcctctgctccatagccttagtgtaattttggtggcaatactttttccagtggatctatgtattatgatgcttttatttggaagtgacagcccatcccctcctccccaaacaaacacaactacaaaagtgctnnnnnnnnnnnnnnnnnnnnnnnnnnnnnnnnnnnnnnnnnnnnnnnnnnnnnnnnnnnnnnnnnnnnnnnnnnnnnnnnnnnnnnnnnnnnnnnnnnnnnnnnnnnnnnnnnnnnnnnnnnnnnnnnnnnnnnnnnnnnnnnnnnnnnnnnnnnnnnnnnnnnnnnnnnnnnnnnnnnnnnnnnnnnnnnnnnnnnnnnnnnnnnnnnnnnnnnnnnnnnnnnnnnnnn

SEQ ID NO: 29730 - DNA, 501 bp, Homo sapiens
  misc_feature (1)...(501): n = a,t,c or g
ttgaatttgatnccattnnnnnnnnnnnnnnnnnnnnnnnnnnnnnnnnnnnnnnnnnnnnnnnnnnnnnnnnnnnnnnnnnnnnggcacgaggtacccgttccttctatgcatgaagcctctgcgggaagtgctgagaagtctgctggggtaacagctccctggggttacctagttcatgcttcgtagaggcagcttagccacttcagaggaaaacggctttaaaagaacatcctcgggttgtgctggcttgtgtggtatatgcttctccttggtgaaaattcctacttaatacagttgtggaagagaaggtgattggagggtggtaggaggcatgagtagaggctgatggaaagccaaaaaatggaaatctggttcantgttggaaatctggtgctgagaatagcgagatgcctgagggaagggggtaaacatangagtgtgtgaggttganggcngggttgnanaaggaatacttttctcccgnnttgtcctgaaaaa

SEQ ID NO: 29731 - DNA, 498 bp, Homo sapiens
  misc_feature (1)...(498): n = a,t,c or g
aatttgatncccattnnnnnnnnnnnnnnnnnnnnnnnnnnnnnnnnnnnnnnnnnnnnnnnnnnnnnnnnnnnnnnnnnnnnggcacgagagtgaaataagcctgtcatggaagagcaaatactatataaatttcacttatataaggtatctgaagttgtcaaattaatnnnnnnnnnnnnnnnnnnnnnnnnnnnnnnnnnnnnnnnnnnnnnnnnnnnnnnnnnnnnnnnnnnnnnnnnnnnnnnnnnnnnnnnnnnnnnnnnnnnnnnnnnnnntggccgcacaacaaaataagtgcacttaacactactgaacagtacacttagaaataaatggttcagatggtaaattttacgctttgtgtttaactgcaatacaagtttatattttatttaacctatatatttaaaacaccatttcaacatgtaacccatatgaaaacaattaaactattttgcattcttttttgctcctcaaaatccagtgngnatcaat

SEQ ID NO: 29732 - DNA, 502 bp, Homo sapiens
  misc_feature (1)...(502): n = a,t,c or g
ttgantccatnnnnnnnnnnnnnnnnnnnnnnnnnnnnnnnnnnnnnnnnnnnnnnnnnnnnnnnnnnnnnnnnnnnnnggcacgagcaccactagctgattttattcagaagatagggctaaaggagaaacttttcccactaaatttcagtacagttactactttcaagaatacaccctgttttcttcaggctctgagcttgtctgctgaaataattagctgtgaggcagacagggaaagaattgcatctgcaaaaagcaggaagacaaggtcaagagaagaggaggcagcttgactcacagctgcccaccctgcagaggagcagagcttgccaagaatatccacattgatttatggagaaaaaatcaggaaaccattcaccccagatagcttggatttgtgacaatatcagtgtaaacgatttccatttagactgtgaattccgagtctccgtaggtgctccattttttcccaccttcgcccttctccgagcatttctag

SEQ ID NO: 29733 - DNA, 495 bp, Homo sapiens
  misc_feature (1)...(495): n = a,t,c or g
attngatnccatnnnnnnnnnnnnnnnnnnnnnnnnnnnnnnnnnnnnnnnnnnnnnnnnnnnnnnnnnnnnnnnnnnnnggcacgagggaagattcatgttaggtaagaaatgtgcctttcttttgtaaagtagaaaaaaggtgtttgaaaggggaagtgggattagaaaaccagtatagctccacacaggtgctcttgagcaaaccagtttttggaaggattataaatagaagtcaaagttctgttaattgattatagtaatactacattgcttatgtaaccctaagcatacatgctcctatgtttaatgctactgatcttggttgtagacccaggtttgaaattatttttgttcaagtgcatgcacactgtcaacttcatacctttactctttaatgaaggaaaatttaagacaagtaaaatttagaacagattttgtatagttggtagtagaatttgaaaatatattaagttncaggncaggcacagtggc

SEQ ID NO: 29734 - DNA, 476 bp, Homo sapiens
  misc_feature (1)...(476): n = a,t,c or g
ttgatncccttnnatgtttgaatcctttggnnnnnnnnnnnnnnnnnnnnnnnnnnnnnnnnnnnnnnnnnnnnnnnnnnnnnnnnnnnnnnnnggcacgagcgtgggtagtgctaggtcttccaggaggctcagccactgatgactttaaggcatgcaggtctccagcatggctgcaggaaaactaagagaacttgtttctagtagatctacccttaaagaatagctgaaggaacttctccaccagatagaaaatggtaaaagcccaaagctgagattttcagagcagggagaacaggatgagtaaaaatagnnnnnaccatactagactattctttatctcatgagctttttncttntatnnaaaangngnttcnnnaaatttntggntcnnnnnnggcctggccattgnattggggaaaaaaaccttncaaatatnggntttttaaanctngggggggnnccccannnttttt

SEQ ID NO: 29735 - DNA, 486 bp, Homo sapiens
  misc_feature (1)...(486): n = a,t,c or g
ttgatncccttcnatnttgaatncntnnnnnnnnnnnnnnnnnnnnnnnnnnnnnnnnnnnnnnnnnnnnnnnnnnnnnnnnnnnnnnnnnnnnggcacgaggtgggtcagtgggtatatgcacttgttgtttttgatgctaccacatggggatatttgcctcgtctgaactctgtgtattctctgctgcaccttgttgcttctttgcaataaacttcctgaactcaaagctaatactggggggaatcccagaagctgctgagggcagggccatgctgctcagtgttccaccctagctcctgacagcatttccctagaaaactgctgctgggcctctaatggagcaaataaannnnnnacaaantaaggcacaanntttcccaaangactggggnaatctaannccttaaacttgggcaaccntnnctggnggnnacccncacntttgcaccnttgagncctcccntttgnggggaaaaggncccc

SEQ ID NO: 29736 - DNA, 503 bp, Homo sapiens
  misc_feature (1)...(503): n = a,t,c or g
gaanacccnnnnnnnnnnnnnnnnnnnnnnnnnnnnnnnnnnnnnnnnnnnnnnnnnnnnnnnnnnnnnnnnnnnggcacgnnnnnnnnnnnnnnnnnnnnnnnnnnnnnnnnnnnnnnnnnnnnnnnnnnnnnnnnnnnnnnnnnnnnnnnnnnnnnnnnnnnnnnnnnnnnnnnnnnnnnnnnnnnnnnnaatttttaaattttttataaagacacattctcattgtgttgcccaggctggtcttggatgttttgaatcagctcttcgtttcttcttatcatttagccagggtctttaccttggatgtaagtctgttttcttatgtccttccctgtctttatttacctgtttcccatttaattatgcctatatataacctcagctattatactgaactcatctgtgtcttctttttttcctttttttgaccgggaaattttttttaaattacaagctnaacccatttggtctggttcaaaggngcagtacttttctttatt

SEQ ID NO: 29737 - DNA, 517 bp, Homo sapiens
  misc_feature (1)...(517): n = a,t,c or g
nnnnnntttgannattggaanaccatnnnnnnnnnnnnnnnnnnnnnnnnnnnnnnnnnnnnnnnnnnnnnnnnnnnnnnnnnnnnnnnnnnggcacgnnnnnnnnnnnnnnnnnnnnnnnnnnnnnnnnnnnnnnnnnnnnnnnnnnnnnnnnnnnnnnnnnnnnnnnnnnnnnnnnnnnnnnnnnnnnnnnnnnnnnnnnnnnnnnnnnnnnnnnnnnnnnnnnnnnnnnnnnnnnnnnnnnnnnnnnnnnnnnnnnnnnnnnnnnnnnnnnnnnnnnnnnnnnnnnnnnnnnnnnnnnnnnnccatattttcaaaaacaaaattagtgacaggagtatcattgctttacacttttgcaaatatttttaatgtctggctgaaaaaaaagacagctagcttctcaatttgcttctgtattcaatctattggtttaaacataaagaaaaattcagtttaccccaatatggcattagaaaaagtaagactttgctgatcccttaaaagggtcttgggg

SEQ ID NO: 29738 - DNA, 505 bp, Homo sapiens
  misc_feature (1)...(505): n = a,t,c or g
ttgatttnaatccatnnnnnnnnnnnnnnnnnnnnnnnnnnnnnnnnnnnnnnnnnnnnnnnnnnnnnnnnnnnnnnnnnnnnggcacgagtgattagacttgtttaccaataggataggttgggggagagaggaaattgagggtgactccaagatttctgacttgggaaactggatgtttgttggtgcaatttcactgagataagaaacaaagacctgggaaccaagttatggtggttggggggcggtgatgggttccattttagatatttgaatttgaggttctggtgtcacctcaaggtaaagctaggcaagggacagatacatggatctgaagcttgggagagcagtctatgggggggatgtagatttgacctctagcagcatatatgtagcagctgaaaccattgaagggcataaagatnacctacttatgtgtaacatttggcccagacagtgctttttaactgtgaccaacggtggtttttttttgnttggtttgttt

SEQ ID NO: 29739 - DNA, 509 bp, Homo sapiens
  misc_feature (1)...(509): n = a,t,c or g
anntttgaanacnnnnnnnnnnnnnnnnnnnnnnnnnnnnnnnnnnnnnnnnnnnnnnnnnnnnnnnnnnnnnnnnnnnnnggcacgagcgacgtggtgannnnnnnnnnnnnnnnnnnnnnnnnnnnnnnnnnnnnnnnnnnnnnnnnnnnnnnnntacaaaatagagcnnnnnnnnnnnnnnnnnnnnnnnnnnnnnnnnnnnnnnnnnnnnnnnnnnnnnnnnnnnnnnnnnnnnnnnnnnnnnnnnnnggtggagggagcaagccggnnnnnnnnnnnnnnnnnnnnnnnnnnnnnnnnnnnnnnnnnnnnnnnnnnnnnnnnnnnnnnnnnnnnnnnnnnnnnnnnnnnnnnnnnnnnnnnnnnnnnnnnnnnnnnnnnnnnnnnnnnnnnnnnnnnnnnnnnnnnnnnnngttgaagagatatatatatatatatagatatatatatctcatgagtcctgcagaaattactaaatgattatnttaataaattaatnggataaa

SEQ ID NO: 29740 - DNA, 507 bp, Homo sapiens
  misc_feature (1)...(507): n = a,t,c or g
atttnaattccatnnnnnnnnnnnnnnnnnnnnnnnnnnnnnnnnnnnnnnnnnnnnnnnnnnnnnnnnnnnnnnnnnnnnnggcacgagcagatgcagcgtaatacttaacagaactccttactccctgccacctctgaaaggaatttaaactgtcagcccattaagtgttcatctctaatgtgaaatttctagatgaaggcaatttagcttaatttgccaagacatctcttcatgtctgggagggctgctgggggaagtagagctggaatccattggagccaccaatctgcagaagtctagaacacaaaggacacagagtgggtttggtgggtcattgtggcatttgtcaaggaaaagcaacattgccctctaaatgactcccacttctgttctggaaaaaacgcatcatcattcatgccaccatcccaatagacataggaagcaatttctcttcaggttttgagatggtgcaagcattgacttttctttctacagagggctggg

SEQ ID NO: 29741 - DNA, 505 bp, Homo sapiens
  misc_feature (1)...(505): n = a,t,c or g
tttgaantttgaatcccattnnnnnnnnnnnnnnnnnnnnnnnnnnnnnnnnnnnnnnnnnnnnnnnnnnnnnnnnnnnnnnnnnggcacgaggtgataagcagcagaaaccgcttctatctagcttgaacagaaaaggatttgttagaagggtggttcttggagtgactagaaaagctggagagccaatttggaaaatgggccagaaccaaggaggctcctgcttagtactcctccgccttcatgatctgtatattgtctctgctttcctgggtcattccctcaagggtcgcactcctggtgggaggatgcattaatcagagctgactggcaggaaaccttccctcacatgaggactgcccaatggggattctccaaaggaagatcagggtgctaatgggagggtcgggtctgatgatggacaaatggaacaaaagtggcanatgcccccatgtattctgngcctttccttgcctttgaaatnaaagcnanttttgccgccaaa

SEQ ID NO: 29742 - DNA, 509 bp, Homo sapiens
  misc_feature (1)...(509): n = a,t,c or g
tttgaancctttnnnnnnnnnnnnnnnnnnnnnnnnnnnnnnnnnnnnnnnnnnnnnnnnnnnnnnnnnnnnnnnnnnnnggcacgagctcacttcctgcaacaggagatgggtcagctcctgtgatggcagtcgttcggctccttgctgaaataaggacaagagcatgcctggtcatggcccagcttttagaagacagcttattttgtgaagaattcatacaacaatgtccagcagctgttgaagttcttaacctagtagcccaggaatgtagtgctggagagcgacttgcagttgtggaggtacagtgtgaacggctgaggatgctctaccgggactgtgctcggcccccaccacctcctttgcaggctgaccgaagacagcccaaagagattacttggagcccctcgcgagtgtttccgctgttcgagcctgcatgttctcatctcaccttacctcagtcaccttcctggctgaccccagcgctgggggaggcctgcccggggcac

SEQ ID NO: 29743 - DNA, 513 bp, Homo sapiens
  misc_feature (1)...(513): n = a,t,c or g
tttgaancctttnnnnnnnnnnnnnnnnnnnnnnnnnnnnnnnnnnnnnnnnnnnnnnnnnnnnnnnnnnnnnnnnnnnnggcacgagtgcatagnnnnnnnnnnnnnnnnnnnnnnnnnnnnnnnnnnnnnnnnnnnnnnnnnnnnnnnnnnnnnnnnnnnnnnnnnnnnnnnnnnnnnnnnnnnnnnnnnnnnnnnnnnnnnnnnnnnnnnnnnnnnnnnnnnnnnnnnnnnnnnnnnnnnnnnnngagggccacttgaacccaagagatctaggttggaggggccaccatactccagcctgggcaacagacaccctgtcttaggaaaaaaatccaaaaaaaccccacaaaaccccaacatcatccaagtctgattataagcatgatctccaagatcagcattaacttcaacgttgtttttctcaaagagtaatcctctaaaaggaagcgctttctcttctttcaagcaacagaaagtgcttccctctagagggtcacagcctgagctctt

SEQ ID NO: 29744 - DNA, 507 bp, Homo sapiens
  misc_feature (1)...(507): n = a,t,c or g
tttggaanccctttnnnnnnnnnnnnnnnnnnnnnnnnnnnnnnnnnnnnnnnnnnnnnnnnnnnnnnnnnnnnnnnnnnnnggcacgaggaggaaaatgcttatcttatttattaatgggaccctaagaaaatattagagtattgcatatgagcagaatcccatttctaatagtgcaccttctcagaggaccttacctaatgannnnnnnnnaantggcttaccagcactttactcttttgaatctagttaatttcttttttgtctttaaaaaatttttttcttcattttttttttcctttcattnattttcatctgtccatttacagatgaatctagtaaactttaaatgtctctgccaaagtagactaaattctttttctcnnnnnnnnnnnnnnnnnnnnnnnnnnnnnnnnnnnnnnnnnnnnnnnnnnnnnnnnnnnnnnnnnnnnnnnnnnnnnnnnnnnnnnnnnnnnnnnnnnnnnnnnnnnnnnnnnnnnnnngaga

SEQ ID NO: 29745 - DNA, 507 bp, Homo sapiens
  misc_feature (1)...(507): n = a,t,c or g
tttgaancctttnnnnnnnnnnnnnnnnnnnnnnnnnnnnnnnnnnnnnnnnnnnnnnnnnnnnnnnnnnnnnnnnnnnnggcacgagcaaatgacagcgatatcccgacacatccctcttcgtgtggttcatgaacatttccatagggtggatttctagaagtggggccttgggagcaggtgtgctcagtttgagttttgatgattacggccaaattgcccttctgcacagctctgttgctgcatccacccacaaggtatgggactgtgctacttcccctatctctgccatcactggtaattactgatttatcattaccattttttggtagccaagttcccgtgtgtctctggtcctccaaggaaggcccagctggtggacatgggggagaggcccctcactgcagctgggctgcaaaaaagggatgctcatcttccgaggctgctgcttcaatgatgagctggggtgaaaatgtggatattgcacactagttgacatctttttcc

SEQ ID NO: 29746 - DNA, 456 bp, Homo sapiens
  misc_feature (1)...(456): n = a,t,c or g
nnnnnnnnnnnnnnnnnnnnnnnnnnnnnnnnggcacgaggaactctccaagccctaggaggaggggcatgcaggttgctaggaggaagagcagcggggtgagggtagggtgcccagggctgcagacaaagtgagcttcacccagtctcaccttgcacaccacggccttagcattttagtaagctccatgcttacatcctgaagactgtccccagccccatttctgccgctgttacaggaggaacagaccaagcccagtgggaagacataacaggaaccaccaaacttgtatatgccaacgagtgcgccaacttcaccaccaatgtctctgccaggtgagacgaggccagcccagcccagtattgtgtgggccgtcctcaggctctatgctgccgtccaggcctgaggctgaggctccctactgcccctccatgtggaagcctccgtgacacaggt

SEQ ID NO: 29747 - DNA, 515 bp, Homo sapiens
  misc_feature (1)...(515): n = a,t,c or g
tttggaanccctttnnnnnnnnnnnnnnnnnnnnnnnnnnnnnnnnnnnnnnnnnnnnnnnnnnnnnnnnnnnnnnnnnnnnggcacgagaactggatgcaagataaacgctcagagtatctataaagaagagagggagagagggctgcagagatggaaaagaggtacagggtgaagagcttagattgtcaagagataggaaccatgccctgagatcccatttttgccactcactaaaatgtgtgactttgggtacttcattttacctttctgggccctcaactcccctattttttcaagttaataaatgtgaagggcttaatgcatgcctcaaaaaaagcaatgaatcaataaagttattattattgttaaataaaaaggagggaaagaagagaggggaaaagactcgccttggaatggtgatcaacttcagctacacacacatagcctcttacactaaccagttacccagcgggtacctccttcccttgctttttgcttccatcaattaccca

SEQ ID NO: 29748 - DNA, 499 bp, Homo sapiens
  misc_feature (1)...(499): n = a,t,c or g
aattcaatacnnnnnnnnnnnnnnnnnnnnnnnnnnnnnnnnnnnnnnnnnnnnnnnnnnnnnnnnnnnnnnnnnnggcacgaggacacaaaacatcaccagcgcttcagaatctaccatctcttacttccttccaatcaataggtacttaccaccctaaagtttattgggagacaattctcccatgtgtctcatgtttctgcatatcttgtgagcaaaggcactgactgcgtgtgttcagaatgtctttccaaggcagccttggaagaccatgtctccagagcaaagggcaggtgtgcttatagtcttgaaaatagagattatgtcccttagagagcaaagaacaggtttacttactattcggtataatagagatgtctcccttcaaagcgaaaaggacaggcatgcttactgccattataaaagattcagattccctatgttccctacaggagttcctctctgtaacacaatccactgtatgtcagggncacttgct

SEQ ID NO: 29749 - DNA, 507 bp, Homo sapiens
  misc_feature (1)...(507): n = a,t,c or g
ttgaattgattccannnnnnnnnnnnnnnnnnnnnnnnnnnnnnnnnnnnnnnnnnnnnnnnnnnnnnnnnnnnnnnnnnnnnnggcacgagaataacaatagctactgtttatcgagcaccttctgtgctttgggcactctccctacatgattcctaatcttcataataaccctgtgagataactactcttatgactacctcccatttttcagatgagaaaattgaggctctgagaggtgaagtcgttgcccatggccccacagtgagtggcagatctgagactcagcgctagcctttgtgacacataactcgtgaccagcaggtagtgctacccgattgaaaaaatgtgagacttaaagggatgcatgtgtccctatacagtggcaaaaactggtatgacagaagtgatgttttaagctatgttatcctttagttggacatacactggacccacagagctagagtacctggcaggctcttgctggacaatgtttgctgaatcaat

SEQ ID NO: 29750 - DNA, 501 bp, Homo sapiens
  misc_feature (1)...(501): n = a,t,c or g
tttgaatccatnnnnnnnnnnnnnnnnnnnnnnnnnnnnnnnnnnnnnnnnnnnnnnnnnnnnnnnnnnnnnnnnnnnnggcacgagaaaatatgagattttcttgcaattttttttttagctgatcagttatcattagtgtcagtgtactttacgtatggcccaaaacaattcttccagtatggcccagggaaaccaaatattggacacccctgagctacattgtagagctattgttcacaagcccaaccatatgctacaactacctggggggcttcaaaaaattcttatgtctggttcttaacccagacatgtcaagtctgagcctctaagagtggggcccaagtggaggtactggtttcaaactcccttcagttgattctaacgtccagtcaaggctgagtactgagtggaaaaggagtggactcaggatcacacaggttaagggagaaaagctttggagaaggccatgatcacaagctgatcatgtagcagcttact

SEQ ID NO: 29751 - DNA, 504 bp, Homo sapiens
  misc_feature (1)...(504): n = a,t,c or g
tttgaatttccatncnnnnnnnnnnnnnnnnnnnnnnnnnnnnnnnnnnnnnnnnnnnnnnnnnnnnnnnnnnnnnnnnnnggcacgagcaggaagaggaagtgtcctgggaaacctgacacgaagcgactgcaagcccatctcagtctagaagttcggtcttcagtgctggggaattttcttgaaagaaaatttcagttagtttttcgtgccatgatccatagttattttttggcagtgaggaataagagagttaaaaaactgaatgaaaactctaggtggggacagggtccctcagtcagtgtgcagtgacttggccacactgtttggggaaggacgctgcacatgtcattgtctcttaggtctttctcttggctggtcaggtcctcctgcttgggggggtaaaggcctggctaccagcattcctagaactgaccactgtaggtcacaagaggttggaggggtccagagagcacctacccccatgtgccaaccttgccttcc

SEQ ID NO: 29752 - DNA, 526 bp, Homo sapiens
  misc_feature (1)...(526): n = a,t,c or g
tttgaanncccttnnnnnnnnnnnnnnnnnnnnnnnnnnnnnnnnnnnnnnnnnnnnnnnnnnnnnnnnnnnnnnnnnnggcacgagattcgctaacctgagtgacaactgaggtgtgagggccaggaacacaagtgggtaagggaaccacctgtcttagaagcgtgctataggaaccaatatctcttataatccatgtcctttccatatatgtgtatgtatgtatgtacatgtgtatatatatcacacaaacacacataaaaccaatatgatacgtattattattgcttttagatcccaggcagggggagccttgggattaggagcacactgtacttcaggaagttcatagccatggctttctactgggaatttagaattccttcatggccctgtcattccaaatgcagttaacctacagaggtcatttttattataagcagcattgcctggtaacagccatttcacctttatcaagtttcttccataggtattctactcattcattaaaaaaaaaaatgaattg

SEQ ID NO: 29753 - DNA, 526 bp, Homo sapiens
  misc_feature (1)...(526): n = a,t,c or g
tttgaanncctttgatgacatnattacgaatttaatacnnnnnnnnnnnnnnnnnnnnnnnnnnnnnnnnnnnnnnnnnggcacgaggtagcagtcaacaaatttgagataaatattgattttacatccttgagtgttttctgtgtaacttgaggatagtaacaatatcctttacctagaatgtagtaacaaaatcctttatctagaatgtagtgcaaaagatggtagttctaaggcagagagtgtacaggaatagggagaaatagttgttctggagtaaacctttgaatggaagtcagttcatttatggctaagaggttgagtgtgttggtaagaaaatttcccaatgcttctggcttggattttccttgtcttcttttccaccctgtgatgaatagcattaatttaaacctatttaaggctagtgtgggagaaaccacagcctttgttgtggcactgctgtcacagtaggactgggtgtttcatttggttaaggcctcaagctgttccanaggacacgggacag

SEQ ID NO: 29754 - DNA, 599 bp, Homo sapiens
  misc_feature (1)...(599): n = a,t,c or g
cngangaanngannnnnnacaatnnnnaccagaantactagnncnangntncttanaatanagaannnggggtaggtcntcttgancttgagcctnanaanaacgatacgaannnnnnnnnnnnnnnnnnnnnnnnnnnnnnnnnnnnnnnnnnnnnnnggcacgagnnnnnnnnnnnnnnnnnnnnnnnnnnnnnnnnnnnnnnnnnnnnnncattgatctttctgtggtcaaaaggattatgtatttgagtaggtatagggtgaaatggtaaatataacaggcctttcccagcatagaatttcttaacctgaaccaaaggatttcttttttttttttnnnnnnnnnnaaangnangggttaaaaatngaaaaaaagggttttttaaacccngggggnanatttgggganggnggaaaaaggggntaggntttaaagggantnnanggatnggttaaaggnnagtngtnaatnaggnannnttaanngggnnaanngggggngggaaanttaaagngangtanagangggaanagnnnttcggnccgnggcccaattttttngggccnggnggcnaagnnccntntttcnnggccccc

SEQ ID NO: 29755 - DNA, 562 bp, Homo sapiens
  misc_feature (1)...(562): n = a,t,c or g
gnnnnnnnagtactttatcttttgactnggcnnnctntnctntgaaacnccctttgacattttgnnnnnnnnnnnnnnnnnnnnnnnnnnnnnnnnnnnnnnnnnnnnnnnnnnnnnggcacgaggtgaaatgtnnnnnnnnnnnnnnnnnnnnnnnnnnnnnnnnnnnnnnnnnnnnnnnnnnnnnnnnnnnnnnnnnnnnnnnnnnnnnnnnnnnnnnnnnnnnnnnnnnnnnnnnnnnnnnnnnnnnnnnnnnnnnnnnnnnnnnnnnnnnnnnnnnnnnnnnnnnnnnnnnnnnnnnnnnnnnnnnnnnnnnnnnnnnnnnnnnnnnnnnnnnnnnnnnnnnnnnnnnnnnnnnnnnnnnnnnnnnnnnnnnnnnnnnnnnnnnnnnnnnnnnnnnnnnnnnnnnnnnnnnnnnnnnnnnnnnnntatatgaaattgaaatacgttgtctttttctgaaaggtggtatgaaacctaatgattgttattgaaatgtaacaaaggcccctggcnttaatggatatggacacagttttnngtctgtatgttaaaacaaaat

SEQ ID NO: 29756 - DNA, 447 bp, Homo sapiens
  misc_feature (1)...(447): n = a,t,c or g
nnnnnnnnnnnnnnnnnnnnnnnnnnnnnnnnnnnnnnnnnnnnnnnnnnnnnnnnnggcacgagaatattttgacagaaaattaattcatgtttacaattgtgggtagcagtgtgtcatttcaactcagtgttgagtgcgcactatgtgtccagcaacaaccttgtgagggagatagttatctctcccacagggaagaaagcaggatagagtactttgagaaattttcccagggattcatagctgataaatggtggagccagagttggaaccgagtctttctcactcaagtccctgttcttctatgtatttatttatttaattttttaaaatagagatggggnnnnngttggcnaanctggtctcgaactcctgactcaagcagtccgccaccttggctgccagagtgttggnattacaggcctgaccattgtgcttacccttcta

SEQ ID NO: 29757 - DNA, 481 bp, Homo sapiens
  misc_feature (1)...(481): n = a,t,c or g
tcccnccccccctttgacccntannaccnnnnnnnnnnnnnnnnnnnnnnnnnnnnnnnnnnnnnnnnnnnnnnnnnnnnnnnnnnggcacgagcagattctttcagatgccacaaagctgtgattagagctgcccattggcaaatcaggtactagtttttgttaatcacattgcagtcttccttcactgtttcttcccctggtcccggaattaaggctgggctccatttgacaagttatcttctgtgcaggtagagcagcaggctgtgttagctcacagcatctactcagtaggcatggaaatatccactgaatgggactgagaaagtggaatgggaggggaacgtgtgaagaacaggaagtttgcctctttatgccaaagctgctacttaaagcancaggatggtgatnatntttttngttaaaaatgcatgggaacggntttcctaanncggttttttancaaanccccanggnatgg

SEQ ID NO: 29758 - DNA, 488 bp, Homo sapiens
  misc_feature (1)...(488): n = a,t,c or g
tttntggcnattggaatcncatcacatgattactnnnnnnnnnnnnnnnnnnnnnnnnnnnnnnnnnnnnnnnnnnnnnnnnnnnggcacgagggagctcgcccttttcggctggagtcgggctttacggcgccggatggctctggacgtgaagtctcgggcaaagcgttatgagaagctggacttccttggggagggacagtttgccaccgtttacaaggccagagataagaataccaaccaaattgtcgccattaagaaaatcaaacttggacatagatcagaagctaaagatggtataaatagaaccgccttaagagagataaaattattacaggagctaagtcatccaaatataattggtctccttgatgcttttggacataaatnnaatattanccttgcntttgattttattggaacctgactnannggnttaaaaaagggnaaaanagnnttgnggcttgcncccttncccatnaaagctt

SEQ ID NO: 29759 - DNA, 472 bp, Homo sapiens
  misc_feature (1)...(472): n = a,t,c or g
ttggaaccnttnnnnnnnnnnnnnnnnnnnnnnnnnnnnnnnnnnnnnnnnnnnnnnnnnnnnnnnnnnnnnnnnggcacgaggattataatctctgggtgtaaaaacagataataagaattcggccctctgtcccctgctccctccgcttccactttcttcaacctgccagctcttccttctttccctgtcctgcctcctaaaaaacaaaaataaattttcatagggtgctgttagaacatagggaagggctactcaattctggttttctttttctttctttttttttcttttagggactcaaataaggctttccaatctgagattgnaaatatatttagttttaggcaaangaagggaaaanaanggnantcnttggtaaaggnantnccccaaatttggnannaactnggngaantaaagggnntngnaaaaaanncncnanantttnaggtttntgggccaaangggg

SEQ ID NO: 29760 - DNA, 468 bp, Homo sapiens
  misc_feature (1)...(468): n = a,t,c or g
aancctttnnnnnnnnnnnnnnnnnnnnnnnnnnnnnnnnnnnnnnnnnnnnnnnnnnnnnnnnnnnnnnnnggcacgagtagcttcatattaaaagaccttggaaagctgtaagaggctgttagaaaagtcatgtcatgtcatgccacctgttacgttttattttttgatgccttttttttcctttttttttttnnnnnnnnnnnnnnnncncgttgccnaggnngnanntcnnaggntnaancnatcntttngcctnggcctcccaaanngnnggnattgcaggcagnanccncananccnggccnttttnattnatnangggaccntttntnaangccaaaanaatgtntttcnttgnnaaaaaaaaaaattnntgnggcccttttannnccncngggggnaatgggnactgngtnaaaaaagccanggtgcggnaatggnaaaaaaggttgngnaatgcctttt

SEQ ID NO: 29761 - DNA, 475 bp, Homo sapiens
  misc_feature (1)...(475): n = a,t,c or g
ttnnnnnnnnnnnnnnnnnnnnnnnnnnnnnnnnnnnnnnnnnnnnnnnnnnnnnnnnnnnnnnnnnnnnnnnnnggcacgagggtctgtgtccacaattacttcctctcgtgttattctctgtcttcagttccctttgctaccccaagtctctggcagtgtcctgttgaaaagtttggctcttatttgacttgtcaagaagaaggccatgtgtcctcaaataagacccttgccctcaccttcagtcgctgtgctgagggaagctgaaattagcaagatccccaaagggaaggtgaactgggggaggaagggtaggctttggggtccagtgggcctcaactcagcactcacacaaacatacaggcttgtttttacttttatgaaggaagatggattccttcccactaggctttttttaatcttcgtaacatgcctgctctagggaaggcactactgtgcacctcaaagagccaag

SEQ ID NO: 29762 - DNA, 482 bp, Homo sapiens
  misc_feature (1)...(482): n = a,t,c or g
tttgaatcctttnnnnnnnnnnnnnnnnnnnnnnnnnnnnnnnnnnnnnnnnnnnnnnnnnnnnnnnnnnnnnnnnggcacgagccagggtttgagggaggggannnnnnnnnnnnnnnnnnnnnnnnnnnnnnnnnnnnnnaagctagggtcccaaactcctgagttctggagaaagaagagcttggggtcttgtaaaagggatatgcctgaggcccaccatgggtgtgaaggaggtggttggatcctcgagccctagggactacttagggatgtgagctgcttccctggtcgctccctgacccaagccctgccccaccccagccatggccaacactcctcaagaactggcagctcctggcagtcaaccacccaggctacatggccttcctcacctatgatgaggtccaagagcgtctgcaggcctgcagggacaagccaggcaggtaaagggtccagggctcagcagaacaaggctgcag

SEQ ID NO: 29763 - DNA, 224 bp, Homo sapiens
  misc_feature (1)...(224): n = a,t,c or g
ttnngnnccnnnnnnnnnnnnnnnnnnnnnnnnnnnnnnnnnnnnnnnnnnnnnnnnnnnnnnnnnnnnnnnnnnnnnnnggcacgagaaacaattgatgtaaaccaagagacatctgacttggatccaagcaaaagtgtaacacgtgttgatgatggagtagcttcctttgtgcttaatctcccatctggagtgacggtgctggagtttaannnnnnnnnnga

SEQ ID NO: 29764 - DNA, 468 bp, Homo sapiens
  misc_feature (1)...(468): n = a,t,c or g
aanccaantttgnnnnnnnnnnnnnnnnnnnnnnnnnnnnnnnnnnnnnnnnnnnnnnnnnnnnnnnnnnnnnnnnnggcacgagtgaaatttcctctcttatagactctagcttcatttttaccttcattcttgtgtgatattttcacatacatagctatcctcaacaaaataaataaagtacttcttaaattaacaaaatctcagatattaacaatagagcaaatgatcccactgtcttttctgcccctgtagaaactgtgtttgctctgcaccgttgttatctggtcttcctaagggaagaaagccaacagcatacttaatttcttccagcaaaggagagaagcactttcagtcatcactaatgaaacctctgctcattctgtcctactttccatccccnnnnnnnnnnnnnnnnnnnnnnnnnnnnnnnnnnnnnnnnnnnnnnnnnnnnnnnnnnnnnnnnnn

SEQ ID NO: 29765 - DNA, 474 bp, Homo sapiens
  misc_feature (1)...(474): n = a,t,c or g
ttgaatcctttgatccnngatcncnannnnnnnnnnnnnnnnnnnnnnnnnnnnnnnnnnnnnnnnnnnnnnnnnnnnnnnnnnnggcacgagtaaaccagtgttctactttattttaggtgtatcttttcttatttaaatgtcagctaaactttctttttaagatattgaatgaaagatgcccatccttcaggtttcgtttaagcaagaatccccattctcaaataatataatataaactttccaaattcttaagtagatcatctgagattgaaagctaagtttaactttctcaaagatattttagccgccatgacacctagacaaagtggtatattaaattctgattaatttggcctaaagcacctaagaatcattcttactttcttatccacaggggttattaagttttcacattanaaaaaatccaacagtgaataatactgcattggggttactgtaattgttaagtag

SEQ ID NO: 29766 - DNA, 473 bp, Homo sapiens
  misc_feature (1)...(473): n = a,t,c or g
antccntttggactcnnnnnnnnnnnnnnnnnnnnnnnnnnnnnnnnnnnnnnnnnnnnnnnnnnnnnnnnnnnnnnnnnnnnnnnggcacgagggaaaaggggtcacaatccttaagagggtgtgtcaaggaagacacaccatgctaatatgccaaaaagaccaaaagaaaataagcctcaaggaaggcctaatcaatagtattgctctccccagagaaatcataatatgggtacaaaatgatgttaaatttgaagatatttattttggtaatatttttcttttgatgaaaatctagagctgatttttcagaatcacttttatataataatttttttttcattttatgtaataatctgatctactgatttttatcaagtcaggtccagcagtttccttttttatgttggcataagttaaagaattttcaagattaaaacagccatgcaataactattttaaagtaatttgat

SEQ ID NO: 29767 - DNA, 399 bp, Homo sapiens
  misc_feature (1)...(399): n = a,t,c or g
aancccattgantcnnnnnnnnnnnnnnnnnnnnnnnnnnnnnnnnnnnnnnnnnnnnnnnnnnnnnnnnnnnnnnnnnnnnnnnggcacgaggttaataaaactgagcatagtaaactttgttacttattagcattttagtaaactggtaacatagctattatttaaaaaaaaataataagccaaannnnnnnnnnnnnnnnnnnnnnnnnnnnnnnnnnnnnnnnnnnnnnnnnnnnnnnnnnnnnnnnnnnnnnnnnnnnnnnnnnnnnnnnnnnnnnnnnnnnnnnnnnnnnnnnnnnnnnnntgtatatatacacatacctatatatgtatttgtgtgtgtgtgtatgattagggactttctgtnnnnnntatttnncatggnnnnccatcatg

SEQ ID NO: 29768 - DNA, 471 bp, Homo sapiens
  misc_feature (1)...(471): n = a,t,c or g
tgannccnattgantcnnnnnnnnnnnnnnnnnnnnnnnnnnnnnnnnnnnnnnnnnnnnnnnnnnnnnnnnnnnnnnnnnnnnnnnggcacgaggtgggtggtaaaatatatgagaatatgccttcttttgttgttttcctttgattaactgggaatcactttgcgctaagaacaaggaagccttaaatatctatggataagagaagatacaaaagtgaggccaaggagttaacagaatcctaattaaagataaacttggatcattacctatttgtatattggctgcagagttgtatacttcatatacatatgaagtatagtgtgtttctcttgaaaatgtgtaataagacctaaggggttggccagacacagggcctaagacagataatccaagcacttggaaggctgangcangangtngcttgaggccangagntnganaccagcctgnnaacatanngagaccccg

SEQ ID NO: 29769 - DNA, 505 bp, Homo sapiens
  misc_feature (1)...(505): n = a,t,c or g
ttgaatcccaaaaaattgaatcnnnnnnnnnnnnnnnnnnnnnnnnnnnnnnnnnnnnnnnnnnnnnnnnnnnnnnnnnnnnnnnnnnnnnnnggcacgaggagagcagcaccatgagcttcnnnnnnnnnnnnnnnnnnnnnnnnnnnnnnnnnnnnnnnnnnnnnnnnnnnnnnnnnnnnnnnnnnnnnnnnnnnnnnnnnnnnnnnnnnnnnnnnnnnnnnnnnnnnnnnnnnnnnnnnnnnnnnnnnnnnnnnnnnnnnnnnnnnnnnnnnnnnnnnnnnnnnnnnnnnnnnnnnnnnnnnnnnnnnnnnnnnnncccttaaaacactatcatctacaagggtactatattagtctcttacttggactcttaatcgagatcacctatnagcaacccaagncaaagnanacnaatcatactttttnaacattaaaaactttgcatgtncaaagaatacattggctgggcatggtanctcatgcctataatcccacactttgg

SEQ ID NO: 29770 - DNA, 492 bp, Homo sapiens
  misc_feature (1)...(492): n = a,t,c or g
aacagntattgaatgccnnnnnnnnnnnnnnnnnnnnnnnnnnnnnnnnnnnnnnnnnnnnnnnnnnnnnnnnnnnnnnnnnnnnnggcacgagaaatcttgatttctgagaggaaaattggggattttgtgttttcccttttagacttgagtgttctgtcactgtggatgagctcttctagaaacttccaagcagtttcaaaggggatttagatgtcatcaggaagtgtggttgacaacgtgatatttgggctttagaaaaacagcgtgtcacccgttttatttattccttgatgactctttttttggttgtttnnnnngnggtcnttgntgnnnnnnnnnnnnnnnnnnnnnnnnnnnnnnnnnnnnnnnnnnnnnnnnnnnnnnnnnnnnnnnnnnnnntcctcctgggttcttgcaaatagacagtcccatttggnggtgacnggagacagtgacanatcatcaagcnttanattntcataaagagcg

SEQ ID NO: 29771 - DNA, 487 bp, Homo sapiens
  misc_feature (1)...(487): n = a,t,c or g
nnnnnnnnnnnnnnnnnnnnnnnnnnnnnnnnnnnnnnnnnnnnnnnnnnnnnnnnnnnnnnnnnnnnnnnggcacgagagagactacnnnnnnnnnnnnnnnnnnnnnnnnnnnnnnnnnnnnnnnnnnnnnnnnnnnnnnnnnnnnnnnnnnnnnnctgttagctttattgctgtggtctggaactgaatgtgaagtgtctttgagggtacactgctatgtattctttcccttttaactctcatttattcctagttctgcaagtaaatccatattgagtgctcactacctctttttaggtcactggctttatagtcattcttcttgtccagagcttgttctgtagtaaattcctcaggaagagctcatggaacaataatctctgaattgtttcatgttgcaaacagtttgctgtgacctttgtacttgaaaatttgctggatggaaaacctangntcacattntntcttnttgantatnntaaaa

SEQ ID NO: 29772 - DNA, 482 bp, Homo sapiens
  misc_feature (1)...(482): n = a,t,c or g
cnnnnnnnnnnnnnnnnnnnnnnnnnnnnnnnnnnnnnnnnnnnnnnnnnnnnnnnnnnnnnnnnnnnnnnnggcacgagacaaaaggttaatgccttgagccaggtttagaaaattggggattaatgtctgaatgcagagctgatgccattttttcaggaaaagcaatggcctttatagaatctttttccaacaacattcttatttgccttccatcaagttttatttggtattgcagagtaagcttactatataaatcagaactctttctgatgaagtgaccaatttaatcccaaaattgaatgtcctagaaggaactcagagagttgcaggaccctggggactttaagcactagaaccaaggacgtgatcaccatcaagatccttttcttctcctnccaacccagctctctttctccactcctctcagtctctgngtgctggcctcattttttccgacagtaggcttctacacaggggaa

SEQ ID NO: 29773 - DNA, 451 bp, Homo sapiens
  misc_feature (1)...(451): n = a,t,c or g
ttttnnnttcngaatccnnnnnnnnnnnnnnnnnnnnnnnnnnnnnnnnnnnnnnnnnnnnnnnnnnnnnnnnnnnnnnnnnnnnnggcacgagcttttgcaaggcataaggaggagcatgtgggcagaaacccctgtgagtgcaagaggtgggccacctgcaggaaaactgcccagtccactctgcagagaaggattggagcattttctacaccagcctgccagggacacacctgactgcacaaagatccatctaaaatcactcacattatactcacagaaggtggtattttcacagcttcatctttccgcagttggtaatcaaatgtaagaagagcttttatttttataggaatgatttagcttatggagtaccaatctcatccttttccttcctctgtctttttaaccaagcatagaatgaggagaccaatgtatataatcaaatact

SEQ ID NO: 29774 - DNA, 442 bp, Homo sapiens
  misc_feature (1)...(442): n = a,t,c or g
tgnnntatnnnnnnnnnnnnnnnnnnnnnnnnnnnnnnnnnnnnnnnnnnnnnnnnnnnnnnnnnnnnnnnnnnnnnggcacgagccacagactcagagagaacccaccatggtgctgtctcctgccgacaagaccaacgtcaaggccgcctggggtaaggtcggcgcgcacgctggcgagtatggtgcggaggccctggagaggatgttcctgtccttccccaccaccaagacctacttcccgcacttcgacctgagccacggctctgcccaggttaagggccacggcaagaaggtggccgacgcgctgaccaacgccgtggcgcacgtggacgacatgcccaacgcgctgtccgccctgagcgacctgcacgcgcacaagcttcgggtggacccggtcaacttcaagctcctaagccactgcctgctggtgaccctggcc

SEQ ID NO: 29775 - DNA, 453 bp, Homo sapiens
  misc_feature (1)...(453): n = a,t,c or g
tnnnnnnnatntgaatccnnnnnnnnnnnnnnnnnnnnnnnnnnnnnnnnnnnnnnnnnnnnnnnnnnnnnnnnnnnnnnnnnnnnnggcacgagcggcacgaggttgtaactttcatccccactcactggaaaacagctctctgaagacccttgaacaagagttgatgaacttccaggttgctgagctcatggaggtgctgggatggtggcctgccccagagggcgtggaagctccatgcacccccaccccataccttgacctatgcatctcttctgtctggctgtttctgagttgtaccctttataataaagcagtaaacataagtaaagagtttccctgaattctgtgagctgttctaccaaattgtcaaaactgaagacgcgatcctgggaatccctgagttacagctnnnnnnnnnnnnnnnnnnnnnnnnnnnnnnnnnnnnnnnnc

SEQ ID NO: 29776 - DNA, 489 bp, Homo sapiens
  misc_feature (1)...(489): n = a,t,c or g
ttnaaatcctttganaccnntttnnnnnnnnnnnnnnnnnnnnnnnnnnnnnnnnnnnnnnnnnnnnnnnnnnnnnnnnnnnnnnggcacgaggatggccacaccggcggtaccagtaagtgctcctccggccacgccaaccccagtcccggcggcggccccagcctcagttccagcgccaacgccagcaccggctgcggctccggttcccgctgcggctccagcctcatcctcagaccctgcggcagcagcggctgcaactgcggctcctggccagaccccggcctcagcgcaagctccagcgcagaccccagcgcccgctctgcctggtcctgctcttccagggcccttccccggcggccgcgtggtcaggctgcacccagtcattttggcctccattgtggacagctacnagagacgcaacgagggtgctgccgagttatcgggaccctgttgggaactgtcgacaaacactcagtggaggtcact

SEQ ID NO: 29777 - DNA, 205 bp, Homo sapiens
  misc_feature (1)...(205): n = a,t,c or g
gnancctttgnnnnnnnnnnnnnnnnnnnnnnnnnnnnnnnnnnnnnnnnnnnnnnnnnnnnnnnnnnnnnnnnnnnnnnnnggcacgagctnnnnnnnnnnnnnnnnnnnnnnnnnnnnnnnnnnnnnnnnnnnnnnnnnnnntcctcatcatcctttgagggctgaaacaaccaagagtttcaggctcatttttttttttttt

SEQ ID NO: 29778 - DNA, 491 bp, Homo sapiens
  misc_feature (1)...(491): n = a,t,c or g
tnntnnnttttntggangccccgcnnnnnnnnnnnnnnnnnnnnnnnnnnnnnnnnnnnnnnnnnnnnnnnnnnnnnnnnnnnnnnnnnnnnnnnggcacgagggggtatcctccctttatatcacctcctgcccaggtgctctgcgccgccagagcatcatgtcatttgggatccctgatggcacattttgagactttggttcacagtaaagattggtcctgtgtgatcttaaagtaatgtggcttaaaaacaaatggctgtcagggaattgtaaatcaaagcaaacaccgatgagaatggcccaaatccaggacactcagcaccaaatgcgagggaggatgtgaagccacaggaagcctcactcactgctggtgggaacgcaaaacagtactgcaccttggaagacagtntgacnaaccttataaagnttnacaccttttacctgggatccncaatatgctncttgatanttacccaaaggagttaaaa

SEQ ID NO: 29779 - DNA, 489 bp, Homo sapiens
  misc_feature (1)...(489): n = a,t,c or g
tnnnccccctttgactcctnnnnnnnnnnnnnnnnnnnnnnnnnnnnnnnnnnnnnnnnnnnnnnnnnnnnnnnnnnnnnnnnnnnnggcacgagatgctgagcgagttcaagaacctggacatcaccaagaagaaattggtccacgagggcccactgacgtggcgggtgactaaggacaaggcagtggaggtgcatgtgctgctgctggacgacctgctgctgctgctccagcgccaggacgagcggctgctgctcaagtcccatagccggacactgacgcccacgcccgatggcaagaccatgctgcggccgtgctgcggctcacctccgcatgacccgcgaggtggcaccgatcacaaagccttctacgtcctttttacctgggaccaggaggccagatatacgagctggtggcacagactgtgtcggagcggaaaaactggtgtgctctcatcactgaactgccggatccctgaaagtccctgcc

SEQ ID NO: 29780 - DNA, 479 bp, Homo sapiens
  misc_feature (1)...(479): n = a,t,c or g
nnnnnnnnnnnnnnnnnnnnnnnnnnnnnnnnnnnnnnnnnnnnnnnnnnnnnnnnnnnnnnnnnnnnnnnggcacgaggacttcagaaggcaaatacagtaagttacatagttgtcagcaaaaatttagctcttttaatattgagaagactcacatttcttaagtaatcaaaggcctaataaaagaaaatgcaaagcgcaagaaattgtcttgataaaacacaaaatctttatttcctaggccaattatctagaaagaaagaaaaacctttcactatttctcattaagagtaaatcaatactccaagaaagcattgagacaagcatcagaacaaagcaattaactgtagataacaagacttaaaatgaccttgataacctcgtgttgagagaaccaaattctattttgcattagcatctttttattttatttatttatttttttgagacagggctcactttgcacctacactggagtg

SEQ ID NO: 29781 - DNA, 310 bp, Homo sapiens
  misc_feature (1)...(310): n = a,t,c or g
ctnnnnnnnnnnnnnnnnnnnnnnnnnnnnnnnnnnnnnnnnnnnnnnnnnnnnnnnnnnnnnnnnnnnggcacgagcactaataccatttaagttagactagaagaggagtatgggtgctattactgtccttttgtttccagacatgttccccttttctgagttaatagaaattgctgaaatcacagactgggttcaaatactagcactgctacttaataggtataggtaaatcagcttttctaagcttcagtcttctcccttctaaaataggaacaataatactcactttnnnnngnattnataagag

SEQ ID NO: 29782 - DNA, 470 bp, Homo sapiens
  misc_feature (1)...(470): n = a,t,c or g
nccnnnnnnnnnnnnnnnnnnnnnnnnnnnnnnnnnnnnnnnnnnnnnnnnnnnnnnnnnnnnnnnnnnnnnnnggcacgagnnnnnnnnnnnnnnnnnnnnnnnnnnnnnnnnnnnnnnnnnnnnnnnnnnnnnnnnnnnnnnnnnnnnnnnnnnnnnnnnnnnnnnnnnnnnnnnnnnnnnnnnnnnnnnnnnnnnnnnnnnnnnnnnnnnnnnnnnnnnnnnnnnnnnnnnnnncccagcatatgaccctatttaatttacatgttagtatgtacatatgtgcctaaaaatgctgggaaaaaagatnnnnnnatgtctatatctatgactcataggagcacttatgacatgagaaaaaaagcaaagtgcagaataatgtttatagtgtgaatattttggtaaaaacacacaaatcattcacctgcttaaagaaagtcatttataaaatgaggagatggctanatcat

SEQ ID NO: 29783 - DNA, 378 bp, Homo sapiens
  misc_feature (1)...(378): n = a,t,c or g
nnnnnnnnnnnnnnnnnnnnnnnnnnnnnnnnnnnnnnnnnnnnnnnnnnnnnnnnnnnnnnnnnnnnggcacgaggcagatgagtgccctggggggctactcctccgtgagcagctgcaatggctatggcagaatgggccttctccaccaggagaagctcccaagtgacttggatggcatgttcattgagcgcttagactgtgacatggaatccatcattcggaatgacctcatggatggagatacattggattttaactttgacaatgtgttgcccaaccaaagcttcccacacagtgtcaagacaacgacacatagctgggtgtcaggctgagggttannnnnnnngnannnnnnnnnnnnnntnnnnnnacctt

SEQ ID NO: 29784 - DNA, 285 bp, Homo sapiens
  misc_feature (1)...(285): n = a,t,c or g
nnnnnnnnnnnnnnnnnnnnnnnnnnnnnnnnnnnnnnnnnnnnnnnnnnnnnnnnnnnnnnnnnnnnggcacgagaaaatgtatctgaaacttcttttccccttgatactctctgactttaattgacaaattaaagcaaacaccagttttaagaactgtcttgcttgaatttccgtttactgnnnnnntaaaatctttaaaggcaacttttaagatgaaaattctagagctggcagngactcacacctgttatccccaaaatttangaggccaaggngggaggg

SEQ ID NO: 29785 - DNA, 471 bp, Homo sapiens
  misc_feature (1)...(471): n = a,t,c or g
caatnnnnnnnnnnnnnnnnnnnnnnnnnnnnnnnnnnnnnnnnnnnnnnnnnnnnnnnnnnnnnnnnnnnnggcacgagccaggctnnnnnnnnnnnnnnnnnnnnnnnnnnnnnnnnnnnnnnnnnnnnnnnnnnnnnnnnnnnnnnnnnnnnnnnnnnnnnnnnnnnnnnnnnnnnnnnnnnnnnnnnnnnnnnnnnnnnnnnnnnnnnnnnnnnnnnnnnnnnnnnnnnnnnnnnnnnnnnnnnnnnnnnnnnnnnnnnnnnnnnnnnnnnnnnnnnnnnnnnnnnnnnnnnnnnnnnnnnnnnnnnnnnnnnnnnnnnnnnnnnnnnnnnnnnnnnnnnnnnnnnnnnnnnnnnnnnnnnnnnnnnnnnnnnnnnnnnnnnnnnnnnnnnnnnnnnnnnnnnnnnnnnnnnnnnnnnggtcctcangagtatgntnncaacaacctggngatgacacctnnnacaa

SEQ ID NO: 29786 - DNA, 472 bp, Homo sapiens
  misc_feature (1)...(472): n = a,t,c or g
cttggntnnnnnnnnnnnnnnnnnnnnnnnnnnnnnnnnnnnnnnnnnnnnnnnnnnnnnnnnnnnnnnnnnnnnnnnggcacgagactagatattcgaatgaatatatagggccattcaacatagtcaccattgagctatctttagagcacagggcatttaataatgggcatctccctgtggagagatctggagctcaggagcattcaggatttccatgccccttctctctgcatcctcctgcctctaatctagctatagcaaggacactacagcagttcactctttaagagtatttctggttacccagtgaagggtgggatcaactctcccacccaaaactgggttgggtgtcaagactgattcaccacatctcaggagggtgtggaaagatgtattgctcacatgaggctttctggggagagcagggcagccatccaaacgggtctagtttttattttggttggagagt

SEQ ID NO: 29787 - DNA, 472 bp, Homo sapiens
  misc_feature (1)...(472): n = a,t,c or g
aatnnnnnnnnnnnnnnnnnnnnnnnnnnnnnnnnnnnnnnnnnnnnnnnnnnnnnnnnnnnnnnnnnnnnggcacgagcnnnnnnnnnnnnnnnnnnnnnnnnnnnnnnnnnnnnnnnnnnnnnnnnnnnnnnnnnnnnnnnnnnnnnnnnnnnnnnnnnnnnnnnnnnnnnnnnnnnnnnnnnnnnnnnnnnnnnnnnnnnnnnnnnnnnnnnnnnnnnnnnnnnnnnnnnnnnnnnnnnnnnnnnnnnnnnnnnnnnnnnnnnnnnnnnnnnnnnnnnnnnnnnnnnnnnnnnnnnnnnnnnnnnnnnnnnnnnnnnnnnnnnnnnnnnnnnnnnnnnnnnnnnnnnnnnnnnnnnnnnnnnnnnnnnnnnnnnnnnnnnnnnnnnnnnnnnnnnnnnnnnnnnnnnnnnnnnnnnnnnggtnctcangagtatgntcncaacaacctggngnatgacanctnnnacag

SEQ ID NO: 29788 - DNA, 478 bp, Homo sapiens
  misc_feature (1)...(478): n = a,t,c or g
ccctatnggatcncnnnnnnnnnnnnnnnnnnnnnnnnnnnnnnnnnnnnnnnnnnnnnnnnnnnnnnnnnnnnnnnnnnnnnggcacgagggttatgctaaacagcctaggtttttaaactgaaagccacatttggagcataaagctttgtatctccttttataaacctttgtataattactcttctcttgacacatctcttcacagttatttaaatatctggcaagagacgaatactaataaatgtataagaattatctctaatgatcatgtgggtaatattcagataagcatctgatttcttttactttgtgttttaagatttttcagaattatgtctgggaaaaagatttgattcaaaatttacttttatggacatgacattgttttattgggcaaaaaaaaaatcattgtttgagatatttgtttaggttttgaaaattctagtgaagaggttattgaggaaggccgcttctt

SEQ ID NO: 29789 - DNA, 420 bp, Homo sapiens
  misc_feature (1)...(420): n = a,t,c or g
atttgnnnnnnnnnnnnnnnnnnnnnnnnnnnnnnnnnnnnnnnnnnnnnnnnnnnnnnnnnnnnnnnnnnggcacgagaagacttaagcatttggaacatagaatgctaataaatttttattaaaaggcagctttgaatggttnnnnnnnnnnnnnnnnnnnnnnnnnnnnnnnnnnnnnnnnnnnnnnnnnnnnnnnnnnnnnnnnnnnnnnnnnnnnnnnnnnnactcaagggnnnnnnnnnnnnnnnnnnnnnnnnnnnnnnnnnnnnnnnnnnnnnnnnnnnnnnnnnnnnnnnnnnnnnnnnnnnnnnnnnnnnnnnnnnnnnnnnnnnnnnnnnnnnnnnnnnnnnnnnnnnnnnnnnnnnnnnnnnnnnnnnnnnnnnnnnnnnnnnnnnnnnnnnnnnnnnnnnnnnnnnn

SEQ ID NO: 29790 - DNA, 380 bp, Homo sapiens
  misc_feature (1)...(380): n = a,t,c or g
cactttgnnnnnnnnnnnnnnnnnnnnnnnnnnnnnnnnnnnnnnnnnnnnnnnnnnnnnnnnnnnnnnnnnggcacgagggcagagtgaaaagcacacacctgagaaatgaaaagaaatggcaaaggtcacacgtctcaggatgaattgcactgtgtgtgacaccctagctgaaatcctatcccacaggaccatcaggtgagcaattaaagaaagtggctgaaattgcttccatgttcttttttctcttctaaaaatatctatgctgagactttttccccgtgtgtgtgtatacgtgtgtgtatacacgtgtgtgtatacacgtgtgtgtatacatgtgtgtgtatacatgtgtgcanntgccatgcttgngcangcct

SEQ ID NO: 29791 - DNA, 475 bp, Homo sapiens
  misc_feature (1)...(475): n = a,t,c or g
ncctttggatatccactnnnnnnnnnnnnnnnnnnnnnnnnnnnnnnnnnnnnnnnnnnnnnnnnnnnnnnnnnnnnnnnnnnnggcacgagcattttaaggtatccagatagacagaattgcatgaaatatttcacctctaacaagatatatcatgccttttgtgtgagagattcttgttctgtctttcctgcccttctccctttgccgtatttttcttctccctttgccgtatttttcttannnnnnttctcttattntcattgactatatgtgctttcatantgntntatnaggtatcacncnnctnaannntncntncnntccnnnnctttgnctnactgctttcctnaacnngntcannngcttntctccntnnagctttgnnttgnncctntgntntccntttattcccnnnanngcncntctnnctccttngngcnntcgngncntcnntctccttntngctnnctct

SEQ ID NO: 29792 - DNA, 503 bp, Homo sapiens
  misc_feature (1)...(503): n = a,t,c or g
ttganncaatnnnnnnnnnnnnnnnnnnnnnnnnnnnnnnnnnnnnnnnnnnnnnnnnnnnnnnnnnnnnnnnnnnnnggcacgagagagagctagcaccatgagcttcaatnnnnnnnnnnnnnnnnnnnnnnnnnnnnnnnnnnnnnnnnnnnnnnnnnnnnnnnnnnnnnnnnnnnnnnnnnnnnnnnnnnnnnnnnnnnnnnnnnnnnnnnnnnnnnnnnnnnnnnnnnnnnnnnnnnnnnnnnnnnnnctccagcctnnnnnngagactctatcgnnnnnnnnnnnnnnnnnnnnnnnnnnnnnnnataatagccttcaatggctttccactgtcttttggactgacccaaatccctaacatgcttcagagagctatccatcatttatagttgctggatttgncatactaaattncttctttcagncttataatnncanacaatntntaattttaggccttngggttttananccttttttnttnntaancnnnctta

SEQ ID NO: 29793 - DNA, 466 bp, Homo sapiens
  misc_feature (1)...(466): n = a,t,c or g
aanncactnnnnnnnnnnnnnnnnnnnnnnnnnnnnnnnnnnnnnnnnnnnnnnnnnnnnnnnnnnnnnnnnnnnggcacgagctttaatagtttagaaaaacattttggccctgtaacttctgattggtatgaatagaagcagttctgtgttgcagtaaggggaaatcacatttttacggggtagaaagttgacactaaatgaagattgtgattttagtattttaaaattaattccgtctaattggattttggttttgcaggcagcatctcatatatgtcgagtacttaacaatttaaagctctgacttgnaaatttatttttcagctctcttttttcgnaattanaatactgttggacttgctcancangaccttatcttancnnnnngtncttatanaaangggagacnttnnttanttnnncccatattatnnttanaagntgactntngaannannnttta

SEQ ID NO: 29794 - DNA, 412 bp, Homo sapiens
  misc_feature (1)...(412): n = a,t,c or g
ttganntcnnnnnnnnnnnnnnnnnnnnnnnnnnnnnnnnnnnnnnnnnnnnnnnnnnnnnnnnnnnnnnnnnnnnnnnggcacgagcctgcacggtatatactgagctacaagtgttggctgccattattattgttattttattattatcaccacccaagaataaggtcagagaataagtaaaaatacagtcatgcaccccctgacacttcagtcaagtatggtcagnnnnnnnnnnnnnnnnnnnnnnnnnnnnnnnnnnnnnnnnnnnnnnnnnnnnnnnnnnnnnnnnnnnnnnnnnnnngattgtgttacaatggcttacaggattcagtgtacagtaacaaactnnnnnnncaacaggttatatcacatggcatttgngtatannanggnatactatntanatttg

SEQ ID NO: 29795 - DNA, 378 bp, Homo sapiens
  misc_feature (1)...(378): n = a,t,c or g
gnnnnnnnnnnnnnnnnnnnnnnnnnnnnnnnnnnnnnnnnnnnnnnnnnnnnnnnggcacgagaccatgagcttcaataccctgaaagattctattattttaaaattatttttattttgtacacatccattcattcattcaagaaccaaagattccataagattaaggatagccaatcctaaagatggactgtacaacatgaggaacatattatagttaaataatcgtaaattatattcatgatttttgctaaatgagtagattatggctggtttctggggagggctcagggcaccacagggccactataatgagatgatagatatgttaatttgcttcactacagtaaccattgccacataacattttggcncctg

SEQ ID NO: 29796 - DNA, 501 bp, Homo sapiens
  misc_feature (1)...(501): n = a,t,c or g
aanttttgagctccnnnnnnnnnnnnnnnnnnnnnnnnnnnnnnnnnnnnnnnnnnnnnnnnnnnnnnnnnnnnnnggcacgagcccatcctcagagagcctgtctatcttccaaactgttgagctaggctagtggtttcacctggggataattttgccccgaggggacatttggcaatgtttggttttagttgtcataactagggtagggnnnnnnnnnnnnnnnnnnnnnnnnnnnnnnnnnnnnnnnnnnnnnnnttgtagtattcaagacagtgtcaaagaattgttcaacctaggatgtcagtagtgccaagattgagaaacccggagctagccaaattcgtctcccaattgatatacatactattctcttctcccactctcatttttttttttggaaaaactnggntnaaatatcanntcttcagggaccntcccccaccttttnnnatnccctnannntggnttaaggangctnctnantnttnnnngnctttt

SEQ ID NO: 29797 - DNA, 493 bp, Homo sapiens
  misc_feature (1)...(493): n = a,t,c or g
nnnnnnnnnnnnnnnnnnnnnnnnnnnnnnnnnnnnnnnnnnnnnnnnnnnnnnnnnnnnnnnnnnnnggcacgagtgacatttaagaaatacagaataatgcaaagaataatattacaaagcttgtgtacccaccacctgaaattaataaatattaatctgttatcactttgattcagatttttaaataaaatatacaggaaatcctagatagagttgatattttcattattgtccatctcagacttattatccttactccttccacaaccccttctagaacatatgtggacactttcagcacttatgtattcatagaaatatatgtggtatcactttatatgttttctaaatgtctaatttataaaaataatattcttctacatgattttttctctcaatattatctatctggggcatatccatctggccaggcacttttcgtgctatatggctgttgncatgatatgaatatgcccaatttattatctat

SEQ ID NO: 29798 - DNA, 545 bp, Homo sapiens
  misc_feature (1)...(545): n = a,t,c or g
gnnntnnngnnnnnttncttnaattcctaantgatctttttntnnnnnnnnnnnnnnnnnnnnnnnnnnnnnnnnnnnnnnnnnnnnnnnnnnnnnnnnnnnnnnggcacgagtttcttatttaaaaaacaaaacaaaactttctttnnnnnnnnnnnnnnnnnnnnnnnnnnnnnnnnnnnnnnnnnnnnnnnnnnnnnnnnnnnnnnnnnnnnnnnnnnnnnnnnnnnnnnnnnnnnnnnnnnnnnnnnnnnnnnnnnnnnnntattttaaaaatattttaacatctgaaaataatgatttgatattatattacattagaaattcttttttttaaagtggggcttatgtaaatnnnnnnnnnnnnnnnnnnnnnnnnnnnnnnnnnnnnnnnnnnatgcgtttttaagaacacaggtcaatagtgttaagtatattcacgttgttggctatcagtctccagaacttctttatnttgcccaactgacattctgtacccgttaaatcacaatnntctattctncaccccatctncagngcttggc

SEQ ID NO: 29799 - DNA, 500 bp, Homo sapiens
  misc_feature (1)...(500): n = a,t,c or g
tcccctttgaantnnngatncacctnnnnnnnnnnnnnnnnnnnnnnnnnnnnnnnnnnnnnnnnnnnnnnnnnnnnnnnnnnnnnnnnnnnggcacgaggagcttcaatacctggaaataaagacttgagagttgctcccctagaagactattaaactctagaactaaactgaactatcatattgcctcaataaaaagctgtcagtgttaaatgtggccagaaacacggcagcaataaaatgccactgaatgtggcaaccagacatttttaaatgtttttgagagagcaactttcaagaaagttgtgatcacatgannnnnngctctanaacnctagnnaatgcngtnnaaanggccatattcntttnngntatcngnntgnagannacnnttnanannnnatctccngttntnttcncttangaacngntttnnttnnntnttnncntngtctcnggtnntncttaccntngnntctnncncnntnannnnnctcgtg

SEQ ID NO: 29800 - DNA, 512 bp, Homo sapiens
  misc_feature (1)...(512): n = a,t,c or g
tntttgancctacngaannnngtctcccanatnnnnnnnnnnnnnnnnnnnnnnnnnnnnnnnnnnnnnnnnnnnnnnnnnnnnnnnnnnggcacgaggggcagaagccacattgtaatgtattaagaggagaataggagatgcaaagttactcattggcagtgaagggaaaaggatagaataacatttcaaaggttttgtaaggaggagagaaacttaatgagaaggtataagaagaaaaatccaagagactagggaatcagctgatggagcagtttttcagagaatgtatgtgagggtaggagtcctaacaccggagaagcgttcacttagaaaataggaaagccctgtcttccgaagcaggaggaagagaagtaaggtgggtgttcttagatctggacttggatgggaggagagtcaaggatatcagttctggtgacctctttctcttggttannctggaaattaacattttaagnntcccncagnttaccntttnagccattggtcta

SEQ ID NO: 29801 - DNA, 542 bp, Homo sapiens
  misc_feature (1)...(542): n = a,t,c or g
ttntgttnnntctntngatccctagtnatctcttttnactgcnnnnnnnnnnnnnnnnnnnnnnnnnnnnnnnnnnnnnnnnnnnnnnnnnnnnnnnggcacgagctggacaaaatatatgaaacaagggttttcggacattggctatatgactgtgttcaggtagtaaggactgtgattacttagaaaggggaaacaaagaaggtgagacctacaactgcctcaacttatagatcggagaatttccagaccacagggcaaaggagaaatgcagacagagcctagcagtctccctgacttgaggataaagaactggggagttcnnnnnnnnnnnnnnnnnnnnnnnnnnnnnnnnnnnnnnnnnnnnnnnnnnnnnnnnnnnnnnnnnnnnnnnnnnnnnnnnnnnnnnnnnnnnnnnnnnnnnnnnnnnnnnnnnnnnnccacggaaaaagaaaaaaacaaagacacacacacacaaaaaaaagaactgggagttcagggaggcaaaagcaatgatcagtgcatgcatgtgaggggactcg

SEQ ID NO: 29802 - DNA, 517 bp, Homo sapiens
  misc_feature (1)...(517): n = a,t,c or g
tcnnttttgaannantnaancncttnnnnnnnnnnnnnnnnnnnnnnnnnnnnnnnnnnnnnnnnnnnnnnnnnnnnnnnnnnnnnnnnnnggcacgagcacttgtccaagatcctttcatgagcactgccacatcccatccgtggaagctaacaagaacccgtggagttgcatcttctgcaggataaagactattcaggaaagatgcccagaaagccaatcaggtcatcaggaatctgaagtcctgatgaggcagatgctgcctgaggagcagttgaaatgtgaattcctcctcttgaaggtctactgtgattcgaaaagctgctttttcgcctcagaaccgtattataacagagaggggtctcagggcccacagaagcccatgtggttaaacaaagtcaagacaagtttgaatgagcagatgtacacccgagtagaagggtttgtgcaggacatgcgtctcatctttcataccacaaggaatttacagggaagattaaatnancaagactgggaa

SEQ ID NO: 29803 - DNA, 498 bp, Homo sapiens
  misc_feature (1)...(498): n = a,t,c or g
tttgccccccnnnnnnnnnnnnnnnnnnnnnnnnnnnnnnnnnnnnnnnnnnnnnnnnnnnnnnnnnnnnnnnnnnnnnnnggcacgagcctgagagcatctggaattaaatgaatagctatggtgaagtctggctgctggtactgcgcttttttttaaacttgctgatttttgctgccatgaaaaatcagcatcatcacaaccagattcaaaaaggtattgtttctattcatcattgtactggaaaagaagtagaaaataaaaaaggtatcgacacccgaaagcagtgtattctacaattaagtattctacgtaaagtaaaagttctgcacctttacttataaggcattagaatcaaggaaagcaaatgttatctaaaagaagttgaaagaacacctaactctatttgantattngctnaataacatttcttttccttaaaaaggaatgttaganaaagtanttcttaacctcataccttgataggaaataaaaggg

SEQ ID NO: 29804 - DNA, 478 bp, Homo sapiens
  misc_feature (1)...(478): n = a,t,c or g
tntgaccccnannnnnnnnnnnnnnnnnnnnnnnnnnnnnnnnnnnnnnnnnnnnnnnnnnnnnnnnnnnnnnnnnnnnnggcacgagnnnnnnnnnnnnnnnnnnnnnnnnnnnnnnnnnnnnnnnnnnnnnnnnnnnnnnnnnnnnnnnnnnnnnnnnnnnnnnnnnnnnnnnnnnnnnnnnnnnnnnnnnnnnnnnnnnnnnnnnnnnnnnnnnnnnnnnnnnnnnnnnnnnnnnnnnnnnnnnnnnnnnnnnnnnnnnnnnnnnnnnnnnnnnnnnnnnnnnnnnnnnnnnnnnnnnnnnnnnnnnnnnnnnnnnnncctaattggaagcgccccctagcaatatcaaccattannnnnnnnnnnnnnnntatnatcttncnnnnnnnnnnnnnnnnnnnnnnnnnnnnnnnnnntgncgccttaanccagcctacgtttttccttctaggnagcctctacctggncngacaac

SEQ ID NO: 29805 - DNA, 530 bp, Homo sapiens
  misc_feature (1)...(530): n = a,t,c or g
gnnnnnnnttnnnntttnntnttttgancaactnaatctcttnnnnnnnnnnnnnnnnnnnnnnnnnnnnnnnnnnnnnnnnnnnnnnnnnnnnnnnnnnnnnnnnnnggcacgagaatataagaatattttatttctatgaacttttaggtgtttgttttccacctacgatttgctttttccttttcagctgatccatctaaacctcttcacagttagctaacttctctatactatgaagtaattcctgcacaaatatttctataataagcctgtccttttttttaagaaaaatatttctcatctgaggataaacttgtccttttgtaaaataaaaaaaaaaggacgtnnnnnnnnnnnnnnnnnnnnnnnnnnnnnnnnnnnnnnnnnnnnnnnnnnnnnnnnnnnnnnnnnnnnnnnnnnnnnnnnnnnnnnnnnnnnnnnnnnnnnnnnnnnnnnnnnnnnnnnnnnnnnnnnnnnnnnnnnnnnnnnnnnnnnnnnnnnnnnnnnnnnnnngnnttatnnccttg

SEQ ID NO: 29806 - DNA, 486 bp, Homo sapiens
  misc_feature (1)...(486): n = a,t,c or g
tnnnntttggtctttgaactacnnaancacctnnnnnnnnnnnnnnnnnnnnnnnnnnnnnnnnnnnnnnnnnnnnnnnnnnnnnnnnnnnnnnnnnnggcacgagggaccctgggcttctgacaggctgtggtgttaggattctgtgatgatcctgggactctgctcatggagctgggtgtccacttttccccgtatggcaccaggctgtgcctctcttattaatgagcacaatcaagaatatgctgcggtcccacccctgccctgcggcagccaagcaagatgagccggagccctggcagagtcccagaggtggcctctggcctttattaaatgccataaatcaattattcatctttgcagatgtncaaagcatgggcactgtcatgagtaaatgggaacggttcccttctggcccttaactgcngnacccnnacagntctnngnactggannnnnttnctanaaannntntnnnnnacccttt

SEQ ID NO: 29807 - DNA, 523 bp, Homo sapiens
  misc_feature (1)...(523): n = a,t,c or g
tggttngaaccnnnnagannttcttctacnanannnnnnnnnnnnnnnnnnnnnnnnnnnnnnnnnnnnnnnnnnnnnnnnnnnnnnnnnnggcacgagggagtgtattctgaagattggtaaggttgtgatggcgtccagtcagtagctgggaccgtggagatcagaacctggtggtggaaggggagtgtggggagtaaaggcagtagtttaggatcttgtgaagtggcagtatcagggtctcaaggacaaatcagatgcccaactaatcagagcagagagaaatgggggaaagccttcttgtatcgagccagcctctttggctggtcacttggggtgcccccagggagggaagatctgtcaacccctgacctgcctcccaggcttattcagtctgcctgtcctgtccatttcctccatagatgtgagaaattcacagcccataaattctgtggctgggagcagccaccgtggcaagcgggtacctggcagggtgcacaggctggttcctttcccccctgcg

SEQ ID NO: 29808 - DNA, 485 bp, Homo sapiens
  misc_feature (1)...(485): n = a,t,c or g
tntttgaannnacnaattcnccttnnnnnnnnnnnnnnnnnnnnnnnnnnnnnnnnnnnnnnnnnnnnnnnnnnnnnnnnnnnnnnnnnnggcacgagctgctgaagggatgcagcatgaaccattggtcccttcatgcgatcatgtcccggggctgcactaacagggtttgggcagaagaagcccaaacatttcaccacaggcagctgcttcgcggcagccccaaggctgggtccctgcgacagagttggtaaggagcactgcacggctgctcactggctgcattgtgccagcaacccccccccccccccccnnnnntttttngnaanttttaaaanttggnngggnntggnnngcccncccnnnncnnaagnnttttncccnnaaaaannttttccttnaaaannggggcccnnngggggggaattaannnnaaaancntngggntttnannntttnttntaaaanntttnaacngggggaaa

SEQ ID NO: 29809 - DNA, 523 bp, Homo sapiens
  misc_feature (1)...(523): n = a,t,c or g
tntgaatcctctgaatcccttnnnnnnnnnnnnnnnnnnnnnnnnnnnnnnnnnnnnnnnnnnnnnnnnnnnnnnnnnnnnnnnnnnggcacgagttcactttttgacaaaaagaaaattagaatcatgaagattaactgtttctcgagatagggcaaggataataacagtatagatttctgaaaatgagccgatagaaaatcaatccaaagaaactgacagaaggaagtcaaattggaaccatccaaaatgatataacaatgaaatgtgatcattaaaacagccatgaagttaatttacttaacacttttttttcatacactggagtcagcagattattccaaggtgaagaaaaggcatagatgtaaccttgtaagaggacagctgtgagacacagctacagacaaagccagcctgagaaaaagcacaaaggctgaatattaaatttatatgatggtactggaaggcagccaggagtggtttgcctgcttttattccaaatctgtagttgggatggtaccat

SEQ ID NO: 29810 - DNA, 493 bp, Homo sapiens
  misc_feature (1)...(493): n = a,t,c or g
tttgcccccacngctatgacnttnnnnnnnnnnnnnnnnnnnnnnnnnnnnnnnnnnnnnnnnnnnnnnnnnnnnnnnggcacgagccccctgcctggaactgtaaaggaggccacccctctccactctactgtgagttcatggtcaagggagggcagctgtgttcctgctagaccgagagggagggtccctctggatctgagcacggggcagaccaaccaagcacggctccttaggagtcatcacagctcagcaaagtccagaccggaggtcccatcctgacctactgagtcaaaggcagggaagaacttccccagcacactctagctgacccttctctgccgaacttgtaagaaaccactctcctgaccttgattcatcccttaactcacttctgtgatgcctcccagatctcattctttctactatcatagcacaagngggtgcccagccccatgcaggagccagagatggagcagccttcaacctacaa

SEQ ID NO: 29811 - DNA, 463 bp, Homo sapiens
  misc_feature (1)...(463): n = a,t,c or g
nntgccccccnnnnnnnnnnnnnnnnnnnnnnnnnnnnnnnnnnnnnnnnnnnnnnnnnnnnnnnnnnnnnnnnnnnnnnggcacgaggggcaactcaaatcaacaattttagaaaggctttttaatttataagaaaactaagttgagttagagtgctaagacatagaacatatttctttgacttacttctcctagtactccactccgtagcataaatttcatggtttctagaattttttattggcagagcattacccccaaattggtatactttataaactcagccttaccctacccctctggccaaacagatatacatttgtcatgcacgttctcgtggacctcattttcannnnnnnnnnnntaaatttcttgacantganganangcctgnantgaattgancgncntgcctncacannttttacntntgnnggtgnctcncanncngctnngnccgct

SEQ ID NO: 29812 - DNA, 409 bp, Homo sapiens
  misc_feature (1)...(409): n = a,t,c or g
tgnnnttggaaaaatctgaantcccnnnnnnnnnnnnnnnnnnnnnnnnnnnnnnnnnnnnnnnnnnnnnnnnnnnnnnnnnnnnnnnnnnnnggcacgaggcggctaccctactctgttgttcgaaacgagcaggtggaaatccgagccgttctctacaattaccggcagaaccaagagctcaaggtgagggtggaactactccacaatccagccttctgcagcctggccaccaccaagagnnnnnnnnnnnnnnnnnnnnnnnnnnnnnnnnnnnnnnnnnnnnnnnnnnnnnnnnnnnnnnnnnnnnnnnnnnnnnnnnnnnnnnnnnnnnnnnnnnnnnnnnnnnnnnnnnnnnnnnnnnnnnnnnnnnnnnnnnnnnnnnnnnnnnnnnnnnaaaaaaaaaaaa

SEQ ID NO: 29813 - DNA, 314 bp, Homo sapiens
  misc_feature (1)...(314): n = a,t,c or g
ttnttttttttcntcnccagctntnacacgattacaatacnactanctatnngtantttgnncctcgaggccaaggaattcggcacgaggccatctcaaaaaaaaaggggggggaccaatnnnnnnnnnnnnnnnnnnnnnnnnnnnnnnnnnnnnnnnnnnnnnnnnnnnnnnnnnnnnnnngaaccttgaaaattgtatgctnnnnnnnnnnnnnnnnnnnnnnnnnnnnnnnnnnnnnnnnnnnnnnnnnnnnnnnnnnnnnnnnnnnnnnnnnnnnnnnnnnnnnaattannnnnnnnnntggtggttgt

SEQ ID NO: 29814 - DNA, 456 bp, Homo sapiens
  misc_feature (1)...(456): n = a,t,c or g
tnnnnnncccccctttgacaccnnnnnnnnnnnnnnnnnnnnnnnnnnnnnnnnnnnnnnnnnnnnnnnnnnnnnnnnnnnnnnnnnnnggcacgaggccatctcaaaaaaaaaggggggggaccaatnnnnnnnnnnnnnnnnnnnnnnnnnnnnnnnnnnnnnnnnnnnnnnnnnnnnnnnnnnnnnnngaaccttgaaaattgtatgctnnnnnnnnnnnnnnnnnnnnnnnnnnnnnnnnnnnnnnnnnnnnnnnnnnnnnnnnnnnnnnnnnnnnnnnnnnnnnnnnnnnnnaattagattggtgggaggagtagatggggccaagggaggcaggaattgggattaactacttagtgggaaccacttttattttgaaatgatcagaatgttttggaaatagagggatgaggntgcacaacacagagaatggagtaaatgtcacctaactga

SEQ ID NO: 29815 - DNA, 435 bp, Homo sapiens
  misc_feature (1)...(435): n = a,t,c or g
ttgaanacctttgannacagcttgacnnnnnnnnnnnnnnnnnnnnnnnnnnnnnnnnnnnnnnnnnnnnnnnnnnnnnnnnnnggcacgagtggcggggtccctgagtgccagaggtggtggtgttgcttatcttctggaaccccatgcagccagatcccaggcctagcggggctggggcctgctgccgattcctgcccctgcagtcacagtgccctgagggggcaggggacgcggtgatgtacgcctccactgagtgcaaggcggaggtgacgccctcccagcatggcaaccgcaccttcagctacaccctggaggatcataccaagcaggcctttggcatcatgaacgagctgctgctcagccagcagctgtgtgacgtcacactgcaggtcaagtaccaggatgcaccggccgccagttcatggcccacaa

SEQ ID NO: 29816 - DNA, 443 bp, Homo sapiens
  misc_feature (1)...(443): n = a,t,c or g
nnnntttgaanacnttgnnnnnnnnnnnnnnnnnnnnnnnnnnnnnnnnnnnnnnnnnnnnnnnnnnnnnnnnnnnnnnnnggcacgaggggctttctgcagctgcggggttcaggacggaagctttggaaacgctttttctgcttcttgcgccgatctggcctctattactccaccaagggcacctctaaggatccgaggcacctgcagtacgtggcagatgtgaacgagtccaacgtgtacgtggtgacgcagggccgcaagctctacgggatgcccactgacttcggtttctgtgtcaagcccaacaagcttcgaaatggccacaaggggcttcggatcttctgcagtgaagatgagcagagccgcacctgctggctggctgccttccgcctcttcaagtacggggtgcagctgtacaagaattaccagcaggcacagtc

SEQ ID NO: 29817 - DNA, 536 bp, Homo sapiens
  misc_feature (1)...(536): n = a,t,c or g
aanntntgaaatccttnnnnnnnnnnnnnnnnnnnnnnnnnnnnnnnnnnnnnnnnnnnnnnnnnnnnnnnnnnnnnnnggcacgagaaaaaaatttattgannnnnnnnnnnnnnnnnnnnnnnnnnnnnnnnnnnnnnnnnnnnnnnnnnnnnnnnnnnnnnnnnnnnnnnnnnnnnnnnnnnnnnnnnnnnnnnnnnnnnnnnnnnnnnnnnnnnnnnnnnnnnnnnnnnnnnnnnnnnnnnnnnnntcttnnnnnnnnnnnnnnnnnnnnnnnnnnnnnnnnnnnnnnnnnnnnnnnnnnnnnnnnnnnnnnnnnnnnnnnnnnnnnnnnnnnnnnnnnnnnnnnnnnnnnntctctgtttttttaaaagagtctttaaaaatgtattatttattattattaatttgttaattatgtctagtacttagaactgcagtaataactttttgtaactaaatatccctctaaagaggcctctacctcaatgcttgtgagttagactccaatctgatattgaaatgacaagaaatcg

SEQ ID NO: 29818 - DNA, 535 bp, Homo sapiens
  misc_feature (1)...(535): n = a,t,c or g
aaacccnnnnnnnnnnnnnnnnnnnnnnnnnnnnnnnnnnnnnnnnnnnnnnnnnnnnnnnnnnnnnnnnnnggcacgaggggaaagattctgaaatgtaccttaatctagtctcttacacagtcttccttggacaggctgaggagttggcagaacattatgtaaaaagtggaactaactttgctttttctaactgttccaaaggctacaaataccccaaacttgcaaatacacaggcctgcacacttgagcctgtgttcctcccatccttctctaagagatcagaagcaagctgagggcccgtagaaattctgccagctggggagggtgtctggtttttcaagcacagttgagtgattcatagtgaagtaggctgggtgagatcctgggagcagagcatgccccaggcctgtgttagtttgaggcagcagcntaggagagaccaatntgnattcctcttcagatgcagagngngtgagatggntggctttttncaggntgncggnatgctggaagctttncccnagattnggac

SEQ ID NO: 29819 - DNA, 536 bp, Homo sapiens
  misc_feature (1)...(536): n = a,t,c or g
gaanntttnnnnnnnnnnnnnnnnnnnnnnnnnnnnnnnnnnnnnnnnnnnnnnnnnnnnnnnnnnnnnnnnnnnnnnnnnnggcacgagcttttcttcatcatggaattattgttctagcttacttaaactcttatctgatgtctatgagtgagcatttaattgagaatcgatgaatgtgtttttacaacgtccttgcctcattagaaagactgcttttatctagaaagcatgacctacttgcagaattaggcattgctacctaaatagttagtgattattctaggaaactgggtggcaaactgcagaatataagtggccagagagaagttgaagggacatcaggaacacacacacacacacacacacgcacaggctcttactatttggtgctcataaaatgacagaatgatacaaaaacatgagcattgattttgtggagcagttttgaggttgaaggaaaactggtggctgatggcaggctgaactcttaagccccaaacacaggaaatcttantggaaacgattctgaatgg

SEQ ID NO: 29820 - DNA, 537 bp, Homo sapiens
  misc_feature (1)...(537): n = a,t,c or g
aannttgaaaatccnnnnnnnnnnnnnnnnnnnnnnnnnnnnnnnnnnnnnnnnnnnnnnnnnnnnnnnnnnnnnnnnnnggcacgagcacccactttccctcttggtcactgccttgcagcttcattggcctacttcctgcttctttttttttctgagacannnnnnnnnnnnnnnnnnnnnnnnnnnnnnnnnnnnnnnnnnnnnnnnnnnnnnnnnnnnnnnnnnnnnnnnnnnnnnnnnnnnnnnnnnnnnnnnnnnnnnnnnnnnnnnnnnnnnnnnnnnnnnnnnnnnnnnnnnnnnnnnnnnnnnnnnnnnnnnnnnnnnnnnnnnnnnnnnnnnnnnnnnnnnnnnnnnnnnnnnnnnnnnnnnnnnnnnnnnnnnnnnnnnnnnnnnnnnnnnnnnnnnnnnnnnnnnnnnnnnnnnnnnnnnnnnnnnttcctgcttcttgaatgcgttaaaacgccttcccgttacatggcttttgcatatctacgtactttttcttggaatgctcttccttcactaattcctact

SEQ ID NO: 29821 - DNA, 551 bp, Homo sapiens
  misc_feature (1)...(551): n = a,t,c or g
tnnnnntttggannatntgaaaatccttnnnnnnnnnnnnnnnnnnnnnnnnnnnnnnnnnnnnnnnnnnnnnnnnnnnnnnnnnnnnnnnnggcacgagtacacttctaagtattagccatggttagttaaatttggaaatggcatttgtgcgggttgtgaaatttttttttggaaacactcagtttattaagaaacttagagcaaattaagaaaaatgagcgatacttggcgtgctcaagtctgttgttggatgggatggagttacctttcttgacaaattggtatttaaaaagcgacgtaatgacttaggacgtaatcactgccagagtgggaatcaacatgagatttaaatagaaaaaaaatgtttctgtcaacgcattatgaatgcttgaaatctgagcgtttgcactgccttgcaacatggacacttccaccttatgtatgggcatctctctgggaatgagctgaagtgctccctaccaagacttggcaaatgctgctttgatatagagaagtataggggtttgtcggaagagggagtatagatc

SEQ ID NO: 29822 - DNA, 459 bp, Homo sapiens
  misc_feature (1)...(459): n = a,t,c or g
tnnnnnnnncccctttgnacacccgnnnnnnnnnnnnnnnnnnnnnnnnnnnnnnnnnnnnnnnnnnnnnnnnnnnnnnnnnnnnnnnnnnggcacgagggaagatgcgagaatattgctcctaggcagcctgaaatggagaatataagctgctctgatcaggtattgtttcttcttctaaattcacaaaatagacgagtcattctctgcctgtcttcactcgccaggatcagtgattttgaaggtgggggtcagggtgggagtagaggaatatagagagaggcccaaagtcaccttggctaaagtccctctgtgtggaaacatgagaccaggcgcttttatgaggctttcttgaatatgcttatctgtgaaacataatgttttcccctttgtgctcccaggtttgtaggttatatccctcatgcagaactgagaagagtggttcagctaccaaatacc

SEQ ID NO: 29823 - DNA, 446 bp, Homo sapiens
  misc_feature (1)...(446): n = a,t,c or g
tnggacntccgttnnnnnnnnnnnnnnnnnnnnnnnnnnnnnnnnnnnnnnnnnnnnnnnnnnnnnnnnnnnnnnnnnnnnnnnggcacgagcgaacttgtaaactcatcctattcctatcatctcgtgtaagtctttttctctagtgaaatctgttctcattcacaggttattttagagctcttggttgtgttatagctcttggttgttttatagcaacacagattggttttcactggcaaaactaaagtaaaccagcatttcataacagacgatttggtgtttaaccacgtctcccacttctgtcttcaaatatactctttgggcactggacttcccatgcatctgaggatacacgttacaacgccttccttataggggcttgactgtatcctgggctgtccctgaccctgtgtaactgngtttatcttctggaagcaaaggtg

SEQ ID NO: 29824 - DNA, 327 bp, Homo sapiens
  misc_feature (1)...(327): n = a,t,c or g
tnttgatancnanaccggaatcccatnnnnnnnnnnnnnnnnnnnnnnnnnnnnnnnnnnnnnnnnnnnnnnnnnnnnnnnnnnnnnnnnnnnnnggcacgaggaatcccaaagctttagggcagagagggtcacagagaaaggaagagacttttccaaggccacacagtgatataaagttaatgaaaacccagatcttccatccaccttttagcctgactcactcttcccacatttatgaaatacttaaactggatggctacgtgtttaaaattcatgtgtacagaatggagagggattacttannnnnnnnnnnnnnnnnnnngg

SEQ ID NO: 29825 - DNA, 453 bp, Homo sapiens
  misc_feature (1)...(453): n = a,t,c or g
tnnnntttgancttgaannccatnnnnnnnnnnnnnnnnnnnnnnnnnnnnnnnnnnnnnnnnnnnnnnnnnnnnnnnnnnnnnnnnnnnnnggcacgagacaatatgctgaaagaaaggaatgataaaagatttggggatacaaaaagagtccttatcttaatgtaaattttattgaaatatagtacctatacagggaaggttacttcctccttgccatcactatttttgtaccacattaccatttgtctagattgattatcttgtttgtattcttcccacatgctctcttatgtggttaaccttcttgaaacagctctaataatgttcccatcttgatgttatttattgattcctttgcctacagaataaaatctaggattttgactagggcatttatggcctggtctatgatgagggtagngatatgtnaagaanggatcnnnaanactc

SEQ ID NO: 29826 - DNA, 464 bp, Homo sapiens
  misc_feature (1)...(464): n = a,t,c or g
tnnnnnttgnanattggaanccnnnnnnnnnnnnnnnnnnnnnnnnnnnnnnnnnnnnnnnnnnnnnnnnnnnnnnnnnnnnnnnnnnnnnnnggcacgagcttttttttttcagttaagctactgggttttgacgaagctcattacagcagttagcctacttcagggtttctcagcctgggcactactgatattttggactacagaattctttgttatggannnnnnnnnnnnnnnnnnnnnnnnnnnnnnnnnnnnnnnnnnnnnnnntcctgctagatgccagtagtaacctctccagtagccannnnnnnnnnnnnnnnnnnnnnnnnnnnnnnnnnnnnnnnnncaaaatcgcctccgattgagaaccagcagcccacactggccaaaacatcaccatcattgctatcatcatcatcataggatattgatagtctagtctctcatgntccccttgaaac

SEQ ID NO: 29827 - DNA, 354 bp, Homo sapiens
  misc_feature (1)...(354): n = a,t,c or g
tnnnctttgganatttgaannccnnnnnnnnnnnnnnnnnnnnnnnnnnnnnnnnnnnnnnnnnnnnnnnnnnnnnnnnnnnnnnnnnnnnnnnggcacgagtagctaacattttgttgtgtgccgggttcttttctcactccttgcatatatcatgctatttaattatgtagtgctttaaaaacaaataannnnnnnnnnnnnnnnnnnnnnnnnnnnnnnnnnnacagctcatttctttcaaagaaaatttgtcagtagaaaatgcttcttaaactttcatatgcaaatgagccacctgggcatcttgttcaaatgcagattgtgatctagtgggtgtggagtgaggnnnng

SEQ ID NO: 29828 - DNA, 458 bp, Homo sapiens
  misc_feature (1)...(458): n = a,t,c or g
tttggaannntnnnnnnnnnnnnnnnnnnnnnnnnnnnnnnnnnnnnnnnnnnnnnnnnnnnnnnnnnnnnnnnnnnnnnnnnggcacgagggtagactctgaaccctgaagaatctggtaccttaagcctaaaggagggtagagtgaggacttgtgggaaaggtacagttatatgggaagacaactgagtgtgaaaatctattcatgcaaggctggctcttaggctctaatagaatcttgcaagctaactctagagcaagtcttttatctttgggatgaaagaaatttaaggctaaactttatacattataattataaaactataataaacattagataatgttctactgaagtataaactcaactatctggcatcaaacagtaactaagccatgatcacaccactgccactgtgttctggcctangtgacagaacaagaccctgtctcaaacaaaa

SEQ ID NO: 29829 - DNA, 459 bp, Homo sapiens
  misc_feature (1)...(459): n = a,t,c or g
tttnggannnnaaagcctgacatgattacgaattncnaacnantnactattgnnnnnnnnnnnnnnnnnnnnnnnnnnnnnnnnnnnggcacgagctggtagaaaaaatctggaatggtnnnnnnnnnnnnnnnnnnnnnnnnnnnnnnnnnnnnnnnnnnnnnnnnnnnnnnnnnnnnnnnnnnnnnnnnnnnnnnnnnnnnnnnnnnnnnnnnnnnnnnnnnnnnnnnnnnnnnnnnnnnnnnnnnnnnnnnnnnnnnnnnnnnnnnnnnnnnnnnnnnnnnnnnnnnnnnnnnnnnnnnnnnnnnnnnnnnnnnnnnnnnnnnnnnnnnnnnnnnnnnnnnnnnnnnnnnnnnnnnnnnnnnnnnnnnnnnnnnnnnnnnnncaaaataataatattcaggtccggnagagatgatggggatgngaatanggaccatttcntaaatgctgaattat

SEQ ID NO: 29830 - DNA, 469 bp, Homo sapiens
  misc_feature (1)...(469): n = a,t,c or g
tnnnnntttgganatttggaannccannnnnnnnnnnnnnnnnnnnnnnnnnnnnnnnnnnnnnnnnnnnnnnnnnnnnnnnnnnnnnnnnnnnnnggcacgagctggtagaaaaaatctggaatgggnnnnnnnnnnnnnnnnnnnnnnnnnnnnnnnnnnnnnnnnnnnnnnnnnnnnnnnnnnnnnnnnnnnnnnnnnnnnnnnnnnnnnnnnnnnnnnnnnnnnnnnnnnnnnnnnnnnnnnnnnnnnnnnnnnnnnnnnnnnnnnnnnnnnnnnnnnnnnnnnnnnnnnnnnnnnnnnnnnnnnnnnnnnnnnnnnnnnnnnnnnnnnnnnnnnnnnnnnnnnnnnnnnnnnnnnnnnnnnnnnnnnnnnnnnnnnnnnnnnnnnnnnnnnnnnaataatattcaggtcgggagagatgatggggatgngaataggacattacgtaaaggctgattatttggga

SEQ ID NO: 29831 - DNA, 467 bp, Homo sapiens
  misc_feature (1)...(467): n = a,t,c or g
tcccctttggactcngaancccatnnnnnnnnnnnnnnnnnnnnnnnnnnnnnnnnnnnnnnnnnnnnnnnnnnnnnnnnnnnnnnnnnnnnnggcacgagggattatgttatgtcttttctagtaaaacatcttagtttctaaactttattttccatatgcctccttaagatgtgggttgacagtctttggacaaactatatattattaatatatctttaaaacattgcagccttaacactacagactaattgcgtcttgaccctggtaaaatgaggtgggacagatacctgtcttagtttgaaacctatgtatctgtcagtacggttttaatggagaattagttttttaaagaagctacattccatttctggttattgagctttgagtaaactatcattattttttcatgaagtcagacctgtaggttttatgtctcttccccttcccttttctctattntcctt

SEQ ID NO: 29832 - DNA, 458 bp, Homo sapiens
  misc_feature (1)...(458): n = a,t,c or g
tttganntnnnaagccnnnnnnnnnnnnnnnnnnnnnnnnnnnnnnnnnnnnnnnnnnnnnnnnnnnnnnnnnnnnnnnnggcacgagtcggcgtggtggagacatggaccgcggcgagcaaggtctgctgagaacagacccagtccctgaggaaggagaagatgttgctgccacgatcagtgccacagagaccctctcggaagaggagcaggaagagctaagaagagaacttgcaaaggtagaagaagaaatccagactctgtctcaagtgttagcagcaaaagagaagcatctagcagagatcaagcggaaacttggaatcaattctctacaggaactaaaacagaacattgccaaagggtggcaagacgtgacagcaacatctgcttacaagaagacatctgaaaccttatcccaggctggacagaaggcctcagctgctttttcgctgtngctc

SEQ ID NO: 29833 - DNA, 324 bp, Homo sapiens
  misc_feature (1)...(324): n = a,t,c or g
tncncttttgacctntgaanccannnnnnnnnnnnnnnnnnnnnnnnnnnnnnnnnnnnnnnnnnnnnnnnnnnnnnnnnnnnnnnnnnnnnnggcacgagctggaggactgggggggccgtggagcacgtgcccactatgatggcttctccctggaacccgagagcgaccactaccgcctgcggcttggccagtaccatggtgatgctggagactctctttcctggcacaatgacaagcccttcagcaccgtggatagggaccgagactcctattctggtaactgtgccctgtaccagcggggaggctnnnnnncnntgcctg

SEQ ID NO: 29834 - DNA, 456 bp, Homo sapiens
  misc_feature (1)...(456): n = a,t,c or g
ttganannaaagccnnnnnnnnnnnnnnnnnnnnnnnnnnnnnnnnnnnnnnnnnnnnnnnnnnnnnnnnnnnnnnnggcacgagtatatataataatgtcatcattttcattaaatattatataaaataatcatgtcatatcattttcattaaatattatatataataaattatcatgtcatatattattatatacattatataaggaatctgagtctcagagtacctcagtaacttacccaaggttatacctctagtgagtaagaaaaccagagttcaaatctccagtttcagtgtggcttcactaaatcattccctcagcaaatatttgttaccttctatgcaacaggtcctaggcatgaggtacacagtgatgcattaaatagatatgatttctcccatgtggagctgagtgccaagcattctttctactcccccagcatatgcnnaggaga

SEQ ID NO: 29835 - DNA, 468 bp, Homo sapiens
  misc_feature (1)...(468): n = a,t,c or g
tnnnnttttgantntgaancccatnnnnnnnnnnnnnnnnnnnnnnnnnnnnnnnnnnnnnnnnnnnnnnnnnnnnnnnnnnnnnnnnnnnnnggcacgagcctccccacacctaactgcctccacctcccactacaccctggctcagccacattgctgcaagcaagccaatgtatcaccccctacacatgactcaccctctggagcctctgaaccatcacatgtgccattaccccaacccagaatcatagcctcggttctctctgccaaacagcatctcccctgtttcaaaactctgttcaacactcccatccttcaggaaaccagtcagcaagatttgttgagcactcacaaatctagagggtggaggaaggagggctggaaaacacatttaaaaagacataaaaacacttattaagaaaacattcaaacacgtaagactctgcaactggatataactttaatcaa

SEQ ID NO: 29836 - DNA, 469 bp, Homo sapiens
  misc_feature (1)...(469): n = a,t,c or g
tnnnntttggannttggaancccatnnnnnnnnnnnnnnnnnnnnnnnnnnnnnnnnnnnnnnnnnnnnnnnnnnnnnnnnnnnnnnnnnnnnnggcacgagctggaagaactcctagaaaaagacaggcaaaatcgacttggtgccaaggaagaatttcttgaaattcagaatcatcctttttttgaatcactcagctgggctgaccttgtacaaaagaagattccaccaccatttaatcctaatgtggctggaccagatgatatcagaaactttgacacagcatttacagaagaaacagttccatattctgtgtgtgtatcttctgactattctatagtgaatgccagtgtattggaggcagatgatgcattcgttggtttctcttatgcacctccttcagaagacttatttttgtgagcagtttgccattcagaaaccattgagcaaaataagtctatagatgggg

SEQ ID NO: 29837 - DNA, 468 bp, Homo sapiens
  misc_feature (1)...(468): n = a,t,c or g
tnnnnttttgaantttgaagcccatnnnnnnnnnnnnnnnnnnnnnnnnnnnnnnnnnnnnnnnnnnnnnnnnnnnnnnnnnnnnnnnnnnnnnggcacgagcaacgagtttctgtctagatcgtgggggacccaagcccggggttgcgtccaaggtcggggatggagaggacgcgacccccgcggcagtcgagatggcctttttaaaattctannnnnnnnnnnnnnnnnnnnnnnnnnnnnnnnnnnnnnnnnnnnnnnnnnnnnnnnnnnnnnnnnnnnnnnnnnnnnnnnnnnnnnnnnnnnnnnnnnnnnnnnnnnnnnnnnnnnnnnagtggccagaaggctcctctccaggcctcacagagggaaacactggtctagtgagagacctgcgtcctgcccatcaggaccgaancggcacgcgtgaggatcctgcaggccannanacncagngattacnaaccc

SEQ ID NO: 29838 - DNA, 388 bp, Homo sapiens
  misc_feature (1)...(388): n = a,t,c or g
ctttgaanncnnnnnnnnnnnnnnnnnnnnnnnnnnnnnnnnnnnnnnnnnnnnnnnnnnnnnnnnnnnnnnnnnnnnnnnnggcacgaggacatttttaagactcattaaaatactaaaggcttttaaaaaatcctttggtttataagcttctttctccttggagctttgtggttctttttttttaattnnnnnatttttgagtgtatnaccnacttggatnccatanacttngtnnnttacaatggtgnccngngtatgatttctaanggcaanngcngntatncgttannnataccacaccnttnaannaatnctnttnnnctaangctacttgntatntncccccttancntantntttaaaccaatnngnntggcggcnccta

SEQ ID NO: 29839 - DNA, 466 bp, Homo sapiens
  misc_feature (1)...(466): n = a,t,c or g
tnnncttgactntgaanccatnnnnnnnnnnnnnnnnnnnnnnnnnnnnnnnnnnnnnnnnnnnnnnnnnnnnnnnnnnnnnnnnnnnnnggcacgagcatttatgcttatatctggcacttgttgctacaaaggtcctttgggatcgcatgctaaatgcaaagatagtaacatggtacataattgctacaattttgtttttagaaaatcatttactgtatttacttaacctaacattttaaataccccaatccagtatcaaaacaagattaaaccagcagttgcatgatttattaagctagtattgcagaagaactctccatgtaatctgaaaaatcaaatgtagtaggaaaaaaaataacttaggcaaacgtaaatgataatgttaaataaaagaatacaaaaaagctctccttccaacctgcacctgcattttaggtggactttagaagactgnggngnttct

SEQ ID NO: 29840 - DNA, 486 bp, Homo sapiens
  misc_feature (1)...(486): n = a,t,c or g
tnnnnnnnnnnnttganncttagctcnnnnnnnnnnnnnnnnnnnnnnnnnnnnnnnnnnnnnnnnnnnnnnnnnnnnnnnnnnnnnnggcacgaggtgacctgagacacaggcatggtttccacattattttggtccataaaaaccaggcctcagaagcactgctgcatcatgctaacgagctgatcagatttgaagagttcatttccgacttgccccccaggttaccactaaaaatgccacagtgccacactctgctctatgtttataacctaccagcaaataaggatggcaagagcgtcagcaacaggctcagacgcctgtccgataattgtggtgggaaagtgctgagtatcacaggctgcagtgcaattctccgcttcataaaccaagatagtgcagagcgcgctcagaagcgaatggaaaacgaagatgtctttggtaataggatcattgngtcatttactccaaaaaatagagaactct

SEQ ID NO: 29841 - DNA, 478 bp, Homo sapiens
  misc_feature (1)...(478): n = a,t,c or g
tnnnnntttganatctgaatccctnnnnnnnnnnnnnnnnnnnnnnnnnnnnnnnnnnnnnnnnnnnnnnnnnnnnnnnnnnnnnnnnnnnggcacgaggcaggatggtcaatcaaaacttgtacagtcttggtgaccatcaagcacatccagccagggtctcaggctgtcttaacccttgatataagccctatattagaaagaaccaaattatcttaagaccagatattcctcaaggctttttctgaagcaaagctacagggcagctcttaaaggaaagtgaacgtttggggctactgatgaaagtatgaaaaacgggggccaaactctgctttgagacttgaggcaaaataacttattaagaaaattcttttcaaaatattctatagtttgggctgggtgcagtgggctcactataatcacaacactatgggaggcaggggtgggaggactgcttgagcccangggttnnanacca

SEQ ID NO: 29842 - DNA, 487 bp, Homo sapiens
  misc_feature (1)...(487): n = a,t,c or g
tnnnntntnnnatttgaanncttannnnnnnnnnnnnnnnnnnnnnnnnnnnnnnnnnnnnnnnnnnnnnnnnnnnnnnnnnnnnnnnnnnggcacgagggaagatgctgcttttgcctgtgttgatggcttatcagcaggaaggctctgcttcagcacttgaatgcaggtgtggtgggagggagggaggaaggtgggaagaggcagtaggactagaaagaggagtgatcagggaaggtggctggagcctcatacttcaagtgcctgaagatgactcatcttgatatttccaggactgttaagttgctttggcaaccaggtcctctcagggatgtgatcccaccggcagatccatcttcctaaaacatatctctaatcatggccgtttttcttgaccaaggttcctccagagaattgagccctcattctccaaggcatccatcgtacacaggaattaacttctctcccaggaatctaaaatggtact

SEQ ID NO: 29843 - DNA, 317 bp, Homo sapiens
  misc_feature (1)...(317): n = a,t,c or g
ttnnntnttaaatttgatntactnatcccttnnnnnnnnnnnnnnnnnnnnnnnnnnnnnnnnnnnnnnnnnnnnnnnnnnnnnnnnnnnnnnnnnnnnnggcacgaggtgattctgatagagataacccaagaccacatgtgaaaaacacttcccttggaggtaatctagagattagcctccgaaaggagtactagatcatactctttacttggttaaaaaataaaattataaaggattaatttgnnnnnnnnnnnnnntggnttctntntttnnaaatnnntttnntggctttgnaacgtnntccntncnnattt

SEQ ID NO: 29844 - DNA, 408 bp, Homo sapiens
  misc_feature (1)...(408): n = a,t,c or g
tttganccctntnnnnnnnnnnnnnnnnnnnnnnnnnnnnnnnnnnnnnnnnnnnnnnnnnnnnnnnnnnnnnnnnnnnnnnnggcacgagaccaaatgtcctcgtccttcaccagcagatagcgactgggctgattcaccaacagttagcgactgggctgattcgccaacagatagcgactgggctgattcgccagcagatagcgactgggctgattcgccagcatagcgactgggctgattcgccagcagatagcgactgggctgaatgtaggaactaggtgctctgactcccaggtgtgattgtaactgtgttgctgactttnantctactnacagtagcttgctcatgggaagaagnctggngaatntgnnctccatggaccangangcantngntttgncagg

SEQ ID NO: 29845 - DNA, 467 bp, Homo sapiens
  misc_feature (1)...(467): n = a,t,c or g
tttgacncctttnnnnnnnnnnnnnnnnnnnnnnnnnnnnnnnnnnnnnnnnnnnnnnnnnnnnnnnnnnnnnnnnnnnnnnnggcacgagaaaaagaaaaagaaagaaaagtaagaaagaaaaaaagaaaaagaaagaaagtaagnnnnnnnnnnnnnnnnnnnnnnnnnnnnnnnnnnnnnnnnnnnnnnnnnnnnnnnnnnnnnnnnnnnnnnnnnnnnnnnnnnnnnnnnnnnnnnnnnnnnnnnnnnnnnnnnnnnnnnnnnnnnnnnnnnnnnnnnnnnnnnnnnnnnnnnnnnnnnnnnnnnnntccaacctgggtgacagcaagactccgtctcaaaaaaaaaaannaangaangaaaanaaaanaaggaaaaaancggggcncaggggntnagncntgtaatcccagcncnttggnaaggccaaggnggnaaaatcanttgaggntaggagtttgaga

SEQ ID NO: 29846 - DNA, 455 bp, Homo sapiens
  misc_feature (1)...(455): n = a,t,c or g
tttgacntttgaanccctannnnnnnnnnnnnnnnnnnnnnnnnnnnnnnnnnnnnnnnnnnnnnnnnnnnnnnnnnnnnnnnnnnnnnggcacgaggtatatccgtattatagtgtatgcacacattatgaaaataattaaatatgcatatagaaggaatacaaactcgaaaatgttcactgacagaggtgtataaaaaaatgtagagattcctgatctgtggaagagaggtctggcctgggagtgagggaatctatattctagtccaacatctcactgacctgatagacaaactttagctagtcacctaatatttatgggcctcagnttttcctgtgcntatcnncanggnantnnnctgcntcnnattctcccatngcctctnnntatnnncttgncntnantnnnnctcggnnnntncnccttcnntcncttctcccncntntttgcctct

SEQ ID NO: 29847 - DNA, 461 bp, Homo sapiens
  misc_feature (1)...(461): n = a,t,c or g
tttgaccnctgtaanccnnnnnnnnnnnnnnnnnnnnnnnnnnnnnnnnnnnnnnnnnnnnnnnnnnnnnnnnnnnnnnnnnnggcacgagctacactattgaagaagacctccgaaaaccagaaggtgttttatttgtagttcatttggcaagaaaacttgagtttgacctgaactcatttggtgttgaagcctgacttgaacagttgggactcttttaaagtccttatgtatgttaggcatccttcataaacatatgtatttactgcagggctattaatgtgtttgattaggggaaattgccctggatcttgctgttttttgttttcactgtaatatatgacttgtgctatataacttttctcaaatgggaagagttctggttcagcagcacctctggccctagggttttggaaaagaggttgtgaaactctttgacatgtgtttacnggataaggttg

SEQ ID NO: 29848 - DNA, 457 bp, Homo sapiens
  misc_feature (1)...(457): n = a,t,c or g
anncttaacagctnnnnnnnnnnnnnnnnnnnnnnnnnnnnnnnnnnnnnnnnnnnnnnnnnnnnnnnnnnnnnnnnnnnnnnnggcacgagagccaacccaggtgggcaccaacacttgaatacactccagtctctccctcttctgacccctttactttctgcactgctgctgctgctaccttgcctgagatattcctccctcccagactcttcactccccttcccactgctgaggagctccccttccttgaccggccagctcacattctgtcttcatcataaagcgctctccctcttcaagaagcacattcagctaacagcgctctctgccagtcgttcatagtttgcatccctcccaggccttagcattttctgccttatattattaaggtttttttttaaccatgtcnnnnnnnnnnnnnnnnnnnnnnnnnnnnnnnnnnnnnnnnnnnnnn

SEQ ID NO: 29849 - DNA, 457 bp, Homo sapiens
  misc_feature (1)...(457): n = a,t,c or g
ttgacncttnnnnnnnnnnnnnnnnnnnnnnnnnnnnnnnnnnnnnnnnnnnnnnnnnnnnnnnnnnnnnnnnnnnnnnnggcacgagaaacatttaaagtgccatgaattagattacatcagaaatcagaaaagcttggattgagctagtnnnnnnnnnnnnnnnnnnnnnnnnnnnnnnnnnnnnnnnnnnnnnnnnnnnnnnnnnnnnnnnnnnnnnnnnnnnnnnnnnnnnnnnnnnnnnnnnnnnnnnnnnnnnnnnnnnnnnnnnnnnnnnnnnnnnnnnnnnnnnnnnnnnnnnnnnnnnnnnnnnnnnnnnnnnnnnnnnnnnnnnnnnnnnnnnnnnnnnnnnnnnnnnnnnnnnnnnnnnnnnnnnnnnnnnnnnnnnnnnnnnnnnnnnnnnnnnnnnnnnnnnnnnnnnnnnnnnnnnnnnnnnnnnnnnnnnnnnnttgggttg

SEQ ID NO: 29850 - DNA, 464 bp, Homo sapiens
  misc_feature (1)...(464): n = a,t,c or g
ttnnntntnnantacngaancttaannnnnnnnnnnnnnnnnnnnnnnnnnnnnnnnnnnnnnnnnnnnnnnnnnnnnnnnnnnnnnnnnnnnggcacgagtgggattctcgatgggggccaaggagcccccctgttttgcatattttaatccactctatatttggaacgagaaaaggaacaaatatctctgtccgtaatagtttcctctcccctcccttctacttccactggtcccactgcagctgcccagtcttccatctccggcccctcactgccactgccaccccacaacggggcaggggacgctccagctggtctggggttggccagggccctagtggcccgccctggggccccagctcggcccctcgcctcgctgagctctagtgtgccccaccgacccttcaggtgctgctcgtggtgggaggggcggcaggccgcgggtcctgctgtgcacccgcg

SEQ ID NO: 29851 - DNA, 464 bp, Homo sapiens
  misc_feature (1)...(464): n = a,t,c or g
tnnnnnnttnnattggaancttganncccnnnnnnnnnnnnnnnnnnnnnnnnnnnnnnnnnnnnnnnnnnnnnnnnnnnnnnnnnnnnnnnnnnnnnnnggcacgagctttactaaaagtccaccaatctaaatgttgatttcatctaataaacaccttcacaaaaagatccagaatatttgagaaaatatctgggcatcgtggcccagccaagctgacacataaaatttactaccatatatgcatatgtatatacagtatacatgtatatatagannnnnnnnnnnnnnnnnnnnnnnnnnnnnnnnnnnnnnnnnnnnnnnnnnnnnnnnnncagatcatcgaggtcaggcgnnnnnnnnnnnnctgnncantgaggnganncccatgctntctnanactacncatgnttagccgnncntngcgnganncgcctggagnccagctattccnnaggctgaca

SEQ ID NO: 29852 - DNA, 508 bp, Homo sapiens
  misc_feature (1)...(508): n = a,t,c or g
tnnnnnnnnnnattgaanttcagctacgacnnnnnnnnnnnnnnnnnnnnnnnnnnnnnnnnnnnnnnnnnnnnnnnnnnnnnnnnnnggcacgagctggtatttttctcaggctttctttaaaaattgtgtttcctcatcacatttaaaacatggatttgctcatatcaaatttttccagaacacatccagggtgtgaagttaggtatacttatcggtcattatctcagcaagaattgtcagtgtgtgacagtgctctgtgtcagggatgcgcctagaggtgctccaccctttctgattaaaatgaggtcgttgggttgaccaggacagctgttttctgaaatttttgccacaaacaatcacgtcaactaaagtaaggatggagacagtttgtgagatgagcacatgtggaaattactctatgcctgaataggaacagaaagatctggcctgtcactgtgtgggtgtatgctgtggaaggcctccccccanggggattcatccagca

SEQ ID NO: 29853 - DNA, 506 bp, Homo sapiens
  misc_feature (1)...(506): n = a,t,c or g
tnnnntttgaanatttgantcncnnnnnnnnnnnnnnnnnnnnnnnnnnnnnnnnnnnnnnnnnnnnnnnnnnnnnnnnnnnnnnnnnnnnggcacgagtattgctttgccaaattccataaacagtttcattgtcacaacaaataaggtaatcaggtctgtggtgacccaatcaagttattttacttgtataaaattagttaaactagagagaagtccacataggattcagagttagtattttgtatgctagagaaatatgacattcatcattgtttcacatgtgtaaagtataatcctacttacttaagtcaatcgaaatgataatcactggtattacaaaatatacatgtactaagaaccaaattaactagttcactgcttgttgttcgggctgtgtggccaaggttaaaaggttgatgagtgccacccagggaagagatgagtgcataattagaggttgttgggatcagacaacgtgcacactagcagtagtgatgcagtgt

SEQ ID NO: 29854 - DNA, 511 bp, Homo sapiens
  misc_feature (1)...(511): n = a,t,c or g
tnnnnnnttnnnntttgaantttgagctcnnnnnnnnnnnnnnnnnnnnnnnnnnnnnnnnnnnnnnnnnnnnnnnnnnnnnnnnnnnnnnggcacgagaatctctcccacattgaaacagagttaaaggcctggcccagaggcttttggtgtgcaggtgggtgttaaggatgatgtgagaagtaaaaagaaccaccagtcaatcatcagggtcagcctgtctgtggtaccaacacctagaatctggctcacaggtgcattcatcctttctccctgggaacaggagctgtcctcctcacatgtgtgaatggtttcagtcctgacactcaacagggcacacaaaaggagcctggaagttcttaaggaacaggaagctcaggggcacagaggagcgtttctagcacacattttaaacaactgggaccaaagccaagcannnnnnnnnnnnnnnnnnnnnnnnnnnnnnnnnnnnnnnnnnnnnnnnnnnnnnnnnnnnnnnnnnnnnnnnnac

SEQ ID NO: 29855 - DNA, 511 bp, Homo sapiens
  misc_feature (1)...(511): n = a,t,c or g
tnnnnnntnnnnttgaanttgactcccnnnnnnnnnnnnnnnnnnnnnnnnnnnnnnnnnnnnnnnnnnnnnnnnnnnnnnnnnnnnnnnnnnnnggcacgagaaatctgccaattttttccaataatgtgaaacaagcatgttgtaagaaaggtagccggaatgtaacttctctcaggaagtgtaagtttgatgagtatgccttttcaactccttgattaaaaatagaataaagcaaatatttggtcattgtaagcatttcctttattaaatcctccccttctcattgaactctgaattacttgctttcgctgaataaacatgtagtgtttgtgtgaattggtacagaaaagtggagagggaagctggggagcatagtacaaatggaggtgaatcagtgttcttaataaggaacagacctgtctttaggaattcatactgataatttatgcaacanatctgattctctaaatctctggcaaaagatgtaacanacatttttgaagacaaa

SEQ ID NO: 29856 - DNA, 513 bp, Homo sapiens
  misc_feature (1)...(513): n = a,t,c or g
tnnnnnnttannatttgaantntgactcccttngatnacangattacnantantnactatntnantatnnggantttgaggccaanaatncngaacnaggngcagtggcggcggcagcggcggctggagcctctgattgggtttcggagtccggtactggagccaatcagcgcgggcagcgaaccgggggagcgaggcacggagtgtacctcacagccttctaggatctccagagtggacaggaatctcacttggagggaccatggagcagtatacagcaaacagcattagttcgacagagcatattgttgtccaggcaggacagattcagcagcaggtccaagggcagccattaatggtgcaggtcattggaggccagctaatcacatcaactggccaacccatcatggtccaggctgtccctggtggacaaggtcaaaccatcatgcaagtacctgttctggaacacagggtttgcagcaaatacaagttggtcccactggacagatccaa

SEQ ID NO: 29857 - DNA, 475 bp, Homo sapiens
  misc_feature (1)...(475): n = a,t,c or g
tttgaattccancagttntnacaccnnnnnnnnnnnnnnnnnnnnnnnnnnnnnnnnnnnnnnnnnnnnnnnnnnnnnnnnnggcacgagcagagctcaggtagcaccatctggctggaggggggcaccccccccatggatgcccttcagatagcagaggacaccctccaaacactggttccccactgccctgtgccttccggccccagaaggatcttcctggatgccaacgtgaaggaaagctactgccccctagtgccccacaccatgtactgcctgcccctgtggcagggcatcaacctggtgctcctgaccaggagccccagcgcgcccctggccctggttctgtcccagctgatggatggcttctccatgctggagaagaagctgaaggaagggccggagcccggggcctccctgcgctcccagcccctcgtgggagacctgcgccagaggatggacaagtttgtcaaga

SEQ ID NO: 29858 - DNA, 472 bp, Homo sapiens
  misc_feature (1)...(472): n = a,t,c or g
ccnnaatttgaantccatnnnnnnnnnnnnnnnnnnnnnnnnnnnnnnnnnnnnnnnnnnnnnnnnnnnnnnnnnnnnnnnnnnnnnggcacgagtgaagtcccccagctcaaatgtgctctaaacccctgtgttctacccatcaagaagtttaagtcactgttgttcaaccttctgtagtggaccaagattttcctatcatcacaaaaagatacagtcaggattatgagtaaataaagggctttgaaaatgatcattggtgcccacagcacagtgaaaggtagaaaagcaccatgagaaagcattcgttttgaagacatgaggcaggagctgtagccctaacatgtttttttcctagttgtgatattgcatccactacttgtcatctctaagcctcgttccctcacctcatnnnnnnnnnnnnnnnnnnnnnnnnnnnnnnnnnnnnnnnnnnnnnnnnnnnnnnnnnnnn

SEQ ID NO: 29859 - DNA, 513 bp, Homo sapiens
  misc_feature (1)...(513): n = a,t,c or g
tnnnnnattttgaantntgaatccctttnnnnnnnnnnnnnnnnnnnnnnnnnnnnnnnnnnnnnnnnnnnnnnnnnnnnnnnnnnnnnnnnnnggcacgagnnnnnnnnnnnnnnnnnnnnnnnnnnnnnnnnnnnnnnnnnnnnnnnnnnnnnnnnnnnnnnnnnnnnnnnnnnnnccaaaacaaaacaaggatttccacatattaacatacattgggtatgtatagtccacagaggtagtaagtatcttttgacaggtcacattaaatcaccagatcataaggtagaattttgaatcgtattagttgaagagaccactaacatttttatttgataaagccattggattaaaaataaacttctactttaatggacttttaagtcaaaattcttataacgttaaaatnnaatatacngctaaaaaggtaggngatcattgacaaaattggatannatatgtagcactgagcaagttgaattattatntattcaanancaagttacctgagtt

SEQ ID NO: 29860 - DNA, 518 bp, Homo sapiens
  misc_feature (1)...(518): n = a,t,c or g
tnnnnnntnnnctntgaancngnnnnnnnnnnnnnnnnnnnnnnnnnnnnnnnnnnnnnnnnnnnnnnnnnnnnnnnnnnnnnnnnnnnnggcacgagctaaaggcgaagagaaagtcttgaaagcagccagagagaaatgatgcattacctatagggaacaccaattcaaatggcagtagatttctcatctgaaaacatggaggccatctgaaatgttacattacctatagggaacaccagttcaaatgacagtagattttctgtatgaaaacacgaagaaggacaagacatgatatttttcaagtgcggaaataaaaggactgtcaatcgtgaatttctgtatctggtgaaattgtgcctcaggaactagaggaaaatagaaacattctcagataatggatacctaaagaatttgttgctagcagaacaacccttaaaattggctaaaggaagttctttaagccgaaaggaaatgatagtagaaggaatcttggagcattaggaaggaagaaggaa

SEQ ID NO: 29861 - DNA, 515 bp, Homo sapiens
  misc_feature (1)...(515): n = a,t,c or g
tnnnnnntnnnntttganatctgannccctnnnnnnnnnnnnnnnnnnnnnnnnnnnnnnnnnnnnnnnnnnnnnnnnnnnnnnnnnnnnnnnnnnnggcacgagaaagacttctttgttgattttttaagatagaaagattaaaaagaaagaaagatgggaagaaaatgaatgttagtcaaggaaaggccacttaaggatctgctctatgaaggagaagaaagaggaaaaagaagtaaaggagttaggaggagacacttaaatgaaagattggcaagaaaagcagtcggactctaccttaaggagggatgggaaggaaagagttgagttggtttctttctgattcctctactcatgtagaaaacacttgtacttctggaaatggactggagactttttaaatttgagtccactattgacatggaaaccccagtggaatcagattttccctcgaagaccatgatggtatcggactagttttcaaacctgcctgttgctgtcctcagacttgtctc

SEQ ID NO: 29862 - DNA, 465 bp, Homo sapiens
  misc_feature (1)...(465): n = a,t,c or g
ttnnnntnttaaatttgaancacnnantcccntnnnnnnnnnnnnnnnnnnnnnnnnnnnnnnnnnnnnnnnnnnnnnnnnnnnnnnnnnnnnnnnnnnnnnggcacgaggaaaattctggatatcaaaacaatgtagaacttgggatctaaattgccatcagtatgagttattgtgattctgaggccgaaatttaggttagcagtcaaatctgatggtctttcctccaagatattttatatcacccattcatattttaagaaaaccttctacagcttctaccttgatctgtgtctttcctacctgttcataatttataacacagatccaatactttaatattattttaaataacatattatatttttattgttcttgatccagaattgtaggattttanaactgggagagaccttagagattatctggtccagttgcctcattttacaggagagaaggaattgt

SEQ ID NO: 29863 - DNA, 513 bp, Homo sapiens
  misc_feature (1)...(513): n = a,t,c or g
tnnnnntnnnnnatntgaantcnnnnnnnnnnnnnnnnnnnnnnnnnnnnnnnnnnnnnnnnnnnnnnnnnnnnnnnnnnnnnnnnnnnnnggcacgagcagcccccggaaaggggaagaaaggcaaggcgaaaagggccacagccctggtctgccccaatctctgggagtgggatgcccccagcaccaggatgggctgcattttcaccatgaccttttctagtggggacaggcaaccccaccacttgaacagattgccactgagtccgaagaacccccaggccctgggtaagaccattcccccaaaacacccgagtgttccaaggcgatttattcctgctctccaggcccctcccaaccacctggatcagccaccccaccaaagagccaccagtagcaagtaaaagccactactcacaaagtattgtttaaaaatacacagccnnnnnnnnnnnnnnnnnnnnnnnnnnnnnnnnnnnnnnnnnnnnnnnnnnnnnaatgaggatcgcttga

SEQ ID NO: 29864 - DNA, 479 bp, Homo sapiens
  misc_feature (1)...(479): n = a,t,c or g
tccccnttgnccnnttggaancccnnnnnnnnnnnnnnnnnnnnnnnnnnnnnnnnnnnnnnnnnnnnnnnnnnnnnnnnnnnnnnnnnnggcacgagcacaatgtcatgccttttcaaatgccagtaattatatgcttaagaagattaaagctttatttgctcagatcttaagtccatgggacttctattagtaactaatcaaaatgatcattactgttagaaggtgggaaatggtagaacattgcttttgaaaactatatttggcaccattaatacaaaggctgggatcgttgtgatgagtgctggtcatgctaaccatgttcccgcatggctggagattatgtcctgggttgggttctgcacggtagcctgctttgggttagggacagtcacacctggtctgcctgacttctttctgggccctcctaaccaaaccaggggaggggagaaggacccaattcttttcctttggtgcac

SEQ ID NO: 29865 - DNA, 473 bp, Homo sapiens
  misc_feature (1)...(473): n = a,t,c or g
cntttgccnnttnnnnnnnnnnnnnnnnnnnnnnnnnnnnnnnnnnnnnnnnnnnnnnnnnnnnnnnnnnnnnnnnnnnnnnnnnnggcacgnnnnnnnnnnnnnnnnnnnnnnnnnnnnnnnnnnnnnnnnnnnnnnnnnnnnnnnnnnnnnnnnnnnnnnnnnnnnnnnntttcactatgttgcccaagctgaaatttctagttttgatgattatattttacattatttagaacaagtttcatgtttttaaaaaagcaaagcaaaactcagagaatctccttattgagctattttgaatagattttnnnnnnnnnnnnnnnnnnnnnnnnnnnnnnnnnnnnnnnnnnnnnnnnnnnnnnnnnnnnnnnnnnnnnnnnnnnnnnnnnnnnnnnnnnnnnnnnnnnnnnnnnnnnnnnnnnnncatgtaaaccaccatgggtgctctnaaatngatttttaaatgattgaga

SEQ ID NO: 29866 - DNA, 278 bp, Homo sapiens
  misc_feature (1)...(278): n = a,t,c or g
nnccnttgaaacccnnnnnnnnnnnnnnnnnnnnnnnnnnnnnnnnnnnnnnnnnnnnnnnnnnnnnnnnnnnnnnnnnnnggcacgaggtagacctgaacattctctaatcattgatttcctctgtaaatctgaatactcccctctattaagtaaagagtctaccacaaagctacacttaatcatttttctgaacatgtaaatctcaaagagtctccatttcctctttgttacagtgaaccttggggtccaagatttcataactttttttttttttt

SEQ ID NO: 29867 - DNA, 434 bp, Homo sapiens
  misc_feature (1)...(434): n = a,t,c or g
nnnnnnnnnnnnnnnnnnnnnnnnnnnnnnnnnnnnnnnnnnnnnnnnnnnnnnnnnnnnnnnnnnnnnnnggcacgagcccatccaggcagtcgggggctggcctaggagatatctgagggaggaggccacctctccaagggcttctgcaccctccaccctgtcccccagctctggtgagtcttggcggcagcagccatcataggaagggaccaaggcaaggcaggtgcctccaggtgtgcacgtggcatgtggcctgtggcctgtgtcccatgacccacccctgtgctccgtgcctccaccaccactggccaccaggctggcgcagccaaggccgaagctctggctgaaccctgtgctggtgtcctgaccaccctcccctctcttgacccgctntccgtcagggcccaagtccctgtttctgagcccggctg

SEQ ID NO: 29868 - DNA, 523 bp, Homo sapiens
  misc_feature (1)...(523): n = a,t,c or g
nnnnnnnnnnnnnnnnnnnnnnnnnnnnnnnnnnnnnnnnnnnnnnnnnnnnnnnnnnnnnnnnnnnnggcacgagatggagaaaataataggaaataaataatttacaaattttaagaatgacagaagnnnnnnnnnnnnnnnnnnnnnnnnnnnnnnnnnnnnnnnnnnnnnnnnnnnnnnnnnnnnnnnnnnnnnnnnnnnnnnnnnnnnnnnnnnnnnnnnnnnnnnnnnnnnnnnnnnnnnnnnnnnnnnnnnnnnnnnnnnnnnnnnnnnnnnnnnnnnnnnnnnnnnnnnnnnnnnnnnnnnnnnnnnnnnnnnnnnnnnnnnnnnnnnnnnnnnnnnnnnnnnnnnnnnnnnnnnnnnnnnnnnnnnnnnnnnnnnnnnnnnnnnnnnnnnnnnnnnnnnnnnnnnnnnnnnnnnnnnnnnnnnnnnnnntgatagaagtaacatttccattgcctacaacagtttaaggataactaaatgaatccatgatgaaatttataaatgggaaataagt

SEQ ID NO: 29869 - DNA, 528 bp, Homo sapiens
  misc_feature (1)...(528): n = a,t,c or g
cctttgaannaccagtnnnnnnnnnnnnnnnnnnnnnnnnnnnnnnnnnnnnnnnnnnnnnnnnnnnnnnnnnnnnnnnnnnggcacgagcaaaaatctccatggtttttccaaaaacccaaaggtgtaataactttggacaaacaagtaatatccacgagttcagacgccgaatccagggaagaagttcccatgtgttcagatgctgaatccaggcaagaagttcccatgtgtacaggccctgaatccaggcgagaagttcccgtgtatacagattctgaacccaggcaagaagttcccatgtgntcanaccctgaacccaggcaagaagttnccacgtgtacaggccctgaatccaggcgagaagttcccatgtgttcagaccctgaacccaggcaagaagttcccatgtgtacaggccctgaagccaggcaagatgttcccatgtatacagactctgaacccaggcaagaagttcccatgtatncagactctgaacccagcaagaatttnctgttnnaggctttt

SEQ ID NO: 29870 - DNA, 450 bp, Homo sapiens
  misc_feature (1)...(450): n = a,t,c or g
gnnncctttnnnnnnnnnnnnnnnnnnnnnnnnnnnnnnnnnnnnnnnnnnnnnnnnnnnnnnnnnnnnnnnnnnnnnnnggcacgagcttaccgagatggctctcaaagttgggcacatgtgagaatcccctnnnnnnnnnnnnnnnnnnnnnnnnnnnnnnnnnnnnnnnnnnnnnnnnnnnnnnnnnnnnnnnnnnnnnnnnnnnnnnnnnnnnnnnctaagaggctacttgctgctactgagcctgctggtgtgggcaccacagtttgccaacagtgctttgtatgttaatcgtaacatnnnnnnnnnnnnnnnnnnnnnnnnnnnnnnnnnnnnnnnnnnnnnnnnnnnnnnnnnnnnnnnnnnnnnnnnnnnnnnnnnnnnnnnnnnnnnnnnnnnnnnnnnnnnnnnnnnnnnnnnnnnnnnnnnnnnnnnncattcgccagg

SEQ ID NO: 29871 - DNA, 445 bp, Homo sapiens
  misc_feature (1)...(445): n = a,t,c or g
gaanccnttnnnnnnnnnnnnnnnnnnnnnnnnnnnnnnnnnnnnnnnnnnnnnnnnnnnnnnnnnnnnnnnnnnnnnnnggcacgaggcttgtagtcccaactnnnnnnnnnnnnnnnnnnnnnnnnnnnnnnnnnnnnnnnnnnnnnnnnnnnnnnnnnnnnnnnnnnnnnnnnnnnnnnnnnnnnnnnnnnnnnnnnnnnnnnnnnnnntgggcaacagagcaaacaaaaagagagnnnnnnnnnnnnnnnnnnnnnnnnnnnnnnnnnnnnnnnnnnnnnnnnnnnnnnnnnnnnnnnnnnnnnnnnnnnnnnnnnnnnnnnnnnnnnnnnnnnnnnnnnnnnnnnnnnnnnncccttattctttattctgaatgttgtaggaataggccaccatgtattgtatgtcagaggtttgcatcaaanacagaaccactcattct

SEQ ID NO: 29872 - DNA, 455 bp, Homo sapiens
  misc_feature (1)...(455): n = a,t,c or g
ganncctttnnnnnnnnnnnnnnnnnnnnnnnnnnnnnnnnnnnnnnnnnnnnnnnnnnnnnnnnnnnnnnnnnnnnnnnggcacgagcggcacgagccgcnnnnnnnnnnnnnnnnnnnnnnnnnnnnnnnnnnnnnnnnnnnnnnnnnnnnnnnnnnnnnnnnnnnnnnnnnnnnnnnnnnnnnnnnnnnnnnnnnnnnnnnnnnnnnnnnnnnnnnnnnnnnnnnnnnnnnnnnnnnnnnnnnnnnnnnnnnnnnnnnnnnnnnnnnnnnnnnnnnnnnnnnnnnnnnnnnnnnnnnnnnnnnnnnnnnnnnnnnnnnnnnnnnnnnnnnnnnnnnnnnnnnnnnnnnnnnnnnnnnnnnnnnnnnnnnnnnnnnnnnnnnnnnnnnnntannnnnnnngnacgaacaccagtcttaaattgcctaattaactgacattngctctgttttcc

SEQ ID NO: 29873 - DNA, 448 bp, Homo sapiens
  misc_feature (1)...(448): n = a,t,c or g
anncctntnnnnnnnnnnnnnnnnnnnnnnnnnnnnnnnnnnnnnnnnnnnnnnnnnnnnnnnnnnnnnnnnnnnnnnnggcacgagttgctatagacttggagccatcttctccattgtcatctgtctgatctcatccttaataactttattccgctggttctagatgaaatggttaataaatccaaatttgcattttcaaagtagaaactttatagtggatagggcctttgtatgattcaaactgccctatataggaagtgcttagatattataataatgcagggaaagaagatataaataggaatggcatgtaaagtagtgaacatagtaactttcaaatcatatggagaaatttgatatcattttcttattttatatggcagttaatgnatgccagtgattcttattacattacagaaccatggnattggtaattgacagagcc

SEQ ID NO: 29874 - DNA, 359 bp, Homo sapiens
  misc_feature (1)...(359): n = a,t,c or g
ccttnnnnnnnnnnnnnnnnnnnnnnnnnnnnnnnnnnnnnnnnnnnnnnnnnnnnnnnnnnnnnnnnnnnnnnnggcacgagcggcacgaggtggtaagtgctatgaaagaagcagtgatgggtggagatagctgcaaatttaaataggatggtcaggaagtcttttttgaggaggtgacattagaactcagaattgaatggtaaggaagcagccttgcaaaaatgattctggaaagggaaataggagttgaaaaggccctgaatgtacaaaaaggccgtgtaagtgagtccttgaaattactagctaataggccgggtatggtggctcacgcctgtnnnncnnnnntntnnnaggcc

SEQ ID NO: 29875 - DNA, 475 bp, Homo sapiens
  misc_feature (1)...(475): n = a,t,c or g
ttttgagcnccttnangacnncnnnnnnnnnnnnnnnnnnnnnnnnnnnnnnnnnnnnnnnnnnnnnnnnnnnggcacgaggtctgattcaattaaaaaaatacttaagtaagcattcttgatttaagttgagaacgtgaagtcatctctttgatcaaatatagttaatacagtgcatcttgatgtaaataaaatatattgctttangcatcttaacacttaaggaaagtgggaatttgtaattggatatacaacctctcacctctggggtcactggattgaatcctgctcacattggtattggctgaaatatattaccatctgttaggaggcctatgtaaagcattttggcatctaacttgaaatgtggaatggctatagtccatgcatagtggtcgatggccatgccttgtntattgaacttganaaagacaaaaancggaanctgatagcagcagatcctctctttattaat

SEQ ID NO: 29876 - DNA, 463 bp, Homo sapiens
  misc_feature (1)...(463): n = a,t,c or g
cattnnnnnnnnnnnnnnnnnnnnnnnnnnnnnnnnnnnnnnnnnnnnnnnnnnnnnnnnnnnnnnnnnnnggcacgagcaacaaaaatggatgaatctctcaaaataattgtgctaaaagagggaagccagaagaaaaaatatgtttctacagtttacccccaaacaatgtgggggttagggccgtcagcctctgcagccaaaaatccatgtaaaactacgggcgagccccaccatacccagctaatttttaatttttatttttgtagaggtnnnnnnnnnnnnnnnnnnnnnnnnnnnnnnnnnnnnnnnnnnnnnnnnnnnnnnnnnnnnnnnnnnnnnnnnnnnnnnnnnnnnnnnnnnnnnnnnnnnnnnnnnnnnnnnnaggcttcatgcttggtgtgttatgttggctaggctgaggagggaggaggaagaaaagggttggcttgctgctcagaga

SEQ ID NO: 29877 - DNA, 476 bp, Homo sapiens
  misc_feature (1)...(476): n = a,t,c or g
tttttnnnncnattttgntatncnnnnnnnnnnnnnnnnnnnnnnnnnnnnnnnnnnnnnnnnnnnnnnnnnnnnnnnnnnnnnggcacgagaactggatgtttctaattcaatttttctggctgttgggcagacaaatgggtactgggagagtgggtacaggaagcccaggaaggacccaggcactggtgccatctgggcaaggggtggcagcagtggagacaggggtannnnnnnnnnnnnnnnnnnnnnnnnnnnnnnnnnnnnnnnnnnnnnnnnnnnnnnnnnnnnnnnnnnnnnnnnnnnnnnnnnnnnnnnnnnnnnnnnnnnnnnnnnnnnnnnnnnnnnggttgagctgctgtgtgagctgtgattgcccactgnactncagcctgggcccagagcaagacctgtcttaaaacaaaaaccaaaagaagaggcnagcgcaatggcttaccctgaatccacacttttgg

SEQ ID NO: 29878 - DNA, 542 bp, Homo sapiens
  misc_feature (1)...(542): n = a,t,c or g
tnnnntnnnnnnntttgaanccctttttgaaanccnnnnnnnnnnnnnnnnnnnnnnnnnnnnnnnnnnnnnnnnnnnnnnnnnnnnnnnnnnnnnnnnnnnnnggcacgagcaggattgaagtaactagtaattttcaagtaatagttaaagaataactgaaaaatataggaatataagatataggaagcagctatgacctctagggttttgatagatcatccaaagaagagctgtgttccttcactctaaggatgggatccagacctcatggaaagagcattgctggggggtcaactggatggtggagacgttgctaagtgtcttactctgttctaaatctgccagaggaggtgtatggggaagctcctgggtgctaaaggatctatgagttggagaagctgccctctccatgaacctagcaggaggaagccgtattctgcaggagccaatcataataggagcctaatgtacaggaagtgagcctgtggaaaaccgccctgctggaactgaatgctggagacagcagctntgtangagct

SEQ ID NO: 29879 - DNA, 523 bp, Homo sapiens
  misc_feature (1)...(523): n = a,t,c or g
gnnnntnnnntntnactactnatcncttttgnacnnnnnnnnnnnnnnnnnnnnnnnnnnnnnnnnnnnnnnnnnnnnnnnnnnnnnnnnnnggcacgagggtgtgatgacatagagggcagcacagaagcagtttctttgtagtgatagaacagttctgtgtcctgatagtgatgatggagatctgcacctgagataaaattacatagaaccacccatgcacgaacgcacatgtgcctgagaatgtgtaaaaactgaaatctgaataagggctgcagattgtaccaatgtcagtttcctggttttgagagtgtattatagttacataacatcctaccattagggaagtttggtgaagggtacacaggacctcactgttattttttgtaagtctctgtgactctatagctatttcaagnaaaatattaaaagcaaaactcattgtatanggcccgtggaggagtataataaaattaaccttccgcctgtgccttctgcctcatttatgngcttgaaatagacc

SEQ ID NO: 29880 - DNA, 547 bp, Homo sapiens
  misc_feature (1)...(547): n = a,t,c or g
nnnnntnnnnnnnnnnntttttgnntccnttantgaancncctnnnnnnnnnnnnnnnnnnnnnnnnnnnnnnnnnnnnnnnnnnnnnnnnnnnnnnnnnnnnnnnnnnnggcacgagtgtgtagttaaaaatactgtttgtgttagcttgccgtttcaaaggcaatacatttatttagtgtctcattggctcactctttttctggtatgtgcattgaaagtttcctttctactacctgttttaaatgatcaaaattcagtgaattccatcctataaaatctgtgtttcacagaaatgcacatttactgaggcaacagaaataacactcaaaagctttggaaatttttgaaagttgattcttcagaagagcctgtggtgtgatattaagggtacttgctatgaagtcacttattccttaaattaacccacagggtgatggacaagtaggtgctgtgtcgttgccaaagtcgtattatcagcagtaaaacctgaatcttcagggttttcaaatataacgcagcatatgttctggctatgattagcaga

SEQ ID NO: 29881 - DNA, 544 bp, Homo sapiens
  misc_feature (1)...(544): n = a,t,c or g
gnnnntnnnngtnnnnntttttgaatcccttanngaancnccttnnnnnnnnnnnnnnnnnnnnnnnnnnnnnnnnnnnnnnnnnnnnnnnnnnnnnnnnnnnnnnnnnnggcacgaggtgactcagaaatggaaggacaagccacctctctgtagtgatcacctgtcttatggaatcttaattgcaatgctaattcagtcttggagttagtgagatagtcaactaaatgataagtacaagatattgataaatgacaagggaagtatttagtaagtcattggtaagtctgttttatcttaatgtgttgagaaatttgaaaattaggagaaggaaataagagcatatttatgaaattttctaaagtactgctctgtcccagatcttgtggtagatgctgtggagggttacgtaaagaagggagattgagctcagcctttggttaacctttgccttcatctaatagaagacaacatgtacttaacaaaaggggaagcaatactggaangcaatatgttaagtgtaggttcatcagangcaagaact

SEQ ID NO: 29882 - DNA, 478 bp, Homo sapiens
  misc_feature (1)...(478): n = a,t,c or g
ttgannccnnnnnnnnnnnnnnnnnnnnnnnnnnnnnnnnnnnnnnnnnnnnnnnnnnnnnnnnnnnnnnnnnnnnnnnnggcacgagaaagaaaatgattcacctctttggaaagatataaggtgtttcattatctgatcgtttctgcaaactcttattccctgcatctggtctctctcattatggtgcacccatgccagctctccccctgtgcttctcttgagtctgcaagacctgatcttcgaatcaagttattatcttgaagtcaggagggtcgaagccagcattgattgaggggcttctatgtgctggacctgcacatgtactatctcatgtcatttctcttacctgccctgtaagggatgcattgtcacctccattttactaagaagtagactggtggtcatagcatcgtgaaactagcaaataacagagccaagatgtggatcattctgactggctctgaagcccatgctc

SEQ ID NO: 29883 - DNA, 459 bp, Homo sapiens
  misc_feature (1)...(459): n = a,t,c or g
cttgaacccnnnnnnnnnnnnnnnnnnnnnnnnnnnnnnnnnnnnnnnnnnnnnnnnnnnnnnnnnnnnnnnnnnnnnnnnggcacgagaggtaccacaacatgtggtttagaaatatgagaaagagttaactaagggaatagaaaggaagacgtttcatcacataggattcagccttggccaggagtaccaggtccagtcctacctggacactgtgagctgatagcttgtgcccagagaattgtcattacatcatagttccaagtgtgatgaacacgcattcctctaaaacctgtagggtatatttgaaggtatcattggtggtgtgttgaaaaattatgtgtagaaacttgattattgctttgcaaaaacagctttttagaaccatgtgaggtaagtaatccaaggataatactatctcagtctgnggngtgagaagntnggggatncaccttgctg

SEQ ID NO: 29884 - DNA, 537 bp, Homo sapiens
  misc_feature (1)...(537): n = a,t,c or g
gnnnnttnnnnttnnnnnatcttgaancncctttnnnnnnnnnnnnnnnnnnnnnnnnnnnnnnnnnnnnnnnnnnnnnnnnnnnnnnnnnnnnnnnnnnggcacgaggttcttgataaattgcaagtggaacgagaaagacaaatcacttttaaagcacagacagcatctctcttttacaattgtgaaggaaagcagtaccttttaaatctcattgatacaccgggccatgttgattttagttatgaagtatccaggtcactttctgcttgccagggtgttttacttgtggttgatgcaaatgagggaattcaagcccaaactgtagcaaacttgtttcttgccttcgaagcacagctatcggtaattccagttataaataagatagatctgaagaatgctgatcctgaaagggttgaaaaccaaattgagaaagtgtttgatattccaagtgatgaatgtattaagatttctgctaacttggaacaaatgttgaaagtgtcttcaggcaatnttgaagaatccccctcttaaggg

SEQ ID NO: 29885 - DNA, 530 bp, Homo sapiens
  misc_feature (1)...(530): n = a,t,c or g
nntttgaancccnttttgannnnnnnnnnnnnnnnnnnnnnnnnnnnnnnnnnnnnnnnnnnnnnnnnnnnnnnnnnnnnnnnnnnnnnnnnnggcacgagcaaggaatctacagaaaatttttagaattaataagtcannnnnnnnnnnnnnnnnnnnnnnnnnnnnnnnnnnnnnnnnnnnnnnnnnnnnnnnnnnnnnnnnnnnnnnnnnnnnnnnnnnnnnnnnnnnnnnnnnnnnnnnnnnnnnnnnnnnnnnnnnnnnnnnnnnnnnnnnnnnnnnnnnnnnnnnnnnnnnnnnnnnnnnnnnnnnnnnnnnnnnnnnnnnnnnnnnnnnnnnnnnnnnnnnnnnnnnnnnnnnnnnnnnnnnnnnnnnnnnnnnnnnnnnnnnnnnnnnnnnnnnnnnnnnnnnnnnnnnnnnnnnnnnnnnnnnnnnnnnaataagtcagttcagcaagattgcaaaatacaaaatgaccntaaaatncaaaatncnctattctatntnctagaatncccccttaaaattaa

SEQ ID NO: 29886 - DNA, 502 bp, Homo sapiens
  misc_feature (1)...(502): n = a,t,c or g
nnnnnnnnnnnnnnnnnnnnnnnnnnnnnnnnnnnnnnnnnnnnnnnnnnnnnnnnnnnnnnnnnnnnnggcacgagaaagaattcctgttggttttaggccaaagtcaagcagtggaatgagccatagggagagggacactgctgatacctgtctatggcctaagaaatgtagctgcagaagttaaaatgcatatatataaattagataaggaaagcatggtttttaagtagttcctatagaatttagacctaatagtttctgctttttatgcgcagttccaatgatttaaggaatcattaagtaatgatatgtaaacataaatatgcatagatattaacttctctttaatattctcttaagcnnnnnnnnnnnnnnnnnnnnnnnnnnnnnnnnnnnnnnnnnnnnnnnnnnnnnnnntgggtggatcacttgaggcaagagttccagaccccatggcaacatggngaaacccctctttctaaaatccaaaattacccgg

SEQ ID NO: 29887 - DNA, 474 bp, Homo sapiens
  misc_feature (1)...(474): n = a,t,c or g
ttganncccntccccttganncctnnnnnnnnnnnnnnnnnnnnnnnnnnnnnnnnnnnnnnnnnnnnnnnnnnnnnnnnnnnnnnnnnnnnnnnggcacgaggtcagtatttggtagacaacatttaaagtttgggaataggtgaaatccaaggagaacataaagatggaaaagtnnnnnnnnnnnnnnnnnnnnnnnnnnnnnnnnnnnnnnnnnnnnnnnnnnnnnnnnnnnnnnnnnnnnnnnnnnnnnnnnnnnnnnnnnnnnnnnnnnnnnnnnnnnnnnnnnnnnnnnnnnnnnnnnnnnnnnnnnnnnnnnnnnnnnnnnnnnnnnnnnnnnnnnnnnnnnnnnnnnnnnnnnnnnnnnnnnnnnnnnnnnnnnnnnnnnnnnnnnnnnnnnnnnnnnnnnnncacctgnctccagcctggncngcngagcgagacgccnncttattnnnnnncgnaggnnttttc

SEQ ID NO: 29888 - DNA, 471 bp, Homo sapiens
  misc_feature (1)...(471): n = a,t,c or g
ccctttgannccctnnnnnnnnnnnnnnnnnnnnnnnnnnnnnnnnnnnnnnnnnnnnnnnnnnnnnnnnnnnnnnnnnnnnnnnggcacgagtattggcattgagtgagacctagctgtttacctctttgtgcttggtgaccttcactgatgcattgaacctctctgaccctcagtttcctcatctttgcagtgggagtaatcattcttacctctggccttgttcggagagttaaatactgttagtgggtgctgaataactgctatctctaaaagaggaaaatgaaaaaataaaagcctaaatatccccttgaaagtgtagtgaaccagaaatcttaagttcacggtattcctgatacaattcttgatttctggaaaatagtcgtctttcttttttttatccgttacccccacctctgagattgatctgactggttcatttggggntnngggctatgaatcttaaatgcc

SEQ ID NO: 29889 - DNA, 478 bp, Homo sapiens
  misc_feature (1)...(478): n = a,t,c or g
gatcccctncccctttgannccnnnnnnnnnnnnnnnnnnnnnnnnnnnnnnnnnnnnnnnnnnnnnnnnnnnnnnnnnnnnnnnnnnnnnnnggcacgagctagagaagttaaatgacttattcagggttttttttttcgctgttaattggctgagttggccatagaagtcaggtttcgtatttgttattcttctgtactgttttcttttaagtttgctatgatgtttttatctattttctatcttctgcagcaagttttatttaagaaccactgttcagtatcccatgtaactttgaatagcatgtatggtactcatgtaaaacttgaggtagttggattagttgatgtctcatattcttttagcactagttgcccctgtttccaagctgtatattaaanggncctcatatgcatgataggtatatatatgcttaatatatattaaaaagacaacacatgtttgatgaatgaatgg

SEQ ID NO: 29890 - DNA, 476 bp, Homo sapiens
  misc_feature (1)...(476): n = a,t,c or g
ctttgataccntnnnnnnnnnnnnnnnnnnnnnnnnnnnnnnnnnnnnnnnnnnnnnnnnnnnnnnnnnnnnnnnnnggcacgagccacattaacatggaggtgattcttgttaaaggtaagctttgaaaagttctaaaactcgccattataagacacacacaacttctctgctacgaaaagtcttgattgattctggcctcaggatgtgaacagtatagaaaactgatgatttgtgtgtaaaaagaggggcagggtttgaaagatatgaaggaagggaaaagagaaattgggaaacaggtaaaagcaaggacgnnnnnnnnnnnnnnnnnnnnnnnnnnnnnnnnnnnnnnnnnnnnnnnnnnnnnnnnnnnnnnnnnnnnnnnnnnnnnnnnnnnnnnnnnnnnnnnnnnnnnnnnnnnnnnnnnnnnnnnnnnnnnnnnnnnnnnnnnnnnnnnnnnnnnnnnnnnnnnnnnn

SEQ ID NO: 29891 - DNA, 475 bp, Homo sapiens
  misc_feature (1)...(475): n = a,t,c or g
ttnnnnccctttgatannnnnnnnnnnnnnnnnnnnnnnnnnnnnnnnnnnnnnnnnnnnnnnnnnnnnnnnnnnnnnnnnnnnnnggcacgagcctacatgcacactcacgtactatcctgggagctcttgattttctgtatcaatgaatggataatatgcacaaggtagcaaaagctgttcttccttttggattaggggaaccatctttctccttttgctggaaatcttccctatcatgatgttactgtgctagtgcagacataacaaagtaccacagcctggttggcttaataaaaggnnnnnnnnnnnnnnnnnnnnnnnnnnnnnnnnnnnnnnnnnnnnnnnnnnnnnnnnnnnnnnnnnnngcaggcctctcttcttggcttgcagacggccgcttccccacatgtcttccacatggtcttctctgtgtatgtctgtgtccaaacctcttcttagaaggacaccagtc

SEQ ID NO: 29892 - DNA, 466 bp, Homo sapiens
  misc_feature (1)...(466): n = a,t,c or g
ccttgannnnnnnnnnnnnnnnnnnnnnnnnnnnnnnnnnnnnnnnnnnnnnnnnnnnnnnnnnnnnnnnnnnnnnnnggcacgagatatatagtcttatatcagtgatcttttcaaacttttaaaatgaagtctgaataaatattattttcttatgcatttcttctgcaccagctgatagggaattttctgtacaatgttttcaggcctcttgcctttcttgcctttatttttctctgcaattccacacacaggtcattgctttcccttcctctccctttttgatcatggatgcttcaactcccttcatatatttgttaagcatattttactaagatttcattttgtgatgcttgcaaatatacattacaaaatatatatttttaaaaagtgatttgaagggccctctgtccatctgatgattaactagaagagtcttttgtaccttgctaaaagtgataagtta

SEQ ID NO: 29893 - DNA, 448 bp, Homo sapiens
  misc_feature (1)...(448): n = a,t,c or g
ttgacncctttgactccnnnnnnnnnnnnnnnnnnnnnnnnnnnnnnnnnnnnnnnnnnnnnnnnnnnnnnnnnnnnnnnnnnnnnggcacgagcattttaatggtatgtgtggtgataaagccaataaactgtcaagatgattgataatctaagcattatagcaatatgactttcctgttctcctctgtgctttagatgatggtttccaaattgaattcctacagtgtgtgctgtatgagtgtgcctgtcagaggctcccctaacagcgtttgaaggaggtagctgtgcttaatgtaagatttttagtcctcaattacccacacaaatatatttgcatatgtgttggaccctctaatnnnnnnnnnnnnangaattnatgactctgcccttgnacagccccccacnatttatgggcactggngnaactnnntnttangnnnttatgg

SEQ ID NO: 29894 - DNA, 467 bp, Homo sapiens
  misc_feature (1)...(467): n = a,t,c or g
ccttggantccnnnnnnnnnnnnnnnnnnnnnnnnnnnnnnnnnnnnnnnnnnnnnnnnnnnnnnnnnnnnnnnnnnnnnggcacgagctttataagtagaattggtgtatagtacctgcgtttaataataaatgctaaatcatttcgatttcaattgtgtaactatatcacctaacatttttgaagcactttctataaattaggcagagccttaattcacttaatctcaacatatgaaggtaagtactattatccatgttttccaaataaggaaacagaccatagagtttaagtaatttacttaagattacaccatgaagtgctttacatgcaattaatattctaaagatttatggtttaatataatttctcttctccttgctttgtgctgtaccatgattaggatgcgaaagtaagtttattactggatgccaaaaatttatattattttccatcattaaaatat

SEQ ID NO: 29895 - DNA, 476 bp, Homo sapiens
  misc_feature (1)...(476): n = a,t,c or g
nnnnnnnnnnnnnnnnnnnnnnnnnnnnnnnnnnnnnnnnnnnnnnnnnnnnnnnnnnnnnnnnnnnnnnnggcacgagnnnnnnnnnnnnnnnnnnnnnnnnnnnnnnnnnnnnnnnnnnnnnnnnnnnnnnnnnnnnnnnnnnnnnnnnnnnnnnnnnnnnnnnnnnnnnnnnnnnnnnnnnnnnnnnnnnnnnnnnnnnnnnnnnnnnnnnnnnngaatcttagctcggagtgcagtagctgtgtgaccttgccaactgcagatgctttttaagtcccagtttcctcacatgtctgaaatgataataatacctcctcccggagttgntgttannnnnnnnnnnnnnnnnnnnnnnnnnnnnnnnnnnnnnnnnnnnnnnnnnnnnnnnnnnnnnnnnnnnnnnnnnnnnnnnnnnnnnnnnnnnnnnnnnnngaattgattgaacctgggaagcanagttgcagngcgttgag

SEQ ID NO: 29896 - DNA, 478 bp, Homo sapiens
  misc_feature (1)...(478): n = a,t,c or g
ttttnnnnccntttnnnnnnnnnnnnnnnnnnnnnnnnnnnnnnnnnnnnnnnnnnnnnnnnnnnnnnnnnnnnnnnnnnnnnggcacgagaaatttttcacatggcctcaggctttcaaactttatgccttgtgttcgaccctctgagatttgaattcaaataatagtgaaaaatacctggaaaacagtgctgaaggaagtactagaattctaatccagcttactgcttgtttttatagggccttcaggctaagaattatttttacatttttaagtggttggagaaaacaaatcaaaagaaggataatatttagggatgagtgaaaattcatgagaataaaatatcagtgccgtaagtgaaagttttattgggctacagccatgctcacttgtggatgtagngctacggctgcttttgcactacggcagtggcagagacccaatgcctgtaagcctagacattactctctggccttt

SEQ ID NO: 29897 - DNA, 477 bp, Homo sapiens
  misc_feature (1)...(477): n = a,t,c or g
ttttnccccctttgagcccnnnnnnnnnnnnnnnnnnnnnnnnnnnnnnnnnnnnnnnnnnnnnnnnnnnnnnnnnnnnnnnggcacgagcttattttggaggagtgtatgtgcatgtgtacacatatgtacatatataaaaacagttgatgttttggtgtatggggtaaaagccccaggagcatacagaacttgagctgaacctggtcagtagaaagggaaaccccaaccctttcttgatttttggagacacccaggactaatggatactgtagtagacatgtagtactatagtaccgtaatattcatctctcctcattttagttgcctttcagattctaaatgtttgggatcattcctatcatcttagtctcttcaggatctttagtattttcctggttctgaggaggcttgagacaggggtatggattccttggctgggctttatcctactgaagntcctctttctcatttgca

SEQ ID NO: 29898 - DNA, 470 bp, Homo sapiens
  misc_feature (1)...(470): n = a,t,c or g
acagcttttnncaatgactantaaatggaaccccatnnnnnnnnnnnnnnnnnnnnnnnnnnnnnnnnnnnnnggcacgagcggcacgagcaaactcctccctcaatgatgccaggggcagtgccaggcagcgggcacccaggcgtggcgggtaatgctcctttgggtttgccttttggcatgccgcctcctcctcctcctcctgctccatccatcatcccatttggtagtctagctgactccatcagtattaacctccccgctcctcctaacctgcatgggcatcaccaccatctcccgttcgccccgggcactctccccccacctaacctgcctgtgtccatggcgaaccctctacatcctaacctgccggcgaccaccaccatgccatcttccttgcctctcgggccggggctcggatccgccgcagcccaaagccctgcattgtggcagctgttcagggcaacctc

SEQ ID NO: 29899 - DNA, 465 bp, Homo sapiens
  misc_feature (1)...(465): n = a,t,c or g
ttgttngccacctttnnnnnnnnnnnnnnnnnnnnnnnnnnnnnnnnnnnnnnnnnnnnnnnnnnnnnnnnnnnnnnnnnggcacgagattcattattcttaatgtacagttctgtgaattggacaaacgcatacagtcatgtgattaccaatagaaggcacagaacaaatttcttcacctccaaaaattcccccatacccctttcaggtaaaccccctccctccttcattgccaggcaaccactgatctattttctgtctttatagtttttttttttnnnnnnngccatataaanggaancatanggnatgganccttatnagttgggtttnacttancataaggcntttgaaattcatccatgttattatgngtatcactactattngnttttatngctgaccagtattgcattgccaatnatntagtttgngggncccntccaaatctnangtggnaaggta

SEQ ID NO: 29900 - DNA, 468 bp, Homo sapiens
  misc_feature (1)...(468): n = a,t,c or g
attttgnaacncnatttnnnnnnnnnnnnnnnnnnnnnnnnnnnnnnnnnnnnnnnnnnnnnnnnnnnnggcacgaggttgaataccctctcccaaaagaattttaatttgtatggtaggaaatgaagagcatttgaagggggtaggttattggtcctttgtctaaatatgcaagaaagggtccagaactgagaggtgggagaggaatatttgatgttttgttcatttatgcacttaacaaaaagtcttgccctcacaaagtttatattctaatgggaggaagatggaatataaacatgttaattgaataacatagtatgttcacagtcacaagtgctatggagaaaaatagcccaaagaagggtatagagaaagctggcataggagtgggaggtatgtgaagttatagagtacaattctgagcagaaacctgtagcagtaggaggatgtgccatgctgatcccaggg

SEQ ID NO: 29901 - DNA, 457 bp, Homo sapiens
  misc_feature (1)...(457): n = a,t,c or g
nnnnnnnnnnnnnnnnnnnnnnnnnnnnnnnnnnnnnnnnnnnnnnnnnnnnnnnnnnnnnnnnnnnnnnnggcacgagcttcaacccatgatttcaagtttgtctgtattggtggattgtagcctgcttcctccctcttcccagccctttcactattgtagaactgacttaacctcacagaggaattgcaggagcagcaataaagaaggtggaggatctgctaggggtttttctaggtgtgctaaagtgactggacatttagatgtcgaatcaatacaaatatctatcacctagctcagaggctgggagggctgctctacattttcatggtcatgcctcttgctgtcattttgtgacttcttttccttttcttttctgccctgaatgatgaatctaatgtgattccacatggataaaaagttgagggaaggccaagttcacagcaggatattaacc

SEQ ID NO: 29902 - DNA, 453 bp, Homo sapiens
  misc_feature (1)...(453): n = a,t,c or g
cttngnnnnnnnnnnnnnnnnnnnnnnnnnnnnnnnnnnnnnnnnnnnnnnnnnnnnnnnnnnnnnnnnggcacgaggtgggtcccaaatctcctatattggcaataaaattctcattgtagtctccttgtagtcaaacctgttcattggtgtttctggagagattcactgtaggtatgnnnnnnnnnnnnnnnnnnnnnnnnnnnnnnnnnnnnnnnnnnnnnnnnnnnnnnnnnnnnnnnnnnnnnnnntgnngggggnctaacacagtnnccntacagtgngantgtnggngtnntatanagaggggcnttnagagaggatntangctactctgangantgggnnaanatgtaagagggntncacagaaaacacgttnganctgggtgttgaagcnagagntatatgnggagagaggaccttccangtntgnctcnctgccnntgnatat

SEQ ID NO: 29903 - DNA, 465 bp, Homo sapiens
  misc_feature (1)...(465): n = a,t,c or g
antcaaagctnnnnnnnnnnnnnnnnnnnnnnnnnnnnnnnnnnnnnnnnnnnnnnnnnnnnnnnnnnnnnnnggcacgagatagtcttccttaagaatattttatagggcaaggaccaggttttagactccattttaatcccgatgttttttgcacggtgtctgacaacagtgggttctcaatagaatgtttgctggatgaatgcatgaagtggttaaactccagaagtagacccacttctctggttttcaggaaggtcacttctagccttgccaagaatgcctggtcaataactctggctctgtctggtggggaaacttcctgccttcctgaactgtgacacggacccagtttaaactaatcaggcgccagacaggagctttcaccgtggcctaaatttgcagccccgtgaggtgtaggcagcttgaggcactgntctgggcctggattctggaaaaaggtgg

SEQ ID NO: 29904 - DNA, 460 bp, Homo sapiens
  misc_feature (1)...(460): n = a,t,c or g
antcnannnnnnnnnnnnnnnnnnnnnnnnnnnnnnnnnnnnnnnnnnnnnnnnnnnnnnnnnnnnnnnnnnnnnggcacgaggttttaatcaccatagggcatggtagtactacgagatgacctaagggatctctcgtattccagacataacttttcttcctttcattgtttagtagcagcctaatttccctttggtagtcaggaggaatcaccctagccagtggagtaattcttcattgcaaaatgacccatggcagtcttaacttccagttcagtgaaataattgtgactcctggtgaaagcattcctccctttggaatgaagacctccagatcagcaaagcataaagccacagggatgggaagcaaagatttaccagtggaccactaggggtaatagtgagttgtgggtgccatttcatttctactactgatccctggaccatgaatcctancttt

SEQ ID NO: 29905 - DNA, 464 bp, Homo sapiens
  misc_feature (1)...(464): n = a,t,c or g
nttcgaannccnnnnnnnnnnnnnnnnnnnnnnnnnnnnnnnnnnnnnnnnnnnnnnnnnnnnnnnnnnnnnnnnnnnnnnnggcacgagttcnnnnnnnnnnnnnnnnnnnnnnnnnnnnnnnnnnnnnnnnnnnnnnnnnnnnnnnnnnnnnnnnnnnnnnnnnnnnnnnnnnnnnnnnnnnnnnnnnnnnnnnnnnnnnnnnnnnnnnnnnnnnnnnnnnnnnnnnnnnnnnnnnnnnnnnnnnnnnnnnnnnnnnnnnnnnnnnnnnnnnnnnnnnnnnnnnnnnnnnnnnnnnnnnnnnnnnnnnnnnnnnnnnnnnnnnnnnnnnnnnnnnnnnnnnnnnnnnnnnnnnnnnnnnnnnnnnnnnnnnnnnnnnnnnnnnnnnnnnnnnnnnnntgactattaacaccttattatatgtatgatttgcaaattattttctccattctggagcctattac

SEQ ID NO: 29906 - DNA, 488 bp, Homo sapiens
  misc_feature (1)...(488): n = a,t,c or g
tnnnntntnnnatntgaantacngaatcccttatnnnnnnnnnnnnnnnnnnnnnnnnnnnnnnnnnnnnnnnnnnnnnnnnnnnnnnnnnnnnnnnnnnnnnggcacgagcttacaatcactagccacccaatttagcacttaattgagcttaaattttatcatgtggattaattctcttctcagtttgatttcaaacacattcatttttagtcacaaaatggtgtgagttatgagggatgaaggtaggcaagaatctgacttgaaggagccccacagtttacttggagagtgatcctaatattgaattttcaataacaatgtctgtggggggtactatttatgaatgcttttatgtgcttgggcacttatattatctgacaccctagtaatcttgtggtgatcattgccactttaccaatgaggacagctgtaattaataatggttaaggaacttgagggtcacccagcttctcagngtcagaatc

SEQ ID NO: 29907 - DNA, 484 bp, Homo sapiens
  misc_feature (1)...(484): n = a,t,c or g
tnnnattttgaantacgnaatcccntntcagcntnnnnnnnnnnnnnnnnnnnnnnnnnnnnnnnnnnnnnnnnnnnnnnnnnnnnnnnnnnnnnnnnggcacgaggaagttcaagaacaaaatgatatgatagtcaagttatggagcaggctgcagtggatacaagggcagaaacacagtctttggagttagacctgggatctgcattgattggttgtgtgactgcagacaagttatttagcctcattaaggatgaatttcttcgcaaaaattggaataatacctgccccatacgactgttgtgagaattaaacaccgcaacttttgatgttcaaattctatttcttctccttctagcaacacatactgttagtgccaggaaccataaaaattataaggctgtatctanaggcctgaaaggaagctaaaatatacagtgtctactctgtctcttttctcttggtatggtatcanaggaaatac

SEQ ID NO: 29908 - DNA, 492 bp, Homo sapiens
  misc_feature (1)...(492): n = a,t,c or g
tnnnntntnnnatctnaantacnaatcccttatnnnnnnnnnnnnnnnnnnnnnnnnnnnnnnnnnnnnnnnnnnnnnnnnnnnnnnnnnnnnnnnnnnnnnggcacgagcggcacgagccccataannnnnnnnnnnnnnnnnnnnnnnnnnnnnnnnnnnnnnnnnnnnntatgggggaaaccannnnnnnnnnnnnnnnnnnnnnnnnnnnnnnnnnnnnnnnnnnnnnnnnnnnnnnnnnnnnnnnnnnnnnnnnnnnnnnnnnnnnnnnnnnnnnnnnnnnnnnnnnaatatggagcgcatgaaaagttctatgttttagagcccttgattctaataaagcagcccagcaaattgcttcaataagatgtttgaccaaactctgtggccacattttattaaataaaattcttaagtctccaattcttcccaaatagacaagggatcccaaatacaaatgaccgtgggttggttatcttcacacagcat

SEQ ID NO: 29909 - DNA, 473 bp, Homo sapiens
  misc_feature (1)...(473): n = a,t,c or g
atttgaancctgtaancnnnnnnnnnnnnnnnnnnnnnnnnnnnnnnnnnnnnnnnnnnnnnnnnnnnnnnnnnnnnnnnnnnnnggcacgagcaattcctcatttctacttnnnnnnnnnnnnnnnnnnnnnnnnnnnnnnnnnnnnnnnnnnnnnnnnnnnnnnnnnnnnnnnnnnnnnnnnnnnnnnnnnnnnnnnnnnatcnnnnnnnnnnnnnnnnnnnnnnnnnnnnnnnnnnnnnnnnnnnnnnnnnnnnnnnggtgtatacaggatttccttttgttcgaaggccgaatgacattctggaatctttggttcttttagcaggctgggtatggttaagtgacagggagggaaacacacttggctggactgcgtgccgctgctgctgtgactgtgggcctgggtgtagggataagcagcgaggaggcgagcaccctggatgaggttcgcgtttacctacctcccgggg

SEQ ID NO: 29910 - DNA, 324 bp, Homo sapiens
  misc_feature (1)...(324): n = a,t,c or g
ttnnntttnnaccacgtnaatctcgttnggcnnnnnnnnnnnnnnnnnnnnnnnnnnnnnnnnnnnnnnnnnnnnnnnnnnnnnnnnnnnnnnnnggcacgagcatgaaacttattaaaggaagtgaccataatactttgtacagtagcatagcacatttataatgcacattgaacttcaggggaatatatgaaagtaagaagaaaatttgcttagaactttcctgcagctgtctgtgagcattttctttttttatctaagtttccctgtaacaatacaagatgatgtgatnnnnnnnnnnnnnnnnnnnnnnnnnnnnnnnnn

SEQ ID NO: 29911 - DNA, 485 bp, Homo sapiens
  misc_feature (1)...(485): n = a,t,c or g
nttnncctttgacnctgaanccattnnnnnnnnnnnnnnnnnnnnnnnnnnnnnnnnnnnnnnnnnnnnnnnnnnnnnnnnnnnnnnnnnnnggcacgagnnnnnnnnnnnnnnnnnnnnnnnnnnnnnnnnnnnnnnnnnnnnnnnnnnnnnnnnnnnnnnnnnnnnnnnnnnnnnnnnnnnnnnnnnnnnnnnnnnnnnnnnnnnnnnnnnnnnnnnnnnnnnnnnnnnnnnnnnnnnnnnnnnnnnnnnnnnnnnnnnnnnnnnnnnnnnnnnnnnnnnnnnnnnnnnnnnnnnnnnnnnnnnnnnnnnnnnnnnnnnnnnnnnnnnnnnnnnnnnnnnnnnnnnnnnnnnnnnnnnnnnnnnnnnnnnnnnnnnnnnnnnnnnnnnnnnnnnnnnnnnnnnnnnnnnnnnnnnnnntatgtcaagtaatttttcaagtaacttgtgctgtcaagtggcactaagtgtgtattactttaggc

SEQ ID NO: 29912 - DNA, 486 bp, Homo sapiens
  misc_feature (1)...(486): n = a,t,c or g
tctnttttancnannatctntttcnttnctgattnnnnnnnnnnnnnnnnnnnnnnnnnnnnnnnnnnnnnnnnnnnnnnnnnnnnggcacgagagcgcagacttcaagggctaccactggacccttcccctgtcttgaaccctgagccggcaccatgcacggacgcctgaaggtgaagacgtcagaagagcaggcggaggccaaaaggctagagcgagagcagaagctgaagctataccagtcagccacccaggccgtattccagaagcgccaggctggtgagctggatgagtccgtgctggaactgacaagccagattctgggagccaaccctgattttgccaccctctggaactgccgacgagaggtgctccagcagctggagactcagaagtctcctgaagagttggctgctctggtgaaggcagaactgggcttcctggagagctgcctgcgggtgaaccccaagtcttatggtacctggc

SEQ ID NO: 29913 - DNA, 331 bp, Homo sapiens
  misc_feature (1)...(331): n = a,t,c or g
tnnnnntnnnnnatttgaancctttgctatcnnnnnnnnnnnnnnnnnnnnnnnnnnnnnnnnnnnnnnnnnnnnnnnnnnnnnnnnnnnnnnggcacgagaactggaagaatttttaaagaaagttgtagggcaagggcaaggtgtgttgaacctacatttaaaatacaataacatcactaaagtcgnnnnnnnnnnnnnnnnnnnnnnnnnnnnnnnnnnnnnnnnnnnnnnnnnnnnnnnnnnnnnnnnnnnnnnnnnnnnnnnnnnnnnnnnnnnnnnnnnnnnnnnnnnnnnnnnnnnnnnnnnnnnnnnnnnnnnnnnnnnnnnn

SEQ ID NO: 29914 - DNA, 338 bp, Homo sapiens
  misc_feature (1)...(338): n = a,t,c or g
ttnnnntttnnacctcgtnaatctncgtttggcnnnnnnnnnnnnnnnnnnnnnnnnnnnnnnnnnnnnnnnnnnnnnnnnnnnnnnnnnnnnnnnnggcacgaggacagaccgggccaggagtcaggaaacattctctgtaaatggccagagagtaaatattttcgctttgcaggccaagtggtctctgttcaacaactcagctttgccactgtggcacaaaggcagccagggacgacatggaaacacatgaaagtggctgtgttctaacaaatctttataaaaataggttgtgggatggatttggccatggttgnnnntggntgancnctangcta

SEQ ID NO: 29915 - DNA, 494 bp, Homo sapiens
  misc_feature (1)...(494): n = a,t,c or g
ttnnnntttnnncctanngaatctcgtttnncnnnnnnnnnnnnnnnnnnnnnnnnnnnnnnnnnnnnnnnnnnnnnnnnnnnnnnnnnnnnnnnnggcacgagaataattttaataattttttttaaaaaaaagatctgttggagccgggcacggtgactcacatttnnnnnnnnnnnnnnnnnnnnnnnnnnnnnnnnnnnnnnnnnnnnnnnnnnnnnnnnnnnnnnnnnnnnnnnnnnnnnnnnnnnnnnnnnnnnnnnnnnnnnnnnnnnnnattcntgnccntgtngaattttnngccatgcttnngggctcnttnaanagccaggnncggnggnatccantntgaaaaaanccagcntcagggncnanttnagccntcatanaaatcnntgccaanggnttnggccncctcctgggcccngnataatgnctttgnagtttcccatttccnggacncntcnttgagnccntgngaatgagngattaag

SEQ ID NO: 29916 - DNA, 503 bp, Homo sapiens
  misc_feature (1)...(503): n = a,t,c or g
gnnnnnnttnnnntttnnacaantnatnctcgttttncnnnnnnnnnnnnnnnnnnnnnnnnnnnnnnnnnnnnnnnnnnnnnnnnnnnnnnnnnnnnnnnnggcacgagattaaagtacagaacatcttggaaatcagtgaaatccttactaaaaagacataatttttggtctccacttctatttannnnnnnnnnnnnnnnnnnnnnnnnnnnnnnnnnnnnnnnnnnnnnnnnnnnnnnnnnnnnnnnnnnnnnnnnnnnnnnnnnnnnnnnnnnnnnnnnnnnnnnnnnnnnnnnnnnnnnnnnnnnnnnnnnnnnnnnnnnnnnnnnnnnnnnnnnnnnnnnnnnnnnnnnnnnnnnnnnnnnnnnnnnnnnnnnnnnnnnnnnnnnnnnnnnnnnnnnnnnnnnnnnnnnnnnnnnnnnnnnnnnnnnnnnnnnnnnnnnnnnnnnnnnnnnnnnnnnnnnnnnnnnnnnnnnnnnnnnnnnnnnnnnnnntctcca

SEQ ID NO: 29917 - DNA, 505 bp, Homo sapiens
  misc_feature (1)...(505): n = a,t,c or g
tgntatttgantcannngatcactntgnnnnnnnnnnnnnnnnnnnnnnnnnnnnnnnnnnnnnnnnnnnnnnnnnnnnnnnnnnnnnnnnnggcacgagctaaagccaaagagggcattatcctatcattctcatcgctaagaactcttctcctcttggcacatgcttattcagttaaagataagccaagcctttcttttgtattttttttttaagagaacaaatttactttggttctgagttttattcctggctctgggtagcttatttttttgacccttattttccccaatttataaaatgaaatagttatcttcactccccaggattgttgtgaagnnnnnnccaaaagatacaatgaggtgactcaggcaaaagtacctggccctgtatagngagtncattgnatgtgttacatatatncttattgctgagaanccacgaangaatgaattaactaatgaggaccctttcncnggntttnngagngangntttnanaacc

SEQ ID NO: 29918 - DNA, 519 bp, Homo sapiens
  misc_feature (1)...(519): n = a,t,c or g
ttnnnntnnnnnnatcngaancccttntctatccnnnnnnnnnnnnnnnnnnnnnnnnnnnnnnnnnnnnnnnnnnnnnnnnnnnnnnnnnnnnnggcacgagtgcttttattcaaagacacttcacagtttgtagctgccgtacacatatacatacaatattacaagagggtgatgttatagcatccttattttaaagatgaggaaatcagaggtgcgattctgaactggattttgaacgcagacctgtcttatttcaaaacctaagcagtctttctgccatttcaaactgctatatagataaaacctctagagaattctaaagggaaattctgggattccagtagtggtgttacagattttgtgtcttatcaaatcctttttgataaaaatagacaattagattagcataaccaaaaaagccacaaacatctataacaaaactaggtttcagagtaacctgttgaaccctaaatatgaatgagtagagataaaccactgacagctattgagtctgcg

SEQ ID NO: 29919 - DNA, 419 bp, Homo sapiens
  misc_feature (1)...(419): n = a,t,c or g
acanccttnnnnnnnnnnnnnnnnnnnnnnnnnnnnnnnnnnnnnnnnnnnnnnnnnnnnnnnnnnnnnnnggcacgagggaaaataaagttgagttgaaataagacttttttctgctgtcatttcctattggcgtctttcttttgctgtagtcaggtgtagagctctagtcaggtggcttacgctgtagtcaggtgagagcagaattagattgttccacctcattccatgctcctaggatttccttggccttccaagtacagccatattcatccctttagagcctcctggngccgnnnnnnnnaaaagcnacctttgccnnnnnnncnaaacnaacgctgactntgtgcagnnnnccngaangannttcctgcnngcanctggacngggcccnnnnnnngnttgncannnngncctgg

SEQ ID NO: 29920 - DNA, 516 bp, Homo sapiens
  misc_feature (1)...(516): n = a,t,c or g
tnnnnnnnnnntttgaancccttntgaannccagctatgacnnnnnnnnnnnnnnnnnnnnnnnnnnnnnnnnnnnnnnnnnnnnnnnnnnnnnnnnnnggcacgaggaagggatggattgctagactgaataattttagtttggcttagacctgcgagtgacactgaacttgacctaaacacctttgcactagtgcttcaccttcgcagtactggtagactcctctctgaggccctgctcccgtgtggaaacagaaacacagaagagtctagcccagttaacatccacattaacagctaaggtccttactgccagtctctaagccctcactaggggctttgaagttttgtagattctcagcagaatacctcagcacctagagaaagttcggtttttttgcccnnnnnnnnnnnnnnnnnnnnnnnnnnnnnnnnnnnnnnnnnnnnnnnnnnnnnnnnnnnnnnnacgtgactgctgctcggctttcaaaggctgggattatggcatgacccctg

SEQ ID NO: 29921 - DNA, 551 bp, Homo sapiens
  misc_feature (1)...(551): n = a,t,c or g
tgatntganntccnacgtgatcccttctatgacatcnnnnnnnnnnnnnnnnnnnnnnnnnnnnnnnnnnnnnnnnnnnnnnnnnnnnnnnnnggcacgagacacgggatgactaccaagtctcttgttcaaaggaggtgtcgatgcctgaaaggagttctaaaacgcctcttgccgcagtactgggctcagcatgagctgaaggtttgggggaggggagatgattttgtctaggggaattgttgagatacttggatctgagtcttggcaagatgacagcatctttatcttgaaaataaactatagtatgttcttactcacacccttcccctccgtgcaagatgctggaaccgcagcagcaggagtgagagggttggcgtgctgcttctcctgtttcacgggagactgatgccttaggtttgccctcaggaaaccccaaganttaaagttaaggaaagctttganaggacagttagagacccacttangctggtattctcagaggtcttnatggatgctgtctctgcagtgatnaaccancacacaggacg

SEQ ID NO: 29922 - DNA, 553 bp, Homo sapiens
  misc_feature (1)...(553): n = a,t,c or g
tnngnnnnntnattgannacctntgngaccnnnnnnnnnnnnnnnnnnnnnnnnnnnnnnnnnnnnnnnnnnnnnnnnnnnnnnnnnnggcacgagaaagaaaaaaagaaaaagaaaaatgnnnnnnnnnnnnnnnnnnnnnnnnnnnnnnnnnnnnnnnnnnnnnnnnnnnnnnnnnnnnnnnnnnnnnnnnnnnnnnnnnnnnnnnnnnnnnnnnnnnnnnnnnnnnnnnnnnnnnnnnnnnnnnnnnnnnnnnnnnnnnnnnnnnnnnnnnnnnnnnnnnnnnnnnnnnnnnnnnnnnnnnnnnnnnnnnnnnnnnnnnnnnnnnnnnnnnnnnnnnnnnnnnnnnnnnnnnnnnnnnnnnnnnnnnnnnnnnnnnnnnnnnnnnnnnnnnnnnnnnnnnnnacctctcctgcttgtctacaaaaaacaaaaataaataaagtaaaaattaaaacagggccaggcacagtggctcatgtctgngatcccaacccttcgggaggcaaagngggagcatcatttgaccccggagttaagaccactgggcaat

SEQ ID NO: 29923 - DNA, 545 bp, Homo sapiens
  misc_feature (1)...(545): n = a,t,c or g
tnnntttngnnncanannagatcccttctangacancnattacnnnnnnnnnnnnnnnnnnnnnnnnnnnnnnnnnnnnnnnnnnnnnnnnnnnnggcacgagtttgcctcaactttaaacattggaaaactcatttctgggttaatcctactatattttttcaatggtctttttttttnnnnnnatncanaatnacngattcntngaaaaatnatttnattnatngcangncnaaattnatcctttttttctttcctgatnatcctaacnccnttnattcaatanccttgnccnttttnatatttttttnatngactattnganggnaagtnncntttttattcncataaagctnggatntcaggncagggttttttngttttngttttngttttngtttttttgaaanggagnctnactgtcnccaggctgnagngcagngnnnnnnnnnnnnnnnnnnnnnnnnnnnnnnnnnnnnnnnnnnnnnnnnnnnnnnnnnnnnnnnnnnnnnnnnnnnnnnnnnnnnnnnnnnnnnnnnnnnnca

SEQ ID NO: 29924 - DNA, 531 bp, Homo sapiens
  misc_feature (1)...(531): n = a,t,c or g
tnnnnttnnnnnntnttgaanccctttttgaacancnnnnnnnnnnnnnnnnnnnnnnnnnnnnnnnnnnnnnnnnnnnnnnnnnnnnnnnnggcacgagcacaaattggcgtaacatttagagagcagcctgctaatgggtccccatatttaaataggcttaccctctgatctcttaattccactcatactatctactttaaagaaataactggacagatgcttcatgatgtctatacaagggtgcttaaatgcctagatggggaaaacttagaaataccatgtctcatagtgagggattggctaaataagttatgttttatccagtcaatggaatgctatgaaatcattatacagaaggatgtccctgatgctgttgttacgtaggaaaagcagttttcaaaccacatattgggtggtcccattttcttttctctattcaggatgtgtgtatgtgtgtgcgcaccatgtgcatgaaaggggatgtgtttttggtgggnataataacttaagcacataggacaaaaggct

SEQ ID NO: 29925 - DNA, 548 bp, Homo sapiens
  misc_feature (1)...(548): n = a,t,c or g
tnnnntnnnnnatntgaannccttgatgacnnnnnnnnnnnnnnnnnnnnnnnnnnnnnnnnnnnnnnnnnnnnnnnnnnnnnnnnnnggcacgagggagggtgtgcagctctgccacagaagccacagtctcaggtgtctggcaggtgctcaggaaggcttctgcattttctgcctctcaggccctggtctgctcatgagacttgcgttccagctcacagcaagtgctgagatttactttcccagctctcaggacctctaagtccatgactagttaactctctttctatctctctgaaaacaggggacatctgaaagcccccacattctctgcagtattggcagtgcagaaggccctcccctcatctcccagactccactggacatggagtttgcccctttggtcacttcctcggaaactgcagttcacaaccctatagctgaagctctggaagctcttttatttttagcttttattttaagttcaagggtacaactgcatgctgntacatagataaacttgggcatggggggttgctgnacaaata

SEQ ID NO: 29926 - DNA, 562 bp, Homo sapiens
  misc_feature (1)...(562): n = a,t,c or g
gnaaaanttnatgttnttaaaancgtgaacttcnnaatcccttctatgacatncnnnnnnnnnnnnnnnnnnnnnnnnnnnnnnnnnnnnnnnnnnnnnnnnnnnnnnnnggcacgaggatttacatgcaaattatgatctaatatcaaccccagcatggtgtgtttggctcagggtcattttgtagacatttggcaatagacagaattcacatttgttaggaatagaagtaatacataggaaaatctttgcttattttttagatgtttggaaaggaattaagtggcaaatattgttttaaaatacttgcctgtcatatgacttctttatcagtggcttccaagtaacagcctgggaaccagcgctcatctagtgttgcagtggcctaaagcaaaaaataaagacaatatantctgcctgcctgcctgcctgtctctctntctatctatctgatgtaaggttaccaactgtcctttcttaaaaagcactgcctatatgctgctatttattcttataaaatttggggggtataaaatacaattttctggctgngcgcctgccc

SEQ ID NO: 29927 - DNA, 551 bp, Homo sapiens
  misc_feature (1)...(551): n = a,t,c or g
gnnnnnttnnnnttntnnnatncngaatccnttannnnnnnnnnnnnnnnnnnnnnnnnnnnnnnnnnnnnnnnnnnnnnnnnnnnnnnnnnnnnnnnnggcacgaggatgtgatgttcccagatttttataaaggatatgtatctgtgtgtgtgtgaatcaggccctttaaaggaacatttagcttggaaataaagtcataaaaactgaagggtaattttgaaatgagtttttaaattaaaaaaattatgtgtactcataagaacgtgcagcagtcatcactgctgagcaattatgtgccctgatttaagcactttacatgtattgtttattcacaaatatcctatgggataggcattatcattctatttaaaaaaataaaaataaaataaaatgacagagacagaagtaactcgccaagggtgagatagctgtcaatggtggagctgagatccgagtgcaggcagcctggccaggctctgtaatcaccacacggtaaagacactgtatgtgccgacctgangactctgacttaagttttactaaaccta

SEQ ID NO: 29928 - DNA, 555 bp, Homo sapiens
  misc_feature (1)...(555): n = a,t,c or g
gnnnnntnnnnttnnnnnatntgaatncctngnnnnnnnnnnnnnnnnnnnnnnnnnnnnnnnnnnnnnnnnnnnnnnnnnnnnnnnnnnnnnnnnnggcacgagggggtgcctgctttggggattgggaggagtggactggggccggggtcacagagtcttttagctgaacccatgggtgctctgggtctcggcttgtcctgactcaagtcaaggggcccaggcctttgtaaaggtccacattgcccattcactggggcctggctttgggtgagggtggcagctggagatggggggaagccctgaacgggaatcttggccacacactgctatatccgcgacaccaaattctatcccacctgttgttggctgttctggaaaccagcactgaaaaatacggagtggaaaagttttctgattttttttttcctgctttgtttgggttttttggaaaacaatttcaaaattagcatatggcttgttaaaattaaatcacaaaggcagtgcctatggtaacgttttgatcaagctctaagnctgggtgaacccggccat

SEQ ID NO: 29929 - DNA, 548 bp, Homo sapiens
  misc_feature (1)...(548): n = a,t,c or g
tnntnttntnttanacnnatccctntgnnnnnnnnnnnnnnnnnnnnnnnnnnnnnnnnnnnnnnnnnnnnnnnnnnnnnnnnnnnnnnnnggcacgaggtgtcaccaagtgtcatcatggcctagttttaactcagggctctgctaaatcacatgggatcacaggtgtagaagggtttgctttccgagaggactgcagagatttcccccactcccctgctccagccttcccttctctcatagaaacaaatgtagggaatctctcttttctcctgcagagtccagggttgctagaggactgagaagggctgtgccatgttttctcctcagcgccgagagagactgggttttccctgaaaatgacaaacttgtcaggtgtgcccccaacaaacgcgtattcagcaccgaggacagcaatcccaggagctgccagagcctacaggcccagaaatggctgcaaatgggcggagccatgctgctgtccacctctcctgtgtgatctggggtcaaccttccttntttctgtgggggttcacccctaacttaaa

SEQ ID NO: 29930 - DNA, 553 bp, Homo sapiens
  misc_feature (1)...(553): n = a,t,c or g
tnnnntnnnanatctgaatcctttnatgacnnnnnnnnnnnnnnnnnnnnnnnnnnnnnnnnnnnnnnnnnnnnnnnnnnnnnnnnnnggcacgagtgttaaatcagttcatgaaaagatgtttaacatgactaaacattaggagaatgcacagtgagataccactgcacaccattagaatggcttaaactgtacttctgactggctgcaacctggggctcccttgattcccccctccttgggttttgattaacgtgctaggatggctcacagaactcagggaaacatgnnnnnnnnnnnnnnnnnnnnnnnnnnnnnnnnnnnnnnnnnnnnnnnnnnnnnnnnnnnnnggataagtgtgaggtatgggggaatggggagcttctgtgccctctctgggtaggccacccccccagcacttccacttattcagcaaaccagaagctcacacatctcattgttcaagagtctttatagagcttaatctctacccctcccactcacctttcctggaggttggtgcctgaagctgaaagttccaatcctctcctct

SEQ ID NO: 29931 - DNA, 551 bp, Homo sapiens
  misc_feature (1)...(551): n = a,t,c or g
tnnnnnnnanaatntgaatccttgatgacnnnnnnnnnnnnnnnnnnnnnnnnnnnnnnnnnnnnnnnnnnnnnnnnnnnnnnnnnnggcacgagctgaaaagaaaaaaaataatagaaaggtaaacaaacaaataaatagaaaagatcaacaacccctttggctatctactgagacatgaccaggaagaaaacatgactttatcattttgttatagaagctgatatataaaggttacacattttcatttatttgtttttctgatttgaaggtataaccttcatgatgaattacttcttcagggtgttaaggcagtgactttagaaacannnnnnnnnnnnnnnnnnnnnnnnnnnnnnnnnnnnnnnnnnnnnnnnnnnnnnnnnnnnnnnnnnnnnnnnnnnnnnnnnnnnnnnnnnnnnnnnnnnnnnnnnnnnnnnnnnnnnnnnnnnnnnnnnnnnnnnnnnnnnnnnnnnnnnnnnnnnnnnnnnnnnnnnnnnnnnnnnnnnnnnnnnnnnnnnnnnnnnnnnnnnnnnnnnnnnnnnnnnnnn

SEQ ID NO: 29932 - DNA, 550 bp, Homo sapiens
  misc_feature (1)...(550): n = a,t,c or g
tnnnnttntanaancnnnaatccctttgatgncctnnnnnnnnnnnnnnnnnnnnnnnnnnnnnnnnnnnnnnnnnnnnnnnnnnnnnnnnnggcacgagagaggaagtgcagtgtgctcagtgtttagatggtttcaaggttacttcaagggaagtggttgaggaaacggagtggggatggatcagttagacagctaaggattgctataagaccttagacattttagaaaacatcaaagtnnnnnnnnnnnnnnnnnnnnnnnnnnnnnnnnnnnnnnnnnnnnnnnnnnnnnnnnnnnnnnnnnnnnnnnnnnnnnnnnnnnnnnnnnnnnnnnnnnnnnnnnnnnnnnnnnnnnnnnnnnnnnnnnnnnnnnnnnnnnnnnnnnnnnnnnnnnnnnnnnnnnnnnnnnnnnnnnnnnnnnnnnnnnnnnnnnnnnnnnnnnnnnnnnnnnnnnnnnnnnnnnnnnnnnnnnnnnnnnnnnnnnnnnnnnnnnnnnnnnnnnnnnnnnnnnnnnnnnnnnnnnnnnnnaaaanaaaaaaaaaagcccc

SEQ ID NO: 29933 - DNA, 475 bp, Homo sapiens
  misc_feature (1)...(475): n = a,t,c or g
ttggttnngtcnaaantnaatacncgctnattattgcttnnnnnnnnnnnnnnnnnnnnnnnnnnnnnnnnnnnnnnnnnnnnnnnnnnnnnggcacgagacagtttaagaacctagcattttggaactagaatagatagtgctttttgaggacagagttcctcgctcagtaatttctaaaaactcttggggaagcctactaaacttgaatagaatggtatagaggaggaaaatgttaatttaatctgaataatttccttatctaaatagttctttgaaaacccttaaagcttttagatagtaactgtttgcttaatatttattatttttaaaaatacatatatatttattgttacatatttaaactagtgtcactaaattttgagttctttactcttactcagttaattcaatccattttcaaataatagaatgacattaccagaggaaactcatttttcatcactttttaaag

SEQ ID NO: 29934 - DNA, 465 bp, Homo sapiens
  misc_feature (1)...(465): n = a,t,c or g
ttntnnnnnntnctgaatccccagtnttgacccnnnnnnnnnnnnnnnnnnnnnnnnnnnnnnnnnnnnnnnnnnnnnnnnnnnnnnnnnggcacgagctgaatagaatcagttataggaaatcacgagatggagaaccaaggtaattgacactatgggaagcaaacacaacaatccatgaatctaaaggacacctgaccctatttcttcaaaaagtcaatgttaggataaagaagtgaggagaaggactgtgtctcaaatttctaggattaaacactggnnnnngttttgcngcngatagtgctttaatatcctatccaggncgnacccagacancggacctagggtgcatgacgagnatncccttncanacacgnntnactnacggtnntgntgccanntnccagcngggnatcgataagaccncantnctcanntnttgggagaggatncanaggnaccggg

SEQ ID NO: 29935 - DNA, 468 bp, Homo sapiens
  misc_feature (1)...(468): n = a,t,c or g
nttnntnncctnanctcgcanttttggancnnnnnnnnnnnnnnnnnnnnnnnnnnnnnnnnnnnnnnnnnnnnnnnnnnnnnnnnnggcacgagaaccttaaaaaaattttttttatgagaactttgccatctgtatatacagcacaggcttcccagcatcgaaggtcagattcacacccttttcgaacaaactctaatttagaatgttcatctaagggttgataatggtattagaaggccagtagggtggtcagtgggtgttgtagattacctcannnnnnnttacagctntacctacacccccacgattcattgngtatgantaaccatcncatcnggcctttnatccnttttaccctttnaaactncgaacacgcnggcnnnaatatggaccnggacaacttcttnntnctaacccncngnctgctgntgaccntggtcgncacctnccngccgagtncacccc

SEQ ID NO: 29936 - DNA, 528 bp, Homo sapiens
  misc_feature (1)...(528): n = a,t,c or g
ttnnnttnnacntacnnaatccctttttgaacannnnnnnnnnnnnnnnnnnnnnnnnnnnnnnnnnnnnnnnnnnnnnnnnnnnnnnnnnggcacgaggggaggcaaaacttgaaaagggcctgcaacactttaaaccttctcaggttcacccacacgaaacggctgtgctgagtgtgctgccggtgcccggggagcttctctgactgtgacccggcagaggcttctgtggcggtgcatgagcggccctacagtggagggttctctttggaaacaaacagccctgcttggtttcagtttgaggccacttatcttcaatgtgacatttcttgccaagccctgtgacactccccattgatgactcccataggtacagataaagttaagaacaggaaacagaagggtaggatgcatagggagggagagaagccctgaaaacttttttttctttttgaagcatggaaaacnaaanaaaaaannnnaanannnnnnaaaaaaaaaaaaantttttttttaagggngcccccc

SEQ ID NO: 29937 - DNA, 519 bp, Homo sapiens
  misc_feature (1)...(519): n = a,t,c or g
ttctnnnttatttgtnaatcccnttcactttnnaaacccntnnnnnnnnnnnnnnnnnnnnnnnnnnnnnnnnnnnnnnnnnnnnnnnnnnnnnnnnnnnnnnggcacgagaagcagtcctgtgaggttgtaaggttaggcaccattattcccatctggaaggtgaaaggaatagcctcaggaagattgatttattgctaaaagggaaaaataattaacaattatttatttatttgtttatttatttattattttcaatgtnnnnnnnnnnnnnnnnnnnnnnnnnnnnnnnnnnnnnnnnnnnnnnnnnnnnnnnnnnnnnnnnnnnnnnnnnnnnnnnnnnnnnnnnnnnnnnnnnnnnnnnnnnnnnnnnnnnnnnnnnnnnnnnnnnnnnnnnnnnnnnnnnnnnnnnnnnnncccgagtccccagagtccattgtgnnnnnnnnnnnnnnnnnnnnnnnnnnnnnnnnnnnnnnnnnnnnnnnnnnnnnnnnnnnnnnnnttttttttcattcc

SEQ ID NO: 29938 - DNA, 507 bp, Homo sapiens
  misc_feature (1)...(507): n = a,t,c or g
tttngaaacccttnctntatctataacccctnnnnnnnnnnnnnnnnnnnnnnnnnnnnnnnnnnnnnnnnnnnnnnnnnnnnnnnnnnnnnnggcacgagcacatttttctggcactgtttataagctcaaatttccagttgaaaggatggttaagattgaattactcttcaaattcctttttcctttcacagttgtttttccttgacgaagtctctttgtcactatcaaggttaagtgaagtcactattgaaggaaagaacagaaggaatttggaatgcttttccattaacttctgaaccacagtgacttattccttgagaatctccagtaaggcttagggtctttcggataagtcattttggagaaatgttttcttcttttgctgttaggttgacatggcaaaagaaataatattatttgagttaacctttgcctagtatgttattgctcaaagcaaggttgtagataccatgagaattatgcctaaatgatcaaaattgattt

SEQ ID NO: 29939 - DNA, 508 bp, Homo sapiens
  misc_feature (1)...(508): n = a,t,c or g
attttgaatcccccncnnatctggaaacccctcnnnnnnnnnnnnnnnnnnnnnnnnnnnnnnnnnnnnnnnnnnnnnnnnnnnnnnnnnnnnnggcacgagaactgtgcctgttgtcttcatgtagacaccttttgttttatctttttcagagaataagcctcagctttttctaggtcctggaagggggtatcatctgactgggtgaggaatagctttttaaatagcctttcagccatgatttctagttttagcccatctcattacagaggttcccggtgctggcaattcctgagactttctgtgttgtttggtgtgaattggatagcttcttcttggttttccttattggtagtttaggaatcaaacttttaaggctctgcgtctgctatgctagtttctactctctattttctggctttcagaattttggtatttccttttaaatttattcttatgaaatccctttaccattattttaatgattttaatgaactaaaattgaatg

SEQ ID NO: 29940 - DNA, 514 bp, Homo sapiens
  misc_feature (1)...(514): n = a,t,c or g
ttttgaancccnnnnnnnnnnnnnnnnnnnnnnnnnnnnnnnnnnnnnnnnnnnnnnnnnnnnnnnnnnnnnnnnnnggcacgaggggaaaacaaccacagaaacaacctcagacaccaaaatttgttatannnnnnnnnnnnnnnnnnnnnnnnnnnnnnnnnnnnnnnnnnnnnnnnnnnnnnnnnnnnnnnnnnnnnnnnnnnnnnnnnnnnnnnnnnnnnnnnnnnnnnnnnnnnnnnnnnnnnnnnnnnnnntgtgcctggccctgcattcactttgttattgaaaaacttannnnnnnnnnnnnnnnnnnnnnnnnnnnnnnnnnnnnnnnnnnnnntgggctacctgaaatccctggagagggattagaagcaggccagttctgatggggagttcatgcttagaggagaggtgatgcacacgataagttccatttgcttgttttaacctagggacaagtatacttggcaaggcatgcgatatagtaggggcactggcagagagatca

SEQ ID NO: 29941 - DNA, 518 bp, Homo sapiens
  misc_feature (1)...(518): n = a,t,c or g
ttntnnnnnattnttgaaccccngacatnttgaangcccnnnnnnnnnnnnnnnnnnnnnnnnnnnnnnnnnnnnnnnnnnnnnnnggcacgagcttaataggttctaggctgggccctggcttctacttctggggccttctctgccaagctaggcacacgcagggcatgtactggggattccctaaatagctcctactggaccaaaccatgaagtttcagaaatcaggttaggatacccagctctgttgccttggcaggtcaccgtgtcttgatttctttctccataaagtgagaatttagactcagcaagctgagagccctttgggctagctgtttgtggagggaggcatcagccctccctgaccgggactgttgggaagatctggtgagcaccatagtattctaaaccnnnnnnnnnnnnnnnnnnnnnnnnnnnnnnnnnnnnnnnnnnnnnnnnnnnnnnnnnnnnnnnnnnnnnnnnnnnnnnnnnnnnnnnnnnnnnnnnnnnnnnnnnnn

SEQ ID NO: 29942 - DNA, 504 bp, Homo sapiens
  misc_feature (1)...(504): n = a,t,c or g
ttttgaancccctgactttgaaccccnnnnnnnnnnnnnnnnnnnnnnnnnnnnnnnnnnnnnnnnnnnnnnnnggcacgagcaccccacctctgcccctgccgcggccttatcaagacttcctgtacatctgtctgtgtgtgctgggggctcagccttcacgaggacccagaggctccttagggaaatccacaggcccttgtgcatgtgaacaataaggaaaggaaaagattttgcttttgggttcttcatcccccctcccaccagcttcaaagttgaccccacccgttctgaattgagggccatgaaaactggcttgtggccatttagaagaggatcagattctggaggcaaattctaaacagactttgcatgtgaaaagaaaataaaaacagctgaattacagacaagaaatgaatctgcccttcccccctcaaaaaaaaggcatcctaacagaactacttcagattgcaagggggacttcctgccagtaacatgaaacgt

SEQ ID NO: 29943 - DNA, 502 bp, Homo sapiens
  misc_feature (1)...(502): n = a,t,c or g
ttaatcccctcaatttgannacnnnnnnnnnnnnnnnnnnnnnnnnnnnnnnnnnnnnnnnnnnnnnnnnnnnnnnnnnnnnnnnnnnggcacgagaacaaatgaaactctgagataaagtgaaaaaacaaattgccctttttagaattaacctgccagtaatctctaggtgcttttacccaaagaccccagtctaaaattcacatgcaaaacatttttttcagttataaaacagaagagttgtaggagagaaaaaacacagaagccaaaagagattgtcctatcacccagagtagatcattccggtttttttttcctattcttatatttaatgatacattatacatgctgttttgttggggtttttggtttatttttgnnnnnnnnnacanttnttttctnnnaatnnttgcctgaccttganctgangcgcactacttttacccgcatnacnnnnggtngatccnggncacttcctacttaaangantgccttttactca

SEQ ID NO: 29944 - DNA, 523 bp, Homo sapiens
  misc_feature (1)...(523): n = a,t,c or g
ttcttnntnattctnaaatccctattnnttctnnatacccnttcactnnnnnnnnnnnnnnnnnnnnnnnnnnnnnnnnnnnnnnnnnnnnnnnnnnnnnnnnnnggcacgagaaaagtaccttttaccttattttatttttcannnnnnnnnnnnnnnnnnnnnnnnnnnnnnnnnnnnnnnnnnnnnnnnnnnnnnnnnnnnnnnnnnnnnnnnnnnnnnnnnnnnnnnnnnnntatgggagggcataaagtgaatccttagcaagtgtgggtctggctcatttgtggttcatcaaatggacgtggacgaagggaaacaaaagtagtaatgtttctttgaagataaaggatcgaaaacagantgttcttatggaaataaanagataatggctanngaaatgggcatcactttttggtatatgcaaaaaaacgngattttcctgctctaatatatatagacnaagncttaactctgttncccaggctnaaangtgtgccacagtcattgctcactgtgaccg

SEQ ID NO: 29945 - DNA, 513 bp, Homo sapiens
  misc_feature (1)...(513): n = a,t,c or g
ttttgaaatccccctccaattcntnaaancccncttcacatgattacnnnnnnnnnnnnnnnnnnnnnnnnnnnnnnnnnnnnnnnnnnnnnnnnnnnnggcacgagcttgcacttaatctcacactgcggcagctcgaccagcatcttgacttgctcaaacattcaaacttcctgggtgcctatgacagcatccggcatgcccatagccagtctgcagaggcagaacgtcgtgccaatacctcagccctggcagtacctagccctgtgagcaactcggcaagtgctcggcatcggacagaggcactgatggatgctcagaaggaggacttcaacagcaaacacatggcctaccagcgggcacttggcaagctctntgccatacccacaccctgagcctgacagacataaatgagctggtgtgnggggcaccangggatgcaccctgngctacaagcccttgtgggggtgccgnntgtcnagatgaggatggncagncgtctgtgggggcctc

SEQ ID NO: 29946 - DNA, 528 bp, Homo sapiens
  misc_feature (1)...(528): n = a,t,c or g
ttnnttnnnttnatcctngaaatcccctnctnatccntgaaagcccctncacatgnnnnnnnnnnnnnnnnnnnnnnnnnnnnnnnnnnnnnnnnnnnnnnnnnnnnnnnnnggcacgaggtaaaataagacaattacannnnnnnnnnnnnnnnnnnnnnnnnnnnnnnnnnnnnnnnnnnnnnnnnnnnnnnnnnnnnnnnnnnnnnnnnnnnnnnnnnnnnnnnnnnnnnnnnnnnnnnnnnnnnnnnnnnnnnnnnnnnnnnnnnnnnnnnnnnnnnnnnnnnnnnnnnnnnnnnnnntttannnnnnnnnnnnnnnnnnnnnnnnnnnnnnnnnnnnnnnnnnnnnnnnnnnnnnnnnnnnnnnnnnnnnnnnnnnnnnnnnnnnnnnnnnnnnnnnnnnnnnnnnnnnnnnnnnnnnnnnnnnnnnnnnnnnnnnnnnnnnnnnnnnnnnnnnnnnnnnnnnnnnnnnnnnttttttttttttncccnaaacaaagnctttntttgnncctagnacnggagg

SEQ ID NO: 29947 - DNA, 522 bp, Homo sapiens
  misc_feature (1)...(522): n = a,t,c or g
tnnnnnnnnnattttgaatcccnnnnnnntttgaanacnnnnnnnnnnnnnnnnnnnnnnnnnnnnnnnnnnnnnnnnnnnnnnnnnnnnnnnnnnnnnnnnnnggcacgagcagaaatcttgggagtgaagttagaaaaggatgtcctaaacaagatgcaaatactactaatcacaaggggaaatggtaaattgaacggcattaaaaataataacttcttatcaagaggcatcactaaaagattgaaaggacacactacagatgaggagaacatattttcaatacacatgtgtaatagaaggctcataatgaactgtcagaaatcagtaagtaaacgtcaagcaaggtaataacactggaaaatatcatataaacatacatttcataaaagatgatacccacatttctgataccataagaaaagtgnnnnnnnnnnnnnnnnnnnnnnnnnnnnnnnnngttttgaaccgtagttcccataatcccccttgttgtggaagggactgggtcggaggtggttg

SEQ ID NO: 29948 - DNA, 460 bp, Homo sapiens
  misc_feature (1)...(460): n = a,t,c or g
antttgatncccatnnnnnnnnnnnnnnnnnnnnnnnnnnnnnnnnnnnnnnnnnnnnnnnnnnnnnnnnnnnnnnnnnnnnnggcacgaggacatagacattgctgatggacagatgtgtgctatcttgttcctgggagtaccagcaacctactactctctcagttatctcttagctctgtgatactaagcaaagttcatcctgtattacaaatttggaacttgccaggctgacactctgattttcggatgagaagaccaaagaacagagaggttaaatgtctgggtcaaggttgctcagtaagctaatggtgtccaattcaacatgaaattgttgccagcaggtgggtgaagaagggggagcattaaacatataaaatgtgatgtgctgtccatccataaggattgaacagtctgcttagataaaaaggaacaataacctagaattcctggacaaatg

SEQ ID NO: 29949 - DNA, 473 bp, Homo sapiens
  misc_feature (1)...(473): n = a,t,c or g
tnnnntnnnnnntntgaanccatnnnnnnnnnnnnnnnnnnnnnnnnnnnnnnnnnnnnnnnnnnnnnnnnnnnnnnnnnnnnnnnnnnnnggcacgagagactgcatagggctcggcgtgggtggataacagcagtagtaaaaattacttaaatgttttgaaggtgggtttgctgagaagtaaaggatgtgtggagaaaactggattgagaattgtataaggactgtattgtatattgtatgagagtgtagatccaggatgagtcacagtatttttgaagttgtagtaaatggaatgaactagaaagatagaagttaatgttcagaaggcaggagacttaaaagttagattgtaaaaatttgcaattagtaataacgtggtttgagctgagatcatgagattgaatagctagatactgaagatagcaagtcattggaaatgacgaggtcaaatgtcaaagaaggtaagtaat

SEQ ID NO: 29950 - DNA, 463 bp, Homo sapiens
  misc_feature (1)...(463): n = a,t,c or g
ttggantttgatncccatnnnnnnnnnnnnnnnnnnnnnnnnnnnnnnnnnnnnnnnnnnnnnnnnnnnnnnnnnnnnnnnnnnnnnggcacgagnnnnnnnnnnnnnnnnnnnnnnnnnnnnnnnnnnnnnnnnaaggaaattgggatttgaacctaggcaggctgattccagagcccccattcttatatgggctgattgcaaaccaggtaagagatagctagtttttcgaagatcccatgccactgtctcctaagtgacatggtgccagctagtgcaatattaatcactgcagcatacagccaaaaaaaacttttcagcgccccagttgagaaatgaacactgaaccacagcgccccctggcttacatagtaattctgattggctcactctagggtcacactggccancanaaattcaagacaaacctttattgggcatctactatgtggcgagctctctg

SEQ ID NO: 29951 - DNA, 513 bp, Homo sapiens
  misc_feature (1)...(513): n = a,t,c or g
annnccatttgaatncccnnnnnnnnnnnnnnnnnnnnnnnnnnnnnnnnnnnnnnnnnnnnnnnnnnnnnnnnnnnnnnnnnnnnggcacgagctggacaggtgtcctctgtgtagggcaggcacagtccatcaagattctcctagaactgtccagaaccacccccctcccttcactctggttccacacttaatgaaaaaccttctgatgactaatacagggtgctggcaccataatgaagtgttttgaatagnnnnnnnnnnnnnnnnnnnnnnnnnnnnnnnnnnnnnnnnnnnnnnnnnnnnnnnnnnnnnnnnnnnnnnnnnnnnnnnnnnnnnnnnnnnnnnnntggnnnnnnnnnnnnnnnnnnnnnnnnnnnnnnnnnnnnnnnnnnnnnnnnnnnnnnnnnnnnnnnnnnnnnnnnnnnnnnnnnnnnnnnnnnnnnnnnnnnnnnnnnnnnnnnnnnnnnnnnnnnnnnnnnnnnntgcagtgagccaagatgacaccactgc

SEQ ID NO: 29952 - DNA, 191 bp, Homo sapiens
  misc_feature (1)...(191): n = a,t,c or g
gnnnnnagnnnnttnnnnttnnatatcngaannccntttacnnnnnnnnnnnnnnnnnnnnnnnnnnnnnnnnnnnnnnnnnnnnnnnnnnnnnnnnnnnnnnggcacgaggagctgtaattgtgtcaccgcacaattgtgtcacccaattatgggctaaagtgagaccttgtctctaaaaaaaaaaaaaa

SEQ ID NO: 29953 - DNA, 441 bp, Homo sapiens
  misc_feature (1)...(441): n = a,t,c or g
ttacgaatttaatacgactcnnnnnnnnnnnnnnnnnnnnnnnnnnnnnnnnnnggcacgagcagcaacatagctggctgcaaagcaacccagttcccaaatccagcagctcttggatgagaagtctgcaagtgtttactgctgggaccaggactgtgtttctaggaaatggtgctaggcttcagagagcatcatccacaggtcatcccacaaccatccacacagaagcctgaggaaaagggctctgcagagcttgcacataaagatgctgaactcaggaaggctctgtgagctgctggtctcttctggtagggcagcagtgtcctgagaaggtggagctagagtatggagaacaaaactaacaagcaccaagacagcaagcaaggcaacccccanatgacagcagttgcaaatccaaagcaatctgtgcttcanaagacg

SEQ ID NO: 29954 - DNA, 505 bp, Homo sapiens
  misc_feature (1)...(505): n = a,t,c or g
tntgannccngttaccnnnnnnnnnnnnnnnnnnnnnnnnnnnnnnnnnnnnnnnnnnnnnnnnnnnnnnnnnnnnnggcacgaggattatgggcatgagccactgcgcccggccaattttggggttatctttaatctccattgagtcccagaggacaaacacattgccttcttagaaatttcagacatacattagatttcctggaatgtaagaaataccatcagaatggctgagagggcattccttctctctttaagtgcgggtgcaagtccacactcctgggtatcgtgagtttccatatgacagtgtccctgaaacacgtggctcaatgcccaggacaccactccagggtcaccagatgcaagtgactggcccattgtgtcacttaggccccaggaggcccattgactcatcccagnggacacacaggccaggggccacatacctgtcctaggctgctctcaagtgagctnctgagctgcccagcnctgctgcgttactgcc

SEQ ID NO: 29955 - DNA, 501 bp, Homo sapiens
  misc_feature (1)...(501): n = a,t,c or g
aanttggaataccatnnnnnnnnnnnnnnnnnnnnnnnnnnnnnnnnnnnnnnnnnnnnnnnnnnnnnnnnnnnnnnnnnggcacgaggtatttgcaactcagcctagaagaggtatgttttcaacatattattatttcagccatcggtctctgggcctgaactacactatatgtgaacctacctcacagtgtagttctgtatgtaattcaattattgaatattgtaattcagtattgaaatcactatgggtagctcccaagtaggcctgcctttcactcctcagcctttatttcatcagttctaagatatgtgtttgcaatcattccacagaagattcgaggggtttttctgagtacttcttttctcattaagattttagattgtnnnnnnnnnnnnnnnnnnnnnnnnnnnnnnnnnnnnnnnnnnnnnnnnnnnnnnnnnnnnnnnnnnnnnnnnnnnnnnnnnnnnnnnnnnnnnnnnnnnnnnnnnnnnnnnnnct

SEQ ID NO: 29956 - DNA, 509 bp, Homo sapiens
  misc_feature (1)...(509): n = a,t,c or g
tttgaannccngtnacnacatgattacgaatttaatatnnnnnnnnnnnnnnnnnnnnnnnnnnnnnnnnnnnnnnnnnggcacgagtggacacnnnnnnnnnnnnnnnnnnnnnnnnnnnnnnnnnnnnnnnnnnnnnnnnnnnnnnnnnnnnnnnnnnnnnnnnnnnnnnnnnnnnnnnnnnnnnnnnnnnnnnnnnnnnnnnnnnnnnnnnnnnnnnnnnnnnnnnnnnnnnnnnnnnnnnnnnnnnnnnnnnnacatctcctttagactcatcaaacacatttacttcgtctctttttttttttnnnnnnnnnnaatactgggangctctgnctnattctaaanggacaagcaactganctgacncaggtgcnacactaactgagngctttcagnaactccggggcctntccattctcctnagctgatcctttacgctccnatgancctggaaaagctncagacaagggccantaaaagccaccttgggctgttctcgttagttg

SEQ ID NO: 29957 - DNA, 514 bp, Homo sapiens
  misc_feature (1)...(514): n = a,t,c or g
tngtgtttgaaancgtnancccttttnnnnnnnnnnnnnnnnnnnnnnnnnnnnnnnnnnnnnnnnnnnnnnnnnnnnnnnnnnnnnnnggcacgagcagctaagaaaacccccacaagtacaaaatcagtaaaaataaaaaccatggttctgcttgtgctggagtattgttgggaaggccctcgtgagcagagcgtagctggcctggccacacctgcctacctggcctcttctctcctccctcaatgttcctctgaggacctctcaacttttcaaactctctattcaaacatggcattggcatctctgcaatttaatgaagattgttatcaaagaatagcatgtaaaaccatatcaggtatgatttaagcccatgagtaatcaagatttaaatcctttattttggttgtagacatagtttcccagcttgtancattagacaaagtttgaattttctcataaatggcacagntgaggggtaagcganagacagtctggcttatctcaggatgtc

SEQ ID NO: 29958 - DNA, 542 bp, Homo sapiens
  misc_feature (1)...(542): n = a,t,c or g
gaganttnttctntgantngtngnnctnaactggaaattccctncnacttnnnnnnnnnnnnnnnnnnnnnnnnnnnnnnnnnnnggcacgagcatagggctcggcgtggaagtggtggtggagggatggagagggaatgttgacctcccataagcagatggggcctggaagcagaaagaggctcatccagccctgttcctctctgtttccaactggcataggctgggctcacacggggctcagagaatatcagtcaagtgtaactggctggggcagggagaataatggctcttaaagtcatccaagtcctaatcnnnnnnnnnnnnnnnnnnnnnnnnnnnnnnnnnnnnnnnnnnnnnnnnnnnnnnnnnnnnnnnnaggcatnnnnnnnnnnnnnnnnnnnnnnnnnnnnnnnnnnnnnnnnnnnnnnnnnnnnnnnnnnnnnnnnnnnnnnnnnnnnnnnnnnnnnnnnnnnnnnnnnnnnnnnnnnnctctataaaaaatacnaaaattaacccgggcgtggtantgcatgcccgta

SEQ ID NO: 29959 - DNA, 343 bp, Homo sapiens
  misc_feature (1)...(343): n = a,t,c or g
ggtgtnnttnntttgantctngaatacccttatgactgacnnnnnnnnnnnnnnnnnnnnnnnnnnnnnnnnnnnnnnnnnnnnnnnnnnnnnggcacgagggctggtcaggagttcattaccaacctgggcaagggcaacatggagaaaccccannnnnnnnnnnnnnnnnnnnnnnnnnnnnnnnnnnnnnnnnnnnnnnnnnnnnnnnnnnnnnnnnnnnnnnnnnnnnnnnnnnnnnnnnnnnnnnnnnnnnnnnnnnnnnnnnnnnnnnnnnnnnnnnnnnnnnnnnnnnnnnnnnnnnnnnnnnnnnnnnnnnnnnnnnnnnnnnnnnnnnnnnnnn

SEQ ID NO: 29960 - DNA, 542 bp, Homo sapiens
  misc_feature (1)...(542): n = a,t,c or g
ggtgnnnttnntttgannactacngnatacccttatgacnnnnnnnnnnnnnnnnnnnnnnnnnnnnnnnnnnnnnnnnnnnnnnnnnnnnnnnnnnggcacgagaaaactgacattctgagaaggtatgaggtagttctcctgtgaaatagaggcctcattcttacctgctaagttgtttccttatcccccatcctactctcatgttctttcagggctgccaggcagagacaagctgaatttactgtttaataagtaattagttcgtagaggacagagattttagatacccacactcatgttctcttaatttctcttcccctgttgtttagagctgggatcctaagtgacctgaagatataagtctaccttattcttcacaaactggtgataaatactacctataatgtaaatcatgtttctccaaggattaatgtgttccttttgaaaaagttttagccccaagattgtcatacttttataagtcagtagacctttggaattctgcaactagaggaggaatagtaactaacactaagttt

SEQ ID NO: 29961 - DNA, 492 bp, Homo sapiens
  misc_feature (1)...(492): n = a,t,c or g
gannccctnnnnnnnnnnnnnnnnnnnnnnnnnnnnnnnnnnnnnnnnnnnnnnnnnnnnnnnnnnnnnnnnnnnnnnnggcacgagaactgagaatttacatgttaatctcatctcaaagcactctgacagaaacacccagaacaatgttttacgtaatatctcggcacctgtggcccagtcatattgaatataaaattaaccatcacttccatataaccagcaccacatcaagaaacaacagcacaaagctggctggattttgaatgttgattttaaagttgatccaaatattgttcagtatgtaaaatgtgcgtgctacccattgacccagtagttcttcttttacgaaggtagcctatggaaatattcacagagatggataaagaaaaataaaaagaggctgggcgcagtggctcacccnnnnnnnnnnnnnnnnnnnnnnnnnnnnnnnnnnnnnnnnnnnnnnnnnnnnnnnnnnnnnnnnnnnnn

SEQ ID NO: 29962 - DNA, 520 bp, Homo sapiens
  misc_feature (1)...(520): n = a,t,c or g
ggtgtnntantngnaaccctttgnactcnnnnnnnnnnnnnnnnnnnnnnnnnnnnnnnnnnnnnnnnnnnnnnnnnnnnnnnnggcacgagggtttcannnnnnnnnnnnnnnnnnnnnnnnnnnnnnnnnnnnnnnnnnnnnnnnnnnnnnnnnnnnnnnnnnnnnnnnnnnnnnnnnnnnnnnnnnnnnnnnnnnngagttttatgctttcaatgtatttcttacatttcnnnnnnnnnnnnnnnnnnnnnnnnnnnnnnnnnnnnnnnnnnnnnnnnnnnnnnnnnnnnnnnnnnnnnnnnnnnnnnnnnnnnnnnnnnnnnnnnnnnnnnnnnnnnnnnngccaaaatggtcntgatctcttgacctcangatccaccagcctatgcctnccanagggcttgggattacnntgtgagantcaccgtncctnattcnactaatgncatnatttaancatgtnnacncatttntggttatnnatantatatttgctntatnactntattatanagtt

SEQ ID NO: 29963 - DNA, 533 bp, Homo sapiens
  misc_feature (1)...(533): n = a,t,c or g
ggtgtnntnntttganaccttangactcnnnnnnnnnnnnnnnnnnnnnnnnnnnnnnnnnnnnnnnnnnnnnnnnnnnnnnnnnggcacgagtcggcgtggggaaaaaaattcttatttacgtttatatattactgctaatcttgtctttaaatatagtcagcacacagaaatcactcatgttctgtctcctcaatagactcctgattcttttcatttgttctctgttggttgaatgaatagaagaacactatcaaagtctatcactttatttgggatgatgttgctcctgctagaaagatcttgcttctcctccagggtttatgacaacagcacaggttagaagggaccctgaggtcgtnnnnnnnnnnnnnnnnnnnnnnnnnnnnnnnnnnnnnnnnnnnnnnnnnnnnnnnnnnnnnnnnnnnnnnnnnnnnnnnnnnnnnnnnnnnnnnnnnnnnnnnnnnnnnnnnnnnnnnnnnnnnnnnnnnnnnnnnnnnnnnnnnnnnnnnnnnnnnnnnnnctacttggga

SEQ ID NO: 29964 - DNA, 533 bp, Homo sapiens
  misc_feature (1)...(533): n = a,t,c or g
gtgnnnttnntttgaancnttatgacnnnnnnnnnnnnnnnnnnnnnnnnnnnnnnnnnnnnnnnnnnnnnnnnnnnnnnnnnnggcacgaggagagctagcaccatgagctcaataccctgctgctctaaaacctagcaccatgagtgaatgctgaataaactaatacagatgctagaggataccatatgagattcaggtacaaagttacactgtccgctttactcataagacagtaacaaattgggtttggagagaaaaaaacagtcaaaatagttcatcagnnnnnnnnnnnnnnnnnnnnnnnnnnnnnnnnnnnnnnnnnnnnnnnnnnnnnnnnnnnnnnnnnnnnnnnnnnnnnnnnnnnnnnnnnnnnnnnnnnnnnnnnnnnnnnnnnnnnnnnnnnnnnnnnnnnnnnnnnnnnnnnnnnnnnnnnnnnnnnnnnnnnnnnnnnnnnnnnnnnnnnnnnnnnnnnnnnnnnnnnnnnnnnnnnnnnnnnnnnnnnnnnnnnnnnanagatcacccctggactc

SEQ ID NO: 29965 - DNA, 538 bp, Homo sapiens
  misc_feature (1)...(538): n = a,t,c or g
gtnnnnntnnnttgantctctganaccttatgacnnnnnnnnnnnnnnnnnnnnnnnnnnnnnnnnnnnnnnnnnnnnnnnnnnnnnnnnnnggcacgagcggcacgagcagggaagctggcagctctgcccctgctcctgaaacaggtgctgttggatagacatnnnnnnnnnnnnnnnnnnnnnnnnnnnnnnnnnnnnnnnnnnnnnnnnnnnnnnnnnnnnnnnnnnnnnnnnnnnnnnngtctctacaacagattttaaaaacgnnnnnnnnnnnnnnnnnnnnnnnnnnnnnnnnnnnnnnnnnnnnnnnnnnnnnnnnnnnnnnnnnnnnnnnnnnnnnnnnnnnnnnnnnnnnnnnnnnnnnnnnnnnnnnnnnnnnnnnnnnnnnnnnnngagaccctgaggctgatggatttccatgactgagcactatttagcaattgtgcaattttatcagttgagctgtggggttagagcccaacagcaaaacgacctgacctgcatggccttcaaggctgtcggccgancgggg

SEQ ID NO: 29966 - DNA, 538 bp, Homo sapiens
  misc_feature (1)...(538): n = a,t,c or g
gtgtnntnnntttgaanctcnnnataccctttgacnnnnnnnnnnnnnnnnnnnnnnnnnnnnnnnnnnnnnnnnnnnnnnnnnnnnnnnnnnggcacgagcaggaatattactcattattgccaggtacaacagcatatttagcctgtgtttaatgtatatatcatgtgattagaacatgggaacaacagtaagactgaaaaggaactctgtgatgcttacctgctgagaacaaaaggaatgagaatcactgctcaactgataacatcaaaactttatagactcacccatcttttcattacagtggcctaatttccaactttatactaagtgtcaagcctctgtctcagtcctaataattcctcttaagtccatatctatatatacaggttcaaatcaaatttctttctgtgtatgtcacaggaacccagtctcaacatttccataccttagatcatgtttgtactttctctttcagagcctgagtgagttctgtggagcccatactacctgcgattcaagccagcaccttggaatc

SEQ ID NO: 29967 - DNA, 202 bp, Homo sapiens
  misc_feature (1)...(202): n = a,t,c or g
ttttgaatccctttnnnnnnnnnnnnnnnnnnnnnnnnnnnnnnnnnnnnnnnnnnnnnnnnnnnnnnnnnnnnnnnnnnggcacgaggggtgttgttggaatgatgggctatggaatctaagctggattggaagaaaactgaagaaaaaggggagggctgatagattggaagaaaatagaggccaataaatcagggttcta

SEQ ID NO: 29968 - DNA, 507 bp, Homo sapiens
  misc_feature (1)...(507): n = a,t,c or g
tttgaantccatntnnnnnnnnnnnnnnnnnnnnnnnnnnnnnnnnnnnnnnnnnnnnnnnnnnnnnnnnnnnnnnnggcacgagcatagggctcggcgtgggagggcaagaacctaaaaaaatcttaagcacatagcctgttttcaggtctggattattcatttcatgtatttgatttaatactcatttaaaaattgactaagaaatagtattaccagttttacagttaacaaagtaacttgctgaagtcataaaattagcaaccgagccagccaatttcatctagttacctaattccaaataacatctatttgttaactgccagaatcttctgctaatgtataagaatagtttctgttctaaggataatcaaaatctcaggaaaaaaaaaaacactaaacattctcataaaaaactcattgtncagcattaatgatatgaccaaaaaacaggaattttaaggagacaaaacatcntcaacatgtgggaagaaacacgacnaaaat

SEQ ID NO: 29969 - DNA, 500 bp, Homo sapiens
  misc_feature (1)...(500): n = a,t,c or g
ttntttntgntctttgnccgcngtcnctntnnnnnnnnnnnnnnnnnnnnnnnnnnnnnnnnnnnnnnnnnnnnnnnnnnnnnnnnnnnnnnnggcacgaggtggcatcagcaactcaagactgtcttccctaccctcttcattgcctctttcaacagtatgaagttaaaatcagctctgaagatgacaatgcattcaaattcaccagatcacccccagctctgaagatgacaatgcattcaaattcaccagatcacccccagctctgaagatgacaatgcattcaaattcaccagatcacccccagctctgaagatgacaatgcattcaaattcaccagatcacccccagctctgaagatgacaatgcattcaaattcaccagatcacccccagctctgaagatgacaatgcattcaaattcaccagatcacccccagctctgangatgacnatgcattcaaattcaccagatcacccccagcttttgaagatnaccat

SEQ ID NO: 29970 - DNA, 549 bp, Homo sapiens
  misc_feature (1)...(549): n = a,t,c or g
ttnnntngnnnnntntgaatccctntntncngnanacccttnnnnnnnnnnnnnnnnnnnnnnnnnnnnnnnnnnnnnnnnnnnnnnnnnnnnnnnnnnnnnnnnnggcacgagcagatgaattagcaattgggtagcacctaaaagctaatattggtccccaaatctactgttaacaacctccccacagacctgtggtcattcccctgcttaaagcagcccgtatttgccagccccaccagcctaggagcttggcagagacacatactgctcaagactatccaggagacccctccctgccattccaagtcccttgcagttaggcgtggccacgtgaataattctggccagtgggctgtaagtgaccggggtgagacacttgagggtcagtgtgtgatctgcctgcatcctccataccctgtcccagcgatgtgcccctcccccggggcagttctagaggccacacattgaggtggcaagccacaagatgaaagcagattgggtcactgagtcaccatanggaggacagctgacaggggaagttcctga

SEQ ID NO: 29971 - DNA, 548 bp, Homo sapiens
  misc_feature (1)...(548): n = a,t,c or g
ttnnntgnnnnntttgnannccttttaacngnaatccctttatgacnnnnnnnnnnnnnnnnnnnnnnnnnnnnnnnnnnnnnnnnnnnnnnnnnnnnnnnnnnggcacgaggttcgattagttgtgacatttacatgaggccttgggggaaaggctggttgccctaccctaatcttattatgcaaatgaattatctttggccagcaccatcttgtctgctcgtgtgannnnnnnnnnnnnnnnnnnnnnnnnnnnnnnnnnnnnnnnnnnnnnnnnnnnnnnnnnnnnnnnnnnnnnnnnnnnnnnnnnnnnnnnnnttgtctgtgtctgcagcgcgactttannnnnnnnnnnnnnnnnnnnnnnnnnnnnnnnnnnnnnnnnnnnnnnnnnnnnnnnnnnnnnnnnnnnnnnnnnnnnnnnnnnnnnnnnnnnnnnnnnnnnnnnnnnnnnnnnnnnnnnctgctgctaggacccattctgacatgaccttttctggagccacctcataaacttagcagtttaacaactgatatgatatttatac

SEQ ID NO: 29972 - DNA, 540 bp, Homo sapiens
  misc_feature (1)...(540): n = a,t,c or g
tnnnntnnnnnntttggaaaccnttantttgannnnnnnnnnnnnnnnnnnnnnnnnnnnnnnnnnnnnnnnnnnnnnnnnnnnnnnnnggcacgagtgtttctccagatctctnnnnnnnnnnnnnnnnnnnnnnnnnnnnnnnnnnnnnnnnnnnnnnnnnnnnccagtataatctcatagtgaataactgctgaatgaaacagtcactgagattagggagcgtgtcaggagaatggtgcagatggcagaactatctcagactgtttccctttggggaagcaggccccagccagaggctgctgggtccagggagcagggagaaagctggagatatccaggcttaggtcaaggatctgacccactgcctggggctggaaatagtgtctacatnnnnnnnnnnnnnnnnnnnnnnnnnnnnnnnnnnnnnnnnnnnnnnnnnnnnnnnnnnnnnnnnnnnttacttttggctactgacccactttgagtgcactagtgcaactanggaactgatttaaantagatttatgggaaantgga

SEQ ID NO: 29973 - DNA, 504 bp, Homo sapiens
  misc_feature (1)...(504): n = a,t,c or g
tnnnnnnnnatnatttgaanaccntttgtgacacgattacgaatttaatatnnnnnnnnnnnnnnnnnnnnnnnnnnnnnnnnnnnnnnnnnggcacgaggagcttcttggtgtgtgctggcgctggccgcttgcacctgtcaacagtgctctgacgccagagttttaggatggagcctggaaggtgggcattttcacagggaccgtgggtgggaaccggagggtggtgggaaggccttggtggtcacagccgatcatggacctggcgattgttaagcagaattagggagaccttggctctatgcancccctggaagcgagggatcaggccagccatgtttcccacacggtcgaggacttgtcttttgaaatcataatattttctcccagagaggccaagcccagtgggagtctgctggtggcattttgagctaaatgttgccttccctctcgaggcaaggtcaacaagcggggcctcattgcaccctggcagaaggccccaaa

SEQ ID NO: 29974 - DNA, 494 bp, Homo sapiens
  misc_feature (1)...(494): n = a,t,c or g
tnatntgaanacctcngnantcccttnnnnnnnnnnnnnnnnnnnnnnnnnnnnnnnnnnnnnnnnnnnnnnnnnnnnnnnnnnnnnnnnnggcacgaggtcccatttgcatcccagggtcgttttttgttttggtttgttttgttttgttttgtttgagacagggtcttattactctgtcgcccaggctgnnnnnnnnnnnnnnnnnnnnnnnnnnnnnnnnnnnnnnnnnnnnnnnnnnnnnnnnnnnnnnnnnnnnnnnnnnnnnnnnnnnnnnnnnnnnnnnnnnnnnnnnnnnnnnnnnnnnnnnnnnnnnnnnnnnnnnnngggtctccntntgttncccaggntgnantncagnggcncnatctnggntnantgnancntccgcctccnaggttnangcnatcttcccntnanccttccnngtatctgaaactgntggnncnnnctaccatgcctggctaantatccntatttttantacanncgga

SEQ ID NO: 29975 - DNA, 501 bp, Homo sapiens
  misc_feature (1)...(501): n = a,t,c or g
ttgannnccnnnnnnaatttgantacnnnnnnnnnnnnnnnnnnnnnnnnnnnnnnnnnnnnnnnnnnnnnnnnnnnnnnnnnnnnnnnnnnnnnggcacgaggtggtgagagcatgtaacaactgctctgtttacatttttcaagaatacaacatatcatccttaactatagtcacctggctgaacaatagatctcttaaatttatttctcctgtctaactgtaattatgtatcctttgatcaacatctccttattcccctttctccccatagtcattcagcctctggtaaactactggnnnnnnnnnnnnnnnnnnnnnnnnnnnnnnnnnnnnnnnnnnnngagtgagatggtgagctatttgtctgtattaaggacacttaacatccatagtgttgcaaatcgcaggatttcattcttatggctgaatagtacttcattgggggatgtacccattttctttaggnctccatttattgatggacatgtagttgattcc

SEQ ID NO: 29976 - DNA, 496 bp, Homo sapiens
  misc_feature (1)...(496): n = a,t,c or g
accannnattgantnannnnnnnnnnnnnnnnnnnnnnnnnnnnnnnnnnnnnnnnnnnnnnnnnnnnnnnnnnnnnnnnnnnnggcacgagcggcacgagcgagcaggtgtcagggcagaaaccaacaaaggtcatgcttcaccccttcctccatctgctgcacctaccactgattctacagattccataacaggacagaattcaagacagagagaagaagagctggaattaatagaccaactgcgtaaacatattgagtaccggttgaaagtgtctctaccttgtgatctcggagcagctctaactgacggtgttgttctttgccatttggccaatcatgtgcgacctcgatctgtcccaagcattcatgttccctcaccagctgtagtaagttgataatcctaaaaagccttggctattcatcagacatttgntaagcacagnggacagacatttcttaagcattgngctagatattaaggatacngatataa

SEQ ID NO: 29977 - DNA, 328 bp, Homo sapiens
  misc_feature (1)...(328): n = a,t,c or g
nnanatnnnnnnnnnnnnnnnnnnnnnnnnnnnnnnnnnnnnnnnnnnnnnnnnnnnnnnnnnnnnnnnnnnggcacgaggtggccactgagctggctgactaagccccgtctgaccccagcccagacagcaaggtgtggaggctcctgtggtagtcctcccaagctgtgctgggaagcccggactgaccaaatcacccaatcccagttcttcctgcaaccactctgtggccagcctggcatcagtttaggccttggcttgatggaagtgggccagtcctggttgtctgaacccaggcagctggcaggagtggggnnnnnnnnnnnnn

SEQ ID NO: 29978 - DNA, 512 bp, Homo sapiens
  misc_feature (1)...(512): n = a,t,c or g
tttgganncccttttgatgacnnnnnnnnnnnnnnnnnnnnnnnnnnnnnnnnnnnnnnnnnnnnnnnnnnnnnnnnnnnnnnnnnnnnnnnggcacgaggggcggcggggaagggagcgagcgtggcgggggacccgaggcacgctctcgagcctacgagcgtgatgcgctcgagtgtgggcggggactgagggaagaagtgaaaatcggactgccaggcgacagttcctccgtttgaaatctcgccggctcctgagcgggccaccgggcccgggctgggggtctggcggcagaaataactttatttggactgagagctggagaatgaaaataggacctgagagtatattgcgctaacgatgacaggtnnnnnnnnnnnngcnctcgtgngtataancngcgantgagcgtannaanttnactnataggcgntaaaacggttatncacanntcangggntnnngcnngaaagnacttgagantntnnggnngntanngggtagnacttgta

SEQ ID NO: 29979 - DNA, 527 bp, Homo sapiens
  misc_feature (1)...(527): n = a,t,c or g
ttganncccnttgnnnnnnnnnnnnnnnnnnnnnnnnnnnnnnnnnnnnnnnnnnnnnnnnnnnnnnnnnnnnnnnnggcacgagcctcctccctctccctcctccctctgcagtatacaacaacgaagatgaacctttagatgaaccttgaggacagacataaaataagccaatcacaaagagataaatagttttggttttacaagacaaaaagagctatagagatggctggtcctgatggttacacattannnnnnnnnnnnnnnnnnnnnnnnnnnnnnnnnnnnnnnnnnnnnnnnnnnnnnnnnnnnnnnncgtgttaccacaattttaaaaactgaagaaaagagttttttaaaaaatcataaaccggctagcataaagaacaatacagctcaaggccaaacaatgcctattttgnttataatttttaactttctgtcgatgttgactctattaaatgatgtatttctgagtagtgaggtaattttggncttancattntataaattctagaananaaata

SEQ ID NO: 29980 - DNA, 523 bp, Homo sapiens
  misc_feature (1)...(523): n = a,t,c or g
tntttgnnccccttganncncnnnnnnnnnnnnnnnnnnnnnnnnnnnnnnnnnnnnnnnnnnnnnnnnnnnnnnnnnnnnnnnnnnnnggcacgagaagcttcaataccctggactgaggtgggcagtttagcaatgaggggggccaccagccatacaccagagcgctctagagagctgagcacaggcttggtcttgctgctgctgggcatgttgcttgcagtacttccagaagatgaccctgtctctgctgactgttggaaaacctcgattgtggccttggcgatgttctccaagagggagttcatctcattgttaggggtctgcttgatcatgagctgcagctccaaggaagactggcgcatggtccactggtccaagttctgtgatagaggccccacacccaggctagtcatcatcgtgttacccccagctacccaacaatctgaggccaattcctgactcctgcaacattgaatcacagactctggaggctgaaagggcctctatgncccatctttaa

SEQ ID NO: 29981 - DNA, 510 bp, Homo sapiens
  misc_feature (1)...(510): n = a,t,c or g
ccnnnnnnnnnnnnnnnnnnnnnnnnnnnnnnnnnnnnnnnnnnnnnnnnnnnnnnnnnnnnnnnnnnnnnnnggcacgagttccttttccctttagttactcattctttcatcattttgctgtcctcaagtcttcctgctcagtgagtcttgcttgataagagttctgttaaaaatatatatgtgtgagggggatgaaactgttgatcaaaagtgttacttatggatttattttatctacaacagtggtccccaaccttctgggcacctgggcaccatggaccagtttcgttgaagacagattttccatggacccaggggtggtggcggggaaatggtttcagaatgatnnnnnnnnnnnnnnntaactgngcactttatttctattattattacagtgtcnnnnnnnnnnnnnnnnnnnnnnnnnnnnnnnnnnnnnnnnnnnnnnnnnnnnnnnnnntgtnncttgcaactanatggncccctggcatgantgcagacagtgacaga

SEQ ID NO: 29982 - DNA, 517 bp, Homo sapiens
  misc_feature (1)...(517): n = a,t,c or g
ttggnncccccttgnannccnnnnnnnnnnnnnnnnnnnnnnnnnnnnnnnnnnnnnnnnnnnnnnnnnnnnnnnnnnnnnnnnnnnnnggcacgaggcaaggagagagcttcatgaaatcagcatgagagaagttggggtggggacgatggagaagagggcggtggctgggagcaaggaacccaggcagacccacacctgtaaggttggagccccaagtggggagctttgagggcagaacatttatcccataggcattcagtttgaaaatcactccagaggcttggaataagagaggaccaagaccctgggcaaaagtaaatgataatggaatagtatcattatggaaatagtaacagtgaaagtagtaataatggaataataattaaaaatagtaattatttaataattaaaacattaaaataaaaacaataattattatttaataataatcanaaataataatggaatagtaacagtgaaagcaaatactcagcaaaaccatgtgccaggctct

SEQ ID NO: 29983 - DNA, 522 bp, Homo sapiens
  misc_feature (1)...(522): n = a,t,c or g
tnnttggnnncccctttgatnacnnnnnnnnnnnnnnnnnnnnnnnnnnnnnnnnnnnnnnnnnnnnnnnnnnnnnnnnnnnnnnnnnnnnnnnggcacgagagccactgtgcctggctaccataccctgtaagtgtgtttttatcaaaaacaagctatgatacaggccatttattttatggatgatatctccatatgacctaattggcaaaagcagtcctcaaaacttatcaaagcatatactactaagtactaacagattcacttgttggtaaatatttttttgttaaaaggatgtagaaagtgttaaatattttataaaatataaaaattaagaattgactatattttatcatgaaaaggttgtaaaatattttattgcacatgtcacattgactgaaatcacagaatttttatcttgagttttagtgagtatgttttaaaaacacttggnagcctagaaaatactccatttggttttaaaataattccactggcatggtggctcacgcctgnatacca

SEQ ID NO: 29984 - DNA, 524 bp, Homo sapiens
  misc_feature (1)...(524): n = a,t,c or g
nnnttngnnncccctttgannacnnnnnnnnnnnnnnnnnnnnnnnnnnnnnnnnnnnnnnnnnnnnnnnnnnnnnnnnnnnnnnnnnnnnnnnggcacgaggggatctcttcccgacaagtggttgtggagggaagaacagtcccttccagtgtgagtggagtaacggtgaacaattccggtcgtaatgactacctcagcgtttcctggctgctggcgcccggagatgtggataactatgaggtaacattgtctcatgacggcaaggtggtcagtcccttgtcattgccaagtctgtcagagaatgttccttcagctccctcaccccaggccgcctctacaccgtgaccataactacaaggagtggcaagtatgaaaatcactccttcagccaagagcggacagtgcctgacaaagtccagggagtcagtgttagcaactcagccaggagtgactatttaagggtatcctgggtgcatgccactggagactttgatcactatgaagcccattaaaaacnaaac

SEQ ID NO: 29985 - DNA, 475 bp, Homo sapiens
  misc_feature (1)...(475): n = a,t,c or g
angacnnnnnnnnnnnnnnnnnnnnnnnnnnnnnnnnnnnnnnnnnnnnnnnnnnnnnnnnnnnnnnnnnnnnnnggcacgaggctccctgggcggcttttcctgaccctagttgtctcagttctctcagaatgctgataggcaggacctctgggcacacagctgcagctccctccttttcctgcttattttcctttcaaaaacagcttcgttgagataattcacacaccatgcgatgcgttcatttaaagtgtatatttccgannnnnnnnnnnnnnnnnnnnnnnnnnnnnnnnnnnnnnnnnnnnnnnnnnnnnnnnnnnnnnnnnnnnnnnnnnnnnaaaaccccgtctctacnnnnnnnnnnnnnnnnnnnnnnnnnnnnnnnnnnnnnnnnnnnnnnngggtnnnnnnnnnnnnnnnnnnnnnnnnnnnnnnnnnnnnnnnnnnnnnnnnnnnnnnnnnnnnnnnnntg

SEQ ID NO: 29986 - DNA, 502 bp, Homo sapiens
  misc_feature (1)...(502): n = a,t,c or g
catnnnnnnnnnnnnnnnnnnnnnnnnnnnnnnnnnnnnnnnnnnnnnnnnnnnnnnnnnnnnnnnnnnggcacgagactataacaagcagatctagttctggcttttcagagtctgtctcctagagagagaacaaggagatagttgttaccttggctagttgactgttttcttctctggaaaatttattttctggccacagtgcctgaaagatatttttggctggcagcccttgccttgtcctgggctttttgctagtgactgctaagcccagttcaggatgtcagttgtactcatgctagccctttccatccccccaattttcatgaccatatacttgtatctttcagtgttttgaggacctgtgttcagtcaggacctcttgattctgagtatgagctgtggggagggaggggatcatccanctcancangntgggatcctcccctgcangaatgcncnaggaanangatggctncngcnnnnangangcnnanaatga

SEQ ID NO: 29987 - DNA, 505 bp, Homo sapiens
  misc_feature (1)...(505): n = a,t,c or g
nccnnnnnnnnnnnnnnnnnnnnnnnnnnnnnnnnnnnnnnnnnnnnnnnnnnnnnnnnnnnnnnnnnnnnnggcacgaggattcatgatggctatgttaaaaacagaatcgcagacctgaatttctcctgtgccagttacaagtgaggaggggaaaggtatttgttttggaaactggaaataatttaagagaaaccaatatgccaagggagcttacagctacaaggaaatgtgcaacttaacctgtttcctgtaaccagaaagtggtgcaggaaaacctggaagtgacgcagtgtcccccaggagttgtatctgacacttctagctggcagacaggtctaaagccaacaggaacatttcttgggcttttcatgatgttggtgaacaacattaaagataggagacagtttcttcatgagaacagatttaagttataaggagagtccacctccataagctctgcttctttctggatggatcaaccaggtaaagattttttgcaccc

SEQ ID NO: 29988 - DNA, 361 bp, Homo sapiens
  misc_feature (1)...(361): n = a,t,c or g
cncnnnnnnnnnnnnnnnnnnnnnnnnnnnnnnnnnnnnnnnnnnnnnnnnnnnnnnnnnnnnnnnnnnnnnnnggcacgagatttgacattgatgaaatgtgaccaagttttgtaaagctttgaaattacatttgctgtcatagttgatgcatctttttatagccacctgttctgaatttgtaactgttataaaatgtttacattttatattctagttggctgttttaaagtacaaaggtgacattttttgcagtctttgttagcttccacaacttgagataatagagattttctgttagaagcagcattttggcagtggggnattnnnnggncctannnnntannnannnnnantatta

SEQ ID NO: 29989 - DNA, 496 bp, Homo sapiens
  misc_feature (1)...(496): n = a,t,c or g
ttgnnnnnnnnnnnnnnnnnnnnnnnnnnnnnnnnnnnnnnnnnnnnnnnnnnnnnnnnnnnnnnnnnnnnnnnnggcacgagnnnnnnnnnnnnnnnnnnnnnnnnnnnnnnnnnnnnnnnnnnnnnnnnnnntgtctccaaaaaaaacaaaacaaaagcaccctgaggaggagtccctagccctcaccattctgccaaggggagagcgggacctcgccagggaccaggtgtcactgcgtcctctgatgaccgagctgctgggaccgaggctgctggccagagacagtctacacaggcattgcagaaaagtagctcaattttgctgcctaacagaactctttccagtcatgcagtaacgacaaaacatgccccaagtgggtaaaatgaaaacctgttctcaaaagagaatatagaaagaattttatttaaattggataaaagcctagttgntgttttataaattttatttaattaagcggccgaagcttattccg

SEQ ID NO: 29990 - DNA, 475 bp, Homo sapiens
  misc_feature (1)...(475): n = a,t,c or g
ccttgnnnnnnnnnnnnnnnnnnnnnnnnnnnnnnnnnnnnnnnnnnnnnnnnnnnnnnnnnnnnnnnnnnnnnnggcacgaggacaaagtaaattttgctaagnnnnnnnnnnnnnnnnnnnnnnnnnnnnnnnnnnnnnnnnnnnnnnnnnnnnnnnnnnnnnnnnnnnnngagctcaggagttcgagaccagccnnnnnnnnnnnnnnnnnnnnnnnnnnnnnnnnnnnnnnnnnnnnnnnnnnnnnnnnnnnnnnnnnnnnnnnnnnnnnnnnnnnnnnnnnnnnnnnnnnnnnnnnnnnnnnnnnnnnnnnnnnnnnnnnnnnnnnnnnnnnnnnnnnnnnnnnnnnnnnnnnnnnnnnnnnnnnnnnnnnnnnnnnnnnnnnnnnnnnnnnnnnnnnnnnnnnnnnnnnnnaggcctgangatacancagggannctttttanncatttgttgccattanctttggacc

SEQ ID NO: 29991 - DNA, 496 bp, Homo sapiens
  misc_feature (1)...(496): n = a,t,c or g
nnnnnnnnnnnnnnnnnnnnnnnnnnnnnnnnnnnnnnnnnnnnnnnnnnnnnnnnnnnnnnnnnnnnnnnggcacgagggtgtttgggaaaaagtggggcaggggactgctgctttctattttaagttctgcaaggcttatttaaccacataaacatatttattattttaataaaatagcttaaacatttttaaccatgttataatctcaaaatagcacagtttcaccctactgcatttataaacttaaataatattgagtaaatactttcaggctatattctatattacctctcaggctaccacctattcaaactttaaccattgctatagtctccaaattggtctttcttcttctactcttgcccctacaatctattctcaagactgtacaactctaagagggtgccttaaattccatcttaacaaagtctctggtggccgggtgcagtggctcanacctnnnnnnnnnnnnnnnnnnnnnnnnnnnnnnnnn

SEQ ID NO: 29992 - DNA, 489 bp, Homo sapiens
  misc_feature (1)...(489): n = a,t,c or g
nnnnnnnnnnnnnnnnnnnnnnnnnnnnnnnnnnnnnnnnnnnnnnnnnnnnnnnnnnnnnnnnnnnnnnnggcacgaggacaagatggactaggctttcctcctcacttttacttgtttctgttgtccccaaaagatttgagaggccgtttaggactgagagtggctctgagaccagtaatcacctttgtttttgatgattcacatattagttaacaggaaagatgtgataaattgtttatgcagtttattttttcctgtctcacagatctgtttcactctcatttaagtactgaaatacagatttttttcataagtttctattagagataagaatcagtgatctaaaaattttaagtatattttaaaaaaatcaaactaagtgagggtttgttttttttggntaagatctttttgnctgaaaattatnaattcagaatattcagaacttgatcncttncanaatggnggagngagggctnangaatt

SEQ ID NO: 29993 - DNA, 573 bp, Homo sapiens
  misc_feature (1)...(573): n = a,t,c or g
nnnnnnnntnnnnnnnnanntnnngnnggggnnncnntnnnnngccnnangaannagcannngncntnnganntttnaanccnnaaaaaattgaaaccannnnnnnnnnnnnnnnnnnnnnnnnnnnnnnnnnnnnnnnnnnnnnnnnnnnnnnnnnnnnnnnnnnnnggcacgagtgggatttgtggcttatttttaaaatccaatgattaaaatgaagttttctggcaatattaatatttgtgtgaatctggatatcctcctcacttaacttctaaggctttttcttcatctgaaaatgacaattttgtatacttggctggattattttaagtaacaagtaacaaacactgtggtagactaacatttgagtttgaagtttcatataattttaaatcattggcatcgactgactttggaaagnaacttctgaganttttggtctgaagtgaccctgaaagtttatgacctaattatnattgtattangnctgaatggagaatgttgnactttgangaggnannngganggaannannnataanngcggntgacntgaggnagcnantnctga

SEQ ID NO: 29994 - DNA, 522 bp, Homo sapiens
  misc_feature (1)...(522): n = a,t,c or g
ttnggaatcccttttggaaacccccnnnnnnnnnnnnnnnnnnnnnnnnnnnnnnnnnnnnnnnnnnnnnnnnnnnnnnnnnnnnnnnnnnnggcacgaggctaccctgttttgttaaggccaccagttcaggaatatcaattactttgagccaaatgcaatttctgattcatccatgtacatacagnnnnnnnnctgtatccttaggttcaatatncatggattnaancaantactgatnaaaattattagaaaananccaatnnancaataaagantaactntanaancactacatcataacaactatttatatagcgnnnacattatatnaacttttacangtaagctagcanatgacttatactatatcgaaaggatgcgtgtnatngatangcanatantgtgcccantttatacctgatacttggcnccctnngantntacannngccaagggatgnagccgatcnnnnatgtgatgagggagctttacangnatgacccgatctanggaatcctt

SEQ ID NO: 29995 - DNA, 527 bp, Homo sapiens
  misc_feature (1)...(527): n = a,t,c or g
gaanncccntttgaaagaccctntnnnnnnnnnnnnnnnnnnnnnnnnnnnnnnnnnnnnnnnnnnnnnnnnnnnnnnnnnnnnnnnnnnggcacgaggtgacaggtaccatactaaataattatattaaagaaacttagaatatacagtaagttttagaagataatcttagggtaggaaaggccttcataagtaaatctaaaacccagaaaccataaagaaaaatatcaacagatttgactgggaaaatacttaaagctgttggaatataaaagtcgctattaacaaaattaaaggacaagtgacagaatggnnnnnnnngttcgtaaaatacataattcataatggattaatatccataaagtaaaaaagttcctacnagccaacangngaatataactccatagaaaacagacaatatttataaataggtagtttcaagaagaananagaaatgactgattttaatctatcagtgcaaggaacacaagcagggttaaaaagcattnctttgagaaatnccccct

SEQ ID NO: 29996 - DNA, 514 bp, Homo sapiens
  misc_feature (1)...(514): n = a,t,c or g
tgnanncccatnnnnnnnnnnnnnnnnnnnnnnnnnnnnnnnnnnnnnnnnnnnnnnnnnnnnnnnnnnnnnnnnnnggcacgaggaggccaagaggaaagatgtaatgaaaataattctaataattataatctggattcacagtttaaagtattcagtccttagagataaacctgctctagtgatgccttactgttcagtaaagtagaaaataacttgtctttttgcttnnnnnnnnttgtgtaaggctatggnttcgtactcccttgangancactacccgtggaaggcctannggntcctactgnttttttgcctgancctcccacagtantgagattataggcacccanccaacacctggntaattttttgnatttaggnagagacggngtttcaccntgttaggtcagggctggtntcaactccngacctcangtgattnnnnnnnnnnnnnnnnnnnnnnnnnnnnnnnnnnnnnnnnnnnnnnnnnnncngncctttntnnattaat

SEQ ID NO: 29997 - DNA, 512 bp, Homo sapiens
  misc_feature (1)...(512): n = a,t,c or g
tggannncnnnnnnnnnnnnnnnnnnnnnnnnnnnnnnnnnnnnnnnnnnnnnnnnnnnnnnnnnnnnnnnnnnnnnggcacgagatttaagcccaggatgtataaatgaatcatacaatttaactgtaatccacaattacagctggggctaaaaaaatttcagccttgtgcaagaggagcctggggagttcttatagttgttacaacaatcagaccgtactgtcttaaataaggactctgcatttatcaaagatgannnnnntctgctgctctgctcttacagnctttcttatcaagtggcctggattgagaaaaacaactggaatgacagaacctcatcctggattcctttaatatccatggnaagagagtgtntttaaagctaacaanggggcccngtgcngngcntnatgncnntgancctacgacnttnggagncnnangcangtggcctcncanngngcngggattctgccnngannnnntggnnnngcaattntttnttnnaaaa

SEQ ID NO: 29998 - DNA, 436 bp, Homo sapiens
  misc_feature (1)...(436): n = a,t,c or g
nncnnnnnnnnnnnnnnnnnnnnnnnnnnnnnnnnnnnnnnnnnnnnnnnnnnnnnnnnnnnnnnnnnnnnnggcacgagaaccagaggatgtatttccaaaggaagaagaaagtgtnnnnnnnnnnnnnnnnnnnnnnnnnnnnnnnnnnnnnnnnnnnnnnnnnnnnnnnnnnnnnnnnnnnnnnnnnnnnnnnnnnnnnnnnnnnnnnnnnnnnnnnnnnnnnnnnnnnnnnnnnnnnnnnnnnnnnnnnnnnnnnnnnnnnnnnnnnnnnnnnnnnnnnnnnnnnnnnnnnnnnnnnnnnnnnnnnnnnnnnnnngaagaaanangngcctnaagcaaaagggtttggncnggtgcggngctngcncctggaaccnttannnttncgagnttcatacnntntgnnnnntnggcgttntgntgagggtcattc

SEQ ID NO: 29999 - DNA, 485 bp, Homo sapiens
  misc_feature (1)...(485): n = a,t,c or g
cttnnnnnnnnnnnnnnnnnnnnnnnnnnnnnnnnnnnnnnnnnnnnnnnnnnnnnnnnnnnnnnnggcacgaggatgaataattgcactaataacttttctgtacatgttttttgatatacatgtgggctaactgatgttcactgtgtatttgggagtggaattgccacctgattgggtgttctgcattcagtcatcattagtagatagtgccagacaatcgcacggccatataagaacattcaaggctttggtcaatgtttcttttgcattgtctttttcttattggtttataggatttttaaatgtattctagacaggagtaaatgtccctttctgctctatgtcttctctctccattgcctcatgacttttgataagaagtagccaacttcaatgtagtcagtttatcaggtgctttatctggtgagtgcattttatcctgttaagaaagtcatggacgggcgcggnggtcacgcctatag

SEQ ID NO: 30000 - DNA, 466 bp, Homo sapiens
  misc_feature (1)...(466): n = a,t,c or g
tcttttgnccctttganccccnnnnnnnnnnnnnnnnnnnnnnnnnnnnnnnnnnnnnnnnnnnnnnnnnnnnnnnnnnnnnnnnnnggcacgagagtggtaattgttgtactagagatgacagtgtggtgttgagccaggtatgccttgccatgcttccagctttaagggacgctgcctggccaggagcctatgaggtggcctgctgtgcccaatagggatgatggctattaaacgagccagtcagagtccctcttttgagaatgtgaactggaagtataacaagaatgaggcattgaatagtgggagcagaagctcaaagtcaaaaggtctggaggagcaggggacctgtgaggccatgggtgggtggaaggaatgatggggcctttaaggcagaggctgtggggagtggagatgggggacctggttggcagcatatcanaagatagcagctccaggcctggtg

SEQ ID NO: 30001 - DNA, 466 bp, Homo sapiens
  misc_feature (1)...(466): n = a,t,c or g
ttggcccnttnnnnnnnnnnnnnnnnnnnnnnnnnnnnnnnnnnnnnnnnnnnnnnnnnnnnnnnnnnnnnnnnnnnnnnnnnggcacgagagttatttgagtaacaacaaaagtgcttagtgtcgtactttacacatcataggtgttctaatggaagcaaggactggagaagcaaagagtggaatgtgaggagcagacctaggcagacaccttgagactaaaagtcagagctgaagggagtcgctggggccaggacggcatgcaggcctgtaccctgttccctaagttcctgcaagcgtcgggaggtgtgttttcagataccagaaagagccttcagtagattcacaagattaaaattgatgcgcttaatttaatgtatcttggctaaacttgatctgattctaatcnnnnnnnnnnnnnnnnnnnnnnnnnnnnnnnnnnnnnnnnnnnnnnnnnnnnnnnnnn

SEQ ID NO: 30002 - DNA, 460 bp, Homo sapiens
  misc_feature (1)...(460): n = a,t,c or g
ttgnnnnnnnnnnnnnnnnnnnnnnnnnnnnnnnnnnnnnnnnnnnnnnnnnnnnnnnnnnnnnnnnnnnnnnnggcacgagtctgaccccaacgaactgtacgtgaaccacaaagtgtataccaggcatatgacatggatccccctggggaaccaggctgatctctttccagagggcactatccgaccagtgcatgatgatatcctcatcgctcagctgcggcctggccaagaaattgacctgctcatgcactgtgtcaagggcattggcaaagatcatgccaagttttcaccagtggcaacagccagttacaggctcctgccagacatcaccctgcttgagcccgtggaaggggaggcagctgaggagttgagcaggtgcttctcacctggtgttattgaggtgcaggaagtccaaggtaaaaaggtggccanagttgccaacccccggctggatacc

SEQ ID NO: 30003 - DNA, 463 bp, Homo sapiens
  misc_feature (1)...(463): n = a,t,c or g
tttgncccctttgnnnnnnnnnnnnnnnnnnnnnnnnnnnnnnnnnnnnnnnnnnnnnnnnnnnnnnnnnnnnnnnnnnnnnnnggcacgagtcaggaagttcagggaatttgtacgtagggaaataagggttttcttcaggagtgtctaggcagaggagcaggtttgggagagagaatagaggaagatacaaatggagagaataaacgagtaggaatccacatacaatttaggctccttgaattctggaacatactaagcttcactagtgatatgaaagaaattcaaactgcttttaaaaatccagtccttttgcctgaattaccgagacacatagaaagagacaataccattactcttcttggacaaagaattgccatgaacaggctccaatgggcaagaaacatttaacataaagcatcaggtttttacttttgataggcaagaaatattaagtatgata

SEQ ID NO: 30004 - DNA, 463 bp, Homo sapiens
  misc_feature (1)...(463): n = a,t,c or g
tttccccctttgaacccnnnnnnnnnnnnnnnnnnnnnnnnnnnnnnnnnnnnnnnnnnnnnnnnnnnnnnnnnnnnnnnnnnggcacgagctctggatgaagcttatactataaatatttagtacataaaatctaaatgtttatatacacacacataattgaaagcacactttaatgcttcaaaacataatctggccagacctggannnnnnnnnnnnnnnnnnnnnnnnnnnnnnnnnnnnnnnnnnnnnnnnnnnnnnnnnnnnnnnnnnnnnnnnnnnnnnnnnnnnnnnnnnnnnnnnnnnnncatctctgaaataaaataaataaaataaaataataaaataaactatctgaaggcactggagaccaaaccaaagtgggcagaaactcacaggaagtcaacatttagaataaagaaaaagcatttgatgactttagttttagtattttatgcttgag

SEQ ID NO: 30005 - DNA, 458 bp, Homo sapiens
  misc_feature (1)...(458): n = a,t,c or g
anccttnnnnnnnnnnnnnnnnnnnnnnnnnnnnnnnnnnnnnnnnnnnnnnnnnnnnnnnnnnnnnnnnnggcacgagagatgctggaacaaaacttggatgactttctgaaacaaaataaatttagtcccctgccactaaaagtgattcggcccattcttcaacaagtggccactgcactgaaaaaattgaaaagtcttggtttaattcatgctgatctcaagccagagaatattatgttggtggatcctgttcggcagccttacagggttaaagtaatagactttgggtcggccagtcatgtatcaaagactgtttgttcaacatatctacaatctcggtactacagagctccagagattatattggggttgccattttgtgaagccatagacatgtggtcattgggatgtgtgattgcagaattatttcttggatggcccgctctacccaggag

SEQ ID NO: 30006 - DNA, 463 bp, Homo sapiens
  misc_feature (1)...(463): n = a,t,c or g
tttgnnncctttgnaaccnnnnnnnnnnnnnnnnnnnnnnnnnnnnnnnnnnnnnnnnnnnnnnnnnnnnnnnnnnnnnnnnnnnggcacgagggtcttttacttcttgaagaatcaaactttttttcctgtggcagaacagttatgcttttcttttcactaaactcattactatttatttttatttttttttaagcattgagtttactgaactatccagttagccatcctagacatcaaagcccattttgatatttttgttatttatatagtaatactgtactgtgtcataatgatgatagtatttgtgattgtagttgcatttgtaaaattgatcacttctcttgtttcttctagtaactgtatcagagggtgaggtataagctcacagaattcagataaatcatcatgaagttatatgtatttctggttaacactggaactactctaacatttgacactg

SEQ ID NO: 30007 - DNA, 465 bp, Homo sapiens
  misc_feature (1)...(465): n = a,t,c or g
tttgacaccttnnnnnnnnnnnnnnnnnnnnnnnnnnnnnnnnnnnnnnnnnnnnnnnnnnnnnnnnnnnnnnnnnnggcacgagnnnnnnnnnnnnnnnnnnnnnnnnnnnnnnnnnnnnnnnnnnnnnnnnnnnnnnnnnnnnnnnnnnnnnnnnnnnnnnnnnnnnnnnnnnnnnnnnnnnnnnnnnnnnnattattcaacactaaaaagaaatgatccatcaagcaataaaagggcatggaggtaccttaaatgcatgttgctaagtgaaagaannnnnnnnnnnnnnntatnaaaggctacgtattttgggattccaattatattttggatnaaacaaanctatgcagacngtaaattactggggattggananagggatgaataancacnacntataggattttcatggnagngaaantactctntgatactatggtagtaaatacntgccattatacg

SEQ ID NO: 30008 - DNA, 471 bp, Homo sapiens
  misc_feature (1)...(471): n = a,t,c or g
tggttccnnnnnnnnnnnnnnnnnnnnnnnnnnnnnnnnnnnnnnnnnnnnnnnnnnnnnnnnnnnnnnnnnnnnggcacgagcagaaaattgtggcccattcaaaggaaagaaaccaagaggaactgtacctgagaaagatctaatgtcagatctactacacaaagactctaaagtagtgttctaaaagacactcaaagtactgaacatatggagagaattttataaaaagagatacctgaaccaaatggaaatattaataaagaaaaaactttaaaagaaatgaaaaaaattctggaactgaaaagtacaataactgaaacaaaaaaatattcactagagggattcaaaggcatatttgagcaggcagaagagagaatcataggacaataaaagttaaggttgaagaaaagggaacacagcctaaagtacctgtgagacccatcaactaaccacatnacattttgggat

SEQ ID NO: 30009 - DNA, 488 bp, Homo sapiens
  misc_feature (1)...(488): n = a,t,c or g
tntnncccctttgactcngnnnnnnnnnnnnnnnnnnnnnnnnnnnnnnnnnnnnnnnnnnnnnnnnnnnnnnnnnnnnnnnnnnnnnggcacgagcggcacgagnnnnnnnnnnnnnnnnnnnnnnnnnnnnnnnnnnnnnnnnnnnnnnnnnnnnnnnnnnnnnnnnnnnnnnnnnnnnnnnnnnnnnnnnngaaaggtcctggatagggatgttggtagggttgatttcttctaaggcctctctgcttgtagatggctaccctctccttcctgtgtctttacaggatcttccctcnnnnnnnnnnnnnnnnnnnnnnnnnnnnnnnnnnnnnnnnnnnnnnnnnnnnnnnnnnnnnnnnnnnnnnnnnnnnnnnnnnnnnnnnnnnnnnnnnnnnnnnnnnnnnnnnnnnnnnnnnnnnnnnnnnnnnnnnnnnnnnnnnnnnnnnnnnnnnnnnnnnnnnnnnnnnnnnnnnnntcttacagat

SEQ ID NO: 30010 - DNA, 479 bp, Homo sapiens
  misc_feature (1)...(479): n = a,t,c or g
ggannccnttgnnnnnnnnnnnnnnnnnnnnnnnnnnnnnnnnnnnnnnnnnnnnnnnnnnnnnnnnnnnnnnnnnnnnnnnnnnnggcacgagctctgatacttgatttaagagcaaaggacttatttgggaattataattttagatctgactgaaaatatgtagtgtatttcctgagtttgagtaatatatagacattaaagcttacttttttaaagccatgaattctaaacactctttctgaatgctgaaaatgactgctacatttatctctagtatcttgaggctcatttaaatttgaggacccacatgaatcaacattcttgcatgttattaatggtgtttgaagattcagcacaagtttgtttcttccagattattaactgcctcacagggtgatagcaagggatttattcaaatacgtagcactgaagtttttcttggnatctaagtttaaactggggaggcttangatggc

SEQ ID NO: 30011 - DNA, 492 bp, Homo sapiens
  misc_feature (1)...(492): n = a,t,c or g
tctnccccctttgacncccttnnnnnnnnnnnnnnnnnnnnnnnnnnnnnnnnnnnnnnnnnnnnnnnnnnnnnnnnnnnnnnnnnnnnggcacgagggcattgtcacaggattattatgtgggttctcataaaaatttcactccccccaaagccacccaaaggaaaggcagtgaaatggggaggaacacacatttgcctggcatcgcaagagctgccttgtagtcatgggttccagtgatcttggaccgatctcttcacttccctggacctcagtttcttccatacaaagaagttgaactggatcatagaaaagatgctgtccagcttggtaatatcagatagggagcagaagctgtctcttagcacatggccagattccggaacaacgatgatggtctccatgtttgtcctaaaaatgcatctcatctcagtagagattttcttccacctcatttgggtctcaatttaaggaaggaagaaaggaaagaaa

SEQ ID NO: 30012 - DNA, 494 bp, Homo sapiens
  misc_feature (1)...(494): n = a,t,c or g
tcttcccccctnttgactccgnnnnnnnnnnnnnnnnnnnnnnnnnnnnnnnnnnnnnnnnnnnnnnnnnnnnnnnnnnnnnnnnnnnnnggcacgagggattaaatccacagtcagccataataactcctcagacatgttatgctggggccgtgtcgatgtatcagtgccagccagaacctcagcacacccacgtgggtcagatgcagtacaatccagtactgccaggccaacaggcatttttaaacaagtttcagaatggagttttaaatgaaacatatccagctgaattaaataacataaataacactcagactaccacacatcttcagccacttcatcatccgtcagaagccagaccttttcctgatttgacatccagtggattcctgtaattccaagcccaattttgaccctggtttttggattaaattagtttgtgaaggattatggaaaaataaaactgtcactgttggacgtcagcaagttcacat

SEQ ID NO: 30013 - DNA, 484 bp, Homo sapiens
  misc_feature (1)...(484): n = a,t,c or g
nnnnnnnnnnnnnnnnnnnnnnnnnnnnnnnnnnnnnnnnnnnnnnnnnnnnnnnnnnnnnnnnnnnnnnnggcacgagcagatcagcaannnnnnnnnnnnnnnnnnnnnnnnnnnnnnnnnnnnnnnnnnnnnnnnnnnnnnnnnnnnnnnnnnnnnnnnnnnnnnnnnnnnnnnnnnnnnnnnnnnnnnnnnnnnnnnnnnnnnnnnnnnnnngttccccaaccctttcctnnnnnnnnnnnnnnnnnnnnnnnnnnnnnnnnnnnnnnnnnnnnnnnnnnnnnnnnttgctctaaactatggcaaagtagtatttacaaccaagtatcataggatccctaatttttaggaacattctcaaccagcaaaatacccacaannnnnnnnnnnnnnnnnnnnnnnnnnnnnnnnnnnnnnnnnnnnnnnnnnnnnnnnnnnnnnnnnnnnnnnnnnnnnnnnnnnnnnnnnnnnnnnnnnnnnn

SEQ ID NO: 30014 - DNA, 477 bp, Homo sapiens
  misc_feature (1)...(477): n = a,t,c or g
tggantcccttnccntnnnnnnnnnnnnnnnnnnnnnnnnnnnnnnnnnnnnnnnnnnnnnnnnnnnnnnnnnnnnnnnnnnnnnnnggcacnnnnnnnnnnnnnnnnnnnnnnnnnnnnnnnnnnnnnnnnnnnnnnnnnnnnnnnnnnnnnnnnnnnnnnnnnnnnnnnnnnnnnntatttataaataaatgttgaagaatagattatatatcctagtagttataacttataaaatttaaacataggcaactggttttatagcccattattttaacctgttgaataaataagatataaataaatgagttataagttgtaaaattccaacacagtcaactggttttataaggtgtacttgtctgcacggtgttggcaatgcttctttaaaacagtttatnnnnnnnnnnnnnnnnnnnnnnnnnnnnnnnnnnnnnnnnnnnnnnnnnnnnnnnnnnnnnnnnnnnnnnnnnnnnc

SEQ ID NO: 30015 - DNA, 469 bp, Homo sapiens
  misc_feature (1)...(469): n = a,t,c or g
cnnnncnnnnnnnnnnnnnnnnnnnnnnnnnnnnnnnnnnnnnnnnnnnnnnnnnnnnnnnnnnnnnnnnnnnnnnnnnnggcacgagaaaaactgacatatttctggagccttgaccaattcattattataattttgagtaactaatagtgattgacatttatgtagtgcttattattgccaggcactgttctaagtgttttttaaaaataaactaatttagtctttgtaacaaccatgtgagggaaaaactatcctccactttacagatgaggaagctgaagaaaaaataagaaatgtactcaaaagttgcacagtcaatgaaggatgaagctaaattcaaacagacattctggctctagggtctgtgttcttaaccactctgcaaactgcctcctagggtgntacatttaaaaatcattcctaggnctggggncgggggtnangccngggacccagcactttggga

SEQ ID NO: 30016 - DNA, 468 bp, Homo sapiens
  misc_feature (1)...(468): n = a,t,c or g
antcctnnnnnnnnnnnnnnnnnnnnnnnnnnnnnnnnnnnnnnnnnnnnnnnnnnnnnnnnnnnnnnnnnnnnnnnggcacgannnnnnnnnnnnnnnnnnnnnnnnnnnnnnnnnnnnnnnnnnnnnnnnnnnnnnnnnnnnnnnnnnnnnnnnnnnnnnnnnnnnnnnnnnnnnnnnnnnnnnnnnnagaggctgtatttttatactgagtttctgtagttggttgtttttttcttaaagaggatgggttattcactctatccatgtatagcctcatggtaccttctacagggtcctgtgggctctgggagctttgcagaatgaatgcattcaaccatggtctgnnnnnccataacaatgtaaagtaattttttttgactgntgtacagctcataatntaggtgcnctccttaatacaatacnnanttttaaacagggntcttggatatattaaaattggnttca

SEQ ID NO: 30017 - DNA, 460 bp, Homo sapiens
  misc_feature (1)...(460): n = a,t,c or g
tnnnnnnnnnnnnnnnnnnnnnnnnnnnnnnnnnnnnnnnnnnnnnnnnnnnnnnnnnnnnnnnnnnnnnnnggcacgagagctatcatttgtcaggcattggaattatatgatttttgtttttaagcgcttttctggaattggcattttaccaaaggaaaaatgaatttggtaagaattcatttggaaagaaacagatgataatttcaaggtaaaataggactattctgcaaagcactaagattacctgctctctaaagaaatgtagtgtggaagattgtaatcagggcatgggctaagaaaagctcaggacattttcttgatgggtatactttataatagaattctgtttctgttctgggtctagaaaattggaataagttctatttaggaaatattttacaaatacattcagaataacattatgtttaatattttaactcatattatatttaataac

SEQ ID NO: 30018 - DNA, 468 bp, Homo sapiens
  misc_feature (1)...(468): n = a,t,c or g
nnnnnnnnnnnnnnnnnnnnnnnnnnnnnnnnnnnnnnnnnnnnnnnnnnnnnnnnnnnnnnnnnnnnnnnnggcacgagtgcaactctatccccacaggaaggataagtgatacaactttacttaagactcttttgaagaaaaggttggggtgccaaaaacaagaccaaagttgataaactgctggtcttgataatcactaaagcctcttcacctctaaaaaattctctaggttgttttgaggattatgaggcagcagttggtctggtgcacaagctcattaatagtgcgagtcctttgtggcctcaagtgaaggcagctctaagaaagcaaggaaatgctccagtttggacaccaagcggggacaagggcacagtagcatcagcaactctgaatgctccaaaataacactctgtcccaaaccgcaggctgcaggagttcaggagcaacatgcatttttagcagaac

SEQ ID NO: 30019 - DNA, 470 bp, Homo sapiens
  misc_feature (1)...(470): n = a,t,c or g
ttnnnttgnnnccnnnnnnnnnnnnnnnnnnnnnnnnnnnnnnnnnnnnnnnnnnnnnnnnnnnnnnnnnnnnnnnnnnnnnnnnnggcacgagagtaaactcctatgacatatttttatgtgtttaatttaggcatatatcattgtggataatagattcgtagtctgaaatgctctgttgagtttccaagtagccctctgaaatgaatacaggttgagtatttctaatctgaaaatccaaaatcccttgagtgtcatgtttggattaagaatactcaacttgtccattttagggctgagaactgatttgcataacgcgtaaacagcagaatactgaaagaccaggtaccaggttgaatttgtgtatgtggtttgntaccttgagaccagacgttgncagttagcctcttactgcatgtctgcctccctggcttcagatgctgtctcttggttgtgccnagnanttggag

SEQ ID NO: 30020 - DNA, 479 bp, Homo sapiens
  misc_feature (1)...(479): n = a,t,c or g
ttnnnttnnnnncnnnnnnnnnnnnnnnnnnnnnnnnnnnnnnnnnnnnnnnnnnnnnnnnnnnnnnnnnnnnnnnnnnnnnnnnnnggcacgaggaaatacatgaatacagaaaatattttgaaaattatgagaagtttatcattgattatagattttcttatccagcagtttttggttgtgttctgtttttcactgtcagagaagcagaaagtggtcagtggactttagaatgtaggctcttgtaggaggccatatgtttgagagtgctgtccaggtgctttgtgatgtggctgagaatggatgcaggcttgcagggaaaaactaatactgtagatctctagagagcattttaggaaagacttctaagctttaggttccctgaccaaagagtaaaaagtgattcttaatatccatagctatagaggaaagtaaatacacttcccacatcaaatgtagaattaaatatttaggcattt

SEQ ID NO: 30021 - DNA, 494 bp, Homo sapiens
  misc_feature (1)...(494): n = a,t,c or g
tttgaanccctttntttgtannnnnnnnnnnnnnnnnnnnnnnnnnnnnnnnnnnnnnnnnnnnnnnnnnnnnnnnnnnnnnnggcacgagnnnnnnnnnnnnnnnnnnnnnnnnnnnnnnnnnagtcttatatgtttttaatttcaaaaacactcagactttttcaaaaaggctgcagtactttaaagtttttaaaggatttaaagtgcgcaaaggatttctaggaagctctaagtatctaagatcagaatattatatagctactttaagctagctagtgtcaaccagaatgtatattttaaaactgatgtgggaggatgaaaggaaccaagacaagcacatataaattaatagatgaacttaaaatcttccatttgtcagtagacttaattatgttccaaaagctttgagacataaatttaatttcaaggatacatatgtttcaggactatgaatatgtgccaggactaacagagactgctacaggactgac

SEQ ID NO: 30022 - DNA, 486 bp, Homo sapiens
  misc_feature (1)...(486): n = a,t,c or g
tnttgnnnnccntnnnnnnnnnnnnnnnnnnnnnnnnnnnnnnnnnnnnnnnnnnnnnnnnnnnnnnnnnnnnnnnnnnnnnnnggcacgannnnnnnnnnnnnnnnnnnnnnnnnnnnnnnnnnnnnnnnnnnnnnnnnnnnnnnnnnnnnnnnnnntggactccagcaacatgagcctacagtctcatgtaatgtaatcatagatgagtaatcacataggtcctaccacctctgctttaagcaagtcacaggacccacccacaccctcaaggggagaggatcacatagtagtatgaacaccagagggtagggatcatgggacccctttaagagcctgccctacagacacacgactctgctgtatttatcactttcacccctactggaaggagcacagagctctccagaggagccctttaataagtgatggtgaagtggaagccactgatttttcatcaaagggcctatagttgagtttacaata

SEQ ID NO: 30023 - DNA, 484 bp, Homo sapiens
  misc_feature (1)...(484): n = a,t,c or g
nnnnnnnnnnnnnnnnnnnnnnnnnnnnnnnnnnnnnnnnnnnnnnnnnnnnnnnnnnnnnnnnnnnnnnnggcacgaggtaggaagactagtaagttcaactcaaaatgttcaagccattgtaagatggaccatcataattaaatattcgaataaaattaggtgttttaaatttatgtattcaaatactaaacaaaacccaatattgcactaattagaattacctggttatgtgagaactgcatcaatgctacccgagtccaggctctgtgtagacagagccttcctgaccttccaggcatcggtgggccctgcttcctttgacatcttcctaaagcagcattcactcttctctgtcatgtattctcaaatgctggatctcagtcccactaagcaggctctcagctccttgagggctgagactcggcctcctccctttctgaagagaggctctgccgggactttttcttcagaggcagacccg

SEQ ID NO: 30024 - DNA, 474 bp, Homo sapiens
  misc_feature (1)...(474): n = a,t,c or g
tnnnnnnnnnnnnnnnnnnnnnnnnnnnnnnnnnnnnnnnnnnnnnnnnnnnnnnnnnnnnnnnnnnnnnnnggcacgagccaaggagcacaaatcagagagacaggaaagccaattcttataacactgcaaagatcctacagtttttaaaagagaaaagagccctttccctggaggaagtgcagagtaattcatacaagttcttgttttaggggtgatgcccactcaatttactttgacatataatctgcctgagcagctcagcttaatctcctgcatggcagagcagagggcttccctccagccctttaaggcctctgtgtgaaaatctcaaagctttgctgttgccatccaggacatagcagctctgaatgccaccacagggaatataagacagattggctgaacatccaaaagaatacatatgctatttagtcaatgtanagtgctttacaccctacgctaaagcacacc

SEQ ID NO: 30025 - DNA, 480 bp, Homo sapiens
  misc_feature (1)...(480): n = a,t,c or g
gnnnncnnnnnnnnnnnnnnnnnnnnnnnnnnnnnnnnnnnnnnnnnnnnnnnnnnnnnnnnnnnnnnnnnnnnnnnnnggcacgaggtgcacgccagtagtcctcctagctacctaggaggctgaggcaggagattgattgagcctgagaggtggaggctgcagtgannnnnnnnnnnnnnnnnnnnnnnnnnnnnnnnnnnnnnnnnnnnnnnnnnnaaaattggagtaatgtatgattgtagttggtacagattaaatctgtttttcccaggggccagtactgaaaagaccttggtgccaaactacttttcttaagagtgttttccaggtttgttggggtttaacttctagaatctctgactgtgctgtgttgaacttccttccttccaaggctctttagttccttcctcacctnttggtttcccttttcaggcctncttggaacanaccggnacatggnctttnattctanaatga

SEQ ID NO: 30026 - DNA, 423 bp, Homo sapiens
  misc_feature (1)...(423): n = a,t,c or g
ttgannacnnnnnnnnnnnnnnnnnnnnnnnnnnnnnnnnnnnnnnnnnnnnnnnnnnnnnnnnnnnnnnnnnnnnnggcacgaggctggagtagagtagttagtgtgttttctttttgctaggtgcccctttcctggtcctctggctagacagagtaggcttttcttatctgcgcctgttggcatttctgactcactggtttcttcagcaatgagtctgggacatacgtggcaaaaacaaacccaggaaactcacaaccatgtcattccttgggtcttgagggccctagctagtctgccttttctacctttcannnnnnnnttatgatgattttgcnnatantgancaaggtttcnnannnagtanttaagnncgangannnnatgnataaatacataatgatnnattttctnnanaaacct

SEQ ID NO: 30027 - DNA, 485 bp, Homo sapiens
  misc_feature (1)...(485): n = a,t,c or g
nnnnnnnnnnnnnnnnnnnnnnnnnnnnnnnnnnnnnnnnnnnnnnnnnnnnnnnnnnnnnnnnnnnnggcacgaggaagaactttgcgagacaacaggcacttcattcttctgtagctgcagacatgctgctctgtggtttggtgcatggggtacctgtaaattatcagcaccgagaataggctagctctggaaaccaaggtagagaaaaaaaatacatctgggaagtctggttatgtgtaacttgaacttgctcaaagccttcagctgacactgatgctttttaaaaacatggcagtgataaattatttcatcactttgctcaaatacattaatgcaaaacattacaaannnnnnnnnnttgactcancttccagggctaagaaagcattttattggggggtgggatgccngancataagggatgttaangngacncttaaaaggaaggngncaacttggtctggctggnggnnctgaaaaca

SEQ ID NO: 30028 - DNA, 496 bp, Homo sapiens
  misc_feature (1)...(496): n = a,t,c or g
ancnncccctttgatnccctcagnnnnnnnnnnnnnnnnnnnnnnnnnnnnnnnnnnnnnnnnnnnnnnnnnnnnnnnnnnnnnnnnnnnnnggcacgagaatagtggaaagacagaaggaaagatggaagatacaaggaaagttgataaaacaagcctggctggaggatggttatcaaaaacccagccgatagtgttagtgctagaaaagatgaagacacctcttagaaatacaagatgtgatgatctaagaaaggaataagtgtgaaggaagtgggaaacaatctcaatcttgtaacttgagtgttttttgagttcaaggattaaaagtagtgagcttcaggccgaataaacaaaatcaatttttaaaaattttagctagaaattttccattttggtagttgattgcagcaatcatttatttttgtaccttcctttaagggttaaagttccatttcccagtataaaactgatttgactagacatatcagaactg

SEQ ID NO: 30029 - DNA, 489 bp, Homo sapiens
  misc_feature (1)...(489): n = a,t,c or g
tntgannccttagnnnnnnnnnnnnnnnnnnnnnnnnnnnnnnnnnnnnnnnnnnnnnnnnnnnnnnnnnnnnnnnnnnnnnggcacgagaaaattttaggagtatttgcatttcaaaggaattgcatgccctattttgttcaaaaataaagttcaaatgtgaaaaataagtatttggcagccgactaatggtgagtgtagctgtgagaggtattgcttccatagctcacggcttagaaaatcatggtttgcagcttcctctgattaacaggaaagagaaggaagaagtttttctacttggtttctttaaatacagctataccttaacagcagatttagctaatttagtcagtttattcatctacatttagagttccatgccaattcccaggaccaggtatagaaattttctcagtcttaacaaatctaagagtncngatttttttttaaaaaccaatctggccggccccagggnttacnctgnaatcc

SEQ ID NO: 30030 - DNA, 488 bp, Homo sapiens
  misc_feature (1)...(488): n = a,t,c or g
agctatttgnnnnnnnnnnnnnnnnnnnnnnnnnnnnnnnnnnnnnnnnnnnnnnnnnnnnnnnnnnnnggcacgaggacttatgggggtcttttcagtgtaaacccagaggaaatctaagtttccaagatttccttttctgtctcttttttgtggctgtgatagttttgtgtccgtaagtgagccactagtgagagttgaaaagagggaaccacaccttttaggaggtggaagtcagggcagagatagaaaataagagatagtgttttgtctggaaggatcgctcatggctcagatttttgtaggctttgcaaatcctccattctgtcccagcaggtttccgatcatttgagacgagagctcttcagctagaagttgttcccaggaagacaccaaacacttgtcttatttccaaattctgtgaatctggtatttggtctctggtgctgnacctcctcattgctcactgcttttggaagggtanattg

SEQ ID NO: 30031 - DNA, 504 bp, Homo sapiens
  misc_feature (1)...(504): n = a,t,c or g
tttgacccccttannnnnnnnnnnnnnnnnnnnnnnnnnnnnnnnnnnnnnnnnnnnnnnnnnnnnnnnnnnnnnnnnnnnnnggcacgaggcatatagattttaaagtgatttattgtattttataatactcacttttctcttttagtctgatgacagtaaaacttctgtgagggatcgctttaatgcaagacaattcatgtcttggttacaagatgtggatgataaatttgacaaattaaaggtatgtatgtttggaagtcagtttaaatgaatgcttcccccttcttaaaaaaaaaaaaannnnnnnnnnnnnnnnaggganaaatanttaggaggggaaanactggttagtcatgaatcctcacnntgggccacaattggaaagataaagaccncaagtccnttttaaggactagttgtagtatgaaagaggaaactgccncanaaaatgcagtttctagngggggtcttcatgcttactatccaangacctggcnggta

SEQ ID NO: 30032 - DNA, 355 bp, Homo sapiens
  misc_feature (1)...(355): n = a,t,c or g
nannnnnnnnnnnnnnnnnnnnnnnnnnnnnnnnnnnnnnnnnnnnnnnnnnnnnnnnnnnnnnnnnnnnnnggcacgagaaagaagctgccagacttggtattcacaccattannnnnnnnnnnnnnnnnnnnnnnnnnnnnnnnnnnnnnnnnnnnnnnnnnnnnnnnnnnnnnnnnnnnnnnnnnnnnnnnnnnnnnnnnnnnnnnnnnnnnnnnnnnnnnnnnnnnnnctattcttctatgtttgggttttcatcgtcgagctgatgggcctgtagggtaagagcaaacgttgtaacataatcttctttcttcttggcacnnnnnggtattgngaaatttttttttttttt

SEQ ID NO: 30033 - DNA, 505 bp, Homo sapiens
  misc_feature (1)...(505): n = a,t,c or g
ttnnttnnttntnanatatcccctttgncatccgnnnnnnnnnnnnnnnnnnnnnnnnnnnnnnnnnnnnnnnnnnnnnnnnnnnnnnnnnnnnnnnnnnggcacgagggctcggcgtgggttagttggtgttttgaagggagccacatttgcttgtagcagctggaggctgtctgcatctgccccatatttctttcctttcagcaagagttttaaattcatttaccagtggcaggtgacaagaactgtgctccaccacccactggctcagtaacagctaactcaatttgggaagcnnnnnnntnagcgngtcancatgctggccagcaacccaggccggagaangctgagaacaatgcnctaaagagagccagccccactngggctttgggtatggngaggaggcagagaaagtaccaggaggtttgcattcatgcagagtgggctgccatgggctgcagcaatgacatgatcntgntncngacctngatntcatantnntacc

SEQ ID NO: 30034 - DNA, 477 bp, Homo sapiens
  misc_feature (1)...(477): n = a,t,c or g
ttgaaccttttgaacccnnnnnnnnnnnnnnnnnnnnnnnnnnnnnnnnnnnnnnnnnnnnnnnnnnnnnnnnnnnnnnnnnnnggcacgagggctgattcaatttaatatagcatctgattgaaagcatttgaagttagattactaaatatagtaaaactatatttagttaaataaagttagcctgtcactgttaggaggtggaccttgctttttataacttctttcagagagtgaattgtgtttcaggtagactaaaatggtgaccctagtgaccttcactgtgcctactnnnnnnnctagatctctccatagctgggctgactgggatcagaagatgngggatntcctnatagttgnctnancccacntttattnatgngggntgccccaggtcctncgcantctctctnnttccngaacngtnntcncctnttnttncttangatgnancntcttgcncttaccganatggga

SEQ ID NO: 30035 - DNA, 484 bp, Homo sapiens
  misc_feature (1)...(484): n = a,t,c or g
nnnnnnnnnnnnnnnnnnnnnnnnnnnnnnnnnnnnnnnnnnnnnnnnnnnnnnnnnnnnnnnnnnnnnnggcacgagggctagacttcccagaacgtgactgttctctactcaaattcatctcattttgcttttctttgcaaaatgaaaattctccatttccataagaatagtattgttatagaatacagttgtgttgataaattatagtccaacaaattaaactaaaatagcccaacagaggcatcctaggcctgacatcattgttgtctttctctgtggctttatgccaatttttacacatcttggggatggcttagtttcacatctttactcatctgcgttctaattttggataaccacaaacatttattgatgggttatccactcagttcagcaacaatcatctactctttcccagaagtgtgttagacactgctttgacataggattaaataatcttgcacttaccagagatgagaag

SEQ ID NO: 30036 - DNA, 485 bp, Homo sapiens
  misc_feature (1)...(485): n = a,t,c or g
annnnnnnnnnnnnnnnnnnnnnnnnnnnnnnnnnnnnnnnnnnnnnnnnnnnnnnnnnnnnnnnnnnnnnggcacgagaaagaaataatgataaaaataaattagttgcctgacctaatgctttaaagtttgcagattgagtaatgtctttttccgacagtaaatttagttaacagttatttgtaaaataattaaaatttcaagtaacacatgctcattttgcttaactaagtttgtgggtttattgttgaaaataaagatcaaannnnnnnnnnnnnnnnnnnnnnnnnnnnnnnnnnnnnnnnnnnnnnnnnnnnnnnnnnnnnnnnnnnnnnnnnnnnnnnnnnnnnnnnnnnnnnnnnnnnnnnnnnnnnnnnnnnnnnnnnnnnnnnnnnnnnnnnnnnnnnnnnnnnnnnnnnnnnnnnnnnnnnnnnnnnnnnnnnnnnnnnnnnnnnnnnnnnnnnnnnnnnnnnnnnnnnnnnnn

SEQ ID NO: 30037 - DNA, 474 bp, Homo sapiens
  misc_feature (1)...(474): n = a,t,c or g
ttggganccnnnnnnnnnnnnnnnnnnnnnnnnnnnnnnnnnnnnnnnnnnnnnnnnnnnnnnnnnnnnnnnnnnnggcacgagaggaattcgtttatgtgattgtgggattagggagcagccagtctgaaatttgtagtgcaagtcagcaggctgaaaacttccagtgagaagataccgctgtagtcttgagacagaatttcttcttcctcagggaaacctcagttttgttcttaaggccttcnnnnnnnnnnnnnnnnnnnnnnnnnnnnnnnnnnnnnnnnnnnnnnnnnnnnnnnnnnnnnnnnnnnnnnnnnnnnnnnnnnnnnnnnnnnnnnnnnnnnnnnnnnnttactgttgattgaataagcacttcctatagtctagccaagttgacccataaaatgaaaccatctaagagccacagccactcaaacacactgcaggattttaagcagaggagtgccataaggg

SEQ ID NO: 30038 - DNA, 479 bp, Homo sapiens
  misc_feature (1)...(479): n = a,t,c or g
nnnnnnnnnnnnnnnnnnnnnnnnnnnnnnnnnnnnnnnnnnnnnnnnnnnnnnnnnnnnnnnnnnnnnnnnggcacgagcagacacacaaagaggcaggaaaacaggatccataatgcggagaaaaatcgatccattgaaactgacccagagttgacaaagatgttagaattagcagannnnnnnnnnnnnnnnnnnnnnnnnnnnnncggccccttacatctttatttgggtgaaattccactaaagcaaatgccgtggaagtctcaaggtgggaaactcacaaaaggaatccatgaatgagcctcaagtgttctgtggcgcaaagctgcctctcccagttctcaagtctcatcgcaattccaaggagtgatggaatgttcatccagccaaatccaaggagctgtgtcaggtgcgatgtgtgccacttctggccaagacaggataacagggactgaatataccctcctgcttgaaac

SEQ ID NO: 30039 - DNA, 498 bp, Homo sapiens
  misc_feature (1)...(498): n = a,t,c or g
anttgnnncctnnnnnnnnnnnnnnnnnnnnnnnnnnnnnnnnnnnnnnnnnnnnnnnnnnnnnnnnnnnnnnnnnnnnnnnggcacgaggagagttggagccaaagcaactttaacctaattcgaaggactggattggtgggatcaattggaaagttcctgaggcaggaatgttcctggaggtatcaggtgattagagaaagagagcaagcaagctgtgggacatgaggtgaaattggagcatggagaataacctgtagggctctgtatgcaactagaggggtgctggcttttgcaatggttttatttattgatttatttttaattttctgacaagctaattaagttatatattgtatatcataaaatttacccatttcaagtatatccttcaatggacaaaatgtactgtatccatagnnnnnnnnnnnnnnnnnnnnnnnnnnnnnnnnnnnnnnnnnnnnnnnnnnnnnnnnnnnnnnnnnnnnnnnnngaggg

SEQ ID NO: 30040 - DNA, 487 bp, Homo sapiens
  misc_feature (1)...(487): n = a,t,c or g
antccanaatntgantcctttnnnnnnnnnnnnnnnnnnnnnnnnnnnnnnnnnnnnnnnnnnnnnnnnnnnnnnnnnnnnnnnnnnnnnggcacgagggcaagtatcgcaaaagagagagccaggcaagctgtatcacagtgtgtcacccaggttcagtgacagggaagcagaggaaattgttgataaaaagtaacaaggttctagaagaccatgtcagagaatattgctgtggctgtttttgaaaaatacagtctgccaccctggtgtcctagtagtcatgccctttgccattttctactgtatcatccccttggttatgattgagacctgtgagttgcttcccagcattagaaaatggcaaaggtggtgtaatgtanctgcacnatnatgtacncttgtatntgactccatcttgctagcaaactngctctangctgtcnttggntcantgaantgnncangttnatnngnctnntnggtcatg

SEQ ID NO: 30041 - DNA, 352 bp, Homo sapiens
  misc_feature (1)...(352): n = a,t,c or g
ccnnnnnnnnnnnnnnnnnnnnnnnnnnnnnnnnnnnnnnnnnnnnnnnnnnnnnnnnnnnnnnnnnnnnnnnggcacgagcggcacgagggaaggcttcccagagggacatgatggctcagctagacctctttggcttttggtactacttgtggcacagggtgttcaggtcggggaaccatgatagggttgcagaggagttcagaggccatggaggagtcagttctcaaaaaatcaaatgataccctcctcctgtctacattttcctgagaggattgaaacctgtgttctctctgccagctnnnnnnnggtaatgcctaaaangagacangcnctggtggagttnaagatg

SEQ ID NO: 30042 - DNA, 495 bp, Homo sapiens
  misc_feature (1)...(495): n = a,t,c or g
ctttgaccccctannnnnnnnnnnnnnnnnnnnnnnnnnnnnnnnnnnnnnnnnnnnnnnnnnnnnnnnnnnnnnnnnnnnnnggcacgagggaagctgtttatgtggtaaaagattatttatcccttaggtctgtatttcctagatggctagagcaagaggagcagacatcacatttcgtgtttaggaatgctcttcagcccctccctgctcatgattcagtatttgtcatttagtgcacagctaatctttttcatgaggcttttcctgtccattcattcctgtacctgatttagtattttattatttcagcaagattttaagctttttgaggatggaaactgtcttacnnnnnnnnnnattgnntatactttangggagtggncncantgnctnctgggncctnccacnctcntgaggcntggnctgcctgangcctttgcnctanctgctcggccctctgcttaaaatgctcttctntcnnacatccntaca

SEQ ID NO: 30043 - DNA, 489 bp, Homo sapiens
  misc_feature (1)...(489): n = a,t,c or g
nnnnnnnnnnnnnnnnnnnnnnnnnnnnnnnnnnnnnnnnnnnnnnnnnnnnnnnnnnnnnnnnnnnnnnnggcacgaggctgctcttcccgccggcggaggccctgcaggtgggcatagtggaccaggtggtcccggaggagcaggtgcagagcactgcgctgtcagcgatagcccagtggatggccattccagaccatgctcgacagctgaccaaggccatgatgcgaaaggccacggccagccgcctggtcacgcagcgcgatgcggacgtgcagaacttcgtcagcttcatctccaaagactccatccagaagtccctgcagatgtacttagagaggctcaaagaagaaaaaggctaacgattgggctgcacaggcttacggcacacgtgcccctgtgggtcccagggaggcttaaacaaggtatttttcaacttaaaaaaaanaaaaaaaaaannatntttaattancgccnnangcttattct

SEQ ID NO: 30044 - DNA, 492 bp, Homo sapiens
  misc_feature (1)...(492): n = a,t,c or g
ctntganncccttnnnnnnnnnnnnnnnnnnnnnnnnnnnnnnnnnnnnnnnnnnnnnnnnnnnnnnnnnnnnnnnnnnnnnnnggcacgagccaggagacaagtaaaagggactcttcctctttactccaagagccgaattgacatctccatagtaaacattggcaggattcatttgggacccaggtcctcctggtcaaagcccctgctcactgccttctgctgtgggatttgggaaatggggtagctggtccctactgcaggtgcccctggattgctgaagccctgtaagatctccaaggatggccagggcccccacaggcacaaatgtgggtaggctaaggaggagaaacagggagggggaactgcatgaatggaggcttggaggccaggactgcttcgggaagactgtatgggagatgcagcttgagacaaggttgcgggggtgaaccagagccatttcatatagggcttcaagacttgaagaccagg

SEQ ID NO: 30045 - DNA, 477 bp, Homo sapiens
  misc_feature (1)...(477): n = a,t,c or g
ttgnatccctttgaatnnnnnnnnnnnnnnnnnnnnnnnnnnnnnnnnnnnnnnnnnnnnnnnnnnnnnnnnnnnnnnnnnnnnnnggcacgagatcagttagctcagaagccacctggaagacccagtgtttccatctctggaatatctgttttatgctaaatggatttaggaagactgtttttcttttaagggggaaacaaggtagagaaaaggacgaagaagtgtaagtcccgctgattctcgggggtaaggctcggatggcaaggacgcgttctgcctgggcatgtaggggaggtgtttttgccatcaccagtttctcaggctggggagcacagaggggaggaggannnnnnnnnnnnnagntgttnccacctgcacatgaacacattcatgacacacnaaactggctggaagganatannaccctnggntncanatnncctccttantncnnccannnnnananggagggat

SEQ ID NO: 30046 - DNA, 474 bp, Homo sapiens
  misc_feature (1)...(474): n = a,t,c or g
ttgatccctnnnnnnnnnnnnnnnnnnnnnnnnnnnnnnnnnnnnnnnnnnnnnnnnnnnnnnnnnnnnnnnnnggcacgaggcggaacctcgcctggagccaggcgtgcccttgagtccaggcacaccaggaaaggtctttccaaaacaactgacctgggtgtgcttttatcctgcctcgtcctctcccctcagcctggctttggtccctcaccaatatctcgggtcaattttgcaggtccaagatagccactctaccagctacccatccctcctcagccacctgacctccatgtacctgaacgccccggcgctcgctctgctgtagccaggatgcagctcccaggccctggtctgcgctcatttatcctctggcttcctcactgcctgtgacttcacctgntnaacctacgtacgctncaagctgaggaggacaccctaccttggnggagaccgactnatcttacaccggaa

SEQ ID NO: 30047 - DNA, 190 bp, Homo sapiens
  misc_feature (1)...(190): n = a,t,c or g
tttgnnncctttggnnnacnnnnnnnnnnnnnnnnnnnnnnnnnnnnnnnnnnnnnnnnnnnnnnnnnnnnnnnnnnnnnnnnnnnnnggcacgagaactggacatggccaaagaagtacctaaagatgtaagaaagaatggtaacaaaagagcttagaattcattccagatacagaaaaaaaaaaaaaa

SEQ ID NO: 30048 - DNA, 472 bp, Homo sapiens
  misc_feature (1)...(472): n = a,t,c or g
gnnnnnnnnnnnnnnnnnnnnnnnnnnnnnnnnnnnnnnnnnnnnnnnnnnnnnnnnnnnnnnnnnnggcacgagggaccatatagatggaaacacagcattaagggtaaaacactctctctctgctctgtctggtgttcagggcccagcatgggctgtatgtcctacacttcgtttcaggctcatcttcaggtgacaccagccttctcggagcctctgtccacatcccacctgtcactacctctgccctaacttcaccttcagtggtcactgccaggacccctccccaaatctaaatgaggtccccctgcatttgccctcattgcaccttctacttttgcttcatggcatttagagtttggaattttttatcgataggatttttagtactctctctctcctctactagactataaactccttgaaggcaaagacgacacctgtccctcagttccagcagccctacactgcg

SEQ ID NO: 30049 - DNA, 441 bp, Homo sapiens
  misc_feature (1)...(441): n = a,t,c or g
nnnnnnnnnnnnnnnnnnnnnnnnnnnnnnnnnnnnnnnnnnnnnnnnnnnnnnnnnnnnnnnnnnnnggcacgagcatattggcttccttaattgaattatacaaataattgcctaagctctctactttattcaagtaagttagcctggctttaaaaaatgtgcnnnnnnnnnnnnnnnnnnnnnnnnnnnnnnnnnnnnnnnnnnnnnnnnnnnnnnnnnnnnnnnnnnnnnnnnnnnnnnnnnnnnnnnnnnnnnnnnnnnnnnnnnnnnnnnnnnnnnnnnnnnnnnnnnnnnnnnnnnnnnnnnnnnnnnnnnnnnnnnnnnnnnnnnnnnnnnnnnnnnnnnnnnnnnnnnnnnnnnnnnnnntgaacctggganggngaaggttgccgngagccannatcatgccattcattccacctggcacanancgagact

SEQ ID NO: 30050 - DNA, 467 bp, Homo sapiens
  misc_feature (1)...(467): n = a,t,c or g
agtnnnnnnnnnnnnnnnnnnnnnnnnnnnnnnnnnnnnnnnnnnnnnnnnnnnnnnnnnnnnnnnnnggcacgaggaaaaaccgaccgagctcaggaagcctaatccaggtggtaaccacagaaggaaggacggaactcaccccagcatatttttaggcctcatctcagtgcctatgaggggcctgccagaaaagtcactaacctgtctcagtgtggccttgtccagccttgtgttttctgtaacccctgtttgtggtacgagataatgagtcctatttttctctcacataatatgcatttgctctcctaggacagtgtaatacatttatgtgaagtaaagacatgcgagactggtggcctgcaaatagcatccgtcaatctgtgttaactgcatagggagggctctgcatagcacctgctatagcggtgcatgttggatcgcttttgngactgntatntgtcttg

SEQ ID NO: 30051 - DNA, 494 bp, Homo sapiens
  misc_feature (1)...(494): n = a,t,c or g
tttgaancnaatnnnnnnnnnnnnnnnnnnnnnnnnnnnnnnnnnnnnnnnnnnnnnnnnnnnnnnnnnnnnnnnnnnnggcacgagatggaagaagtattcaatttatataataaatggctaacttaacggttgaatcactttcatacatggatgaaacgggtttaacacaggaaccacatgaatcttctgtgggccaagagatgttccttaatccttgtagaatattccttaatccttgtagaacctgttttctatattgaactagctttggtacagtagagttaacttactttccatttatccactgccaatataaagaggaaacaggggttagggaaaaatgacttcattccagaggcttctcagagttcaacatatgctataatttagaattttcttatgaatccactctacttgggtagaaaatattttatctctagtgattgcatattatttccatatcatagtatttcatagtattatatttgata

SEQ ID NO: 30052 - DNA, 501 bp, Homo sapiens
  misc_feature (1)...(501): n = a,t,c or g
tnnnnntttganntttgaanccattnnnnnnnnnnnnnnnnnnnnnnnnnnnnnnnnnnnnnnnnnnnnnnnnnnnnnnnnnnnnnnnnnnnnggcacgagaccctggttattttattatccttggttattttcacatttcagtatgatcctgagcctctgagcaaagggtactgcaaggatgtttgcttaacagacagcctcggaagtcggagagtaatgtctccattaagatagacagcacgggagagatctggagacaaggctctctcctttctattctccggatgagattggcttacattctggtataacagataattaatttctcnnnnnnnnnnnnnnnnnnnnnnnnnnnnnnnnnnnnnnnnatcgctgttgctcttactcaggcaaggcagaggtgcgagtagcccataaaagtttantctctcctaatttgggggtcctntcccatgatgcanacctaatgcanacgcaggtaacttttgactcttaacag

SEQ ID NO: 30053 - DNA, 519 bp, Homo sapiens
  misc_feature (1)...(519): n = a,t,c or g
tatnntatnttgaaancatacnctttnnnnnnnnnnnnnnnnnnnnnnnnnnnnnnnnnnnnnnnnnnnnnnnnnnnnnnnnnnnnnnnggcacgnnnnnnnnnnnnnnnnnnnnnnnnnnnnnnnnnnnnnnnnnnnnnnntcagcatnnnnnnnnnnnnnnnnnnnnnnnnnnnnnnnnnnnnnnnnnnnnnnnnnnnnnnnnnnnnaattctgttttatttaatgtgtggtagaaccaaaattgagccaagcagtctgactctggagtttgtacccttaattacctccttaaactacctctgagaatattgtgctcctggctccagccttgctttctcgcactgcagctcataaggacgtgggtttgggcctctactgtnnnggatcttaaggaggncaggaancagcaccatttttctttgacgnatttnctgctggcttnttncatagtcttganttgaattcagtaanatttactattttaaagcccaatnaatggtgnactnanngtgaaat

SEQ ID NO: 30054 - DNA, 425 bp, Homo sapiens
  misc_feature (1)...(425): n = a,t,c or g
ttannnnnncccttgagaccntnnnnnnnnnnnnnnnnnnnnnnnnnnnnnnnnnnnnnnnnnnnnnnnnnnnnnnnnnnnnnnnnnnnnnnnnggcacgagaagccagtcctgggccccgcacccctcaccgagctgggcctggtgaggttcccggtccatgctgccttggtctggggtcccgagaagaacaagatctacttcttccgaggcagggactactggcgtttccaccccagcacccggcgtgtagacagtcccgtgccccgcagggccactgactggagaggggtgccctctgagatcgacgctgccttccaggatgctgatggctatgcctacttcctgcgcgnnnnnnnnnnncnnnaagttngaccctgtgaaagtnaannctctgnagggcnttcccctntngnnngggctga

SEQ ID NO: 30055 - DNA, 472 bp, Homo sapiens
  misc_feature (1)...(472): n = a,t,c or g
attngattccttnnnnnnnnnnnnnnnnnnnnnnnnnnnnnnnnnnnnnnnnnnnnnnnnnnnnnnnnnnnnnnnnnnnnnnggcacgagtgggcacacactactggtttaataacaaacagaggaaaaacaagcagcctaccattagaaataaaatgaagtttgcagatttttaaaaaggaaagacttgttattgaagttcaaaactgtttacatgccttctagaaatttagtcacaccaaattggcaagaactgaaaatcaaaattttgaatctcaagtgagggcaagatagggaaatcagagagcatcactgccccgttagagatcctggaactaggaaaggatgatactgtgatttcactgctcaaggaaacataaaggacatntcctacccaatgagtgggtctccagngntatgnntgtgtcncagggtnaacagttgtcaancattagnagcannganatggtga

SEQ ID NO: 30056 - DNA, 511 bp, Homo sapiens
  misc_feature (1)...(511): n = a,t,c or g
ttnnaattnaaanntnngaantntaattccctttgcaacatnnnnnnnnnnnnnnnnnnnnnnnnnnnnnnnnnnnnnnnnnnnnnnnnnnnnnnnnnnggcacgagcggcacgagcacttttctagttaactttttccatatccctcttgacattcaaaacagttacttaagattcagttttcccactttttggtaatatatatatttttgtgaattatactttgttgtttttaaaaagaaaatcagttgattaagttaataagttgatgttttctaaggccctttttcctagtggtgtcatttttgaatgcctcataaattaatgattctgaagcttatgtttcttattctctgtttgcttttgaacgtatgtgctcttataaagtggacttctgaaaaatgaatgtaaaagacactggtgtatctcagaaggggatggtgttgtcacaaactgtggttaatccaatcaatttaaatgtttactatagaccaaaaggagagattattaa

SEQ ID NO: 30057 - DNA, 508 bp, Homo sapiens
  misc_feature (1)...(508): n = a,t,c or g
aatanntgaacaagcagaacccnttggaaacatnnnnnnnnnnnnnnnnnnnnnnnnnnnnnnnnnnnnnnnnnnnnnnnnnnnnnnnnnnggcacgagggtatttttctagacttcttaatttcagaaaacagtatttcctctttaaaatattagcgtttaatagaatatcccagatattctgtcttatcagtgtaaaatgtggaagacatatttttacccccacaatatgaagttatacattcattttgtatgaattagatccagtgtaatttatttgcttagcaaactgtgattggtcctaggtcatagtggagttggagttcaaactcctcgggataataacagtaattggttttaattcaggttttactcattctttatttctataggtttctttgttttttagcctaaatataaaactttacatatattaatgntcaattaaatgnaattganttgagactattcttcagtttttgaatccttgtgaatcaggatttcaatc

SEQ ID NO: 30058 - DNA, 342 bp, Homo sapiens
  misc_feature (1)...(342): n = a,t,c or g
atttgnanccgtnnnnnnnnnnnnnnnnnnnnnnnnnnnnnnnnnnnnnnnnnnnnnnnnnnnnnnnnnnnnnnnnnnnnnnnggcacgagagtcccatcacatcatattattatatttattcatatatataggtatatataattttcacttttttgataatgtctactacattaatgagatagcatatttccttagaaagacaatatgtaacatatagtgtaatgaggcannnnnnnnncanctatgnngatagcgtatnnncttataangacnntntgnnncatatngngnannnggnnnatgnnnnttnctanncagncttgnnnnnttgnctnttacg

SEQ ID NO: 30059 - DNA, 501 bp, Homo sapiens
  misc_feature (1)...(501): n = a,t,c or g
tnnnnntttaaattgaatcctaannnnnnnnnnnnnnnnnnnnnnnnnnnnnnnnnnnnnnnnnnnnnnnnnnnnnnnnnnnnnnnnnnnnggcacgaggcaccatgagcttcaataccctggtgctctcaacctacttgactaaagaagaaggtggaaggaagatcgacatctaactctccacgttcagctatgaaacagatcggaaacattctcgggcattcatttacacctgttctctctgcttctcagttcatccagaacaaatacaatactctgattcaccccagactctaatcttacatttgctgaaacaaaactcccctcatctccacctatgaaacaaagggagccatgggaagattttctatttacacagaataagtcaagaagtccatatgccttctaaaatctttcttaagtctagtacaaatgttatccttccctttttactacttcgcaccactgtcttcatttctgtctctttactgtcctctatgc

SEQ ID NO: 30060 - DNA, 494 bp, Homo sapiens
  misc_feature (1)...(494): n = a,t,c or g
tggaatccgtnnnnnnnnnnnnnnnnnnnnnnnnnnnnnnnnnnnnnnnnnnnnnnnnnnnnnnnnnnnnnnnnnnnnnnnggcacgaggatgttttgagagaccacattcacttaacttttactaatattactgtaattgttctattactgttcnnnnnnnnnnnnnnnnnnnnnnnnnnnnnnnnnnnnnnnnnnnnnnnnnnnnnngaaaaaaatacacctcagtactatctgcagttttaggcgtcatctgagggtattggaactatgttctgaggataaggggtgactactgtaatttaattgttcaaggaagaaagtgtacctggtctttcaaacccagtatagcacactttgtagcatcctgttttgcaactctcctgttctgtagattctgtcaattagaaatgcttccacttggacttctgcttantctttcactccctcatgtagacattctccatactgctgccagagagagctttctnaatg

SEQ ID NO: 30061 - DNA, 484 bp, Homo sapiens
  misc_feature (1)...(484): n = a,t,c or g
nnnnnnnnnnnnnnnnnnnnnnnnnnnnnnnnnnnnnnnnnnnnnnnnnnnnnnnnnnnnnnnnnnnnnnggcacgagaaaatatttatgataactaaaatgtgatagctgatacattactgtggaaagctgtttgaatctttctctagagctttctaagactatcatggaatgctttctgtctagatgatttcttctaagcctgagattttcgggaaaatgattgcaaatttactgttttagtgactgccatatgtcaatttgttgtagaatttaaatgtgcctgattcatctctccctgctgaaaatgaagccactggccctggctttgttcctccacctcttgctccagtcagaggtccattgtttccagtggatgcaagaggcccattcttgagaagaggacctcctttccccccacctcctccaggagccatgtttggagcttctcgagattattttccaccaggggatttcccaggtc

SEQ ID NO: 30062 - DNA, 401 bp, Homo sapiens
  misc_feature (1)...(401): n = a,t,c or g
gnnnccnaaancttnnnnnnnnnnnnnnnnnnnnnnnnnnnnnnnnnnnnnnnnnnnnnnnnnnnnnnnnnnnnnnnnnnggcacgaggcagaggcgagagacgccggcggggcgcgggcgcggcggccccggaggatgctgctgagccccggcactgcctggctgcgagcacatgatggcgatacgggagctcaaagtgtgccttctcggggacactggggttgggaaatcaagcatcgtgtgtcgatttgtccaggatcactttgaccacaacatcagccctactattggggcatcttttatgaccaaaactgtgccttgtggaaatgaacttcacaagttcctcatctgggacactgctggtcannnnnnnnttcattcattggctnccatgtactat

SEQ ID NO: 30063 - DNA, 500 bp, Homo sapiens
  misc_feature (1)...(500): n = a,t,c or g
tatttgaatccctttcngaanccccntcnnnnnnnnnnnnnnnnnnnnnnnnnnnnnnnnnnnnnnnnnnnnnnnnnnnnnnnnnnnnnnnnnnnnggcacgaggctcggctggctgttgctgttgcctgtaatattctgactctcaggcaaccatctcgctcaccccttcacctcctccccatctttggtcaactgtcttctcaatgagcctctcagtaaccaatgacctgtcacccaggcccacatcctcatctccctaaccctgcttcatttctctccttactgctcagcatcatttataacctcacataatctacttctttgccttgattttgttggtctccccatccagatgatcggcttcctgaaggcatggatttttatctcttgctcactgttccatccccaggacctacaacagttcctggcttgatacatttttgtttgaagaagngaatgaatgaggctaggaaaggagggagngattngctcaaagct

SEQ ID NO: 30064 - DNA, 492 bp, Homo sapiens
  misc_feature (1)...(492): n = a,t,c or g
tttgaancccatttgatancnnnnnnnnnnnnnnnnnnnnnnnnnnnnnnnnnnnnnnnnnnnnnnnnnnnnnnnnnnnnnggcacgagtttatgagaaatctcaatttttaatgttgccaactaaacattgaatgagtcacgtagaataggtctttgggccaaattgtatctccattttatggtctctctgaacattttcagctcttaaattaatttctttcccacagtttctaagaaaaacatatttttctactgggagtataaggatgaaaaagacacaagtcctaggagcttacggtctggtcgccagtggttttctttcttgaacttcctcatctgctgccagttttctttaacctcaccatccaaatttcactctgaccatctcgtacctagaaaacccccattcatgtgctttataagtttcaccaaagccattgctatatcctcccaaggcagtggttttctgctcccagctcctttctctagt

SEQ ID NO: 30065 - DNA, 499 bp, Homo sapiens
  misc_feature (1)...(499): n = a,t,c or g
tatttgaanccccattnngaatcccttcngctatncnnnnnnnnnnnnnnnnnnnnnnnnnnnnnnnnnnnnnnnnnnnnnnnnnnnnnnnnnnnnnggcacgagcggcacgagggcttattttcaatttgttgcatttttaaaaattcttatttattcattgattttttttggtgcttttattttgttgttgtgttagatataaccatatttccatctgtatttgctcactttattaattttggggaggacttaaggggccaaactgttattaatgagttatttgttattaattagcattaaaatagctatttcaaaaatattgatgtacaataactgagtataactatttaatgtgaggtccccaagccaattaaagtgtggtaatataaaaagtatacttctttttattaanaattgttattactctgtggcttccctgtaaataccaatgactgattgcatccaaactagtatcagttatacctaaaaaaatcgg

SEQ ID NO: 30066 - DNA, 315 bp, Homo sapiens
  misc_feature (1)...(315): n = a,t,c or g
cttcccnnnnaccccccannnnnnnnnnnnnnnnnnnnnnnnnnnnnnnnnnnnnnnnnnnnnnnnnnnnnnnnnnnnnnnnnnnnnnggcacgaggaatattcacaattcttacttgtcatagtctgtttatcctctttatcttctatgctgtttttaaaagcaatacaaacagaagctagagtaaccagagttttgtctgacacattcttcttgataaactttatgaggagtggctatattcgactgtacctttagtcacatgcctgcttcttagcacagaggagatgaaaccacccacagctttgnnggggg

SEQ ID NO: 30067 - DNA, 497 bp, Homo sapiens
  misc_feature (1)...(497): n = a,t,c or g
tttncnttccctcccannnnnnnnnnnnnnnnnnnnnnnnnnnnnnnnnnnnnnnnnnnnnnnnnnnnnnnnnnnnnnnnnnnnnggcacgagaacatgggacattttttaaaaagttaccgtcctagagccacagagatatgaaaatacaatttgacagagaatctgaatactttctaatacagcacataattggattttacagtcttcaagaagagctaatttggcttatagttagtattttatgatcaatgtattgaatttagatgagttttccactggatctatatcaaaattgtttgttcagtataacctcagtttttagtattttcagagagtaaaactttaagatttcaaagaggaagaaaaagcttattttgcccaattctgatttttgtagacnggngtccacatccagcaacaggctgcaacaatttagaaactcccattgtagcttaaaactcagagtaaaatccgatcttctgttagcataattt

SEQ ID NO: 30068 - DNA, 499 bp, Homo sapiens
  misc_feature (1)...(499): n = a,t,c or g
tttgncttcccanncnnnnnnnnnnnnnnnnnnnnnnnnnnnnnnnnnnnnnnnnnnnnnnnnnnnnnnnnnnnnnnnnnnnggcacgaggtttagtaatatttctctattgtcagcatcttaggaatcttttggctaatgaggcattataaagtgaatcttcagcaccgactttctgtttcatcttttctaggcggtaaatgactcgtgctaccagaatgatgattctgtcctaaaatccctcgttgagattgcagatactgttccaaagtatttgcgtcctcacttggaagcaactctacagctaagtctaaagttgtgtggagacactagcctcaacaatatgcaacgccagcttgcccttgaagtgatcgtcaccctctctgagactgcagctgctatgttaagaaaacataccaatattgttgcacagactagtaagtcaatggcttcagatagtttatgtgtatngnggccaaatttttggataaattngctg

SEQ ID NO: 30069 - DNA, 500 bp, Homo sapiens
  misc_feature (1)...(500): n = a,t,c or g
cttcctttnccccccannnnnnnnnnnnnnnnnnnnnnnnnnnnnnnnnnnnnnnnnnnnnnnnnnnnnnnnnnnnnnnnnnnnnggcacgagtgaaatcttgtcatttcagacaacgtgaatgtacctagaggacacnnnnnnnnnnnnnnnnnnnnnnnnnnnnnnnnnnnnnnnnnnnnnnnnnnnnnnnnnnnnnnnnnnnnnnnnnnnnnnnnnnnnnnnnnnnnnnnnnnnnnnnacgagaggggagcagggaaaaacgggtagggaaggatgggttaatgggtacaaaaaagttgggaatatgtaacaagaaacataaaaatagttattctctnnnnnnnnnnnnnnnnnnnnnnnnnnnnnnnnnnnnnnnnnnnnnnnnnnnnnnnnnnnnnnnnnnnnnnnnnnnnnnnnnnnnnnnnnnnnnnnnnnnnnnnnnnnnnnnnntacccagtagtgggatttatcggatcatgtggtagttctgtttaaaa

SEQ ID NO: 30070 - DNA, 524 bp, Homo sapiens
  misc_feature (1)...(524): n = a,t,c or g
tnnnnnnnnnnnttganncccttnttnnnncnnnnnnnnnnnnnnnnnnnnnnnnnnnnnnnnnnnnnnnnnnnnnnnnnnnnnnnnnnnnnnnnnnnnnnnnnggcacgagttgatgcaaaaccagaatacgagacagcagatggacacacctatggtgtcctgtggaaatgaacaatttttggataacagttttgagaaagttaaacggagacttgatttagatattgatggtttgcaaaaagaaaactgcccttatgtcataacaagtggaataactgaacaagaaaggcaacatttgccagaaaaaagataccctaagggatctggcttcgttaacaagaataaaatgttaggaactagttccaaagaaagcgaggagttactaaaaagccagatgttagcttttgaagaaatggcgaagagactggaagaacagcacgcccagcaattatcactactcatacttgancaggaaagggaccangaaagactgcaaaagggangaatgnggngggngatcc

SEQ ID NO: 30071 - DNA, 429 bp, Homo sapiens
  misc_feature (1)...(429): n = a,t,c or g
ntttggnnnccnanttgctatncnnnnnnnnnnnnnnnnnnnnnnnnnnnnnnnnnnnnnnnnnnnnnnnnnnnnnnnnnnnnnggcacgagaactggattaggaagtcagggattgtgtgatactatccacacgtcggccaggcctggacttactatccnnnnnnnnnnnnnnnnnnnnnnnnnnnnnnnnnnnnnnnnnnnnnnnnnnnnnnnnnnnnnnnnnnnnnnnnnnnnnnnnnnnnnnnnnnnnnnnnnnnnnnnnnnnnnnnnnnnnnnnnnnnnnnnnnnnnnnnnnnnnnnnnnnnnnnnnnnnnnnnnnnnnnnnnnnnnnnnnnnnnnnnnnnnnnnnnnnnnnnnnnnnnnnnnnnnnnnnnnnnnnnnnnnnnnnnnnnnnnnnnnnnnnnnnnnnnnnnnnnnnnnnnnnnnn

SEQ ID NO: 30072 - DNA, 497 bp, Homo sapiens
  misc_feature (1)...(497): n = a,t,c or g
tnttggannccnatntgaanncccnnnnnnnnnnnnnnnnnnnnnnnnnnnnnnnnnnnnnnnnnnnnnnnnnnnnnnnnnnnnnnnnnnnnnnnggcacgagaaaaatttaaatatatagtcatctattggttgaaaaactcatgtaatgaaaatacatttgtgttaaagcatgtattaatgtaattcagcatgtaaaattttattaatcatagctaatttgtgccaaacactaaaactctatgtgtgttaataaatttaattctcacagtaactcaataacataggtacttattttacggagaaagatacagagccacagagaaaaatgacttggtcacattgcaaaaccagtattaaaacacaagcaactttgacttcagaaataactcttgtctattatagtaaacaccttcttcaaacaaaataaatgattaacaaccattcttagtaaaaatttaacaaaaatggaaacaactgatacttttttttgttat

SEQ ID NO: 30073 - DNA, 492 bp, Homo sapiens
  misc_feature (1)...(492): n = a,t,c or g
tntttgaatcctnnctgaatcccntnnnnnnnnnnnnnnnnnnnnnnnnnnnnnnnnnnnnnnnnnnnnnnnnnnnnnnnnnnnnnnnnnnnnnggcacgagccactgtgcctggccgcctctttaagtcttaaagcttgtgcactctgtattactttatagttcatttaagatagagaaggtactgggtaggtcttactcatcctgaggtattttctatgaaagtgttttttgtttaccatcccagaaatatttgtttatattttggataccaccttaaattttctaactttatggaaatttattaaaaacaatattgctgtgtatgctttaatttttattttatttgacnnnnnnnnnnnnnnnnnnnnnnnnnnnnnnnnnnnnnnnnnnnnnnnnnnnnnnnnnnnnnnnnnnnnnnnnnnnnnnnnnnnnnnnnnnnnnnnnnnnnnnnnnnnnnnnnnnnnnnnnnnnnnnnnnnnnnnnnnnnnn

SEQ ID NO: 30074 - DNA, 511 bp, Homo sapiens
  misc_feature (1)...(511): n = a,t,c or g
tttgaanccncttgntnnnacctccnaatnccaatnnnnnnnnnnnnnnnnnnnnnnnnnnnnnnnnnnnnnnnnnnnnnnnnnnnnnnnnnnnnnnnnnnnggcacgagttttctaacaattaagcctgagggccaggtgcagnnnnnnnnnnnnnnnnnnnnnnnnnnnnnnnnnnnnnnnnnnnnnnnnnnnnnnnnnnnnnnnnnnnnnnnnnnnnnnnnnnnntgnnnnngtcattntnanccannnntnactcttctgtcccnttnncctatcatgancctgnncctgtgccctatctgatncanncnctttcgntcatnagcctnatnntgggncntaacngnatncctatnnttggtaccatggagaattggtagttgtttnttgtagtccanttntagaacctcagcctgtatatatnacntccngcatnttatatatnnnaaacnnnagactntntntatnacctnctgcaacntaaattccttttanngngggtnatttt

SEQ ID NO: 30075 - DNA, 506 bp, Homo sapiens
  misc_feature (1)...(506): n = a,t,c or g
ntntgaanccnannnnnnnnnnnnnnnnnnnnnnnnnnnnnnnnnnnnnnnnnnnnnnnnnnnnnnnnnnnnnnnnnnnnnggcacgagttttttttttttccaactcctatgttcctgtctaatgggttttattgggttttattgggctngtttttagctgggtttattgaccattgaccatttggtgcatgcnnnnntcaaagnggttnaaaggcctgganccaaancanatgacgtgaaaaaggggtttgattgaccctgactggntnttgaaggctaaatttgnancccccgtgagtaaaaaggggggccgactgaatggcaaaacaaggaaccggnctagtagttccagccntgcaaaaacggtgtgggctgcctgggnaggcaaagcccagccagcctcctgatgtgagtcancancgtgagtcagtgntgtggnacaaggccntcaacatcctggntgctttaccaggtgtagttccatggggaaggaggggtgatttt

SEQ ID NO: 30076 - DNA, 530 bp, Homo sapiens
  misc_feature (1)...(530): n = a,t,c or g
tnnnnnnnnnnctttgaancccctttnncnttgaanccantnnnnnnnnnnnnnnnnnnnnnnnnnnnnnnnnnnnnnnnnnnnnnnnnnnnnnnnnnnnnnnnnnnnggcacgagcggcacgaggtgatggtgggcaagccttcctctcacagtcagtataccagcagtggttctgtgtcttcctcaggcagcaaaagccaccatagccattcttcctcctcttcctcatctgcttccacctcagggaagatgaaaagcagtaaatcagaaggttcatcaagttccaagttaagtagcagtatgtattctagccaggggtcttctggatctagccagtccaaaaattcatcccagtctggggggaagccaggctcctctcccataaccaagcatggactgagcagtggctctagcagcaccaanatgaaacctcaaggaaagccatcatcacttatgaatccttctttaagnaaaccaaacatatccccttctcattcaaggccacctggaggctntgacaagcttgct

SEQ ID NO: 30077 - DNA, 504 bp, Homo sapiens
  misc_feature (1)...(504): n = a,t,c or g
ttgannccaannnnnnnnnnnnnnnnnnnnnnnnnnnnnnnnnnnnnnnnnnnnnnnnnnnnnnnnnnnnnnnnnnnnggcacnnnnnnnnnnnnnnnnnnnnnnnnnnnnnnnnnnnnnnnnnnnnnnnnnnnnnnnnnnnnnnnnnnnnnnnnnnnnnnnnnnnnnnnnnnnnnnnnnnnnnnnnnnnnnnnnnnnnnnnnnnnnnnnnnnnnnnnnnnnnnnnnnnnnnnnnnnnnnnnnnnnnnnnnnnnnnnnnnnnnnnnnnnnnnnnnnnntggtggctatttctctttttaaattctctcaggactcctaaaatctcaaaactttgacctagattccctaatctacatttccagctctgaccattttcttgaggtctcttccttctagtacaaatattatagaaaatattctcaaccacatgctcatacattgctaattggtgcagattacttttgtagatagtgaatgttgtctattttatgntggttctcatta

SEQ ID NO: 30078 - DNA, 510 bp, Homo sapiens
  misc_feature (1)...(510): n = a,t,c or g
tnganncccttncctcngannccatttnnnnnnnnnnnnnnnnnnnnnnnnnnnnnnnnnnnnnnnnnnnnnnnnnnnnnnnnnnnnnnnnnnnggcacgagccgacgggcatcatggaccgatctaaagaaaactgcatttcaggacctgttaaggctacagctccagttggaggtccaaaacgtgttctcgtgactcagcaatttccttgtcagaatccattacctgtaaatagtggccaggctcagcgggtcttgtgtccttcaaattcttcccagcgcgttcctttgcaagcacaaaagcttgtctccagtcacaagccggttcagaatcagaagcagaagcaattgcaggcaaccagtgtacctcatcctgtctccaggccactgaataacacccaaaagagcaagcagcccctgccatcggcacctgaaaataatcctgaggaggaactggcatcaaaacagaaaaatgaagaattaaaaaagaggcagtgggctttggaagac

SEQ ID NO: 30079 - DNA, 502 bp, Homo sapiens
  misc_feature (1)...(502): n = a,t,c or g
ttgancccttnctcnganccttgctatgacnnnnnnnnnnnnnnnnnnnnnnnnnnnnnnnnnnnnnnnnnnnnnnnnnnnnnnnnnnggcacgagctcagctatcaactttgaaataagtttaggcaacacctactgaaaacaaaaaccacttactataaaaatatcccccaccagaattgggtcccccatatcatttctacaaaacagttctggagtggatcaaagtctcatcagatcagcttgccccttcttgtttgggcaggttctaggagaagctgctgtaatacaaaaactgaaagatgaaatcgtaaagctagataatgataatgatatttagtggggaaggctacagtatgttttcccataggcatttaaacactcactttttccaacgctttatactttgccctatagcctttgtaattttaactttgatgacagtntaacttaggataacctgaatatgggtattactgttagtcatttgtatttttatcat

SEQ ID NO: 30080 - DNA, 511 bp, Homo sapiens
  misc_feature (1)...(511): n = a,t,c or g
tttgaanccncttnntntnactctaatnccattnnnnnnnnnnnnnnnnnnnnnnnnnnnnnnnnnnnnnnnnnnnnnnnnnnnnnnnnnnnnnnnnnnnggcacgagtctgttgtcatgagaagtaggaaaagacataaaaagtcctaggaaccatttccttggcaaagtctttgatgtggttccaacatctcagacatcccatggtgaacatcccctccaaagtggtaactgtctccttttccctactccatctctaaacacccgtctttgtagctgtggcatccatgacagtgtagacatctcaccatggaattatcctcggagagttccttagtgtagacatctcaccacggtgttatcctaggagagttccttagtgtagacatctcaccacggtgttatcctaggagagttccttantgtanacatctcaccacggtgttatcctaggagagttccttantgtagacatctcaccacggtgttatcctangagagttccttagtg

SEQ ID NO: 30081 - DNA, 507 bp, Homo sapiens
  misc_feature (1)...(507): n = a,t,c or g
atttgaanccnantnnnnnnnnnnnnnnnnnnnnnnnnnnnnnnnnnnnnnnnnnnnnnnnnnnnnnnnnnnnnnnnnnnnggcacgagnnnnnnnnnnnnnnnnnnnnnnnnnnnnnnnnnnnnnnnnnnnnnnnnnnnnnnnnnnnnnnnnnnnnnnnnnnnnnnnnnnnnnnnnnnnnnnnnnnnnnnnnnnnnnnnnnnnnnnnnnnnnnnnnnnnnnnnnnnnnnnnnnnnnnnnnnnnnnnnnnnnnnnnnnnnnnnnnnnnnnnnnnnnnnnnnnnnnnnnnnnnnnnnnnnnnnnnnnnnnnnnnnnnnnnnnnnnnnnnnnnnnnnnnnnnntcctttggtgaattttgaagtgaacctgttctcgacagtttttttccaggtatttcagcattattctcctagacgggttataaactctttaggataggaactagacttatttcagtgtcctgcagttcctagcatgcttccttgctagagctgaccttcctagagt

SEQ ID NO: 30082 - DNA, 497 bp, Homo sapiens
  misc_feature (1)...(497): n = a,t,c or g
nnnnnnnnnnnnnnnnnnnnnnnnnnnnnnnnnnnnnnnnnnnnnnnnnnnnnnnnnnnnnnnnnnnnnnnggcacgagcggcacgagttggcttcaatactgtgccatgcaggcctgtctacagggatgctcatgatacagcagctggttttacccccaacaagtgatccaagagaggcacagagtacaagagagtgatccagtgtctttgaaacctgcagtgtcttttataaattgatttaggaagcaacataccattacttttgctgtattccgtgggacgtgtagaacaaccctggaacagcgtgggagaggtggaggggatttgttccaggcaaagagcaaaattggtcatggattcagtctccatggagtaaatactccaaaggacagaattaaaggggccagtagggagacntgaagtggggagtctggactaagtctagactaagggggtgtgttgcagagaatgctcaccaagttcttttggaatgag

SEQ ID NO: 30083 - DNA, 524 bp, Homo sapiens
  misc_feature (1)...(524): n = a,t,c or g
ttnnnntnnnncnactgaanccctantnnnnnnnnnnnnnnnnnnnnnnnnnnnnnnnnnnnnnnnnnnnnnnnnnnnnnnnnnnnnnnnnnnnnggcacgagcttcttgtcttgatcctaatgcagacattcacctctnnnnnnnnnnnnnnnnnnnnnnnnnnnnnnnnnnnnnnnnnnnnnnnnnnnnnnnnnnnnnnnnnnnnnnnnnnnnnnnnnnnnnnnnnnnnnnnnnnnnnnnnnnnnnnnnnnnnnnnnnnnnnnnnnnnnnnnnnnnnnnnnnnnnnnnnnnnnnnnnnnnnnnnnnnnnnnnnnnnnnnnnnnnnnnnnnnnnnnnnnnnnnnnnnnnnnnnnnnnnnnnnnnnnnnnnnnnnnnnnnnnnnnnnnnnnnnnnnnnnnnnnnnnnnnnnnnnnnnnnnnnnnnnnnnnnnnnnnnnnctctattaaatttttgtggacaaaaataaaattgtcattatttgtttgctctcatggagcactttcagtaatacaatttttttta

SEQ ID NO: 30084 - DNA, 509 bp, Homo sapiens
  misc_feature (1)...(509): n = a,t,c or g
nnttgannccctactnnnnnnnnnnnnnnnnnnnnnnnnnnnnnnnnnnnnnnnnnnnnnnnnnnnnnnnnnnnnnnnnnnnnggcacgagaattaaacaaatcacaataagtcaaggaagttaataagtaaaagaagtaaataccaaaaaaatggactgaaacagttgaaaatgttgccttggggagtggaaaatgaagtgaaagagacagtaggtactgttgttttttgcaataagtctcacagactgtatgactctgtttatgtgaaggtatatataattatatagctatgaaggtatattttaaactatctgaaagtatatgtaattttgataaaaaattaaagctaaattaaaaatagtaaaggatatttgtgaagaaacagttgaaaccaggaaattttgctgtaggacagcaataaaaattcaaggactgcttatgggaattattacctaaaaatagcaaaagtgaaacttgatcaaggttttaaggattcatttggtttgg

SEQ ID NO: 30085 - DNA, 491 bp, Homo sapiens
  misc_feature (1)...(491): n = a,t,c or g
tttgaanccctatttgntatccnnnnnnnnnnnnnnnnnnnnnnnnnnnnnnnnnnnnnnnnnnnnnnnnnnnnnnnnnnnnnggcacgagaaatttacggagctatggcataggctcatgctccctgcacnnnnnnnnatgtggaagttctgagtaagggaggttacctgctcctgattannaatgagcangaaggaacctaggacaatggagaggaggcactgatccagaggtgagaaggagagtatagactcctaatgagagattttcaaacaaacactggaaaaccattggcttgccaccccaccatgtcttcaataacagacaagcctttgatgacaccactggagacaggaagcctccacctgctcaagcctagaacccaggaactctctaggctggatgtccttcaagcacatttttggcttgacaaaagggctgcctcagataactttgatgattttaaaaatgatacttttaaaaacaaaca

SEQ ID NO: 30086 - DNA, 495 bp, Homo sapiens
  misc_feature (1)...(495): n = a,t,c or g
tnttgnnnnccnatttgatncccnnnnnnnnnnnnnnnnnnnnnnnnnnnnnnnnnnnnnnnnnnnnnnnnnnnnnnnnnnnnnnnnnnnnnnnggcacgagggctaatatcccgtcatcaacaagattagggaggtaatggcgacaggagatcctgtaggctatggcaaagactttagatttttctgaagtctctacaaaaatcctcaacaaaatattggcaaattgaatgcaacaatatgtaaaaggataatataaccaaatggagtgtaccctgggaatgcaaggctagttcaattagttcaccatattaacagactaaagaagaacaggccacaccatcatctcaacagatatagacaaatattaagcagccataataaaaactctcagcanattggaacagaagggaatttccttaacctcatgaacagaaaccacatanaaacctacatctaacatcnaacttaagggtgaaaggctgaattccttccc

SEQ ID NO: 30087 - DNA, 528 bp, Homo sapiens
  misc_feature (1)...(528): n = a,t,c or g
tnnnnnnnnnnnatttggattacccannnnnnnnnnnnnnnnnnnnnnnnnnnnnnnnnnnnnnnnnnnnnnnnnnnnnnnnnnnnnnnnnnnnnggcacgaggggagagattattgagagctgaagggactagagaaactttcttgaaaggtggcaggattgagtagcatttgggtagtcagatgaaggaaaaaaacattttagacctggaaatgggaaattgtgaaaagacacggcttgggctatgctattaatattaaacatttctcctctcaggtttctgccccatttgaaaggacttaaatgcttctaaagcatatccttttatgccttacacttatcctgtctgtaggcttttatagtaccttacaaggcatgtcaaagggcaaaattcttttacttgtcttagttttttgtttgtttgtttttgtttgtttttttaatgactgtggaacattcttaatctctgcaacacaaattgcatttttctctgctcatctttgtatttgtgtgtgtgtgtgtgggtg

SEQ ID NO: 30088 - DNA, 526 bp, Homo sapiens
  misc_feature (1)...(526): n = a,t,c or g
nnnnnnnnnnnnnnnnnnnnnnnnnnnnnnnnnnnnnnnnnnnnnnnnnnnnnnnnnnnnnnnnnnnnggcacgagaatatttaataaatacttttcataatactgaatttaacagccacagaatactttgttgtagtttgaaacatatttttttagctaatcctttatgagtggttacttaggttttctttttttgcatttttttctctataaatagatgtggcagacattcttcaggttaaatctttgcacgtaaccatgcttttttccttaggatacattcctggaactagaattggaggccaaaaggcttgccaaactttaagatacctgcttcctattaccaggttatgttggaaatttgtacttctttgctatatatttaaaaatattggctgggtatgatggnnnnnnnnnnnnnnnnnnnnnnnnnnnnnnnnnnnnnnnnnnnnnnnnnnnnnnnnnnnnnnnnnnnnnnnnnnnnnnnnnnnnnnnnnnnnnnnnnnnnnnnnnnnnnnnnnttag

SEQ ID NO: 30089 - DNA, 565 bp, Homo sapiens
  misc_feature (1)...(565): n = a,t,c or g
gnnnnnnnntnnttnnnnnnnntttgtntgccaccgttatgacnnnnnnnnnnnnnnnnnnnnnnnnnnnnnnnnnnnnnnnnnnnnnnnnnnnnnnnnnnggcacgagataccatttgcaataacaatgaaaatgatctagtgtctaggaattaagtatctagaaattaactaagcatattaaagatacttatagataaaatttttaaaactctatgattttctaaannnnnnnnnnnnnnnnnnnnnnnnnnnnnnnnnnnnnnnnnnnnnnnnnnnnnnnnnnnnnnnnnnnnnnnnnnnnnnnnnnnnnnatatcccaaacagaaagtatgtactcattaaataataacgtccatttctctctctctgtnnnnnnnnnnnnnnnnnnnnnnnnnnnnnnnnnnnnnnnnnnnnnnnnnnnnnnnnnnnnnnnnnnnnnnnnnnnnnnnnnnnnnnnnnnnnnnnnnnnnnnnnnnnnnnnnnnnnnnnnnnnnnnnnnnnnnnnnnnnnnnnnnnnnnnnnnnnnnagaattgtattccttttaaggcttaaggctgaata

SEQ ID NO: 30090 - DNA, 531 bp, Homo sapiens
  misc_feature (1)...(531): n = a,t,c or g
anccgtncnnnnnnnnnnnnnnnnnnnnnnnnnnnnnnnnnnnnnnnnnnnnnnnnnnnnnnnnnnnnnnnggcacgaggaggaagatcattggaaactacatcctataaccagactggagaaccagcagatgatgaagcggccagtctcagccgtgggatataagagaccattgagccagcacgcaagaatgtccatgatgattcgtccagaggcccgatatagggcagaaaacattgtgctgttagagctggacatgcccagccggaccaccagagactatgagggtccagccattgcccccaaggtccaggctgcattggatgcggctctgcaggatgaagatgagatacaggtggatgcatcatcatttgaaagcactgcaaataagaaatccaaggccaggcctaaaagtggaaagaagtcgggatcctcctcctcttcctcaggaacccctgcatctcagctttatccacagtctcgggggctggttccaaagtaaagccagcttctcctctccagggcggaaac

SEQ ID NO: 30091 - DNA, 530 bp, Homo sapiens
  misc_feature (1)...(530): n = a,t,c or g
ntttgaanccttntnnnnnnnnnnnnnnnnnnnnnnnnnnnnnnnnnnnnnnnnnnnnnnnnnnnnnnnnnnnnnnnnnnnnnggcacgaggtcaaatctaaaagtgtctgtgaaatacatagatagctttattcgcgtcctttcatattaggatatgcaaagtggttcctcatggtgctcacttcagtagcatatatactaaaattataataatacccagaagattagtatggcccttgtgcaaggatgacacacaaatttgtaaagcattccatattaccatattttaccccccaaaattacaaagtgacacaaggaaacatttgcaggtgctgaatatgtttattacttagactgtggtgatgttattatgagtatttgcatatattcaaattcataaaattgtgaaaaataagtatatgcaactttttgtatttcaattatgcctcagtaaagctgtaaatgtaaaaatgtgcttctcaggccggcatgatggattacaggtgtgaccaccacgcctggcccagtc

SEQ ID NO: 30092 - DNA, 494 bp, Homo sapiens
  misc_feature (1)...(494): n = a,t,c or g
ntttgaannccnatttgaanccccatnnnnnnnnnnnnnnnnnnnnnnnnnnnnnnnnnnnnnnnnnnnnnnnnnnnnnnnnnnnnnnnnnnnnnggcacgaggcagtgaattcacagttggtttgtgttctggcccagattgactaggggagagactggagtgtctctctgggtgtgtgagtttccactggggccaggacacgttaggcactgtgtcactctgctcagtgcttgggcctcaccatggcatgctccaaagcaacattgtgtacctgttcccctctcattctttcaagcatcagtgtctccacactgtgctgcctggggttgagggaaggggtggagcaggcagtattgtggccaggacggccaccgtaatgctagctcacacctgaaaaccatagctgccaagacaagcacagcacagggatatgcccaagacccatggaactatagcctgcctgctgctgaggtttatttgtggctcaagtcc

SEQ ID NO: 30093 - DNA, 509 bp, Homo sapiens
  misc_feature (1)...(509): n = a,t,c or g
tnnnnnntttgaaatntgattcctatnnnnnnnnnnnnnnnnnnnnnnnnnnnnnnnnnnnnnnnnnnnnnnnnnnnnnnnnnnnnnnnnnnnnnggcacgagaaaaacaaatttcagacttactatttgggaaagatcattaaatctagttgtttgtttaatggattataattctgatggtataaattttcagcatcttgttaccttggtgagttcatggctttgaggtgactggaaacatggtgttgtctgtttgaataatggaatttctgcaacttattttacatacacagcctcttaagtctgccactgatggaggttatttatggatctgtttctgatccaaagtcttgcagagggagattttcccttggagcataggctggccaaaatatttanatgggatctggtgtggccttccctangctggcttcatagtcccagaanagagccagcttcctagnggcctntgccttgattgctgccanaagtnccannggatcntggg

SEQ ID NO: 30094 - DNA, 504 bp, Homo sapiens
  misc_feature (1)...(504): n = a,t,c or g
ttnnattgaaaccttgacnnnnnnnnnnnnnnnnnnnnnnnnnnnnnnnnnnnnnnnnnnnnnnnnnnnnnnnnnnggcacgagcgtgggtatgcaagatagtcattgccagaattcctgcccttaagatccatggccatacagttgattcaccacccaccctcagggaagcgcccttatcataaatggtagtttggactcatagaaattgctatttggggcagctaatttaagcatatttgttagaatcagtattacagactagtttctagcaatcttaaatatggtcagtgttgactatcattcattcttactccgttctgtttactctttcctaacttcacatcttttcccttcctcctcagacacataggtatattgtcgcaccttgaggacactgtgtcattgcagagcctgttctccagatcagtcattcacgtgtctttcacatgcagagttttttcctgtcanaggtgatctaagagatcgaggcccatctgcctg

SEQ ID NO: 30095 - DNA, 514 bp, Homo sapiens
  misc_feature (1)...(514): n = a,t,c or g
tnnnnnntttnnatntgantcctatnnnnnnnnnnnnnnnnnnnnnnnnnnnnnnnnnnnnnnnnnnnnnnnnnnnnnnnnnnnnnnnnnnnnnggcacgagaattaattcatttttcagctaattattagtcacctaatgtggattaagcatcatgctagggagggacatacttaagctaaaataaatgaccgagtaaaaaaaataatttggtttctctttaatttctgctaaaaaatacatggaaattttaaggtatttacccaaaaggaatttggtataataaaacattgttattggctatcctttagagatttctttaggggatctgcagaaatttgtttttttggaattattactcttatgtggcctgctgtattcattgccttctcggatcaagcttatatttgagcaaattcgttgcattttgtttactttggtgatccatatgtttgtatttctaatgtggattgaattttactgtatttatcagtcatcctttcttataaaattg

SEQ ID NO: 30096 - DNA, 526 bp, Homo sapiens
  misc_feature (1)...(526): n = a,t,c or g
ttnnnnttnnnnttctgaanttcgatcnccttnnnnnnnnnnnnnnnnnnnnnnnnnnnnnnnnnnnnnnnnnnnnnnnnnnnnnnnnnnnnnnnggcacgagtctggactatgacattctactgagagctttacatactgtattggtaatatgctcttggtatannnnnnnnnnnnnnnnnnnnnnnnnnnnnnnnnnnnnnnnnnnnnnnnnnnnnnnnnnnnnnnnnnnnnntatccaggcagggcttggttggattctctgcttagagtctcataaggctgatatcagggtgtgtgtcacctgggctgggctcagctctcatctgaaggctctgggaaagaatgtgcttccagctcattcaggttgtcgacagaattcagggttgtaggactgaagtcacctgttttcttcccatttttcttgctggctgtgagctgtggacaactcttagcatatagacaggcactgtccgtatttctgttcacttggtctcccctaccttcaagctggcaatggtgcatg

SEQ ID NO: 30097 - DNA, 505 bp, Homo sapiens
  misc_feature (1)...(505): n = a,t,c or g
tttgantctgattccnatnnnnnnnnnnnnnnnnnnnnnnnnnnnnnnnnnnnnnnnnnnnnnnnnnnnnnnnnnnnnnnnnnnnnnggcacgagatgcaggcatactatttcatgcggtatgttttgttttgacttgtcctggctggacattttttttccccttatattttcatgattgcacatttaaaatagtgtctatnnnnnnnnnnnnnnnnnnnnnnnnnnnnnnnnnnnnnnnnnnnnnnnnnnnnnnnnnnnnnnnnnnnnnnnnnnnnnnnnnnnnnnnnnnnnnnnnnnnnnnnnnnnnnnnnnnnnnnnnnnnnnnnnnnnnnnnnnnnnnnnnngtccnnnnnnnnntctctacnacaaaaaagatgntctttctcaagctcattcatccctgcagnattgctatgataagctcaaaagttcatcccagctctgnttaacggaaagtacctcaggccattctnantntccanggagaaanggctnganatccc

SEQ ID NO: 30098 - DNA, 517 bp, Homo sapiens
  misc_feature (1)...(517): n = a,t,c or g
tnnnnnnnnnnttntgaantccatnnnnnnnnnnnnnnnnnnnnnnnnnnnnnnnnnnnnnnnnnnnnnnnnnnnnnnnnnnnnnnnnnnnnnggcacgagtttccaaatagtgagccagaatccctgtatcaggcagaccatgtctcaacatctgccaacacagatgcccctgctaaggaaagagctccagctacccagaaccctaccaccttgaccttagatgaacagaccacagttgtaggactctatcccttgggtaccaaataagctttaggaatacagaaaaggaaggaaaaaacagagttaaagcagtcacggagagtcatgtagaagaagtggcgcatcaggcataaggacagcagcaagaaaaataatacagcagacaaaaaagtcaagatttgttctggtatgtgtcccatcattggagaaacacatatcaagtacttgccaggaaccagacactgtatcacgttaagatgatacnaaataatgaagcatacagtgtanataacaga

SEQ ID NO: 30099 - DNA, 499 bp, Homo sapiens
  misc_feature (1)...(499): n = a,t,c or g
nttgannccnnnnnnnnnnnnnnnnnnnnnnnnnnnnnnnnnnnnnnnnnnnnnnnnnnnnnnnnnnnnnnnnnnnnnnnggcacgagcatatgtacatatctacatgtatgtacataaatgtatgttaagtatgcatgaacatgacatgcatacttaaaagctttttagtgttgggattcatgatctaataattttgaagatttctactctaggctaaagatttttaaactttttggggcagggaacagtcacagacccctttgagacaataaaagatatatactcacttctcagaaaaaatgatgcacacattctgctaaataaaattttgcccagaatttgagggcagtcacatgcctattgatggctgttgttatggactctgataaaaccccctggatgaggatgtgaatgccctaaggagttgtgggacttacccaggatcacatggtaacataatctgatctttcaatcaaaacttcctggctgggtggttg

SEQ ID NO: 30100 - DNA, 484 bp, Homo sapiens
  misc_feature (1)...(484): n = a,t,c or g
attgannccnnnnnnnnnnnnnnnnnnnnnnnnnnnnnnnnnnnnnnnnnnnnnnnnnnnnnnnnnnnnnnnnnnnnnnnnggcacgaggttacgaagttagtgcagcgaattcctgtataccctttatatactttctcttgcttgtaaatgtcttacgtaattatggtatatttaaaatgaagaaattaacgttggtacaatactgttaactacagactttttggatttcatcagtttttccaccaatggtcctttttcagtcataggacccaatgtaggttactctattacatttaattgtcatgtcttcttagatatgaagcaaacttaccaactgtagtacagtaggtacacactgtgtgtataggttttttggttttagcctcctaatatccagccacatcactgttttccaaagctgctactatgtagccttttgggctgnnnntttccttanaaaactcatttanaanncatncatg

SEQ ID NO: 30101 - DNA, 505 bp, Homo sapiens
  misc_feature (1)...(505): n = a,t,c or g
ttgaantcnatnnnnnnnnnnnnnnnnnnnnnnnnnnnnnnnnnnnnnnnnnnnnnnnnnnnnnnnnnnnnnnnnnnnnnggcacgagnnnnnnnnnnnnnnnnnnnnnnnnnnnnnnnnnnnnnnnnnnnnnnnnnnnnnnnnnnnnnnnnnnnnnnnnnnnnnnnnnnnnnnnnnnnnnnnnnnnnnnnnnnnnnnnnnnnnnnnnnnnnnnnnnnnnnnnnnnnnnnnnnnnnnnnnnnnnnnnnnnnnnnnnnnnnnnnnnnnnnnnnnnnnnnnnnnnnnnnnnnnnnnnnnnnnnnnnnnnnnnnnnnnnnnnnnnnggtaagttttataggttgccatgtatgagaattagaaatgtttgcaaagtgcccatgtggagcctgggctgcagcagggacctgtcagtggcactcttcagtacggtgtggatgcccttaaagggatgagaaagtccttatgctgcaggacatgctggcccaaagcaggtgctatccagtct

SEQ ID NO: 30102 - DNA, 518 bp, Homo sapiens
  misc_feature (1)...(518): n = a,t,c or g
tnnntntnttnantaantnaatccctttggnnnnnnnnnnnnnnnnnnnnnnnnnnnnnnnnnnnnnnnnnnnnnnnnnnnnnnnnnnnnnnnnnnggcacgagatcacctttgtgtttctcagttcccacctgagtgcttgtgtacattaactgcacatatttgagaagtcaatttgtgatactgcctgttcctatggcttcagtctttttgctttattttttttaaaacattggcttttaaaagaccacaaaaagtagtatgtgctgttgataaaaattcaaacaataaaagtttgttataaagtaaaaaaatgaatattctctcccttcccttcccaccactcccactctcgaggggtggtgacaactatcatttttacactgatgatgtccaggttttcagtttcagtccctagatccctcttgagtttcacaatccagtatctgaatgttgagcccagatgctgatttatagttatttatatttttccgtataattttctggactcccatagt

SEQ ID NO: 30103 - DNA, 528 bp, Homo sapiens
  misc_feature (1)...(528): n = a,t,c or g
tttaanncctttannnnnnnnnnnnnnnnnnnnnnnnnnnnnnnnnnnnnnnnnnnnnnnnnnnnnnnnnnnnnnnnnnnnggcacgaggatgtgagccttgccagagtaatttaattatagcactccaagggccctcagaaccagtgacttgctaggatccctgtccacacagcatagagacaggaagaagggggagtgtgggctacccagacgtgcctctccatggtccagtgccaggctcagtggcaggcaggctgagacacctgcacacgtggtgggtatcagagaaggtgtgggcattacgtaatgatctgcagggagggaggagacagagggctgctcccaaggtcccattcctcctgcattcagttgcaggcagtgcagttagttcattgcaggcagctcatggcgctccatcaacctggttcaaagcaaggtgtggacatcaggtggccttggggctgtcatactgaactttcagcctgatggagactggctgcaaggaagtctgangcagggcagcaaa

SEQ ID NO: 30104 - DNA, 529 bp, Homo sapiens
  misc_feature (1)...(529): n = a,t,c or g
atttgaanccctttnnnnnnnnnnnnnnnnnnnnnnnnnnnnnnnnnnnnnnnnnnnnnnnnnnnnnnnnnnnnnnnnnnnnnggcacgagatcgtaacttaaagagaaaaaagcattatatcttggtttctcttaaaagtagtgtnnnnnnnnnnnnnnnnnnnnnnnnnnnnnnnnnnnnnnnnnnnnnnnnnnnnnnnnnnnnnnnnnnnnnnnnnnnnnnnnnnnnnnnnnnnnnnnnnnnnnnnnnnnnnnnnnnnnnnnnnnnnnnnnnnnnnnnnnnnnnnnnnnnnnnnnnnnnnnnnnnnnnnnnnnnnnnnnnnnnnnnnnnnnnnnnnnnnnnnnnnnnnnnnnnnnnnnnnnnnnnnnnnnnnnnnnnnnnnnnnnnnnacctgtgcactacactaccagtgcaccactgcctgggtgatagtgagattctgtctcaaaaaaaagaaaaaaaagtattaagaactgttagtgctaatagaaatattctaacctctttgacattttttttgatcaatg

SEQ ID NO: 30105 - DNA, 531 bp, Homo sapiens
  misc_feature (1)...(531): n = a,t,c or g
attgaanccttannnnnnnnnnnnnnnnnnnnnnnnnnnnnnnnnnnnnnnnnnnnnnnnnnnnnnnnnnnnnnnnnnnnnnggcacgagagataccccacttcactgggcagcctttaagaacaatgctgagtgtgtgcgggctctcctagagagcggggcctctgtcaatgccctggattacaacaatgatacaccgctcagctgggctgccatgaagggaaatcttgagagtgtcagcatccttctggattatggcgcagaggtcagagtcatcaacctaataggccagacacccatctcccgcctggtggctctgctagtcaggggacttggaacagagaaagaggactcttgctttgagctcctccacagagctgttggacactttgaattgaggaaaaatggcaccatgccacgagaggtggccagagacccgcagctatgtgaaaaactgactgttctgtgctcagctccaggaactctaaaaacactcgctcgctatgccgtgcgccgaacctgggacttcat

SEQ ID NO: 30106 - DNA, 537 bp, Homo sapiens
  misc_feature (1)...(537): n = a,t,c or g
tnnntttgncccctttgaanccctttnnnnnnnnnnnnnnnnnnnnnnnnnnnnnnnnnnnnnnnnnnnnnnnnnnnnnnnnnnnnnnnnnnnnnggcacgagatgggaagcgagagaggtacgtagttgttatttgaggctaggttttcgaagtgggacatagcgtgttccgaacaaaccgacgtttggcatcactgattgctgtctggagcagtgcttcgcaaaagtttggcacaattaccggtgctggtccttgaagaaacaaatatggaaattgaaagcgtttaaaaccttttgaaagcaatataacaataattttatacctgttaaatgtaataaattggggcctgcattttgtatgtttcttttattccatatttctctaaggattcatttttattgttttatgaaactaccagtctgtgacatggaaggtagaggaaaaagattcttgaccctagttgcttgtgaaacctgggattctacaagtgacagttgctgtttactcttgaagttcaagtgntactttgtacatg

SEQ ID NO: 30107 - DNA, 414 bp, Homo sapiens
  misc_feature (1)...(414): n = a,t,c or g
tnntncccccttttgaanccccttnnnnnnnnnnnnnnnnnnnnnnnnnnnnnnnnnnnnnnnnnnnnnnnnnnnnnnnnnnnnnnnggcacgagagcaaccctactaggtttttcccattttacagatacagaaacggaggcatagactggcaaaataacttcccaaggtcacatagctagtatgttatagagtagggattcaaacttcggcagtctgcctccaagtcagccttcttaatcactctgttatgctgacatttattagatgaaaagaaagaggcacaggtgagtcataagtggctgtttgtgtttttggaaannnnnnnnnnnnnnngcctactggcannttgaaatanttnagctgctccatncattannnnnttattnntttgaaatntganntntntgcttc

SEQ ID NO: 30108 - DNA, 502 bp, Homo sapiens
  misc_feature (1)...(502): n = a,t,c or g
tnaaaatttgaaaannntngaatccctttngnagctcngtnnnnnnnnnnnnnnnnnnnnnnnnnnnnnnnnnnnnnnnnnnnnnnnnnnnnnnnnnnnnnggcacgagagaattttaatcacccaggagcttggcatcaacataagaacatggctgatactcaagtccagagagactaggagaactggggagtttcagaagttggtcaaagaacgtgttgcctttggcaaaaccacacgtgtcaaacaatccgagtgtctaatcaatctgtatcgctctcagagagactttcagcacaaggtttcagaagccaggaaaagcctaataatgtaggacatcaggtgtccccagcaaccctggggtgaaaagccaaagaaggtggttcttaaacaagggcnnnnnnnnnnnnnnnnnnnnnnnnnnnnnnnnnnnnnnnnnnnnnnnnnnnnnnnnnnnnnnnnnnnnnnnnnnnnnnnnnnnnnnnnnnnnnnnnnnnnnccg

SEQ ID NO: 30109 - DNA, 479 bp, Homo sapiens
  misc_feature (1)...(479): n = a,t,c or g
atntgaancccttnnnnnnnnnnnnnnnnnnnnnnnnnnnnnnnnnnnnnnnnnnnnnnnnnnnnnnnnnnnnnnnnnnnnnnnggcacgagttaatcagaagctggaagaagggctgtgacgtgtgtgacagcaggaactgctggtcaacccacagccggccagcctgccgggacgccatcttggccccaatcttggcagggagaggggagtgtatcggactctggggagagcagctgcctgcacgggcagggtcctcccgtctcaggattaacgttctcaactgtatttgatttctcctcagccagagggggtaaggtggccttcccagaagcacaggtgggccgcgtgtcagaggccctggacagcctgtgcctctcccaggcctcccagcaggggtggctctcgcccctctggaggggagaccccaggaaccggccccgcctcagccatagcctcacagggtccttgtttctcgg

SEQ ID NO: 30110 - DNA, 548 bp, Homo sapiens
  misc_feature (1)...(548): n = a,t,c or g
agannannagaggngnnnnaaannnnnnnngnnnnnnanananaaaannnnnaaanaaananncgnncananntnnnccccctttgaacccttgaaacctatgacatgannnnnnnnnnnnnnnnnnnnnnnnnnnnnnnnnnnnnnnnnnnnnnnnnnnnnnggcacgagctaatctgctgtggtggttgttagtgatacataaaagaaagttaccagatctttcttttctctaaggccaggttgaagcagagccttcatgtttgctaggctttctcctgtgtagttagccttgctcagtcagagtacccttaatacactccttttattaacccttcagtttaggtactaaatcccattcatcagttaacttctcagacactttgcttccataatgatcccttatctctggaataatcagttcatttcctttctcattttcattctctattactggataacaaaccactccaaaactttgtggctaaacagcaaccattttatnngtntaccattgngcaatctggtttgagctcacctgggcagcc

SEQ ID NO: 30111 - DNA, 522 bp, Homo sapiens
  misc_feature (1)...(522): n = a,t,c or g
tnnatttgatanctcntnaaacccttttnnnnnnnnnnnnnnnnnnnnnnnnnnnnnnnnnnnnnnnnnnnnnnnnnnnnnnnnnnnnnnnggcacgagctgaagacccccaggtaaccaaggacattcttatcaagcaggacattccaagggcttagaggttacctcctaggagccaggaacagaaaaccaaaacttctttgagcaagattaatcctttactgcatactgaccnnnnnnnnnnnnnnnnnnnnnnnnnnnnnnnnnnnnnnnnnnnnnnnnnnnnnttccctagtctcttccaatctgtgacagctcttggtctttctctttcatgaccttgatgcttttgaggaatagtcatgaatannnnnnnatgatcctcaatttggnttcatctgatttttttttatcatgagcagattgaggttatgaatttgagggatggatatcaccnnatcttagtnccttcttattgaattatntcaggaaacaagattatgtcaacatgatttattacta

SEQ ID NO: 30112 - DNA, 535 bp, Homo sapiens
  misc_feature (1)...(535): n = a,t,c or g
ggnnntnnnnnnntnnattganactttgatnacagctnnnnnnnnnnnnnnnnnnnnnnnnnnnnnnnnnnnnnnnnnnnnnnnnnnnnnnnnnnnnnnnggcacgagtttcattccaaacagattgtgaggtgactacgtagtacagaagtacagtgaaatatgagattcctgagcctttagtggatgctgagctggagacccccgttagtgctacctctttctaaacagcgccagccatgaagcttttgaccttttcacctttaaactttgtttgaacttggaaagaagacttttgaattgtttaaaaaaannnnnnnaggaaaaaaaggaaaaanaaacacaggggaaaaaaagggttagggaggctgcaaaananatgtgganactgggggaaanggactgattatangttacnttaacngtnatactnggaaannaatcctcctnttgnctaggagtttntgntncnggganccanagggtaatcagctcacatgacntacccanaggcgaangctaacctgtgctgttt

SEQ ID NO: 30113 - DNA, 468 bp, Homo sapiens
  misc_feature (1)...(468): n = a,t,c or g
tttnatnnnnnnnnnnnnnnnnnnnnnnnnnnnnnnnnnnnnnnnnnnnnnnnnnnnnnnnnnnnnnnnnnnnnnnggcacgagaactggattgactctcagaacagtttgccaacccctttctacagcagtgttttctaaattatgtgtcatgacccattggtaggttaatttttttattttttatnnnnnnnnnnnnnnnnnnnnnnnnnnnnnnnnnnnnnnnnnnnnnnnnnnnnnnnnnnnnnnnnnnnnnnnnnnnnnnnnnnnnnnnnnnnnnnnnnnnnnnnnnnnnannnnnnnnnnnnnnnnnnnnnnnnnnnnnnntggcttagtatgttaaattcaacttagtaagatgcagttggcatttagaaaatattggagtggnnnnnnnnnnnnnnnnnnnnnnnnnnnnnnnnnnnnnnnnnnnnnnnnnnnnnnnnnnnnnnnnnnnnnnnnnnnnnn

SEQ ID NO: 30114 - DNA, 296 bp, Homo sapiens
  misc_feature (1)...(296): n = a,t,c or g
nnnnnnnnnnnnnnnnnnnnnnnnnnnnnnnnnnnnnnnnnnnnnnnnnnnnnnnnnnnnnnnnnnnnggcacgagatttcagttgtatagctacatacagcctgaactaacattcagttttctgagaatttaaaaaaatacactgatggccggnnnnnnnnnnnnnnnnnnnnnnnnnnnnnnnnnnnnngccatggtgggaggattnnnnnnnnnnnnnnnnnnnnnnnnnnnnnnnnnnnnnnnnnnnnnnnnnnnnnnnnnnnnnnnnngaannnnnnnnnnnnnnnngtgg

SEQ ID NO: 30115 - DNA, 518 bp, Homo sapiens
  misc_feature (1)...(518): n = a,t,c or g
tttgnnnncnnnnnnnnnnnnnnnnnnnnnnnnnnnnnnnnnnnnnnnnnnnnnnnnnnnnnnnnnnnnnnnnnnnnnnnnnggcacgagctgagtcctgactgcagctcccccaaggacctgccacgcatggattatacacaaagtctgttcaagtctgttgagggagtgaagggtcggggggcagcaatcccctgtttggcctgccaggtaaagcctttgtaattgctaatggctgggcctgacagattacacataggattttggcctggagcccaaataattcctcaactccatcctttgatttttcagagcccaagcgagaaacataggctaccccatcatggacctgaatgggtagattttgagggtctctgttaggagccaggttattagtctgcagttacaataaatagaccatggtcaggatcaagatcacttccagcatcgtgtacagattaatatgcctggggtagcttangtccagaaaaatccatgtttacagaaatgtttgtttg

SEQ ID NO: 30116 - DNA, 511 bp, Homo sapiens
  misc_feature (1)...(511): n = a,t,c or g
tttgcccccntngnnnnnnnnnnnnnnnnnnnnnnnnnnnnnnnnnnnnnnnnnnnnnnnnnnnnnnnnnnnnnnnnnnnnnggcacgagggcccagatgacgaccacctggggtagacccagggtctccagggaatggctcgggggcagacgctgtgtctgtgtgtgtgtgtgtgtgtaaaattcactttttgtggcatccagttctaaaggttttgacaaatgcatagagatatgtatccataaccactatcatgatatagaacaattccattgaccccagaaagttccttcatactgctctttttagtggacaattcttccaaaagaagtaaaattatgggaataaaatgaactgatagatataagagcttgtaagagttaaaaatgctgtgtanatacagngtctctattgatatgactcacttgatttggcaccaataattattttcttagtacacagagtcnaagattttttttaatctttctgctanatgtantactatntggg

SEQ ID NO: 30117 - DNA, 445 bp, Homo sapiens
  misc_feature (1)...(445): n = a,t,c or g
ttnnnncccnnccccttgccnccctagnnnnnnnnnnnnnnnnnnnnnnnnnnnnnnnnnnnnnnnnnnnnnnnnnnnnnnnnnnnnnnnnnnnnnggcacgagcttctttattgtctgcttctctcagcgatgtgagttgacctagcatttgctggctttagagactcccctgcattcccattattaatggttaagtttcagcttacactacttctgaagatcagcttttaatctgtgcccagtattctgaatattcctagcaaactcattttctgtcatcactggcaagagccaggatttgggtggccataaactatgatgattatgactgggaagactcacaaaacatactacctgtttctggaaaataagncagngcctaagaacagctcatacctnngatgnngaagttcaactgctgaaactgnggngannantatact

SEQ ID NO: 30118 - DNA, 380 bp, Homo sapiens
  misc_feature (1)...(380): n = a,t,c or g
ttggcnncctnnnnnnnnnnnnnnnnnnnnnnnnnnnnnnnnnnnnnnnnnnnnnnnnnnnnnnnnnnnnnnnnnnnnnnggcacgaggagttttttctgggttatatgaaacaaaatataaatcttttatataactcaatttcctacagaaaaaaaacttacttgtcagagggattttaaagttttattttattttcttggatctcattacttttccataaatcctataagcagaattacaatgaggtgagtcatagacttaacacttttttggagtttcttctgccaaagcagcttgaaatatagaggattttcaaaaactgtgttaggggaacatgggaaggtatgggaaagaaaggaagggatnnnnnnnnnnnna

SEQ ID NO: 30119 - DNA, 569 bp, Homo sapiens
  misc_feature (1)...(569): n = a,t,c or g
gaagnngnnntnnnntncccccttgacgccancttctatgncaanagctnnnnnnnnnnnnnnnnnnnnnnnnnnnnnnnnnnnnnnnnnnnnnnnnnnnnnnnnnnnnnnnggcacgaggatttttaatcaacttccacaattaagtcttctagaagatcaaattgaatactttcagtttggaatgaattaaacgatagctaaccctcatagcagttcattttcttttgcatttcataccatttaccgtcaagtctgtttgccccaggattaagcagtatcttgttcctgggaatcccatgacttctaaaaatctgttacttttctctcttaatgaaagttcactttgaaaaaataggtgagtacctatgaggcattttacttggtgttaggaggaatgcaaagatgactaaatgtaatttctgcccacaaaagcctggtggaagaaatcagttttatatacnaataattatgacttatagaactgaactataaagttactggtagtatctagggnatgatatattcaactgaagctttctgnattgaatttacnttaaataaatttt

SEQ ID NO: 30120 - DNA, 501 bp, Homo sapiens
  misc_feature (1)...(501): n = a,t,c or g
annnnttgaanaccttnnnnnnnnnnnnnnnnnnnnnnnnnnnnnnnnnnnnnnnnnnnnnnnnnnnnnnnnnnnnnnnnnnnnnnnggcacgaggtgaaattgactcagggcatctgcctggagcaaaataagacctccagctgtgcggagtttaagaaggacaggggagagggcctggcccgagtgctgtgtggggaggagcaggctgatgctgatgctggggcccaggtatgctccctgctccttgcccagtctgaggtgaggcctcagtgtctactgctggtcttggccaacagaacagaaatttccagcaaactccaacttatgaaaaagcaccaatctgacctgaaaaagctggggatcctagatttcactgagcaagatgttgcaagccaccagagctattcccaaaagaccctgattgcactggtcacctcgggagccctgctggctgcttgggcatcactggctatttctgatgaatcgcgaactggacccc

SEQ ID NO: 30121 - DNA, 517 bp, Homo sapiens
  misc_feature (1)...(517): n = a,t,c or g
tttnnnncnnancntttganaccttnnnnnnnnnnnnnnnnnnnnnnnnnnnnnnnnnnnnnnnnnnnnnnnnnnnnnnnnnnnnnnnnnnnnnnnggcacgagaaaatgtagataaaaataaataaataaaaacaaagaaaaatgtagataaataacaatacttacccagtagaactgatgtaaggattaaagttttttgtgggttttttgttcgtgttcgttttggagtgggacttgttaggttaaagaggagcttctggggtatacaagaattagccacaatttatttcatagagtgcactatactcttttttgtatcagattcgtaaatgtaaacaagaatgcagtcttgctcttagagtctaaacatgtttttcctaccaggaattttgtttagatgaccttctgtgaagtaagatgtgtaatattttgagtaacataaataaatcgtcatattgctctgctgtagtacttggcaaagcacagggcacataataggcatttaataattcctg

SEQ ID NO: 30122 - DNA, 520 bp, Homo sapiens
  misc_feature (1)...(520): n = a,t,c or g
ttgantcctatcttataancaatctctttganctancnnnnnnnnnnnnnnnnnnnnnnnnnnnnnnnnnnnnnnnnnnnnnnnnnnnnnnnnnnnnnggcacgaggtgcctcatattcctcctctcttggctgcccttgttctgttttgtggtctgtgtgacaggttggggcatgtcttttatttgtcttgacagctgtttcgattgaagtcaacattgctagttgtaagcccagaaaaaaaccccaccagtgttgaggcctttattctgttgctaaaggaaaaaaaaaagagttattttatttcccagatttttatcttaaaccagttaaagtcatcagtgagaaagtaggcttcactagactgtgggagtcctacggtgttaaacttcaggcccacaggtccctttcctgtctgccattgctgctctttgcggcttgctctgagcancaggtacaacaaaacaccttttcttcctanngtatcanacttctttacactgactttgtaaacaagctct

SEQ ID NO: 30123 - DNA, 496 bp, Homo sapiens
  misc_feature (1)...(496): n = a,t,c or g
tnnnnnnnnnnnnnnnnnnnnnnnnnnnnnnnnnnnnnnnnnnnnnnnnnnnnnnnnnnnnnnnnnnnnnnnnggcacgaggcgtggggaatattgagtgagaattatcaaatagggggatgattattttataggaggtaaagctccaactagaattttaaaaaggatttgttgagctagtagtaaatgttacagtaccagtcagacacaccttgtggaggtggcatttgggtgcagctaatgggnnnnnnnnnnnnnnnnnnnnnnnnnnnnnnnnnnnnnnnnnnnnnnnnnnnnnnnnnnnnnnnnntaccatctnagctcactgnagcctntgcctnccggttcaacgattncnnnnnnnnnnnnnnnnnnnnnnnnnnnnnnnnnnnnnnnnnnnnnnnnnnnnnnnnnnnnnnnnnnnnnnaganagacggngttnnanctgttggcaanacannntnnntntnnnanctnnnnancgctgcttgnctcc

SEQ ID NO: 30124 - DNA, 521 bp, Homo sapiens
  misc_feature (1)...(521): n = a,t,c or g
ttgnnnccnnnnnnnnnttgnnnnccnnnnnnnnnnnnnnnnnnnnnnnnnnnnnnnnnnnnnnnnnnnnnnnnnnnnnnnnnnnnnnnnnnnnnnnnnggcacgagaactggaagaatttgggatactctgtgttcaaaatataataaatttatttaatcaaaaatattaaaaagatatatagcaggaagaatggctttattggaaattcactccccaaacttaatcatattacaaattacttctataaatgcatattgtacaaaataggaatagatctgatgcagtcatgattccactgaatgagctgggtccttccaagtgctcctggtagaggtgggctgcagtttgcagaagaaagaaaatattaaggcttaagaatcctgnnnnnnnnnnnnnnnnnnnnnnnnnnnnnnnnnnnnnnnnnnnnnnnnnnnnnnnnnnnnnnnnnnnnnnnnnnnnnnnnnnnnnnnnnnnnnnnnnnnnnnnnnnnnnnnnnnnnnnnnnnnnnnnnnnnnnnt

SEQ ID NO: 30125 - DNA, 474 bp, Homo sapiens
  misc_feature (1)...(474): n = a,t,c or g
nnnnnnnnnnnnnnnnnnnnnnnnnnnnnnnnnnnnnnnnnnnnnnnnnnnnnnnnnnnnnnnnnnnnnnnnggcacgagggcatctgtatgagcccagagtcctatctggggtctcctcagcacagcccctctaccaggggctctccaaataggagcctcccatctccaggtgttctctgtgggtctgcccgtcccaaaccttacgatcctcctggagagaagatggtagcagcaaaagtaaagggtgagaaactggataagaagctgaaaaaaatggagcaaaacaagacagcagccactaggtaccgccagaagaagagggcggagcaggaggctcttactggtgagtgcaaagagctggaaaagaagaacgaggctctaaaagagagggcggattccctggccaaggagatccagncctgaaagatngatanaanaagnncnnanggcnngggggannaaangggcccta

SEQ ID NO: 30126 - DNA, 529 bp, Homo sapiens
  misc_feature (1)...(529): n = a,t,c or g
atnnnnnnnnnnnnnnnnnnnnnnnnnnnnnntnnnnnnnnnnnnnnnnnnnnnnnnnnnnnnnnnnnnnnnnnggcacgaggaaaacgaatgcctcagcgctcacatctgcggaggagcctcctgtcacaacaccctggggagctacaagtgcatgtgtcccgccggcttccagtatgaacagttcagtggaggatgccaagacatcaatgaatgtggctctgcgcaggccccctgcagctatggctgttccaataccgagggcggttacctgtgtggctgtccacctggttacttccgcataggccaagggcattgtgtttctggaatgggcatgggccgaggaaacccagagccacctgtcagtggtgaaatggatgacaattcactctccccagaggcttgttacgagtgtaagatcaatggctaccccaaacggggcaggataccggagaancncaaacgnaactgatgcctcantatnnaggntnaatatantanaaantctntggaggnttnncaagttgga

SEQ ID NO: 30127 - DNA, 488 bp, Homo sapiens
  misc_feature (1)...(488): n = a,t,c or g
nannnnnnnnnnnnnnnnnnnnnnnnnnnnnnnnnnnnnnnnnnnnnnnnnnnnnnnnnnnnnnnnnnnnnnggcacgaggctatgccagtttcttaagacaacagtgaggtttgcgacatcagttgannnnnnnnnnnnnnnnnnnnnnnnnnnnnnnnnnnnnnnnnnnnnnnnnnnnnnnnnnnnnnnnnnnnnnnnnnnnnnnnnnnnnnnnnnnnnnnnngatnnnnnnnnnnnnnnnnnnnnnnnnnnnnnnnnnnnnnnnnnnnnnnnnnnnnnnnnnnnnnnnnnnntgcnnnnnnnnnnnnnnnnnnnnnnnnnnnnnnnnnnnnnnnnnnnnnnnnnnnnnnnnnnnnnnnnnnnnnnnnnnnnnnnnnnnnnnnnnnnnnnnnnnnnnnnnnnnnnnnnnnnnnnnnnnnnnnnnnnnnnnnnnnnatggannncttntgctgctttactacacctacagntncttnctcatngaaa

SEQ ID NO: 30128 - DNA, 549 bp, Homo sapiens
  misc_feature (1)...(549): n = a,t,c or g
ttgnantccctntttnnnnnnnnnnnnnnnnnnnnnnnnnnnnnnnnnnnnnnnnnnnnnnnnnnnnnnnnnnnnnnnnnnnnnnnnnnggcacgaggttatgatccctatttatagatgaggaaactgagacccagagaagtaactcagccagtgagccagcatcttgggcctgtgtcctcatcagctctgctttttttttttnnnnnnnnnnggagnctnannnnnnnnnnnnnnnnnnnnnnnnnnnnnnnnnnnnnnnnnnnnnnnnnnnnnnnnnnnnnnnnnnnnnnnnnnnnnnnnnnnnnnnnnnnnnnnnnnnnnnnnnnnnnnnnnnnnnnnnnnnnnnnnnnnnnnnnnnnnnnnnnnnnnnnnnnnnnnnnnnnnnnnnnnnnnnnnnnnnnnnnnnnnnnnnnnnnnnnnnnnnnnnnnnnnnnnnnnnnnnnnnnnnnnnnnnnnnnnnnnnnnnnnnnnnnnnnnnnnnnnnnnnnntnnggttttttcatngcnnnaaaaacccnnnanttggacntttcctccnaggtcctg

SEQ ID NO: 30129 - DNA, 486 bp, Homo sapiens
  misc_feature (1)...(486): n = a,t,c or g
ntttgannccnttnnnnnnnnnnnnnnnnnnnnnnnnnnnnnnnnnnnnnnnnnnnnnnnnnnnnnnnnnnnnnnnnnnnnnggcacgaggggacctgaatgtgcggctgcatggccagcatttggtccagcagctggtcctaagaacagtgaggggctacttagagacgccccagccagaaaaggcccttgctctgtcgttccacggctggtctggcacaggcaagaacttcgtggcacggatgctggtggagaacctgtatcgggacgggctgatgagtgactgtgtcaggatgttcatcgccacgttccactttcctcaccccaaatatgtggacctgtacaaggtgaggccgaccagggctggggtgaggcctctgtgctgggagggagacccttctgcagcccttcttgcaaggaaatgggctctggagaacctggggaggtggggacaggtggcagaacctgtgacagaccactccgtcc

SEQ ID NO: 30130 - DNA, 501 bp, Homo sapiens
  misc_feature (1)...(501): n = a,t,c or g
ttnnnnnnnntnatttgaancctttgagnccttnnnnnnnnnnnnnnnnnnnnnnnnnnnnnnnnnnnnnnnnnnnnnnnnnnnnnnnnnnnnnggcacgagcttgaactattatgttatactatcatcatctaaaagagtgggataatgatagggctaatgtcagaattaaaaagatggaggtggccagnnnnnnnnnnnnnnnnnnnnnnnnnnnnnnnnnnnnnnnngcaaggagtggactnnnnnnnnnnnnnnnnnnnnnnnnnnnnnnnnnnnnnnnnnnnnnnnnnnnnnnnnnnnnnnnnnnnnnnnnnnnnnnnnnnnnnnnnnnnnnnnnnnnnnnnnnnnnnnnnnnnnnnnnnnnnnnnnnnnnnnnnnnnnnnnnnnnnnnnnnnnnnnnnnnnnnnnnnnnnnnnnnnnnnnnnnnnnnnnnnnnnnnnnnnnnnnnnnnnnnnnnnnnnnnnnnnnnnnnnnataataataataagatggatgtgg

SEQ ID NO: 30131 - DNA, 488 bp, Homo sapiens
  misc_feature (1)...(488): n = a,t,c or g
tttgnnncctttgnnnnnnnnnnnnnnnnnnnnnnnnnnnnnnnnnnnnnnnnnnnnnnnnnnnnnnnnnnnnnnnnnnnnggcacgaggcagtggcttcagagtatgagctggtacagctgctaccaggggagcgagagctgactatcccagcctcggctaatgtattctacgccatggatggagcttcacacgatttcctcctgcggcagcggcgaaggtcctctactgctacacctggcgtcaccagtggcccgtctgcctcaggaactcctccgagtgagggaggagggggctcctttcccaggatcaaggccacagggaggaagattgcacgggcactgttctgaggaggaagccccgttggcttacagaagtcatggtgttcataccagatgtgggtagccatcctgaatggtggcaattatatcacattgagacagaaattcagaaagggagccagccaccctggggcagtgaagtgccac

SEQ ID NO: 30132 - DNA, 376 bp, Homo sapiens
  misc_feature (1)...(376): n = a,t,c or g
tttgnnncctnnnnnnnnnnnnnnnnnnnnnnnnnnnnnnnnnnnnnnnnnnnnnnnnnnnnnnnnnnnnnnnnnnnnnnnggcacgagtgaatgctgagctgtgtgtctgggcatgtattttggccacacctaatcctttctgtcatgttttaactactccttaaagtggaggtcagcagtgtctgattacctccagagttcctctctcttatcgtatcttgtccctcgctccatttccttttctggcattattggacagcaagtgttacaacttaaaatcaatacgaagcaatttcatttgtttataactatgaagatgagcgcttcagcagagcactgtactttcaagtaaagtttaggtttttttttttttt

SEQ ID NO: 30133 - DNA, 532 bp, Homo sapiens
  misc_feature (1)...(532): n = a,t,c or g
tnnnnnnnnnnnnttggaancctatnnnnnnnnnnnnnnnnnnnnnnnnnnnnnnnnnnnnnnnnnnnnnnnnnnnnnnnnnnnnnnnnnnnnnggcacgagacctgacccaggttgaaaaggagtgcaggagaaaaagagtgagtctacttccatttttttaaagaattttagtgtattgtttgagatcatggatttttaatagtttgtctttatggataatgtatttctgctttcaactgtcaaactacctgaagagggcacgtccagcaagttgctttttaaggtctttgtagttaagggttggctctttagtgtggttcttaaccctaggcgcagttgtgcttctatacaaataactgtgcccattcccagatactctgtttcggtagtttgagagaggcttangtacccctgtatgttttaaatttctcagatgcttctgatgcgtagttttcattgcactggtttatagtgaaaaagataaaatatttttatccttcttaataatgccttttaaaaatgggnattc

SEQ ID NO: 30134 - DNA, 495 bp, Homo sapiens
  misc_feature (1)...(495): n = a,t,c or g
tnnnnnnnnnnnnnnnnnnnnnnnnnnnnnnnnnnnnnnnnnnnnnnnnnnnnnnnnnnnnnnnnnnnnnnnggcacgagcggcacgagcggcacgagcggcacgagnnnnnnnnnnnnnnnnnnnnnnnnnnnnnnnnnnnnnnnnnnnnnnnnnnnnnnnnnnnnnnnnnnnnnnnnnnnnnnnnnnnnnnnnnnnnnnnnnnnnnnnnnnnnnnnnnnnnnnttgtttttaattagtgggagcctttctttaaataaaactacccagatgctcaatttgtaaatgagagttgcttttggagggttgggggttgcaggttagcacagagacagtggaagggagctcagtctctccggccttccgcaggcagcgctcgagtaccttctaggtaccttcctcatgagcagtttcaaaaccattgggccattggggtaggatgcatggctggtttttgtttggtttggtttggttttgagacggagctggctctgt

SEQ ID NO: 30135 - DNA, 501 bp, Homo sapiens
  misc_feature (1)...(501): n = a,t,c or g
cctatnnnnnnnnnnnnnnnnnnnnnnnnnnnnnnnnnnnnnnnnnnnnnnnnnnnnnnnnnnnnnnnnnnnnnggcacgagattttcacagaagtataatgtgagaaaacactttgaaaatactttggatctgaaattttaacagtcatgtttgcctaagtatttttgaagctaaacccccctcttataatacactaataactgacgtggagccatttgtttcacatgggcaaaatactgaaacagttgagcgaattttgtatatgcagagtaatgtcattgatgggaggagcagtactatggactttctaataagtctatggcttatgtcctgtggcagttcttcacctttttaataggcccattccaaaaaaacccacaaagatatgcaggggagaatggccttatattcaggatagcttcatacctattttagaatcacttagaaaatctgatgctttcactactagtattagtagtanagccttgcacatacttta

SEQ ID NO: 30136 - DNA, 525 bp, Homo sapiens
  misc_feature (1)...(525): n = a,t,c or g
tnnnnnnnnnnatttgaaccctnnnnnnnnnnnnnnnnnnnnnnnnnnnnnnnnnnnnnnnnnnnnnnnnnnnnnnnnnnnnnnnnnnnnnnnggcacgaggagcttccatagggggaaatttaaattttttttacaagttgtttaattataatgtgctttaaaaacactttagcatatcataaaccttcaaaacaaaatgagtaatcatcttctgagatccatagaaaatgtttcttaaatgtcactttcaattaccacttctggagctaacttgcaaaacaattgtgtttccaccaactgaaatatgttttcaccaaatttaagataatctgtggtcagtgtgagctttgtcttgatttaggaggaggaaagcaaagttccatttatgaatactttgaaaattttcagaaattctcctaaattgtttcagcaaccaggccaaaagagaggcctggaatcccaaggtgagaggaaactttaaaagttacacttatggccaggcacggtggctcacaccgtaatt

SEQ ID NO: 30137 - DNA, 528 bp, Homo sapiens
  misc_feature (1)...(528): n = a,t,c or g
ttnnnttnaaaaatntgaatcctntcagnttnnnnnnnnnnnnnnnnnnnnnnnnnnnnnnnnnnnnnnnnnnnnnnnnnnnnnnnnnnnnnnnnggcacgaggttagaatatggtaaatgaccccaaagtctattgaggtgagcttgagaaaaaaaagagaggagttttggaacaagtgcccatgatgagagaagaaactttttgtgatatttttctgcttgtaagtattatcaaatcaactgtatacatgcactatttccaaccatgatttcagaaagacatgcatgtcagagaagagtgaaatattcatgtcttaacttaagtagactgtttttaaacagctggtccagttttttttcctaacattgtaccatatctatcatctgtcaattactgttactttaaagctaaagattactttgatggcccagctacatttgcaatgatgtgcacgtaaacactgttaagaggttaaagcttgtatacaatctgttactgtgaaataactaaattgggctttaaaaaa

SEQ ID NO: 30138 - DNA, 520 bp, Homo sapiens
  misc_feature (1)...(520): n = a,t,c or g
gaanccctacagntattgaatgcttnnnnnnnnnnnnnnnnnnnnnnnnnnnnnnnnnnnnnnnnnnnnnnnnnnnnnnnnnnnnnnnnnnnnnnnggcacgagcggggaggcgcggagcgcgcgtgtggtccttgcgccgctgacttctccactggttcctgggcaccgaaagataaacctctcataatgaaggcccccgctgtgcttgcacctggcatcctcgtgctcctgtttaccttggtgcagaggagcaatggggagtgtaaagaggcactagcaaagtccgagatgaatgtgaatatgaagtatcagcttcccaacttcaccgcggaaacacccatccagaatgtcattctacatgagcatcacattttccttggtgccactaactacatttatgttttaaatgaggaagaccttcanaaggttgctgagtacaagactgggcctgtgctggaacacccagattgtttcccatgtcaggactgcagcagcaaagccaatttatcaggaggtgg

SEQ ID NO: 30139 - DNA, 515 bp, Homo sapiens
  misc_feature (1)...(515): n = a,t,c or g
tttgnnncctnnnnnnnnnnnnnnnnnnnnnnnnnnnnnnnnnnnnnnnnnnnnnnnnnnnnnnnnnnnnnnnnnnnnnnnggcacgagnnnnnnnnnnnnnnnnnnnnnnnnnnnnnnnnnnnnnnnnnnnnnnnnnnnnnnnnnnnnnnnnnnnnnnnnnnnnnnnnnnnnnnnnnnnnnnnnnnnnnnnnnnnnnnnnnnnnnnnnnnnnnnnnnnnnnnnnnnnnnnnnnnnnnnnnnnnnnnnnnnnnnnnnnnnnnnnnnnnnnnnnnnnnnnnnnnnnnnnaatanccagtttntattcaccntacnctgcntttacagacaaangtctgaaaangctccnatgttatngttnnnnnnnnnnnnnnnnnnnnnnnnnnnnnnnnnnnnnnnnnnnnnnnnnnnnnnnnnnnnnnnnnnnnnnnnnnnnnnnnnnnnnnnnnnnnnnnnnnnnnnngnggctctacaaaaantcaaaanttancctggtatgcacctgtagtcccagct

SEQ ID NO: 30140 - DNA, 515 bp, Homo sapiens
  misc_feature (1)...(515): n = a,t,c or g
ttgaatcctnnnnnnnnnnnnnnnnnnnnnnnnnnnnnnnnnnnnnnnnnnnnnnnnnnnnnnnnnnnnnnnnnnnnnnnggcacgagctgagctccatgaggacaagaaccatgtctgactcaaggctgtatccacagcacatttcttctgtagacagtagctaaagtcacctgtctgagtaaggactaaacacaatgcagtcattttaatgagcctttttctttactaaaatctgattctatctttatcatgtatgggttctacattccaactgtatcactttgattttcattctagaaatgctgtttgctaacagtctgaaatgttggtgtcccaccaaaatacctgtgttgatacctaatgcccaaggttattaagaggtgggtcttgggaggtgcctatgtgggtgggatttgtgcccttgtaaaagaggtctgaagaagcttgtttgtcccttttgccacgtgaggacncagcaagaaggcaccatctatgagaaaagggccctcacca

SEQ ID NO: 30141 - DNA, 520 bp, Homo sapiens
  misc_feature (1)...(520): n = a,t,c or g
tttgaatccctttgaaaaattgaatccntnnnnnnnnnnnnnnnnnnnnnnnnnnnnnnnnnnnnnnnnnnnnnnnnnnnnnnnnnnnnnnnnnnnnnnnggcacgagcaagaccaactaaagatatctggatcaggcttacccaggcgggctatcttcacattagaaaaaatnnnnnnnnnnnnnnnnnnnnnnnnnnnnnnnnnnnnnnnnnnnnnnnnnnnnnnnnnnnnnnnnnnnnnnnnnnnnnnnnnnnnnnnnnnnnnnnnnnnnnnnnnnnnnnnnnnnnnnnnnnnnnnnnnnnnnnnnnnnnnnnnnnnnnnnnnnnnnnnnnnnnnnnnnnnnnnnnnnnnnnnnnnnnnnnnnnnnnnnnnnnnnnnnnnnnnnnnnnnnnnnnnnnnnnnnnnnnnnnnnnnnnnnnnnnnnnnnnnnnnnnnnnnnnnnnnnnnnnnnnnnnnnnnnnnnnnnnnnnnnnnnnnnnnnnnnnnnnnnnnnnnnnnnnnnnnnnnnnnnnnnnnnn

SEQ ID NO: 30142 - DNA, 519 bp, Homo sapiens
  misc_feature (1)...(519): n = a,t,c or g
ttgaatcctttcaaaaatttgaatccttnnnnnnnnnnnnnnnnnnnnnnnnnnnnnnnnnnnnnnnnnnnnnnnnnnnnnnnnnnnnnnnnnnnnnnnggcacgaggaaatgttccaggtctgtgaaatgtcaaatctgacaacagcttgacaaaaattaatcaagagaacaacttgacttaatggagagtgcacagtgttttttggctcagaacagtggctctccaagtgtggtactctaaaccaatagcatcagcactaactgggaacttgttagaatgcaaattctcaggctctatctcaggtctactgaactagacactggggggtacagcccagcaatccgtatttttaaaaagcccannnnnnnnnnnnnnnnnnnnnnnnnnnnnnnnnnnnnnnnnnnnnnnnnnnnnnnnnnnnnnnnnnnnnnnnnnnnnnnnnnnnnnnnnnnnnnnnnnnnnnnnnnnnnnnnnnnnnnnnnnnnnnnnnnngtggggcatgacggtgcatgcctg

SEQ ID NO: 30143 - DNA, 512 bp, Homo sapiens
  misc_feature (1)...(512): n = a,t,c or g
ttnnnnncnnnnnnattgannccctnnnnnnnnnnnnnnnnnnnnnnnnnnnnnnnnnnnnnnnnnnnnnnnnnnnnnnnnnnnnnnnnnnnnnnggcacgagctcactgaaaacagaagtctgcttattaaattttagctttttgttattaaaatttaaataaaatgtacatgttgggtacccaatagatgttagccccaaagctgcaaaatactggcttgtagaagtgttttgttggtttatatgacaatttagattttgggacattaaacataaaaactggatttgggatttctcttgatacgtttatactgtaatattttgtttgcatttcagcatttaactgtaactgaaatgattcctagtttagtcacagcataccctctctaaattgttagcttaattttccctttttttttttnnnnancnnatttnatntngnngggcccnggccngggnctnaancccgnatncccagcnnttnggnaaacngagggggaaggatngcttg

SEQ ID NO: 30144 - DNA, 520 bp, Homo sapiens
  misc_feature (1)...(520): n = a,t,c or g
ttgtantccttnanaancggaatcccnttnagctatcnnnnnnnnnnnnnnnnnnnnnnnnnnnnnnnnnnnnnnnnnnnnnnnnnnnnnnnnnnnnnnggcacgagccaagacctaaaattgtctggaacaaaaaaggaaagaaagtcagcaatcagagatttgaggtaatagagtttgacgatgggtctggatcagttctcagaatacaacccttacggactccgagggatgaggccatttatgaatgtgtggcctcaaataatgtgggagaaataagtgtatccaccagactcacagttttgcgggaagatcaaattcccaggggcttccctaccattgacatgggcccacagttgaaggtggttgagcgtactcgcacggccaccatgctttgtgcagccagtggtaatccggatccagaaatcacttggtttaaagatttcttacctgtggacacaagcaacaacaatggtcgtattaagcagttacgatcaggagcccttcagattgagcagag

SEQ ID NO: 30145 - DNA, 535 bp, Homo sapiens
  misc_feature (1)...(535): n = a,t,c or g
gnctacttcttgtntacccatnngatctntttggaatnaccntatgncnntnnnnnnnnnnnnnnnnnnnnnnnnnnnnnnnnnnnnnnnnnnnnnnnnnnnnnnnnnnnnnnnnnnnnnnnnnnnnnnnnnnncgnnnnnnnnnnnnnnnnnnnnnnnnnnnnnnnnnnnnnnnnnnnnnnnnnnnnnnnnnnnnnnnnnnnnnnnnnnnnnnnnnnnnnnnnnnnnnnnnnnnnnnnnnnnnnnnnnnnnnnnnnnnnnnnnnnnnnnnnnnnnnnnnnnnnnnnnnnnnnnnnnnnnnnnnnnnnnnnnnnnnnnnnnnnnnnnnnnnnnnnnnnnnnnnnnnnnnnnnnnnnnnnnnnnnnnnnnnnnnnnnnnnnnnnnnnnnnnnnnnnnnnnnnnnnnnnnnnnnnnnnnnnnnnnnnnnnnnnnnnnnnnnnnnnnnnnnnnnnnnnnnnnnnnnnnnnnnnnnnnnnnnnnnnnnnnnnnnnnnnnnnnnnnnnnnnnnnnnnnnnnnnnnnnnnnnnnnnnnnng

SEQ ID NO: 30146 - DNA, 516 bp, Homo sapiens
  misc_feature (1)...(516): n = a,t,c or g
tttgaanccttgnnnnnnnnnnnnnnnnnnnnnnnnnnnnnnnnnnnnnnnnnnnnnnnnnnnnnnnnnnnnnnnnggcacgaggtctatatctcgcccaaatgctgtggtcgggaggtgtcgcatgatccgccactcaagagacaagaaaaatgaacccaatcctcagaggtttgaccgaattgcacacacaaaggagacaatgctctctgatggtttgaactcactcacctaccaggtgctggatgtacagagatacccattgtatacccaaatcacagtggacatcgggacaccgagctagcgttttggtacacggataagagacctgaaattagccagggacctctgctgtgtgtctctgccaatctgctgggctggtccctctcatttttaccagtctgagtgacaggtccccttcgctcatcattcagatggctttccagatgaccangacgagtgggatattttnccccaacttggctcggcatgtgaattcttactctgcaaggggtt

SEQ ID NO: 30147 - DNA, 495 bp, Homo sapiens
  misc_feature (1)...(495): n = a,t,c or g
gtgngnnnnnntgnattgttncctattgagacgctgatcctnnnggaaaanccnnnnnnnnnnnnnnnnnnnnnnnnnnnnnnnnnnnnnnnnnnnnnggcacgagagcaagagcaccaccgacaatgacatcgcactgctgcacctggcccagcccgccaccctctcgcagaccatagtgcccatctgcctcccggacagcggccttgcagagcgcgagctcaatcaggccggccaggagaccctcgtgacgggctggggctaccacagcagccgagagaaggaggccaagagaaaccgcaccttcgtcctcaacttcatcaagattcccgtggtcccgcacaatgagtgcagcgaggtcatgagcaacatggtgtctgagaacatgctgtgtgcgggcatcctcggngaccggcaggatgcctgcgagggcgacagtggggggcccatggtcgcctncttcacggacctggttcctggtgggcctggtgaact

SEQ ID NO: 30148 - DNA, 533 bp, Homo sapiens
  misc_feature (1)...(533): n = a,t,c or g
tntgaattncattccntnnnnnnnnnnnnnnnnnnnnnnnnnnnnnnnnnnnnnnnnnnnnnnnnnnnnnnnnnnggcacgaggagatgagcttnnnnnnnnnnnnnnnnnnnnnnnnnnnnnnnnnnnnnnnnnnnnnnnnnnnnnnnnnnnnnnnnnnnnnnnnnnnnnnnnnnnnnnnnnnnnnnnnnnnnnnnnnnnnnnnnnnnnnnnnnnnnnnnnnnnnnnnnnnnnnnnnnnnnnnnnnnnnnnnnnnnnnnnnnnnnnnnnnnnnnnnnnnnnnnnnnnnnnnnnnnnnnnnanaaaaataanntaanncaaaacanaaaatancaagaattggttannanatggnnaannggaaactgntctgcattgctggaggaanngtaaaanggnannttaactggggaaacctgtcctnaaaaacttatnncanaattaccntacnnattcagcaatcccattnattgggtgcatacctanttnaaatgaangctngncctcaananangtatttgttccccangtta

SEQ ID NO: 30149 - DNA, 542 bp, Homo sapiens
  misc_feature (1)...(542): n = a,t,c or g
tnnnnnattggaattnaattaccgtnnnnnnnnnnnnnnnnnnnnnnnnnnnnnnnnnnnnnnnnnnnnnnnnnnnnnnnnnnnnnnnnnggcacgagaactgnnnnnnnnnnnnnnnnnnnnnnnnnnnnnnnnnnnnnnnnnnnnnnnnnnnnnnnnnnnnnnnnnnnnnnnnnnnnnnnnnnnnnnnnnnnnnnnnnnnnnnnnnnnnnnnnnnnnnnnnnnnttgggcctagcttttggcctcagcttttaacatgccttcctctgtatcttcagcagagannnnnnnnnnnnnnnnnnnnnnnnnnnnnnnnnnnnnnnnnnnnnnnnnnnnnnnnnnnnnnnnnnnnnnnnnnnnnnnnnnnnnnnnnnnnnnnnnnnnnnnnnnnnnnnnnnnnnnnnnnnnnnnnnnnnnnnnnnngggagggaggggaagaggggaagacagagtgggagagagagaggatgggccagtctgtggagctgcaagaatgcataaaacatttttgcttaagtttgcctcttatatgggcactggt

SEQ ID NO: 30150 - DNA, 541 bp, Homo sapiens
  misc_feature (1)...(541): n = a,t,c or g
taatatatntgaacagtgatncctttnnnnnnnnnnnnnnnnnnnnnnnnnnnnnnnnnnnnnnnnnnnnnnnnnnnnnnnnnnnnnnnggcacgaggctcaggggaggaaggagaggtgcccgtggtggcagagggtggggagcagggagggtccgaatactctgggactgtgttgaggtggatctgacagagttaggtgcaggccaatcagtggaggcttccagacacgcctgggaggtggtgagaaggaacaggtgccactgggctccacagctatttctgagctttgcaccaggctggggtgggcggggaaggcagggttggggatggaggtgcagtaggttggtttccttcaccccaacctcctccctcccctcccggggttatgccctgcccacaagacaggcgggggacagagccgggccgagacttggtccctgctcagtgacagcnccatggacacgagatactctggaaagaagtggncggnccccacgggtgagacacngccaggactgttctgatcccagncctcctgt

SEQ ID NO: 30151 - DNA, 469 bp, Homo sapiens
  misc_feature (1)...(469): n = a,t,c or g
ttgannccnaannnnnnnnnnnnnnnnnnnnnnnnnnnnnnnnnnnnnnnnnnnnnnnnnnnnnnnnnnnnnnnnnnnnggcacgagcggcacgagaactggagtgacgactttgtcctgcccaatggctcagcagcgtccagtgtggagaccttcggggctgcatggcgggcgcccggctcctccaagggctgtggcgagggctgcgggccccaaggctgcccagtgtgcttggcagaggagactgcaccctatgagagcaacgaggcctgcgggcagctccggaacccccagggccccttcgcgacctgccaggcggtgctgagtccctctgagtacttccgccaatgcgtatacgacctgtgcgcgcaaaagggtgacaaagccttcctgtgccgcagcctggcagcctacacggcggcctgtcaggcagctggcgtggccgtgaagccctggaggacagacagct

SEQ ID NO: 30152 - DNA, 515 bp, Homo sapiens
  misc_feature (1)...(515): n = a,t,c or g
gctatgattggattcnnnnnnnnnnnnnnnnnnnnnnnnnnnnnnnnnnnnnnnnnnnnnnnnnnnggcacgagttnnnnnnnnnnnnnnnnnnnnnnnnnnnnnnnnnnnnnnnnnnnnnnnnnnnnnnnnnnnnnnnnnnnnnnnnnnnnnnnnnnnnnnnnnnnnnnnnnnnnnnnnnnnnnnnnnnnnnnnggcattttatttcagtacttaaaatttttgctcttcaaaagacactgtatcaagaaaatgaaaacaaaccacagtctgagagaaattatttgcaaaacatgtatccaaaatacatgaagaattctcacaattcgttaagacaacccaatttttttgcctttttttttttaaaacaaggttcactntcatngtccaggctgcaacctctacctccngggctcaagcctctgcagtaggtggnactgcagggggccgccactgnccaggcttacttttatactttttgaaaagacaggtttnttcgggttgnccaggctggg

SEQ ID NO: 30153 - DNA, 522 bp, Homo sapiens
  misc_feature (1)...(522): n = a,t,c or g
ggtnttnntntgatacccgtnnnnnnnnnnnnnnnnnnnnnnnnnnnnnnnnnnnnnnnnnnnnnnnnnnnnnnnnnnnnnnnnnggcacgagccttttttccccctccttcctcctttatttctttttgtcatttacatttgcttgaaannnnnnnnnnnnnnnnnnnnnnnnnnnnnnnnnnnnnnnnnnnnnnnnnnnnnnnnnnnnnnnnnnnnnnnnnnnnnnnnnnnnnnnnnnnnnnnnnnnnnnnnnnnnnnnnnnnnnnnnnnnnnnnnnnnnnnnnnnnnnnnnnnnnnnnnnnnnnnnnnnnnnnnnnnnnnnnnnnnnnnnnnnnnnnnnnnnnnnnnnnnnnnnnnnnnnnnnnnnnnnnnnnnnnnnnnnnnnnnnnnnnnnnnnnnnnnnnnnnnnnnnnnnnnnnnnnnnnnnnnnnnnnnnnnnnnnnnngcttgacattttaaattacggtagatatctatttttgnaagttgtttggacataagcttttanttttactttttg

SEQ ID NO: 30154 - DNA, 502 bp, Homo sapiens
  misc_feature (1)...(502): n = a,t,c or g
nnnnnnnnnnnnnnnnnnnnnnnnnnnnnnnnnnnnnnnnnnnnnnnnnnnnnnnnnnnnnnnnnnnnggcacgaggagacaccagcgctttctctccagcatgtgagacacagcaagatggtggacctttgcaaatcagggagaggccctcaccacacatcagacctggcagcannnnnnnnnnnnnnnnnnnnnnnnnnnnnnnnnnnnnnnnnnnnnnnnnnnnnnnnnnnnnnnnnnnnnnnnnnnnnnnnnnnnnnnnnnnnnnnnnnnnnnnnnntatcctgcttcataattttcagcagagccagggaaccccagctactctcctttaagagttgnnnnnnnnnnnnnnnnnnnnnnnnnnnnnnnnnnnnnnnnnnnnnnnnnnnnnnnnnnnnnnnnnnnnnnnnnnnnnnnnnnnnnnnnnnnnnnnnnnnnnnnnnnnnnnnnnnnnnnnnnnnnnnnnnnnnnnnnnnnnnnnnnngctgggcgncgggg

SEQ ID NO: 30155 - DNA, 224 bp, Homo sapiens
  misc_feature (1)...(224): n = a,t,c or g
gtaagnnnnnttttaggttntanntcctnataccctnnnnnnnnnnnnnnnnnnnnnnnnnnnnnnnnnnnnnnnnnnnnnnnnnnnnnnnnnnnnnnnnnggcacgaggacttaatttttcttacaagcctaaacttcatttagattaaggatgttggttgttagagaagagaagcagtaagggagtatacattaaatttgccatcaataaaaaaaaaaaaaa

SEQ ID NO: 30156 - DNA, 539 bp, Homo sapiens
  misc_feature (1)...(539): n = a,t,c or g
ggtnnnngntntnaatcccttaggtcctganacccgtnnnnnnnnnnnnnnnnnnnnnnnnnnnnnnnnnnnnnnnnnnnnnnnnnnnnnnnnnnnnnnnnnggcacgaggatctttcttcatactttgcttgattttgggaagaaatccaatccgaccccgtttgtgctccaaatttcgaggctctttcacttttactcccaaatgcttcatatacatgagaataacatactgcatggtggagctcttatcttcctctacagcctgagcagtcatcaatacttcttcaattttggcaacaatctgttctgcacatgtccgctccttctccaaagtcaatcggtccttgtctcgctctgcatcaagtttagtcagctcgctttcagccaaggtcagtcccatactacgtttctgccgaaaatcttctaagtgcctttgaacttctggatggactctttcttgcataatttggatatangtggcgatgcagatcctcangaatgagctcnagtcttntttttctagantctggagacatt

SEQ ID NO: 30157 - DNA, 512 bp, Homo sapiens
  misc_feature (1)...(512): n = a,t,c or g
ttgntannnnnnnnnnnnnnnnnnnnnnnnnnnnnnnnnnnnnnnnnnnnnnnnnnnnnnnnnnnnnnnnnnnnnnggcacgagcactgatctaaaagtgtcagaaaaccataaaggatgtgttttgcctgtgtctcatcagaacaatgagaaaatgccacttttagaacttggaggagaaacaacccctcctttgtccacagagcgtagtccagaagctgtgggaagtgagtgtccatccagagtcctcgtccaggtcaggtccttcgtgctccccgtggagagcacccaggatgtgagctcccaggtcatcccagagagctctgaagttagagaagtgcagttgccaacttgtcacagtaatgaacctgaagtggtttccgttgcaagttgtgttcccccacaagaggaagtactgggcaatgaacactctcattgcacagcanaactcgcggcaaaatctgcccacaagtcatacccgtcagcatcagagaaaactctgctattcaggg

SEQ ID NO: 30158 - DNA, 589 bp, Homo sapiens
  misc_feature (1)...(589): n = a,t,c or g
tgnannnaaanannnngananantnnaagnnaaaatnggggngnnnanangnaaganaganggnatttntgntaantnggataccttagttngatacgaattaaacgactcannnnnnnnnnnnnnnnnnnnnnnnnnnnnnnnnggcacgagctagcccactgttcagggtccggggtggcggcatggcctgggggtcctggcaccgctgctcctctgcccaccctaacttcccggcatggcggctgccccctctgagcgtccccaaccaaactgcaggggatatgaagcaagctggacttggggagacatctctgctcgagtgcacagttggcctgatgacgactgctcttgggttcacgggttccaggctctgcccgggagcctcatgcaaactggtcccgttctacagacgaggaaactgaggcacaagagtgantacggctgtncctgagctcctgcagccagtaagtgtctctgaggatgaactgccatgtgcccggcggggatgccgtccctggcccttgctgaatgcctctgggacgaggncagctgancctgncattctaactcagacaccatctnactt

SEQ ID NO: 30159 - DNA, 541 bp, Homo sapiens
  misc_feature (1)...(541): n = a,t,c or g
tnccctccccccctttgcttnnnnnnnnnnnnnnnnnnnnnnnnnnnnnnnnnnnnnnnnnnnnnnnnnnnnnnnnnnnnnnnnnnnnnnggcacgagacattacattttatagagatgccagttcaccccacaattaaattataaagttaaatgtaattccaaacacacttttaccagatctttgtttaacttgacaaagtcagtcattctaaagctcataaggaaatatcagcaggtgcttcgatcagtcatgtttttacaaagagtaatgagagggaatgtgtactaccacatactaaaacatattttaaagctgaagtaattaaaataaggtcttgccttaaacatagacatatgaataaaaagaatagctcagcaacagaccctagtatgtatgagtctgtaaagagggtatttcaaattaatgcagtaaaatgattaatttaacaaatacctattgagtattatgcattgggcagcttctaggccttcgaggttacagaagtaaaaatgagcacanatcttttctttcatggact

SEQ ID NO: 30160 - DNA, 467 bp, Homo sapiens
  misc_feature (1)...(467): n = a,t,c or g
tttgatnccctnnnnnnnnnnnnnnnnnnnnnnnnnnnnnnnnnnnnnnnnnnnnnnnnnnnnnnnnnnnnnnnnnnnnnnnggcacgaggagagctagcaccatgataccctggtgttcctgggtgaggtgacaccccaccctgcttcagctcgccctccttgggctgtacacactgtccaaccagttccaannnnnnnnnnnnnnnnnnnnnnnnnnnnnnnnnnnnnnnnnnnnnnnnnnntgccgatcttgtnnnnnnnnnnnnnnnnnnnnnnnnnnnnnnnnnnnnnnnnnccagctgcccatcnnnnnnnnnnnnnnnnnnnnnnnnnnnnnnnnnnnnnnnnnnnnnnnnnnnnnnnnnnnnnnnnnnnnnnnnnnnnnnnnnnnnnnnnnnnnnnnnnnnnnnnnnnnnnnnnnnnnnnnnnnnnnnnnnnnnnnnnnnnnnnnnnnnnnnnnnnnnn

SEQ ID NO: 30161 - DNA, 488 bp, Homo sapiens
  misc_feature (1)...(488): n = a,t,c or g
ttnnnnttnnnnnntnctnaatnccccttcagctncngacacnnnnnnnnnnnnnnnnnnnnnnnnnnnnnnnnnnnnnnnnnnnnnnnnnnnnnnnnnnggcacgagcacagaagggggcctaccctggtgtcggggtcagggagggcttccctggggttggggtatttagctgagacctgaagggtgagtagatttcagcagaaagagcccggagggatggctcccagcagagggtatgtcagggacaaaggccaggaggctggaaggaacctagagcagcagggaaccagaggtggccaggtggctgcaggaaggaaggctgctgggcatggagctgggctttcctgtgcacgcaaggaagccatgggaggatgcagccagaatgccaggcaggaggagtagacatggcaggggcctgagggggtcctttgccatcccctagatgagagttggaggcattagggtcagacagtccagggttgaag

SEQ ID NO: 30162 - DNA, 555 bp, Homo sapiens
  misc_feature (1)...(555): n = a,t,c or g
gnnnnnnnnnnntnnnnnnnnncctntgataccgnttnnnnnnnnnnnnnnnnnnnnnnnnnnnnnnnnnnnnnnnnnnnnnnnnnnnnnnnnnnnnnnnggcacgagttcagagctcagatatcttctgcctgtgtcttacctggtcacagagaattaaaagaataccccaagccacaggctccacatacaaactgggaagnnnnnnnnnnnnnnnnnnnnnnnnnnnnnnnnnnnnnnnnnnnnnnnnnnnnnnnnnnnnnnnnnnnnnnnnnnnnnnnnnnnnnnnnnnnnnnnnnnnnnnnnnnnnnnnnnnnnnnnnnnnnnnnnnnnnnnnnnnnnnnnnnnnnnnnnnnnnnnnnnnnnnnnnnnnnnnnnnnnnnnnnnnnnnnnnnnnnnnnnnnnnnnnnnnnnnnnnnnnnnnnnnnnnnnnnnnnnnnnnnnnnnnnnnnnnnnnnnnnnnnnnnnnnnnnnnnnnnnnnnnnnnnnnnnnnnnnnnnnnnnnnnnnnngatttttantnaagcggccgangctaatcccttaagngggggga

SEQ ID NO: 30163 - DNA, 547 bp, Homo sapiens
  misc_feature (1)...(547): n = a,t,c or g
tnnnntnccccccnttgaccacccncttnnnnnnnnnnnnnnnnnnnnnnnnnnnnnnnnnnnnnnnnnnnnnnnnnnnnnnnnnnnnnnnggcacgagcaaatatgtggagcatgtggaaatgttatgagatgccaagagaaagtgcagaatacaaaactataagcaaaccatgattacacctatatgtatatatgtattctgatatacagatatgaaggaaatgtgcaaaataaaatgcagattttatctgtagagttatttttgttgtaacttttcttttgagtatattttaatgtagatatacatagttttaatgaaattggaattacatttataatgggtttataaaagatagcagaccagagtcatttttcttttttttaaaattgaaaccggtaagtaagagcttgtttttttcctcctacgcagttggagagtgacagatattgctgatgaccctcctttcaggatttctgcttgcagccaagtngggaggaaatgtttcnaatcaaaaaggngaaggatgaanagactcaangccttc

SEQ ID NO: 30164 - DNA, 559 bp, Homo sapiens
  misc_feature (1)...(559): n = a,t,c or g
gnnnnnnnnnnaggtcccnccccctctttgaccccctantnataccgtnnnnnnnnnnnnnnnnnnnnnnnnnnnnnnnnnnnnnnnnnnnnnnnnnnnnnnnnnnnnnnnnnggcacgagggataaaactggtagtatgaacgttatccacatgctggaaagtttcacattccggaaccatgttagcatggcctttgaattgctgagcatagacctttatgagctgattaaaaaaaataagtttcagggttttagcgtccagttggtacgcaagtttgcccagtccatcttgcaatctttggatgccctccacaaaaataagattattcactgcgatctgaagccagaaaacattctcctgaaacaccacgggcgcagttcaaccaaggtcattgactttgggnccagctgtttcgagtaccanaagctctacacatatatccagtctcggttctacagagctccagaaatcatcttaggaagccgctacagcacaccaattgacatatggagntntggctgcatccttgcanaacttttaacaggacagcctctctt

SEQ ID NO: 30165 - DNA, 545 bp, Homo sapiens
  misc_feature (1)...(545): n = a,t,c or g
tcnnntcccccctcgtgacacncnnttnnnnnnnnnnnnnnnnnnnnnnnnnnnnnnnnnnnnnnnnnnnnnnnnnnnnnnnnnnnnnnnggcacgaggaaaaaaagactgaaagggtaagctagtaaaacggattccctatgggggaggggaatgggctggaaagggatgagagtgaggctttcctgaatagatctttttatattgctttgacttttgagccatacaaatatttacatatttaaaaactacaagtcagaaaagaagaaagcannnnnnnnnnnnnnnnnnnnnnnnnnnnnnaaacagcctagctatctatgaaactgacaacagaagcacacggagagaagcctggntccacgtgactttanagcctagngaccaggcatccttanngggatacactctaagggcaaagaggaaaggcantttcaatcagatctattgttagaattaatataggtactatgatttcaaaacttttaagtatattataggatagagcncataantatgttnatgtancacacatgttcaggctt

SEQ ID NO: 30166 - DNA, 544 bp, Homo sapiens
  misc_feature (1)...(544): n = a,t,c or g
gtnnnnnnccctctttgccccccctttgacaccgnnnnnnnnnnnnnnnnnnnnnnnnnnnnnnnnnnnnnnnnnnnnnnnnnnnnnnnnnnnnnnnnnnggcacgagnnnnnnnnnnnnnnnnnnnnnnnnnnnnnnnnnnnnnnnnnnnnnnnnnnnnnnnnnnnnnnnnnnnnnnnnnnnnnnnnnnnnnnnnnnnnnnnnnnnnnnnnnnnnnnnnnnnnnnnnnnnnnnnnnnnnnnnnnnnnnnnnnnnnnnnnnnnnnnnnnnnnnnnnnnnnnnnnnnnnnnnnnnnnnnnnnnnnnnnnnnnnnnnnnnnnnnnnnnnnnnnnnnnnnnnnnnnnnntttggagctttttgcttttgttaggactcttataatcgttatttctgtaatttctgagatttttcaagnggcttacctaagcttgacctcatgtactgaggggnattnnggggcaattatganaaggntgagtgtgggtcaataagatagatgactgatgtacccttaacatttgtaattttgctattttccagtccc

SEQ ID NO: 30167 - DNA, 541 bp, Homo sapiens
  misc_feature (1)...(541): n = a,t,c or g
tcnnntcccccctttgaccaccncttnnnnnnnnnnnnnnnnnnnnnnnnnnnnnnnnnnnnnnnnnnnnnnnnnnnnnnnnnnnnnnnggcacgagcagttgccaattacttggccttaagggtaaaaagtacaatatacactaaacctcaaccgttaaagcagatgcaaaaattcacctcacctaaattgaacttcttgcatatttccattactgacttggatagtctttctttcatatcactaatggagttggaataaagagctgtttgcctatccctgttaatgatggttgagtttaagaatcttcctcgtcacgtttgtgttcagatctcttatgttataattagatcagagactggtagcatcgtttctctctctgaaagcaccagtgcccagagtctgctcggtaataaaattatggatccagattgttctgagagacgaanatacttgctgctgatagaggtgaaaacganattgatccgncnggggnnttacggagtgcactgggtgctgcacagacttgcaaggattgcta

SEQ ID NO: 30168 - DNA, 550 bp, Homo sapiens
  misc_feature (1)...(550): n = a,t,c or g
gnnnnnngnnnnttnnnnttttatntacngatacccntnnnnnnnnnnnnnnnnnnnnnnnnnnnnnnnnnnnnnnnnnnnnnnnnnnnnnnnnnnnnnnnnnggcacgagctaattaatattttatgaattagttgtatgtaggattcagatattattcattattagatttgaattatgctgtcctatactgcagggagcttgtactataatatagataacaacaaaatacgttatggatgctgtctaaactgggccaaggttagctgtgtttccaggtgtaatggcagaagcaaactctgggacgtatgcatggctaaattttcaagaaaaaggtgggaagaaaataggaataatgaatagtagctttaaataacttgagcagaagacagtattctgacagaaaaacagcttanatgcgattgaatcgcccttgatcccatggactgacccctgcataacgttttcacaggtgccagtggcatttcactggggcacatgtgccaggtatcccntggaantanaaggnaatttcagggagggatggcaa

SEQ ID NO: 30169 - DNA, 456 bp, Homo sapiens
  misc_feature (1)...(456): n = a,t,c or g
nnnnganncccnnnnnnnnnnnnnnnnnnnnnnnnnnnnnnnnnnnnnnnnnnnnnnnnnnnnnnnnnnnnnnnnnnnnnnnnggcacgagattttaattcagagtgattgttgattactcttaagatttaactctctcagctaggttgtcaggtggcttgtataccactcttgtagatttgctgtctttggtagtgtttatgaactatacttcaccatgcagagaagagatgggatttgactcatggcataactgaatacttgagtggatgctttgacatgtttacataattggagggtgacatcatcacaataactctaggaacaaggatttgttttaaaaatctgtcagtgtgacctagggtcacagagtagtttgctacaaaaatcatatgtatttaaatatatgggtcattaagactttttgttgatgacttgtgggaagtctgtatatga

SEQ ID NO: 30170 - DNA, 468 bp, Homo sapiens
  misc_feature (1)...(468): n = a,t,c or g
tgntnccctttnnnaanggaanccctnnnnnnnnnnnnnnnnnnnnnnnnnnnnnnnnnnnnnnnnnnnnnnnnnnnnnnnnnnnnnnnnnnnnnnnggcacgagggggggactagttttcgttttggtgactcgtgattcagatttcataaaatctgaggagccatcgattatgtagtgttcagtagtcaatttcctgtttttctttcattatttacttcctgacttttttttaccagcttctgggtttttgtttatgttttggtgggctccttttcatctcctctggaatggagtggcattttgggggcagtcaaccctgacagcttggtgcatatacagtaggcaagcccacgagttctttaggagtggtcttgcctgatatatatgtgtcacaggtgttcctcctgagttacactgccgtggaaggatgatcaggggaaaaatagccacttaaatgagatgttg

SEQ ID NO: 30171 - DNA, 546 bp, Homo sapiens
  misc_feature (1)...(546): n = a,t,c or g
gnnnnnttnnnttnnnnnnnttgnattncgtaccngnnnnnnnnnnnnnnnnnnnnnnnnnnnnnnnnnnnnnnnnnnnnnnnnnnnnnnnnnnnnnnnnnnggcacgagatcccgaatcaaagcggcgcattgaggcaggtggggtgccagtggaagagagaaagcaggcgagtgtttacggcctgacttgggaggccggcggatcagcaattgcagaagcaggcagcggcagagagggaatggtgcaggcaggcgctgagaaggacgcgcagtccatctctctcagaaaagaacaatgggaaaccaaacatcaaagaacagaaaggaagatccctaaatacgttccgcctcacctttctccagataagaagtggcttggaactcccattgaggagatgagaagaatgcctcagtgtgggatccggctgcctctcttgagaccatctgccaatcacacagtaactatttggaatggtgagcgaactgcggggaccggtgggagctcattnagacnggcttttttaccaantnacccgaccccaaa

SEQ ID NO: 30172 - DNA, 528 bp, Homo sapiens
  misc_feature (1)...(528): n = a,t,c or g
tnnnnnnnnnnnnnnnnnnnnnnnnnnnnnnnnnnnnnnnnnnnnnnnnnnnnnnnnnnnnnnnnnnnnnnnggcacgaggttgactggaagtgtggatagtagacatcttattcctgattttaaagagaatgtctgtaacatttcactatgaagaatgaagtttatagctgggtgtggagnnnnnnnnnnnnnnnnnnnnnnnnnnnnnnnnnnnnnnnnnnnnnnnnnncacctggccaatgctttgcttttcaaactcttcaaagggtatgtaataaaaaggaaggcttaccaccagacaccataccttgattctataagcagtgactgtatttttgtatgttctttaagtgatattttttatccttatgcactcctttatttttactggaagaggagggaccacatgaggcattagtgatgagcattctttttttttttnatggcttttgcctgntttttanggnnggnnggnnggttnggntttnanaaancncnnttttnannanncccanttttttttaaa

SEQ ID NO: 30173 - DNA, 566 bp, Homo sapiens
  misc_feature (1)...(566): n = a,t,c or g
gnntnnnnnnnnttnntttgtaacctncnnanacccttnnnnnnnnnnnnnnnnnnnnnnnnnnnnnnnnnnnnnnnnnnnnnnnnnnnnnggcacgagctcttcagaaacgccaggacaggcccagggcattttcaggagctcttagcaaagcagcctcagtccgtttcctggcaataccctacactaaaccagcctctggggagagacctgtggcagggaggaatgcagacgccctgctggcctgtctctgacccctcacatgctgcactcatattaattttccaggattcctgaagtccagcctcaagggatatgtgacagaaaaaagggaatcaaatgctcttttgtcctatgggcaaacttgctttaatttaaagcactgtgagggctgaaggcagatgatcctgtctccaagcatggactctggccagaaccccctggagggcagaaggcagggagctgtctgcagaangccagtggggtccacccccaggggcagcagggatggtcacgaaggaaaccatgccaggaagggcaagtggtggactcaganaacggnacaa

SEQ ID NO: 30174 - DNA, 551 bp, Homo sapiens
  misc_feature (1)...(551): n = a,t,c or g
tnnntttgnnancctttnnnnnnnnnnnnnnnnnnnnnnnnnnnnnnnnnnnnnnnnnnnnnnnnnnnnnnnnnnnnnnnnnnnnnnnnnnnggcacgaggttttgcaactttgtgctaattctgatgttatcatttgcatactttatttgaaaaggatattatttacaaaagaaaaatagtattcatctgccaaaaagaaggtagtaaactcattttgataactcgcggtgaggtggaagtctggcttccctccagcctacttgtaggaccttccgcatgttaaactccatagaagttaatgtccccttagagcttctgcgagcagtcgagtagtcatctgctaagcttcgcttttttttgcccatacatattgattgtttttaggagaatcaacatttagtgaatgtcactgtgcaccagacaaatagaagggaagctcagcacctttttgaccaagcagacgtctgtaaagttcttactcaggagtctaggattgtcacacgaagaagtgttcatcccaccttatgtgcccctggtcaaacttgggac

SEQ ID NO: 30175 - DNA, 532 bp, Homo sapiens
  misc_feature (1)...(532): n = a,t,c or g
nnnnnnnnnnnnnnnnnnnnnnnnnnnnnnnnnnnnnnnnnnnnnnnnnnnnnnnnnnnnnnnnnnnnnnggcacgaggttggttctgttttcctgcaaaccctgactgataaccacagtggccccagctggggacctagaaggttagtggtagaagggaagagggtaaaagcgggtggaaagtgtaggctcacttggtgggtattcagtgcagacctccatggagaagggctggacctcaggagctctcagtggagccagggaaagacagtcacaagggtggtgtccacatgcccctggggggcaactatctcaccagccctggctcctgtgacaaggtcctgattcctaagcagggagaggcaggatgagaggcagctccctcccctcctacatcacagaaagcagaagcctcgagaggagaagcctcttcaccactccctggcctacgctggcacccaccttcccagttcccctcctgtcctcatggagacatgtcttttctccccactctcccggacctccctctctg

SEQ ID NO: 30176 - DNA, 509 bp, Homo sapiens
  misc_feature (1)...(509): n = a,t,c or g
annttgntnacnnnnnnnnnnnnnnnnnnnnnnnnnnnnnnnnnnnnnnnnnnnnnnnnnnnnnnnnnnnnnnnnnnnnnnnggcacgannnnnnnnnnnnnnnnnnnnnnnnnnnnnnnnnnnnnnnnnnnnnnnnnnnnnnnnnnnnnnnnnnnnnnnnnnnnnnnnnnnnnnnnnnnnnnnnnnnnnnnnnnnnnnnnnnnnnnnnnnnnnnnnnnnnnnnnnnnnnnnnnnnnnnnnnnnnnnnnnnnnnnnnnnnnnnnnnnnnnnnnnnnnnnnnnnnnnnnnnnnnnnnnnnnnnnnnnnnnnnnnnnnnnnnnnnnnnnnnnnnnnnnnnnnnnnnnnnnnnnnnnnnnnnnnnnnnnnnnnnnnnnnnnnnnnnnnnnnnnnnnnnnnnnnnnnnnnnnnnnnnnnnnnnnnnnnnnnnnnnnnnnnnnnnnnnnnnnnnnnnntaggaaaaccagagacctttgtcacttggttatctgctgaccttccttcctattgg

SEQ ID NO: 30177 - DNA, 506 bp, Homo sapiens
  misc_feature (1)...(506): n = a,t,c or g
tnnnnnnnnnnnnnnnnnnnnnnnnnnnnnnnnnnnnnnnnnnnnnnnnnnnnnnnnnnnnnnnnnnnnnnnnnggcacgaggaggacttgtgcaaagcatgtgtgcccagacccatcagactcctcagatatggcctcaaatacctagtgatgtagaagtaccgtggagggcctcaataagagggcaagcacacagatggctagaagcctgtatggcttctggtcaggatgaacccttggccaagttcttgaggaaaccaggtctatattcctgaagggacagttcagtttgggactctattaggtttcagtagtaatataggctgcttgcatcattttaacattcatagggaaaatctctttgagcaggctataaatgaagctgttgcaggtagggaagaacaggacctgaagatgggaaccaggaagtgagatcctgttggcaaagggaatgtagagcttccagggtgcattgccctggtctcattgnntaccagncttccag

SEQ ID NO: 30178 - DNA, 506 bp, Homo sapiens
  misc_feature (1)...(506): n = a,t,c or g
annnnnnnnnnnnnnnnnnnnnnnnnnnnnnnnnnnnnnnnnnnnnnnnnnnnnnnnnnnnnnnnnnnggcacgagcggcacgagcaggggctgcctgggggtgggtgttacctgctgtatgtctgtgtgcgtnnnnnnnnnnnnnnnnnnnnnnnnnnnnnnnnnnnnnnnncgcgcgcacgcgcgtctgtgtgcccactactgtctcttacgtctctgtctctctctctctcccttctcgctctttccgtcgccctctctttctgtctctgtccgtctgtgtgtgcatgcgccttgggacacatgttccctgtgcgccggaggctgggtttcttgcacgtcggcctttcttctggncancctctccccgcgtntctgccatcacctgaanacccccacgcnanacactgnatgtcacctgtgcctgncgctcngccaccttgcggccgtgtttgactnaactnagctcctttaacccttaatatttnnggnaaaanccnttctt

SEQ ID NO: 30179 - DNA, 504 bp, Homo sapiens
  misc_feature (1)...(504): n = a,t,c or g
nnnnnnnnnnnnnnnnnnnnnnnnnnnnnnnnnnnnnnnnnnnnnnnnnnnnnnnnnnnnnnnnnnggcacgaggggcaggcctctattcacagacctcaaaatatgtaaagcaaaagctgatgggcagacaagagcaacaggaaacaggcctacccatgggtacagcaggagtgctgaccctcttctttcagtaactgagaggagatagcagaaaatcaagagggatagaaaagacttgaaaaacactctttgctaattggagccagttgagagtcgtgtatcagtacactcaacaatgacagtcgtgtagcattacacccaacaacagtcacatagcattacacccaacaatgacagtcacatagaattacacccaacgatgacagtcacgtagcattacacccaacgacgacagtcagcattacacccagcaacaacagtcacatagcatacacccacaatgacgtcacatagaatacccccaacacaggcatgtacatac

SEQ ID NO: 30180 - DNA, 590 bp, Homo sapiens
  misc_feature (1)...(590): n = a,t,c or g
ggnnnttnntnttnntaaaattttgaaacccttnnnnnnnnnnnnnnnnnnnnnnnnnnnnnnnnnnnnnnnnnnnnnnnnnnnnnnnnnnnnnnnnnggcacgagggagaacttgctagctgcagttgccaggtcaacccctagctctgactgcccgtggtggccccaaggacacccagcccagctatcaccatggcaatggaccttacaacgacgtgaacgtcaatggctgctggtttttcaagctgcctcacaaggatggtaatagctgtaatgtgggaagcccctttgccaaggacttcctgcccaagatggacgatggcaccctgcaggctggcccaggaggtgccagtgggcccngtgctctggaaatcccnngaatgatttntttctggangaacancccataaacgtatnacctcccanatggtggtgtggctgnccangtcactntgcccgtgctgngatnangnactcctgnctatgatgangaaggcctntatgnnncatcttgcctaagtggtgactgccggttcattaatcgncgncttgtggagcccacatgggttnacggcaacnttcccngctt

SEQ ID NO: 30181 - DNA, 594 bp, Homo sapiens
  misc_feature (1)...(594): n = a,t,c or g
gnnnnnnnnnnnntnnnntttggannnctttggannnnnnnnnnnnnnnnnnnnnnnnnnnnnnnnnnnnnnnnnnnnnnnnnnnnnnnnnnnnnnnnnnnnnnnnggcacgagcggcacgagaatttctgaatgaatgttacaaattctcatggtgccctttgaggcctatattacaaaatttgattttttaattcattgatgtatgattcagatgtgtttcccttcatgcagaaaatgaaatagctggtatcctaagtgggaaagaacccagaatttctaaattaggcttctatttatattcatatattttgaaaaagtttttaaaattttgttctataggcatttaaatgagactatgccttttatagttaatgagggggctgtgctggaacaaagtttgaaatatctcatttttaaagccctttctgtgactttaacacattctgcaaattttggttaaagtaattaaatgtctatcctaacactcatagcatagacatattgagagatattgaagcatgacagggaaaaaaaaggaaagaaagtgacaggtcagcaaaggaggaacaacttactagcttgagcactgtc

SEQ ID NO: 30182 - DNA, 570 bp, Homo sapiens
  misc_feature (1)...(570): n = a,t,c or g
ttnnnnnnntttggnnnnnnnnnnnnnnnnnnnnnnnnnnnnnnnnnnnnnnnnnnnnnnnnnnnnnnnnnnnnnnnnnnnnnnnnnggcacgagggcgactccgttcaccccgtgtgctgtttagcacccagcctccccgtgaagctgcagacactcaggatctggacttcgaggtcggtggtgctgcccccttcaacaggactcacaggagcaagcggtcatcatcccatcccatcttccacaggggcgaattctcggtgtgtgacagtgtcagcgtgtgggttggggataagaccaccgccacagacatcaagggcaaggaggtgatggtgttggaagaggtgaacattaacaacagtgtattcaaacagtacttttttgagaccaagtgccgggacccaaatcccgttgacagcgggtgccggggcattgactcaaagcactggaactcatattgtaccacgactcacacctttgtcaaggcgctgaccatggatggcaagcaggctgcctgcggttatccggatagatcggnctgtgtgtgtgngctancangaagcttgnaaaa

SEQ ID NO: 30183 - DNA, 585 bp, Homo sapiens
  misc_feature (1)...(585): n = a,t,c or g
gggntttnnnttntannatcctgatacctnnnnnnnnnnnnnnnnnnnnnnnnnnnnnnnnnnnnnnnnnnnnnnnnnnnnnnnnnnnnnnnnnggcacgaggcagtgaaagaaccctggcggggcagcctgggaatgcagggctctgctccttgtgaagccacaaatgaccacagggccttgaccagtcagccacactctgggagcatccagcttctagtgaataaaacgggtagaatggactccctggtctaactccgtgctttgctagcgatcatgttctgattgtgtggcaaggctggcattcctgagttgccctggtagtgctcattgagtgggccagtgacctactggacctgcttgctggcatgggccgtccttgcaactgtgatagtggctgcttggaaaccaggttttgcattcttgagaattggaatgagtaagttcttatcagaatcagtggttctcaactggggccattttgcccctacgtgacatttggccatgcctggagagctggagacatttcttggtgncacaactgaagggcaaggggtgggtgctattgcatctaatgaataaaaa

SEQ ID NO: 30184 - DNA, 540 bp, Homo sapiens
  misc_feature (1)...(540): n = a,t,c or g
ttnnntntanaatttgaataccattttgactgcnnnnnnnnnnnnnnnnnnnnnnnnnnnnnnnnnnnnnnnnnnnnnnnnnnnnnnnggcacgagctggattcaagtgaaggctgtgctattaatctatactcacactttctccaatacacaaaatttagccaattctgggtgtgaagatttgatgaaaatgcagttaggttagaggtccatttaattgtatctaaggacgctcccttcccctctttatttttattttgnnnnnnnnnnnnnnnnnnnnnnnnnnnnnnnnnnnnnnnnnnnnnnnnnnnnnnnnnnnnnnnnnnnnnnnnnnnnnnnnnnnnnnnnnnnnnnnnnnnnnnnnnnnnnnnnnnnnnnnnnnnnnnnnnnnnnnnnnnnnnnnnnnnnnnnnnnnnnnnnnnnnnnnnnnnnnnnnnnnnnnnnnnnnnnnnnnnnnnnnnnnnnnnnnnnnnnnnnnnnnnnnnnnnnnnnnnnnnnnnnnnnnngacctcggcccccaaaatgctgggattacaggcg

SEQ ID NO: 30185 - DNA, 524 bp, Homo sapiens
  misc_feature (1)...(524): n = a,t,c or g
accnntntttgaanacnnnnnnnnnnnnnnnnnnnnnnnnnnnnnnnnnnnnnnnnnnnnnnnnnnnnnnnnnnnnnnnnnnnnnggcacgaggttttatcgtaatataattatcacatacaagatgtggtaattgcctatttttaggaatctccccactgggaatcatggtgaagatgatctctagaaaagctctctgcggtcctgtgaaacaacctcccttctcaagacaagactccccttcctgataacctgttgctgctctgcagattggtctcttcacctccatcaagggcttcttgtctgtttcactgaatattaggaatgcttctccctaggcttcagccttgggctttcccctcaggttctgcttgccccttgggacctatttgtggatctgcngcagaaacataagcnnacgangtagagaangtgtgtgangaagccactttgtgcttcggacatntcataacccacctcctaaagcatanccctgatgangtcacattcctgcttaanaaatc

SEQ ID NO: 30186 - DNA, 524 bp, Homo sapiens
  misc_feature (1)...(524): n = a,t,c or g
acnnnnnnnnnnnnnnnnnnnnnnnnnnnnnnnnnnnnnnnnnnnnnnnnnnnnnnnnnnnnnnnnnnnnnggcacgagggtgtttttgtgttttctctttataaggcaaaaagatctgtatttacactccttcacctagggatgtgtttgttgccctcctacccaattgtcatgattgtccttagtaccctaggcctagattctgagatcttcccattctaggcctacaagcactacttgctgtagctgagacttgtctagagtcctttgttttgcacttttgacccaccccttcctggatcactcctttgcactccactcccctcgttctgtcactttgaacgaagtctgagtgaggctagtgactccttgggtgtcctcaacagtgaattcactgtctgcgtgcagttattacatgcatttgtgcatttctactacaatggcatctttatgtctctgtaacattggccttttcatggctccacactgggtggaaccatattctcttagatcacatttagta

SEQ ID NO: 30187 - DNA, 533 bp, Homo sapiens
  misc_feature (1)...(533): n = a,t,c or g
tttnnnnnccnnnatttgannacnnnnnnnnnnnnnnnnnnnnnnnnnnnnnnnnnnnnnnnnnnnnnnnnnnnnnnnnnnnnnnnnnnnnnggcacgaggggtgatatatgactaattttttatgcaaatggattaggcggtgtattcccatccctgtagttcactccttaagacaagatactgtctcccacattttagtctcccctacataagctagaagtactttgaattgagagattacctaagtatttcttggcttgtggacttttataaattaaggctgtgttaaaacctaagagtaggaaatttgttttgtggctgatttcttctcttaaagctggaagacatttcttgactgaaatgcaattaaatgcttttaaaatttagatttttgggggtcatattttgaaaacaataagtatttggtttattgtattcctagagttgagaaaggtggtcactgagaaatgtcttgcaaagcggattgtatgctgtgtctgggctctcagataagtgtgtgctttctttgga

SEQ ID NO: 30188 - DNA, 537 bp, Homo sapiens
  misc_feature (1)...(537): n = a,t,c or g
tnnnnnnnnnnanntttgannacnnnnnnnnnnnnnnnnnnnnnnnnnnnnnnnnnnnnnnnnnnnnnnnnnnnnnnnnnnnnnnnnnnnnnggcacgagctacatccgagtgtttccagtatttagagaatcctcatttaccaagttagtcttcccacttcctttagtggtcccttgcatgacataattttgcaaggtcaatatccaccttaaagtgttgttttcaaagttggatgcagttctctaggctgagccataccaatgcagactggagtggaattccggccttctggaatctgtgcttcttttgatgcacccaaagatcaatttatttggttaatggtgtgttttgacattcacattctttctcctcatataaatgaggtgctccatgaagacagacaccatacctcccactccttcattctctctctggctatacacataggagacacttcacttgctggaatggcattcatgcattcatgttatatatctactgtgagcgaggactgtgctangtgctagaaacacaa

SEQ ID NO: 30189 - DNA, 486 bp, Homo sapiens
  misc_feature (1)...(486): n = a,t,c or g
tntcctctccnngatcncncagtttnnnnnnnnnnnnnnnnnnnnnnnnnnnnnnnnnnnnnnnnnnnnnnnnnnnnnnnnnnnnnnnggcacgagaacatgtcacgtttcaaatgcctctatgctattgaaaactacgttctgtcccccgaaacatccttctccttgggcctgaattttttgtcccaaaacattccttcctcaaccctccaaatttttcttgtgtatcattttccttaggaaggcttcctgcatctgatgcccttctgctgtctcttatagcaccccttggaaacttctgttatagatcgtatcatactaaagtgtagctggttgcttacttgtttgtattcccaggtgaactgtgagcccttggaagtgaagaagtatgtctttgatgtctgtacacccaggccctaaaaaagtgcttaacacatagtaagtggattcacacactttttctgtgcttaatacatactgaatggg

SEQ ID NO: 30190 - DNA, 478 bp, Homo sapiens
  misc_feature (1)...(478): n = a,t,c or g
ctntgnnnccnnnnnnnnnnnnnnnnnnnnnnnnnnnnnnnnnnnnnnnnnnnnnnnnnnnnnnnnnnnnnnnnnnnnnnnggcacgannnnnnnnnnnnnnnnnnnnnnnnnnnnnnnnnnnnnnnnnnnnnnnnnnnnnnnnnnnnnnnnnnnnnnnnnnnnnnnnnnnnnnnnnnnnnnnnnnnnnnnnnnnnnnnnnnnnnnnnnnnnnnnnnnnnnnnnnnnnnnnnnnnnnnnnnnnnnnnnnnnnnnnnnnnnnnnnnnnnnnnnnnnnnnnnnnnnnnnnnnnnnnnnnnnnnnnnnnnnnnnnnnnnnnnnnnnnnnnnnnnnnnnnnnnnnnnnnnnnnnnnnnnnnnnnnnnnnnnnnnnnnnnnnnnnnnnnnnnnnnnnnnnnnnnnnnnnnnnnnnnnnnnnnnnngaaaggtcttattcctcatgctgatcagtttgaattttttcctgagggtaatagggag

SEQ ID NO: 30191 - DNA, 570 bp, Homo sapiens
  misc_feature (1)...(570): n = a,t,c or g
gntnnnnnnnnntntttgganacccntttnnnnnnnnnnnnnnnnnnnnnnnnnnnnnnnnnnnnnnnnnnnnnnnnnnnnnnnnnnnnnnnnnnnnnnnnnggcacgagcagaagagacaaaagaagctctttgaagtaagagagaagagatggactatcttgaaaaaagcaacaattggacttttagctaacttcttaacagcaacaatgcaagccagaagatcttccacatgctgagagacaacaattatcaacctaacaactctgtgctcagggaaaatatcttttgaaaacaaggacaaagtaaggatatttttcagattaaaaagtgaaagagttnnnnnnnnnnnnnnnnnnnnnnnnnnnnnnnnnnnnnnnnnnnnnnnnnnnnnnnnnnnnnnnnnnnnnnnnnnnnnnnnnnnnnnnnnnnnnnnnnnnnnnnnnnnnnnnnnnnnnnnnnnnnnnnnnnnnnnnnnnnnnnnnnnnnnnnnnnnnnnnnnnnnnnnnnnnnnnnnnnnnnnnnnnnnnnnnnnnnnnnnnnnnnnnnnnnnnnnnnnnnnnnnnnnnn

SEQ ID NO: 30192 - DNA, 564 bp, Homo sapiens
  misc_feature (1)...(564): n = a,t,c or g
gntnnnntntnntntcnnaatcccgtttganacccttntnactgantncaanntctatacgnnnnctgtnggngngnggncnncaattcggcacgagaccttctagactgctcacagggccttaacttcatgttgccttcttttctatccctttgggccctgggagaaggaagccatttgcagtgctggtgtgtcctgttccctccccacattccccatgctcaaggcccagccttctgtagatgcgcaagtggatgttgatggtagtacaaaaagcaggggcccagccccagctgttggctacatgagtatttagaggaagtaaggtagcaggcagtccagccctgatgtggagacacatgggattttggaaatcagcttctggaggaatgcatgtcacaggcgggactttcttcagagagtggtgcagcgccagacattttgcacataaggcaccaaacagcccaggactgccgagactctggccgccgaaggagcctgctttggtactatggaacttttcttangggacacgtcctcctttcacagcttctaagggtccag

SEQ ID NO: 30193 - DNA, 543 bp, Homo sapiens
  misc_feature (1)...(543): n = a,t,c or g
nnnnnnnnnnnnnnnnnnnnnnnnnnnnnnnnnnnnnnnnnnnnnnnnnnnnnnnnnnnnnnnnnnnnnnnnggcacgagaataattatcttaagaacagaacattgtaggtgagaagttagtctcatctttttaaccaatacccattctggctctgcctcccccatatctgaaggtacccatgagcttgacacatatacttgtccttatattgtctctttccttacatctttctgtttgaagagatcactttttacccagttcaaaacatcagttttaaagaaggggaaactatgtaatatgattggaccttgtttccaagggtggcaattgaatgaatgaaaagtaatgannnnnnnnnnnnnnnnnnnnnnnnnnnnnnnnnnnnnnnnnnnnnnnnnnnnnnnnnnnnnnnnnnnnnnnnnnnnnnnnnnnnnnnnnnnnnnnnnnnnnnnnnnnnnnnnnnnnnnnnnnnnnnnnnnnnnnnnnnnnnnnnnnnnnnnnnnacgccctgtagcccagtctcaggaggctgagcaggaa

SEQ ID NO: 30194 - DNA, 518 bp, Homo sapiens
  misc_feature (1)...(518): n = a,t,c or g
nnnnnnnnnnnnnnnnnnnnnnnnnnnnnnnnnnnnnnnnnnnnnnnnnnnnnnnnnnnnnnnnnnnnnnnggcacgaggccatatctggcagaggttctgtgtgcggagaggcccaagagtaaactgaaagcaaaaacaattgagctagctggtggattttgaaggcctctaatcatttaattaccttgcaagaagcttttgcatttctgctttttctttcttgtttgctcttcttgtaccaaatttctttcttttaagtatagaagaggagcctccttctgttgctcagaaagagggaaaaagaaccagaagggaataaaataaggccaggcgtggtagtannnnnnnnnnnnnnnnnnnnnnnnnnnnnnnnnnnnnnnnnnnnnnnnnnnnnnnnnnnnnnnnnnnnnnnnaaactctncccaatagaaaaatatttttttttttctacnananatannannaagtangnangnangnagcnggcatnggnangcctgntgtnncnnanntctt

SEQ ID NO: 30195 - DNA, 549 bp, Homo sapiens
  misc_feature (1)...(549): n = a,t,c or g
ttganaccgttgnacancnnnnnnnnnnnnnnnnnnnnnnnnnnnnnnnnnnnnnnnnnnnnnnnnnnnnnnnnggcacgagcggcacgagctaataaagnnnnnnnnnnnnnnnnnnnnnnnnnnnnnnnnnnnnnnnnnnnnnnnnnnnnnnnnnnnnnnnnnnnnnnnnnnnnnnnnnnnnnnnnnnnnnnnnnnnnnnnnnnnnnnnnnnnnnnnnnnnnnnnnnnnnnnnnnnnnnnnnnnnnnnnnnnnnnnnnnnnnnnnnnnnnnnnnnnnnnnnnnnnnnnnnnnnnnnnnnnnnnnnnnnnnnnnnnnnnnnnnnnnnnnnnnnnnnnnnnnnnnnnnnnnnnnnnnnnnnnnnnnnnnnnnnnnnnnnnnnnnnnnnnnnnnnnnnnnncactaataagacattccttttctttacttgctatcttgttctcatcaaatctgtccctagccattcttattacttttgtgcagacaactcccaaagttgcattcagctcacatttatcttttcaggtctaaactcatatattcattggt

SEQ ID NO: 30196 - DNA, 541 bp, Homo sapiens
  misc_feature (1)...(541): n = a,t,c or g
ntttgnnaccnnnnnnnnnnnnnnnnnnnnnnnnnnnnnnnnnnnnnnnnnnnnnnnnnnnnnnnnnnnnnnnnnnnggcacgaggaaaaagccctggagagtattgtaaaataacaaatgtcaggtttgatggaatgactatgcatgcaattaagtgattttctttagtgctagagttcttttttcttaggtaaatcattttaaaaaatggaccagactttgtgaaagtagatatgttacataaaataatgttagctaaagatgaatggaataggttaagagtgtcttcttgaaaatttgaactatatctctttcaaaaagaattttattacctctaggctggacttgactgaaaagttaaaaaaaaaaaagacaaaatcttatgattgttgaactcccagngaggagtcagagaattgtganagccagggtctgttttttgcacttttctctctctctttttttaanataacatcttgctatctgcaggctgaagtgcagtggtgcgatcacagctgcttgcagctttgaactcttagc

SEQ ID NO: 30197 - DNA, 532 bp, Homo sapiens
  misc_feature (1)...(532): n = a,t,c or g
gnnnnnnnnnnnnnnnnnnnnnnnnnnnnnnnnnnnnnnnnnnnnnnnnnnnnnnnnnnnnnnnnnnggcacgagaactggaagtcctaactaatgtaataaaagacaaaaagaaaataaaaagtatacagatttgaaaggattaaatactgtctttctttgcagatgatatgattcaaaagaattgattaaaaactcctaaaactagtgagtgattacagcaacgttgcaggaatcagtaataaccttccaaaacagaaagcatcaaaatacatgaggcaagagctgatagagctgatactaagattaatataataaagtccatcactttcctatataccagcatgaacaggtagaacttgaaattaaaaacagnnnnnnnnnnnnnnnnnnnnnnnnnnnnnnnnnnnnnnnnnnnnnnnnnnnnnnnnnnnnnnnnnnnnnnnnnnnnnnnnnnnnnnnnnnnnnnnnnnnnnnnnnnnnnnnnnnnnnnnnnnnnnnnnnnnnnnnnnnnnnnnnnnnnaccccctgt

SEQ ID NO: 30198 - DNA, 543 bp, Homo sapiens
  misc_feature (1)...(543): n = a,t,c or g
anccnttgganannnnnnnnnnnnnnnnnnnnnnnnnnnnnnnnnnnnnnnnnnnnnnnnnnnnnnnnnnnnnnnnnnnnnnggcacgagcaatggtgtttctgtcaagtacaagttttggctattatgttgcatttgtttttagtgtctttacacacatcggtgtttcaaaagcatcatatttaacttctgtcactgaaagctcgtctaaccggccttactgtctcaatggtgatgtcttcagccacacataatcttgcgattgtccatttcagttcatatatggcattacaagttttctccttacacttttatggagaatcacctgtgacaaatcctcctaagcatattgaaaggctgttttactccctattcccttgcggggctggtaggagcctggctcagggtagagatgggggaaatgcagacaggactggagaaatgcgcaagacttggagatctgnctgtttatctgagacttggtttctatttggttaggaagggnaagaagtccctgatcataaatgtgctgcagattttctc

SEQ ID NO: 30199 - DNA, 511 bp, Homo sapiens
  misc_feature (1)...(511): n = a,t,c or g
anncttnanngcannnnnnnnnnnnnnnnnnnnnnnnnnnnnnnnnnnnnnnnnnnnnnnnnnnnnnnnnnnnnnnnnnnnnggcacgagaagaaagagagagcctttagcagaaactcggtgcaccctctccccacccttgccctatatctgaggttgctcacctctccatggccgtagtcccaccctcaccctgcctcagttattactctctgcagccaacagaatttaactgctgccagtgaaggctgcagctcagccctgatttcccacccctttgtgatccctccctgctggcttagttctgcctagcctggggtgctgagaacttatgggggagccctcagatgccagtgtatgctgcatgtgccccatcctcaatctgtggaatgactgtaagaccttctgatctcccctggtattanaacagtggctcctggataccatgtgggtcaataatcctcacccaaccccagtctctgcttgctgaagttacccantcctcatcccg

SEQ ID NO: 30200 - DNA, 505 bp, Homo sapiens
  misc_feature (1)...(505): n = a,t,c or g
cntnnnnnnnnnnnnnnnnnnnnnnnnnnnnnnnnnnnnnnnnnnnnnnnnnnnnnnnnnnnnnnnnnnnnnggcacgagcggcacgagggctttgtagactcaaaaagcagtaaaaagagccagcattcaaaaccagcttgactccagtttattctgtgtactacaccattcctggagaggctaagtgtgtgttacagaagaccatggggagaatttagctcaagtaaagataagccctgggaaaagaccattggatttttgagttttttgactaaggggttcccataacatagcagcacctgcactcctgcttaacgcgtctgtgaatgtgggtaatccagacaaatgtaaacgcctgtcaataaggggggaaaaagtcaagatagtaaatggaaaaattagtatnatgaaaacnaaccagtattaaattctatctagatactcttgccaaccaagcacttcnaatctcaaggcttgaatgaagaatagctnttttttttctg

SEQ ID NO: 30201 - DNA, 510 bp, Homo sapiens
  misc_feature (1)...(510): n = a,t,c or g
tttgannccannnnnnnnnnnnnnnnnnnnnnnnnnnnnnnnnnnnnnnnnnnnnnnnnnnnnnnnnnnnnnnnnnnnnnggcacgaggtatttagggataaatgtcatgatgtctttaattattcttaaatatttcagaaaaaatgaagtaaatatggcaaaacattagttgttcaaccaaagttttgagaatatgaatgtttattatatcatttactctactttcctgtgtgtcttacatttttcatnnnnnnnnnnnnnnnnnnnnnnnnnnnnnnnnnnnnnnnnnnnnnnnnnnnnnnnnnnnnnnnnnnnnnnnnnnnnnnnnnnnnnnnnnnnnnnnnnnnnnnnnnnnnnnnnnnnnnnnnnnnnnnnnnnnnnnnnnnnnnnnnnnnnnnnnnnnnnnnnnnnnnnnnnnnnnnnnnnnnnnnnnnnnnnnnnnnnnnnnnnnnnnnnnnnnnnnnnnnnnnnnnnnnnnnnnnnnnnnnnnnnnnnnnnnnnnnnnnnnn

SEQ ID NO: 30202 - DNA, 508 bp, Homo sapiens
  misc_feature (1)...(508): n = a,t,c or g
nnnccannnnnnnnnnnnnnnnnnnnnnnnnnnnnnnnnnnnnnnnnnnnnnnnnnnnnnnnnnnnnnnnnnnnnggcacgagnnnnnnnnnnnnnnnnnnnnnnnnnnnnnnnnnnnnnnnnnnnnnnnnnnnnnnnnnnnnnnnnnnnnnnnnnnnnnnnnnnnnnnnnnnnnnnnnnnnnnnnnnnnnnnnnnnnnnnnnnnnnnnnnnnnnnnnnnnnnnnnnnnnnnnnnnnnnnnnnnnnnnnnnnnnnnnnnnnnnngtggaaatgaaattttccaccatacctcatgttatctcaggtaaatacccaaaaagtgctggtttaccagctcatattgatttttcattttcatgagcttcaaattttctgaggatatttnnnnnnnnnnncctgttgctcaaagtctatgctgntaagtcaaaangcttaaagtttacaacatacttggaatttgctacgtaaaatatgcactaactacaggngcanttaagnaatgaataca

SEQ ID NO: 30203 - DNA, 388 bp, Homo sapiens
  misc_feature (1)...(388): n = a,t,c or g
tttaactannnnnnnnnnnnnnnnnnnnnnnnnnnnnnnnnnnnnnnnnnnnnnnnnnnnnnnnnnnnnnnnnnnnnnggcacgagatctgttatttgagacatttcaatctggttaggatccattgctagagaggtagtactgttctttggaggtgtcaaaacactctgcctttttctactgcttgaattcttctgctgattccttctcatctgaggtattgtcgcttcttatttttgtatttgctgnnnnnnnggggctttttacttttttaattcttttnttccttgagggtattactgtannntatatagngtgatgatnctgnngnncattnngnacnntngnacccnnnnatgnnnttcnnangcccttncccnnancctgc

SEQ ID NO: 30204 - DNA, 595 bp, Homo sapiens
  misc_feature (1)...(595): n = a,t,c or g
gnnnnnnnnnnnnntnnnnntttgnnacatctggagacccnnnnnnnnnnnnnnnnnnnnnnnnnnnnnnnnnnnnnnnnnnnnnnnnnnnnnnnnnggcacgagactttctttaaaatgttgtgagtttcctgtgaatcttagtggggttcactctatgcctcaaaagccacatctataatagcctttgagacagccctctctgctttgtgcagaacaatcccctgaagattcctagtagtacttttgtctaggtgatagggtgtactaggcaccacctaagtctttctggagtcttaacaaagagtattatggccatttaataaccactctttgcctgcaggggaggtggggcagaatgggagcaggctgagcaaactacggcctacaggccaatcctgttgccattgacttgtttgtacaatgtacaagctaagaatagtttttgcatttttaaaaggttgttaaacagaagaatatgcaacagagaccatatatgactcaccaagtctaaaatatttactnattggntctttatataaaaagggtgcaattcctggctaattcaagaaaaactggtagcataatggttatc

SEQ ID NO: 30205 - DNA, 380 bp, Homo sapiens
  misc_feature (1)...(380): n = a,t,c or g
nnnnnnnnnnnnnnnnnnnnnnnnnnnnnnnnnnnnnnnnnnnnnnnnnnnnnnnnnnnnnnnnnnnnggcacgagaannnnnnnnnnnnnnnnnnnnnnnnnnnnnnnnnnnnnnnnnnnnnnnnnnnnnnnnnnnnnnnnnnnnnnnnnnnnnnnnnnnnnnnnnnnnnnnnnnnnnnnnnnnnnnnnnnnnnnnnnnnnnnnnnnnnnnnnnnnnnnnnnnnnnnnnnnnnnnnnnnnnnnnncgttgagtagaaaatggtcttagaagctgggaagggtaatgggtaaagggaatannnnnnnntggttaatggataaaaaaattacagttaggctgntgtgnggctcacgcctataattccagnactttgngagg

SEQ ID NO: 30206 - DNA, 516 bp, Homo sapiens
  misc_feature (1)...(516): n = a,t,c or g
tttgnnnccntnnnnnnnnnnnnnnnnnnnnnnnnnnnnnnnnnnnnnnnnnnnnnnnnnnnnnnnnnnnnnnnnnnnnnnnggcacgaggtgggggaggcatgcacggacatgaagcgcgagtacgaccagtgcttcaatcgctggttcgccgagaaatttctcaagggggacagctccggggacccgtgcaccgacctcttcaagcgctaccagcagtgtgttcagaaagcaataaaggagaaagagattcctattgaaggactggagttcatgggccatggcaaagaaaagcctgaaaattcttcttgaccttgacagtcaccttgaaggatttcgcaagtccagaaattgaggactctggatttttgtcaactaactctgtgaacatagccatcagatttgatgaggaacttaggagagaggagttttatttcctccttcgatgttttcctctcagttgtaaaagatgaactctttgagatgatttctcacctgctgtggtatcttgcagga

SEQ ID NO: 30207 - DNA, 172 bp, Homo sapiens
  misc_feature (1)...(172): n = a,t,c or g
tttgataccctttnattgcanntnnggaatacccnttatgacnnnnnnnnnnnnnnnnnnnnnnnnnnnnnnnnnnnnnnnnnnnnnnnnnnnnnnnnnnggcacgaggactaataaccattttgatttgtcaaatcttaaagcagatagaagctgtatttttttttttttt

SEQ ID NO: 30208 - DNA, 525 bp, Homo sapiens
  misc_feature (1)...(525): n = a,t,c or g
tttnnnnncnnnnnnnnntttgnttaccngnnnnnnnnnnnnnnnnnnnnnnnnnnnnnnnnnnnnnnnnnnnnnnnnnnnnnnnnnnnnnnnnnnggcacgaggtgactctgaggactttcacagaataaagatatttcttattttaatgaacgttgtcagtatcaggataattttatgtagtcaacatatatacagtgttggtcctataggagttggagaccttttgccagttttatttggtcaaatacattattttgtgatgaaataactgtgagtgatgagttgagcctcaaagaacatgatacttcattaaatcaacaagctgaacagtatcatctaaccaaagctgtagaataaatggtgataaacttaaattcaggaatgaaacaatcaccatttttgttacaaatttgtccacccgtcatcactaaccccatttttatttaatactggtaatgaacaaaacctgaagaagaaataaaactaaaatatttcatttgtagatgacatgattaattatct

SEQ ID NO: 30209 - DNA, 540 bp, Homo sapiens
  misc_feature (1)...(540): n = a,t,c or g
tncccttcccnctatngaatcccatttnnnnnnnnnnnnnnnnnnnnnnnnnnnnnnnnnnnnnnnnnnnnnnnnnnnnnnnnnnnnnnnnggcacgagctctaattaaccacgcacccaggttagactctgaaggaattgagttgataacaaaatttcttcagtatgaatctaagaaaagggtttcagctgaagaggccatgaaacatgtttactttcgaagtctgggaccaagaatacatgctttaccagaaagtgtatcaatattcagtttgaaagagattcagttgcaaaaggacccgggttttcgaaattcttcttatccagagacaggtgtgtttgtcataaaccatttcacgtgtcgatcatgaatttttgcgtggaaccaagcttttggtttataaattgatcagtaaaattattgatgtaaaaccaatgtcagtgcattccacaactgnttatgtttagcattgcacgtctcacttttctgtatgatgtgggcagctcaagtaaatcttcagagaaaaatctgctcagtca

SEQ ID NO: 30210 - DNA, 396 bp, Homo sapiens
  misc_feature (1)...(396): n = a,t,c or g
ttgantcaacagctatgacnnnnnnnnnnnnnnnnnnnnnnnnnnnnnnnnnnnnnnnnnnnnnnnnnnnnnnnnnnggcacgaggaggcttggatctgcatgggaggacgtgggcctgagctggaggacaaagcaactgtggatgtggcagcaggcggcattgccaggaagtaagctgggagggagatgcaggcccagggcagagccagcaagccatgtgagagtccagggtggctgccacgtgtctggaggctgccgtggcctgggagcacctgaggtgcttgtgagaagaggaggcannnnnnnncagccagcggngactgattcttacanncactgacctttgcaacccctactctgngccaagngtcgnancatncttcnttatgnagctg

SEQ ID NO: 30211 - DNA, 509 bp, Homo sapiens
  misc_feature (1)...(509): n = a,t,c or g
tnnnttnnnnncttgannccannnnnnnnnnnnnnnnnnnnnnnnnnnnnnnnnnnnnnnnnnnnnnnnnnnnnnnnnnnnnnnnnnnnnnggcacgagctatcagtttattaaacagaagctatgcatttgtttaatttgaagcatataccacttccaaatatgacactgagcattaatatttttagacttcccccaggtaaattaaaagcatgatcattttgttgataatcagcctttggagaattaaacagcctgcttactgccagtgctagttcagtaaatatgtttctcattttctatttggcaaaattagataacctaagcctaggaaaaataaaaaattagaaaaaaaaaagtagatttggggatatttaactcaaattgcccttactggtggaaactcgaggcagttacttagattatttccaaatggctttttttaaatgtatttctatattgnatacaacagtctcagtcttcatctctcctgttcagctagccataca

SEQ ID NO: 30212 - DNA, 499 bp, Homo sapiens
  misc_feature (1)...(499): n = a,t,c or g
ctttgantccannnnnnnnnnnnnnnnnnnnnnnnnnnnnnnnnnnnnnnnnnnnnnnnnnnnnnnnnnnnnnnnnnnnnnggcacgaggacgcaaacccaattctgtttattacaaacattgtgcccgtaaccattcaattaccactcctcaacataactgctattatgctatcggagttatggaattagaaggaaacaagtgtccatctcaacctagggcatcaggagcagttgggaggcaacagatgaactgagtcttgagggatgaaaacactgtaaggtttatgtaaatgtcctcattaattccattctataggcaatggctggctctggctaaatgatcatttgtgaaaattgctacatttttatttatagtagagaaagagttacaaatctgttggataattaattccttctcccgatagggcacaggcttcattcttagtttgtgcttttgggtgtcgttgtcatttagcataaatcctatcaatctttgg

SEQ ID NO: 30213 - DNA, 431 bp, Homo sapiens
  misc_feature (1)...(431): n = a,t,c or g
nccnnnnnnnnnnnnnnnnnnnnnnnnnnnnnnnnnnnnnnnnnnnnnnnnnnnnnnnnnnnnnnnnnnnnnnnggcacgagatgtcactgacatttctgtgtcaattagcttcttttacatcaaaatcctgttacgttcattagtctcaaaatctcctataacacttagaacttnnnnnnnnnnnnnnnnnnnnnnnnnnnnnnnnnnnnnnnnnnnnnnnnnnnnnnnnnnnntcnnnnnnnnnnnnnnnnnnnnnnnnnnnnnnnnnnnnnnnnnnnnnnnnnnnnnnnnnnnnnnnnnnnnnnnnnnnnnnnnnnnnnnnnnnnnnnnnnnnnnnnnnnnnnnnnnnnnnnnnnnnnnnnnnnnnnnnnnnnnnnnnnnnnnnnnnnnnnnnnnnnnnnnnnnngntgaccactgnnctncnnctga

SEQ ID NO: 30214 - DNA, 403 bp, Homo sapiens
  misc_feature (1)...(403): n = a,t,c or g
tnnnnttgnnactaggaccncttaggattaccaatttaatacgactcnnnnnnnnnnnnnnnnnnnnnnnnnnnnnnnnnnggcacgagatttgatgctgctgtattatgaatactttaagagtacagtatttttctgttaatgaggagtgtttacttaacatgctcttcctttccaatgagggaacatgctttgctgccaatcaaattaaggtggagatcatttcaaagaaaccatgaaacactttttctttattctgcctctcctattaaatgttgagaagcaaatcttctatcaaacagatggatatactgggatcttgttaaaaggctgcttgataaaaagggaaagttaaatataaagtggatctgnnnnnnnnncttccaaggntgnnnanngccta

SEQ ID NO: 30215 - DNA, 503 bp, Homo sapiens
  misc_feature (1)...(503): n = a,t,c or g
ttgannccntacnnnnnnnnnnnnnnnnnnnnnnnnnnnnnnnnnnnnnnnnnnnnnnnnnnnnnnnnnnnnnnnnnnnnnggcacgaggtgnnnnnnnnnnnnnnnnnnnnnnnnnnnnnnnnnnnnnnnnnnnnnnnnnnnnnnnnnnnnnnnnnnnnnnnntgaaaaaaaaatcttaatccctctttccatcttacctgctatcccttttctttgtttttctatttaacaatactttgaaagaagaattgcctatatttcatctttcaatttcannnnnnnnnnnnnnnnnnnnnnnnnnnnnnnnnnnnnnnnnnnnnnnnnnnnnnnngnnnnnnnnnnnnnnnnnnnnnnnnnnnnnnnnnnnnnnnnnnnnnnnnnnnnnnnnnnnnnnnnnnnnnnnnnnnnnnnnnnnnnnnnnnnnnnnnnnnnnnnnnnnnnnnnnnnnnnnnnnnnnnnnnnnnnnnnnnnnnnnnnnnnnnnnnnnnnnnnnnnnnnnnn

SEQ ID NO: 30216 - DNA, 533 bp, Homo sapiens
  misc_feature (1)...(533): n = a,t,c or g
tttgnnnnnnnnnnnnnnnnnnnnnnnnnnnnnnnnnnnnnnnnnnnnnnnnnnnnnnnnnnnnnnnnnnnnnnnnnnggcacgagctaagcagcaaacactggccaccaagacttggactcttgtgaatcagcttcagatnnnnnnnnnnnnnnnnnnnnnnnnnnnnnnaaatatttgtttgggtttttttgttaggtcaccaagaagagttttaaaaccctgtctcactaaagggctttttaagatctatacaaagctaattttttctcataagtatgtgttattttctcataatgatttttctcatttctatatcatattaaaaaaattcnnnnnnnnnnnnnnnnnnnnnnnnnnnnnnnnnnnnnnnnnnnnnnnnnnnnnnnnnnnnnnnnnnnnnnnnnnnnnnnnnnnnnnnnnnnnnnnnnnnnnnnnnnnnnnnnnnnnnnnnnnnnnnnnnnnnnnnnnnnnnnnnnnnnnnnnnnnnnnnnnnnnnnnnnnnnnnnnnnnnnnnnnnnnnnnnnnnnnnn

SEQ ID NO: 30217 - DNA, 516 bp, Homo sapiens
  misc_feature (1)...(516): n = a,t,c or g
nannnnnnnnnnnnnnnnnnnnnnnnnnnnnnnnnnnnnnnnnnnnnnnnnnnnnnnnnnnnnnnnnnnnnnggcacgagaagaggaattcagcttttcctggaaaatcttatctttaaagaaaatttttatgaaactttccttctggggcactaagtcatacagtgtccaatagggcaggggnnnnnnnnnnnnnnnnnnnnnnnnnnnnnnnnnnnnnnnnnnnnnnnnnnnnnnnnnnnnnnnnnnnnnnnnnnnnnnnnnnnnnnntnnnnnnnnnnnnnnnnnnnnnnnnnnnnnnnnnnnnnnnnnnnnnnnnnnnnnnnnnnnnnnnnnnnnnnnnnnnnnnnnnnnnnnnnnnnnnnnnnnnnnnnnnnnnnnnnnnnnnnnnnnnnnnnnnnnnnnnnnnnnnnnnnnnnnnnnnnnnnnnnnnnnnnnnnnnnnnnnnnnnnnnnnnnnnnnnnnnnnnnnnncaccccagtanggcaatttctcggcgtangtttctttactggg

SEQ ID NO: 30218 - DNA, 536 bp, Homo sapiens
  misc_feature (1)...(536): n = a,t,c or g
tnttnnnnaccnttgannacagctatgacnnnnnnnnnnnnnnnnnnnnnnnnnnnnnnnnnnnnnnnnnnnnnnnnnnnnnnnnnnggcacgaggtggttctacacagggtaccattatttatttagtcccctattgctggaccctcatggccaaggctgccagtgggccccttcttccacagtgacagtttgttctgggcacctggagggccccactcatccctcctgctggctgggatatgtgtaccagtggtaggaagtcatcccacagcacctgcaccaagccagcatcctgggggcaggggagacaggacagagggagccagccctgctgtcattttagggcacaaattccccactgagggatgcagagaccttttcacgaaagataaatgtgcttgtgttgtgagcggctgttattttgggactggagcccacgcagctcaacctgtatactaactaataaaacgtctgtgtgtaagccaggtgcggcggctacgcctgtaatcccagcactttgtggggcgaggcggg

SEQ ID NO: 30219 - DNA, 530 bp, Homo sapiens
  misc_feature (1)...(530): n = a,t,c or g
ccgntttgacnnnnnnnnnnnnnnnnnnnnnnnnnnnnnnnnnnnnnnnnnnnnnnnnnnnnnnnnnnnnnnnnnnnnnnnggcacgagattaaagttataaacttctgtgcatcaaaggacactataaagaatgnnnnnnnnnnnnnnnnnnnnnnnnnnnnnnnnnnnnnnnnnnnnnnnnnnnnnnnnnnnnnnnnnnnnnnnnnnnnnnnnnnnnnnnnnnnnnnnnnnnnnnnnnnnnnnnnnnnnnnnnnnnnnnnnnnnnnnnnnnnnnnnnnnnnnnnnnnnnnnnnnnnnnnnnnnnnnnnnnnnnnnnnnnnnnnnnnnnnnnnnnnnnnnnnnnnnnnnnnnnnnnnnnnnnnnnnnnnnnnnnnnnnnnnnnnnnnnnnnnnnnnnnnnnnnnnnnnnnnnnnnnnnnnnnnnnnnnnnnnnnnnnnnnnnnnnnnnnnnnnnnnnnnnnnnnnnnnnnnnnnnnnnnnnnnnnnnnnnnnnnnnnnnnnnnnnnnnnnnnnnnnnnnnnnnnnnnnt

SEQ ID NO: 30220 - DNA, 516 bp, Homo sapiens
  misc_feature (1)...(516): n = a,t,c or g
nnnnnttnnnnnctttgaanncnnnnnnnnnnnnnnnnnnnnnnnnnnnnnnnnnnnnnnnnnnnnnnnnnnnnnnnnnnnnnnnnnnnnnnnggcacgagctctcaggaggataccgggtctgtccatttatctctgcagacctatttaaatccagtggggttttttttttctttttttttctgtctnnnnnnnnnnnnnagngctgncagnggggtgttgaagncccctnttgngctataaaggaatgcccaaggctgggnaatttataaataanagattttattnggctcactattctgcaaactgtncaanaagcncagnggttgngtaaaagngcctggcctcctctnttcagcctggcttgttggctggtancagcagctgctcagggctcggaagcctgtgtactcccatgtgagtttgancaatgcctctgcaatctccaggcaactcactctattaggctgganacctgcaagggcaagggggctcccacagctagcgttgcaaaag

SEQ ID NO: 30221 - DNA, 541 bp, Homo sapiens
  misc_feature (1)...(541): n = a,t,c or g
tnnnntnnnntnattgnanncaattgnnnnnnnnnnnnnnnnnnnnnnnnnnnnnnnnnnnnnnnnnnnnnnnnnnnnnnnnnnnnnnnnnnggcacgagggagacagacactgaagcagcccctgtttgctaccgagcgtggcaacttccatatacccaagggtgccttagggatgactactccctaagtcatggccagaacatttagtgtaattagttcctctaggagtttattgtgaggtgagatttgctcataatgaattttcattgccaaggacttggttactcgcaggtaccccactatagtcttttgacttttctgtctttgtaagctgtcttcctctcctctttgctctttgcttttaccataggatgttttcttctttactctttttaannnnnnnnnnnnnnnnnnnnnnnnnnnnnnnnnntccannnnnnnnnnnnnnnnnnnnnnnnnnnnnnnnnnnnnnnnnnnnnnnnnnnnnnnnnnnnnnnnnnnnntcagcctttcaanaagctgggattacaggngctgcc

SEQ ID NO: 30222 - DNA, 510 bp, Homo sapiens
  misc_feature (1)...(510): n = a,t,c or g
tnnttgnnnccattgannccannnnnnnnnnnnnnnnnnnnnnnnnnnnnnnnnnnnnnnnnnnnnnnnnnnnnnnnnnnnnnnnnnnnnnggcacgaggtnnnnnnnnnnnnnnnnnnnnnnnnnnnnnnnnnnagnnnnnnnnnnnnnnnnnnnnnnnnnnnnnnnnnnnnnnnnnnnnnnnnnnnnnnnnnnnnnnnnnnnnnnnnnnnnnnnnnnnnnnnnnnnnnnnnnnnnnnnnnnnnnnnnnnnnnnnnnnnnnnnnnnnnnnnnnnnnnnnnnnnnnnnnnnnnnnnnnnnnnnnnnnnnnnnnnnnnnnnnnnnnnnnnnnnnnnnnnnnntccaacgttttttagacttttattcctaaaagataaccaggaaatattaccacaggtactgggtgatgaagtccttcagttcactcagagctctgggcgctagggtcagagtgacaaatgagagagacgtggtgctgctcttacagaccccgtgatttatagcagcagg

SEQ ID NO: 30223 - DNA, 510 bp, Homo sapiens
  misc_feature (1)...(510): n = a,t,c or g
tnattgnnnnccattgannccannnnnnnnnnnnnnnnnnnnnnnnnnnnnnnnnnnnnnnnnnnnnnnnnnnnnnnnnnnnnnnnnnnnnnggcacgagaatctatgctcataaggactgagaagtacagaaaagcgtaaaaagggaaacatacccatatcctaccacctaaagatataattgttaacattttggccaggcacagtggctcannnnnnnnnnnnnnnnnnnnnnnnnnnnnnnnnnnnnnnnnnnnnnnnnnnnnnnnnnnnnnnnnnnnnnnnnnnnnnnnnnnnnnnnnnnnnnnnnnnnnnngagaataattgttaacatttttcttagtttattgatcatgcatttttaaacataattgttaatattgtatatatagatgctgcttgacttacactggggttaccgtcctgagaaatgcgcatatcgaaaatgcatttaataccctaataacccagtcatccagccaaacaaacataagtcaaaccatcataagt

SEQ ID NO: 30224 - DNA, 522 bp, Homo sapiens
  misc_feature (1)...(522): n = a,t,c or g
nntntnnnnttngaatcncttnnnnnnnnnnnnnnnnnnnnnnnnnnnnnnnnnnnnnnnnnnnnnnnnnnnnnnnnnnnnnnnnnnnnggcacgaggaaaagaaaagcatagtccattgtcagatatgatttcattatattgagagactcatttttcccttgaacagatgactcctgtatttacagtggaagtcactgtaagaataataattgaaaagaaatccaacttgtagcacacgtccatgtagtacatgagatttaagcatgggaattggagcgacagagacttggattctcaactggtctatgccagtttcaggtcgtatcacctcatgcaaatgactcaatttttaaaagctcatttctttgtaaaattggggaggatcgtaaattcaaacgtgtttattcaaccattattttttgagtgccttctgtgtaccccaggactttgtgttaggtactttgttttcaacactgtgggatgagtcctttgatgtgaagtacagggagctataaaaccc

SEQ ID NO: 30225 - DNA, 517 bp, Homo sapiens
  misc_feature (1)...(517): n = a,t,c or g
tnnnttnnnnnnctttgannncnnnnnnnnnnnnnnnnnnnnnnnnnnnnnnnnnnnnnnnnnnnnnnnnnnnnnnnnnnnnnnnnnnnnnnnggcacgaggcaaaccaaaaaatacaaaattgtgacccagaggatgtacagtgacttctggctttctagggtgctgtggcttttgagttctgatgatgacaaaaatattttggcagagactccatctcaaaaaaaaannnnnaaaaaaaaancgngancgtcagcatcctntggggctcccaggacnccgngacttcntggccgcggngcttaccagggtctggncaggggccctgaactntntacctcaaanatttcttctntggacacttcaatgcggcaatgaccagcttggggctgctgaaccnacagtncgtgtctgaggactttcagcttctggactaaatctctttcgaatctctgggcaggaagctcctcgtcctccaaagagccctcantgggcagtggcagcggctgctgggctc

SEQ ID NO: 30226 - DNA, 499 bp, Homo sapiens
  misc_feature (1)...(499): n = a,t,c or g
nccnnnnnnnnnnnnnnnnnnnnnnnnnnnnnnnnnnnnnnnnnnnnnnnnnnnnnnnnnnnnnnnnnnnnnnnggcacgagcggcacgagcaacaagttgaatcaacttttcacaaaaagcaaaagactatagttttgaatgatagtttttcattttaacagtaagaaaagggcccaaatattccagtttggttatagccagaaataagatagttttatgtttcatatattttatctcaagataataattcctaaagttctagccttaaccctaaatctcagtggttcttctttaaagctagaacatagtgtgttttcatcttgatcagtatttgaaagatgagactgatgtttactaattacaattgcagtaacaaagcttgatctattaatatattgatcagagttccatgatccttttctaaaatggtggctttattttgccagaataattctgcagggtgnnnnnnnnnnnnnnnnnnnnnnnnnnnnnnnnnn

SEQ ID NO: 30227 - DNA, 292 bp, Homo sapiens
  misc_feature (1)...(292): n = a,t,c or g
ttnnnnnnnnnnnnnnnnnnnnnnnnnnnnnnnnnnnnnnnnnnnnnnnnnnnnnnnnnnnnnnnnnnnnnggcacgagtataatctttgtgtaaagttatatttattggctgaaaattggatttattgaatttattggatttannnnnnnnnnnnnnnnnnnnnnnnnnnnnnnnnnnnnnnnnnnnnnnnnnnnnnnnnnnnnnnnnnnnnnnnnnnnnnnnnnnnnnnnnnnnnnnnnnnnnnnnnnnnnnnnnnnnnnnnnnnnnnnnnnnnnnnnnnnnnnnnnnnn

SEQ ID NO: 30228 - DNA, 506 bp, Homo sapiens
  misc_feature (1)...(506): n = a,t,c or g
aanncttnnnnnnnnnnnnnnnnnnnnnnnnnnnnnnnnnnnnnnnnnnnnnnnnnnnnnnnnnnnnnnnnnnnnnggcacgagcttacctctggtcaacctccttctgaagttcacgactgcgttcttccaactgctgttgaagccgttttcgctgctgctctgggggcaagtggctaaaatcctcggtcaccactgtctgcaaggtctctggaatgttatgtccgggagcaagcatgggtccaggaggcagggaggcccatgtctctctgtccacttagctttctgggctgacagtctagaagacgcatgcaggaatcaaggtctcagacagcccagtggacccagaccaggcacccacgttcttgggatccacagcatttgcagccaccttcatgccctccaagcacttggctattatgggcaccacctccagctcggctccgacaggagcccatacccggcacccaggcgggtggcctgcgttcatccatgtcttggagctt

SEQ ID NO: 30229 - DNA, 488 bp, Homo sapiens
  misc_feature (1)...(488): n = a,t,c or g
nnnnnnnnnnnnnnnnnnnnnnnnnnnnnnnnnnnnnnnnnnnnnnnnnnnnnnnnnnnnnnnnnnnggcacgagagcagcactgtttccccaacccaccctaaaggtgcatgtttacttgtgtgtacacacagacacatatataccagggcctttgtaatcactatttacagttgaacaaacatgcagaggcaaagaaatgggagtaagaaactttacaactcagggcatgagaatgtgtatgaccagccttgctgactgagaaaagtacaagtttgacattttaatgattttgattaaaagaagctttctttggcttctgaggagctggttttaggtgtgatgttagtttctgtttttttctactgggtttggaagatacatgcagctgccaatagagtatgttcttccaacttctcggccataataatgaacctagaacttactgngttgcctttgngcattatcttcctggngctctttaaagc

SEQ ID NO: 30230 - DNA, 523 bp, Homo sapiens
  misc_feature (1)...(523): n = a,t,c or g
anngctatgacatgattacnaatttaatacnaatnnnnnnnnnnnnnnnnnnnnnnnnnnnnnnnnnnnnnnnnnnnnnnnnnnnnnnnnnnnnnnnnnnnnnggcacgagaactggagttgattttggttttaagagcactagaggagaaacttgctatgaaatctttgggaaagaggaatctcatcatgactagctcagcatcacctattggttcagactatgtagctcatttcaaatgagatcaggcacatttagggtgatatagccacagattgtgtagctcatttcaaatttaactaagcattaagtagtaaggcctctgccaattttgttaagtctggcaaaaagtttgggttgtatttttcagaagggacttatctgtatgactctctcctttaactgntgcggtccttttgggactggtgcaaataactccaaccacttaaagttgtgggctttcctgattattaatggtcttttcaaatgctatttaaacatgaacagaggttctgagactgaa

SEQ ID NO: 30231 - DNA, 532 bp, Homo sapiens
  misc_feature (1)...(532): n = a,t,c or g
tnnnnnttnnannanttganncccnnnnnnnnnnnnnnnnnnnnnnnnnnnnnnnnnnnnnnnnnnnnnnnnnnnnnnnnnnnnnnnnnnnnnnnggcacgannnnnnnnnnnnnnnnnnnnnnnnnnnnnnnnnnnnnnnnnnnnnnnnnnnnnnnnnnnnnnnnnnnnnnnnnnnnnnnnnnnnnnnnnnnnnnnnnnnnnnnnnnnnnnnnnnnnnnnnnnnnnnnnnnnnnnnnnnnnnnnnnnnnnnnnnnnnnnnnnnnnnnnnnnnnnnnnnnnnnnnnnnnnnnnnnnnnnnnnnnnnnnnnnnnnnnnnnnnnnnnnnnnnnnnnnnnnnnnnnnnnnnnnnnnnnnnnnnnnnnnnnnnnnnnnnnnnnnnnnnnnnnnnnnnnnnnnnnnnnngatgaccagttttgcagcacagaatgcatttattcatgaggcagccaagtgaggagatgggaaaacaggtctcaaacccacttcctcgaagatggggtttanagacgtttatgggacaaagaagcagg

SEQ ID NO: 30232 - DNA, 514 bp, Homo sapiens
  misc_feature (1)...(514): n = a,t,c or g
ctnnnnnnnnnnnnnnnnnnnnnnnnnnnnnnnnnnnnnnnnnnnnnnnnnnnnnnnnnnnnnnnnnnnnnnnggcacnnnnnnnnnnnnnnnnnnnnnnnnnnnnnnnnnnnnnnnnnnnnnnnnnnnnnnnnnnnnnnnnnnnnnnnnnnnnnnnnnnnnnnnnnnnnnnnngagattgtgctactgcactgannnnnnnnnnnnnnnnnnnnnnnnnnnnnnnnnnnnnnnnnnnnnnnnnnttttcccattgctggttttcccattttctttttgaccttcccacctaccagtctttgttcccccatccttgaccctcttctccatgtggataccgttgatacacttttaggtttgaatatcaccttccttttagaatgttccatacctttaagcatttgataaaagctatggtggtttccccagaaaaatgttcaacaggaagttttgctacatttttggattcacagacctcagttcctatggcaggntcatatacgtaagttcactg

SEQ ID NO: 30233 - DNA, 519 bp, Homo sapiens
  misc_feature (1)...(519): n = a,t,c or g
ttgaatccntnnnnnnnnnnnnnnnnnnnnnnnnnnnnnnnnnnnnnnnnnnnnnnnnnnnnnnnnnnnnnnnnnnnnnggcacgagaaggcagttaaagcttgtcaaagtggatcaatgtctgattcatgcacagggaaaggtgtgcctatcctatcttctaaaacatgactgggtcttttgattatttccaaagagtgagacgtagagatatatatataaaagctcaatttttcaaaaataaaattttattgaactataggtagtgatacacttttaaaatgttgctaaattatttttttgaacaggaaatgttaagagatttaaatcttggtgaaacgaaaagcggagtaccagtgttggcagtatccttagcattggaggggaaggctagtcatagagagatgacatctaagcttctttctgacctttgtgggacagtaatgagcacaactgatgtggaaaaatcatttgataaattgntgaaagatctacctgaattagcactggatactccta

SEQ ID NO: 30234 - DNA, 521 bp, Homo sapiens
  misc_feature (1)...(521): n = a,t,c or g
taaattgaaaanncngaatccatagctatgacnnnnnnnnnnnnnnnnnnnnnnnnnnnnnnnnnnnnnnnnnnnnnnnnnnnnnnnnnnggcacgagttcggtttgatgggtcaccaggacaaatggggggaggaggccctttgagatttgaggggccacaaggtcagctaggaggtgggtgtcctttgagatttgaaggtcctccaggaccagtggggacacctctgcggtttgagggcccaattggtcaagcaggaggaggtggttttcggtttgaaggttcccctggtctgaggtttgagggatctccaggtggtttgagatttgagggaccaggaggccatcctgtgggtggtctgaggtttgagggacatnnnntcaacctgtnggngntctntagntngatggacctantggtcnnnctgngnacaggacntaaactcnataagtgcctnatnatggnatntgcntannaaganatntnaggngaatttcnatttcttgnncaanctanctgtt

SEQ ID NO: 30235 - DNA, 512 bp, Homo sapiens
  misc_feature (1)...(512): n = a,t,c or g
nnnnnnnnnnnnnnnnnnnnnnnnnnnnnnnnnnnnnnnnnnnnnnnnnnnnnnnnnnnnnnnnnnnnnggcacgagagaagcaaactactctaaaaattagaaaaaaaagaataataaagtaaactaatagatagctgaagaaaataatttataataaaaataaatggtggaaattactaaattagaagagaaaaatggtagaaaaggttggtttttaaatgaatcaatataatagacaaactttgttaacctcctttttttttaaaggaaaaaaccatgagtatataaattcaggttgaaatttcaaaacaattaaaaaaccatcagactttttcacagtactttgtagatgaaatgggatacttttctaggaaaatacagtacacaaaaattgaacccagtagagatagaaagtataaatagagtttcatagaagtagacctgtgttagaactccccttcaaaagaacactgtcccacatgttcagagaaattcaatcatatttttatt

SEQ ID NO: 30236 - DNA, 512 bp, Homo sapiens
  misc_feature (1)...(512): n = a,t,c or g
nnnnnnnnnnnnnnnnnnnnnnnnnnnnnnnnnnnnnnnnnnnnnnnnnnnnnnnnnnnnnnnnnnnnnggcacgaggagggagaatgctgtttctttagggaaattgagtgattgtggaaactgtcttttctcccttaagaatcactgttctactttacaaccttgtttatagcaaaaggggtagaatagctgcatatcccaaagctggagattttggcagagtaaattatggtataatagtgtgacaggttactgtgcattaaaaatactaaggtaggataatggccaaataatatgaaaagatacaatattttgtagttagcaaaaaaaatttttctaaaatctacactcattttataaaaataaatggttataacctaaaaagtttggcatatgcgaaccaaatattagccatagttattatctgaatggtaaaattcttctttttccttccagtattattgntacaaaaaagcanaacaattttattaaaataagaaaacaaaaagg

SEQ ID NO: 30237 - DNA, 483 bp, Homo sapiens
  misc_feature (1)...(483): n = a,t,c or g
ttnnnnncnannnnnnnnnnnnnnnnnnnnnnnnnnnnnnnnnnnnnnnnnnnnnnnnnnnnnnnnnnnnnnnnnnnnnnnnnnnnnnggcacgagcctcnnnnnnnnnnnnnnnnnnnnnnnnnnnnnnnnnnnnnnnnnnnnnnnnnnnnnnnnnnagtttgagatcggcctgggcaacgtaggtgcaagattttatctttacaaaaaattgatttaaaaaatagtctggcnnnnnnnnnnnnnnnnnnnnnnnnnnnnnnnnnnnnnnnnnnnnnnnnnnnnnnnnnnnnnnnnnnnnnnnnnnnnnnnnnnnnnnnnnnnnnnnnnnnnnnnnnnnnnnnnnnnnnnnnnnnnnnnnnnnnnnnnnnnnnnnnnnnnnnnnnnnnnnnnnnnnnnnnnnnnnnnnnnnnnnnnnnnnnnnnnnnnnnnnnnnnnnnnnnnnnnntgaggntgcanngaccganactgnccantgactca

SEQ ID NO: 30238 - DNA, 515 bp, Homo sapiens
  misc_feature (1)...(515): n = a,t,c or g
ctntnnnncnannnnnnnnnnnnnnnnnnnnnnnnnnnnnnnnnnnnnnnnnnnnnnnnnnnnnnnnnnnnnnnnnnnnnggcacgaggcagaataaaaccagcagagactccttttctcctaaccgtcccggccaccgctgcctcagcctctgcctcccagcctctttctgagggaaaggacaagatgaagtggaaggcgcttttcaccgcggccatcctgcaggcacagttgccgattacagaggcacagagctttggcctgctggatcccaaactctgctacctgctggatggaatcctcttcatctatggtgtcattctcactgccttgttcctgagagtgaagttcagcaggagcgcagacgcccccgcgtaccagcagggccagaaccagctctataacgagctcaatctaggacgaagagaggagtncgatgntttggacaagagacgtggccgggaccctgagatggggggaaagccgcaanaangaanaccctcangaaggcctgg

SEQ ID NO: 30239 - DNA, 464 bp, Homo sapiens
  misc_feature (1)...(464): n = a,t,c or g
nnnnnnnnnnnnnnnnnnnnnnnnnnnnnnnnnnnnnnnnnnnnnnnnnnnnnnnnnnnnnnnnnnnnnnnggcacgaggggactcttattattcccatttgcagatgaagaaacagagtctatggagatgatccataacttgcccaaggccccgggataagaatgtggtgggcagggattgaaaccaggctgtcgggactggaaccagttgctcagttccaggtcaccctcccaggttgcgggcagaggggcagggctggagagctaggtgcagtggagagggctggagggcagaaagcctgtgtactcccccactgggtcctggcgaggttgagccaggtgatatcccagggtcccttcacctatggcctatccnnnnnnntccaaccanaagaaaatggggccggntgccgnggcttaccctgtaatcctacactttnggangctnangcnncnnantgcc

SEQ ID NO: 30240 - DNA, 504 bp, Homo sapiens
  misc_feature (1)...(504): n = a,t,c or g
atnnnnnnnnnnnnnnnnnnnnnnnnnnnnnnnnnnnnnnnnnnnnnnnnnnnnnnnnnnnnnnnnnnnnngnnnnnnnnnnnnnnnnnnnnnnnnnnnnnnnnnnnnnnnnnnnnnnnnnnnnnnnnnnnnnnnnnnnnnnnnnnnnnnnnnnnnnnnnnnnnnnnnnnnnnnnnctgtgtcatttcagtatttttcgtgtgctttcacaaattacaatgtttactacatttctgcaacagaaaacctaattgagtttataaaattttattttttgaattttatttgcatttatggttttatacaaaagtaaacaggaaagtcagaaaatctgaataataacaaaatcacaccataaagtgaacttccaaaaaggagaaacttggtttcccatgtataggggagaaagccctatcctttcaacacaaagccacagtgggtccttcaggttcccgaaaatangaaatgccctgnntaaccttttacataactcaanattaggtt

SEQ ID NO: 30241 - DNA, 470 bp, Homo sapiens
  misc_feature (1)...(470): n = a,t,c or g
ttnnaaccnagnnnnnnnnnnnnnnnnnnnnnnnnnnnnnnnnnnnnnnnnnnnnnnnnnnnnnnnnnnnnnnnnnnnnnggcacgagatcagatccaacagttaaaacagatcgactgtggcacgacaagtatactttgaggaaatcgatgattccttcgtttatgacgatggatcagtctaggaaggtccttttgataggaaaatcaataaatttcttgcaccaagtttgtcatgatcagactcccactacaaagatgatagctgtgaccaagtctgcagagtcaccccaggacgctgcagacctattcacagacttggaaaatgcatttcaggggaagattgatgctgcttattttgagaccagcaaatacctgttggatgttctcaataaaaagtacagcttgctggaccacatgcaggcaatgaggcggtacctgcttcttggtcaaggagactttataaggcac

SEQ ID NO: 30242 - DNA, 481 bp, Homo sapiens
  misc_feature (1)...(481): n = a,t,c or g
nnnnnnnttnnnntncnannnnnnnnnnnnnnnnnnnnnnnnnnnnnnnnnnnnnnnnnnnnnnnnnnnnnnnnnnnnnnnnnnnnnnggcacgagtgaatattaataatcaaagttttattgagagctactatgagcctggctatgcttactactgagttgattaaagaaatatgatataatccatggtatgaagatatttatgatctagttgaataaatagtaatatattcatgtatagtatatactcnnnnnnnnnnnnnnnnnnnnnnnnnnnnnnnnnnnnnnnnnnnnnnnncatattacattactactatatttattatataatatgtatacaatacatatgtatttaacatatacacactgtattgtatgtattactgtttactcactggactatttaccagtgaactatacacttaaaaatggttgtgatgggggccgggtgtggnggtcacgcctgtaatcccagcactta

SEQ ID NO: 30243 - DNA, 537 bp, Homo sapiens
  misc_feature (1)...(537): n = a,t,c or g
tnnnnnnntaaattgaanncattnnnnnnnnnnnnnnnnnnnnnnnnnnnnnnnnnnnnnnnnnnnnnnnnnnnnnnnnnnnnnnnnnnnnggcacgaggttaaagatacattatcattttgataaacttgatgggacatgaaaaatggtacaaatatctgtacattgtacacctactgcttcttgaataaagcaaataatacactctgcattccaagcagtggcatatgtggtgggaggtggggtgaacagaaggaagtgtattccttaggttctgaagcattggtgactgggaattattgtattagtctcatcaaatagagaagcagattagaaaaatacagtaatcttgtacatgattaaagcaatcctgtgaattttactgattttaagataattntgaattccttatatacagcctctttagatgactttnttttttttttttnananacgggcccctgganaananagnggagncccngnccaaaaatgannanngnncaggaaannacngngncnantnngccnnttttt

SEQ ID NO: 30244 - DNA, 540 bp, Homo sapiens
  misc_feature (1)...(540): n = a,t,c or g
tnnnatttgganacncnggaatcccntnnnnnnnnnnnnnnnnnnnnnnnnnnnnnnnnnnnnnnnnnnnnnnnnnnnnnnnnnnnnnnnnnnnnggcacgagtggaagaattattagatcttttttttttatttccataatcattcacaaatgaacagctcacattaaataaatcacttgtatacttagtgaaaatagtannnnnnnnnnnnnnnnnnnnnnnnnnnnnnnnnnnnnnnnnnnnnnnnnnnnnnnnnnnnnnnnnnnnnnnnnnnnnnnnnnnnnnnnnnnnnnnnnnnnnnnnnnnnnnnnnnnnnnnnnnnnnnnnnnnnnnnnnnnnnnnnnnnnnnnnnnnnnnnnnnnnnnnnnnnnnnnnnnnnnnnnnnnnnnnnnnnnnnnnnnnnnnnnnnnnnnnnnnnnnnnnnnnnnnnnnnnnnnnnnnnnnnnnnnnnnnnnnnnnnnnnnnnnnnnnnactccatttcaaaaagaaaaaagaagacagtagttatatttgattaataacttgaaatggatgaat

SEQ ID NO: 30245 - DNA, 540 bp, Homo sapiens
  misc_feature (1)...(540): n = a,t,c or g
tnnnnnnntaaanttgaanncttggactcnnnnnnnnnnnnnnnnnnnnnnnnnnnnnnnnnnnnnnnnnnnnnnnnnnnnnnnnnnnnnnggcacgaggctcttaggagaaggggcaatcatactagataggaaagccaggaagccagatgggtatctgagtatcaatattaacacagacactgtgactaaaagtccttgacttgtttgagtattcttctttcttcagtgcacaattactcaagtaaatggatgtaggaccctttggagaaggactgaaaaaatcattaccatgtatatttgccatgatgttacaaatctctcctcctggggacccagtcccgtttcagtttatggtggctctgaacgttgattcaggtcgagaaactggaccaggaaactatgtctttttattgaggccactggccctcagcctcctgatcatccattcaggnnnnnnnnnnnnnnnnnnnnnnnnnnnnnnnnnnnnnnnnnnnnnnnnnnnnnnnnnnnnnnnnnnnnnnnnnnnncggctcactg

SEQ ID NO: 30246 - DNA, 555 bp, Homo sapiens
  misc_feature (1)...(555): n = a,t,c or g
gnnnnnnnnnnnttnnnntnttnaatacngaatcnntngaataccnnnnnnnnnnnnnnnnnnnnnnnnnnnnnnnnnnnnnnnnnnnnnnnnnnnnnnnnnnnnggcacgagcagacgtggcgnnnnnnnnnnnnnnnnnnnnnnnnnnnnnnnnnnnnnnnnngcacccatgacnnnnnnnnnnnnnnncccnatncnggctncctgtgccatcctgccactgactgggcngagtgtggagcggctntgngtgnancccngacaccgacnggggccngngaacctgctntaagaccctgancaaggggtngaggngactggccantatgagaggganaaggctggnttctcatggatcgaagtgaccttcangaaccccctgntatgggttcaccgcatnccctgaacacgtggtggtgactcggaaccnangaatntctgttacaanngganagagacgctattctnaangatgcccgnnctgaanatgaccatggacaagactggtctgctgntgctagcgacccanacanagtgccataggnctgtggtt

SEQ ID NO: 30247 - DNA, 556 bp, Homo sapiens
  misc_feature (1)...(556): n = a,t,c or g
gnnnnnnnnnnnttnnnntnnnnnatttgaancctttgannnnnnnnnnnnnnnnnnnnnnnnnnnnnnnnnnnnnnnnnnnnnnnnnnnnnnnnnnnnnnnnnnggcacgagtgttctttgaggtaatcagaaacctaaggagtaggtcctgagcaaaagtacaagaatggtgggccaggaattaagaaacccaagttatagtcctgtttctcgtactacctgtatattactggacaagtcaccttaacttctctactcttgcttcttcttcagtaaaaggtaatttataacaaagttacttgtgactctaaatacagtcagtcttcattatttgcagctatacttgcaaatgcacctactcactaaaatttatttataagcccaaatcaatacgtctggggcttttttggtcatttgtagacatgcacagagcagtaaaaaatttgaaatcacttgatgttcatgttcctgaggtcaaacaaggcaacactatgcctccttgnttcactctcctactgaaaacaagtatctttttaatggngtagtagtgctgc

SEQ ID NO: 30248 - DNA, 535 bp, Homo sapiens
  misc_feature (1)...(535): n = a,t,c or g
tnnnnttgaaaacnctgaatccatnnnnnnnnnnnnnnnnnnnnnnnnnnnnnnnnnnnnnnnnnnnnnnnnnnnnnnnnnnnnnnnnnnnnggcacgagagcatcagcaaactattgtaagtcgtcctctgtgcatagggttggaaaatttttttaaatccatacctattttgtcactatctttaaagcgtttgatcatggctatgaatggtttggaaatttgcagacaagataaaccttactgaaccaagctctaaccctggagacatcgagctgccattcagctttttcttttgttcctttcatgaactcttctctgtaacccacttcttgctgggaatggatttgcagcttccctttcagtcatattttccctaacgttgaaatgtttcccattaataaaacaggtgtaagtatttttgctgaaccatttcaaagacattgcagacattgggactgttgacctaaatatttgagcttacttctcaagagataaaaatactgtctgtgaaaccacaatactattatcacatt

SEQ ID NO: 30249 - DNA, 553 bp, Homo sapiens
  misc_feature (1)...(553): n = a,t,c or g
gnnnnnnnnnnnttnnntnnnnnatntgantcctnnnnnnnnnnnnnnnnnnnnnnnnnnnnnnnnnnnnnnnnnnnnnnnnnnnnnnnnnnnnnnnnnnnnnggcacgagatgcagtagctatttatctctgctagtccctttagacggtgaacttctttggagaagggattaaatttctcttgttcaaagtcgtacctccagcatgtagcacagtgcctggcatatagaaggtatgttagactgggttctctgagaagcagatgccagttggattcatatctaatccaatatggaatagatgtgcaagggatttattgggggaaaacacttatgaaggaaaatgaggagggagctgaaggaggccggaaaagccatcagaccatggtgcaggtctgacccttgtggaagagagaggaaaggaaggaaggttgagtaggaggaatcttagactgcagtgccgttttaagaaagtttggcaaggtcaatggggagtcctcaagccaaagtcccctgtgagcaaagtcctgggttacaggacttaatatctttg

SEQ ID NO: 30250 - DNA, 538 bp, Homo sapiens
  misc_feature (1)...(538): n = a,t,c or g
tnnaattggaaaacnnnggaatcccttnnnnnnnnnnnnnnnnnnnnnnnnnnnnnnnnnnnnnnnnnnnnnnnnnnnnnnnnnnnnnnnnnnnnggcacgagcagaaatgtcatcaaatattaccaaaaaagtatttttttaagttagagaatatatttttgatggtaagactgtaattaagtaaaccaaaaaggctagtttattttgttacactaaagggcaggtggttctaatatttttagctctgttctttataacaaggttcttctaaaattgaagagatttcaacatatcatttttttaacacataactagaaacctgaggatgcaacaaatatttatatatttgaatatcattaaattggaattttcttacccatatatcttatgttaaaggagatatggctagtggcaataagttccatgttaaaatagacaactcttccatttattgcactcagcttttttcttgagtactagaatttgtattttgcttaaaattttacttttggtctgnattttcatgtggaatggat

SEQ ID NO: 30251 - DNA, 541 bp, Homo sapiens
  misc_feature (1)...(541): n = a,t,c or g
tnnnnttgganantntgantccatnnnnnnnnnnnnnnnnnnnnnnnnnnnnnnnnnnnnnnnnnnnnnnnnnnnnnnnnnnnnnnnnnnnnggcacgagaaaagaggttactaagcaaaaccacctaaatttaagttggtgatttaaatgaatctcacattaaaagaaagcttgacagtgttatgaaagccaccagactcagccagtgtgtccccatgggtatccccagccatccttgctcaatccattacttatatactaactacataatgacctgttcaaaccagactctatttaatgaactgtgaatttacacagaggccattttaaatgggtcaccccatttaggattagtggatctcaaattattaaccaaacatcactccatttcaaagtaaaatattccaccagcgatttgatttattggctcttccattgccactgagcaatgcccaggaagcaggcacattgccaaggactgggggcatcttgactaggaagcttctcgnttgtgtgancctgggtcanaccgccaaatag

SEQ ID NO: 30252 - DNA, 533 bp, Homo sapiens
  misc_feature (1)...(533): n = a,t,c or g
atttgnnnccnnnnnnnnnnnnnnnnnnnnnnnnnnnnnnnnnnnnnnnnnnnnnnnnnnnnnnnnnnnnnnnnnnnnnnggcacgagcataaagtaacatacttcattcattccttcttcatataaccattatttcccagtaaacaaggaagcaacannnnnnnnnnnnnnnnnnnnnnnnnnnnnnnnnnnnnnnnnnnnnnnnnnnnnnnnnnnnnnnnnnnnnnnnnnnnnnnnnnnnnnnnnnnnnnnnnnnnnnnnnnnnnnnnnnnnnnnnnnnnnnnnnnnnnnnnnnnnnnnnnnnnnnnnnnnnnnnnnnnnnnnnnnnnnnnnnnnnnnnnnnnnnnnnnnnnnnnnnnnnnnnnnnnnnnnnnnnnnnnnnnnnnnnnnnnnnnnnnnnnnnnnnnnnnnnnnnnnnnnnnnnaggtctcaacataagacttcagtgtgattccaaatgttcattctcatgggctgtggctgctgtggagccctttttctccgnaccatactgnttcctcatgcagttccc

SEQ ID NO: 30253 - DNA, 519 bp, Homo sapiens
  misc_feature (1)...(519): n = a,t,c or g
atnnnnnnnnnnnnnnnnnnnnnnnnnnnnnnnnnnnnnnnnnnnnnnnnnnnnnnnnnnnnnnnnnnnnnnggcacgaggttgtatacacattattcttatctacatataatatatcctgtttgtatcaggatataatttttgtatagttacatgcaagactgccttgaaagttcagatgaccattacattctttaaacccatagtttttagtttcttgttagtttctctaaaattattttttacagaccttaaatttgtaatgccttatcatagccagaggtgaattttgttgaaacttggagaaaaatttattccacccctttaagcgtacccaaaagggaagagagaactatttttcgttcaacaaaaaattttaaaagccttttttccttcagcggaaaactccaaaacagctttgctcagaacgttaaacttggcatggataaaaaaanttgagttttgctttgttgaggaaattgttttgaacacaatggtataaatatttttaaatngccg

SEQ ID NO: 30254 - DNA, 474 bp, Homo sapiens
  misc_feature (1)...(474): n = a,t,c or g
cntggccnccnnnnnnnnnnnnnnnnnnnnnnnnnnnnnnnnnnnnnnnnnnnnnnnnnnnnnnnnnnnnnnnnnnnnnnnnggcacgaggaggaatactgttggcgttcaaaagcattgctgtttcagttaagtagttccttaattacttacaatgtagtaaggctacattgaaggaagatataaatttcagtcaagactacgactgagcaaaggaaaaaaaggnnnnnnngtcaaggtgtctgntctcttgcacagacaccttgaacatttagaccaggctggctagagcagtgtttatagggacgtaacaggagatatgtgtggcagatttagggtagattcagagtgccagnantatgccaagccaaggcacgttgccccttatacattgggaaaactgttgaaggnttttaacattgggaaggncgatcgcatagcttggngccngataccnctgngcanatggcttac

SEQ ID NO: 30255 - DNA, 462 bp, Homo sapiens
  misc_feature (1)...(462): n = a,t,c or g
nnnnnnnnnnnnnnnnnnnnnnnnnnnnnnnnnnnnnnnnnnnnnnnnnnnnnnnnnnnnnnnnnnnnnggcacgagctttcttattcatttatttattttttagaaatgaggtcttgctctgtcacttgnnnnnnnnnnnnnnnnnnnnnnnnnnnnnnnnnnnnnnnnnnnnnnnnnnnnnnnnnnnnnnnnnnnnnnnnnnnnnnncctggttaatttttttttttttctttgnnnnnnnnnnatctccctgnnnnnnnnnnnnnnnnnnnnnnnnnnnnnnnnnnnnnnnnnnnnnnnnnntggccttccaaaangctaggagtncanatncnagccaccatgcccggntagctggctgcatttctttaaggcccaaagcctccngnggnancatcnggatttgaaangctnnnnnnnnnnnnnnnnnnnnnnnnnnnnnnnnnnnnnnnnnnnnnnn

SEQ ID NO: 30256 - DNA, 612 bp, Homo sapiens
  misc_feature (1)...(612): n = a,t,c or g
gnnnnnnnnnnnttnnnnnnnnnatntganaccgttnttngatgaccacnannacangacnactaantatnnnnnnnnnnnnnnnnnnnnnnnnnnnnnnnnnnnnnnnnnnnggcacgaggtgagggtgtctacgccattgccaggtgctgcctgctaccccaggccaactgcagcgtccacacagctccaccagctgaggccagcatggggacccgtgtccactgccaccaacagggccacgtcctcacaggctgcagctcccactgggaggtggaggaccttggcacccacaagccgcctgtgctgaggccacgaggtcagcccaaccagtgcgtgggccacagggaggccagcatccacgcttcctgctgccatgccccaggtctggaatgcaaagtcaaggagcatggaatcccggcccctcaggagcaggtgaccgtggcctgcgaggagggctggaccctgactggctgcagtgccctccctgggacctcccacgtcctgggggcctacgccgtanacaacacgtgtgtagtcaggagccgggacgtcagcactacaggcagcaccancgaagaagccgtgacagccgttgcatctgctgccgga

SEQ ID NO: 30257 - DNA, 585 bp, Homo sapiens
  misc_feature (1)...(585): n = a,t,c or g
tnnnntnntaaaatntgataccctttttnaataccnctatgacatnactnnnnnnnnnnnnnnnnnnnnnnnnnnnnnnnnnnnnnnnggcacgaggtctgttcaagtagggacaggaagaacttgtaggtgacagagcacattgcccagcattgtcatgggtcttgggataaagcagacaagcagaattggacagcttctggggtagtcctgaatgtcaccgccacctcatcatggctgatgtttgtcctgtttttttttttttnnnnngagggatggnaaaaggaaaangggctttgccnttnttgtcnggggctagnacntgacangtcanggggcnaatngatnttgtnnagggggttntcanaangggancaaanatttcnnaaaatggtttcannctttactagncttacttncccttngtnccnttgaccntgaggtaattaaaaaattttttggggggaccatnatntgtcagggtcctnaccctctgggananaaagttttttaaanaantgnccaaaanaaggccngccttgtttttaagcccgaatncnanctttttnagcccagggggggggg

SEQ ID NO: 30258 - DNA, 498 bp, Homo sapiens
  misc_feature (1)...(498): n = a,t,c or g
tnnnnnnnnnnntttggnnnnnnnnnnnnnnnnnnnnnnnnnnnnnnnnnnnnnnnnnnnnnnnnnnnnnnnnnnnnnnnnnnnnnnnnggcacgaggatccagattaatagagtcctaaagactacactgcaatgacttaaaaagatttcgctacataatttgaagaaagtcaaattttttacacttgctcctaaagataacttaagtcacaaaatgggcagcgtagagnnnnnnnnnnnnnnnnnnnnnnnnnnnnnnnnnnnnnnnnnnnnnnnnnnnnnnnnnnnnnttagtcacatggcaaaggagactgcagatgtaattannnnnnnnnnnnnnnnnnnnnnnnnnnnnnnnnnnnnnnnnnnnnnnnnnnnnnnnnnnnnnngagtccttaaaaagaggaaagaggcacagaagagtgggcanagagaggcacatganaagaatgngcccccattgctggtttganatggnnganngnnnctnnnngacc

SEQ ID NO: 30259 - DNA, 581 bp, Homo sapiens
  misc_feature (1)...(581): n = a,t,c or g
tnnnnnnnnnnnattgganaccnnnnnnnnnnnnnnnnnnnnnnnnnnnnnnnnnnnnnnnnnnnnnnnnnnnnnnnnnnnnnnnnnnnnggcacgaggaattacagttgtattttaggatctagctaaaaaatctcatttatctcaattcaaatatacttcgattctttaaatcacaattgaaccagtgtttcagagccagaggagacagaaaccgttcaattactcttcaccctccattgtgttccctgtcatatataatgcaaagcaaaatttgggtaagttgtacagtgcttccctcctcctgctgtaggatacatgtttagatgtagtgaaccatcttggatcctagagctggcaccacttacttgctgatggaagtgagtatggaggggttttgccctcatgaatttacaaacaaactcctaggggacaggtgtgtgcctattcaaaaaaagaatcttttttcctgaccctttacttagccttccagggatgaaactttagaggcttatgaggaaatctagtccaacttctnctggaataantcattgggcctaatgctcatcaagncttttcaa

SEQ ID NO: 30260 - DNA, 572 bp, Homo sapiens
  misc_feature (1)...(572): n = a,t,c or g
ttnnntnnnnnatctganaccgttatgacnnnnnnnnnnnnnnnnnnnnnnnnnnnnnnnnnnnnnnnnnnnnnnnnnnnnnnnnnnggcacgagtcgattttacctttgtctcagtcaatatttacctctgaggtcaatacgtgtggatattcacctcagctgcagtcaatatccatttcgtattacaatatatgatgtgcatatgtgaaaataaagaacagcatggtacaaaaaaggtctgctaggcaaagaagctttttgcaaagcggatgtgtttttgtttttttttttttnnnnnnnnnttnncngggccnnttttnaanggccaaatnntnttnccctaaatnggncntangggnnttnnnccaaaangggnantttnggcagggntaccnngataccaantaacctttcagncngcccttagggatntngantngaccncantttnncaaaagtcccngtttaantncacccttaaaaccttccccangctngcaaatngangggggatgaaaanggaanctttccttaggacccanattttcctnagcccnngncncnnaaaaa

SEQ ID NO: 30261 - DNA, 500 bp, Homo sapiens
  misc_feature (1)...(500): n = a,t,c or g
nnnnnnnnnnnnnnnnnnnnnnnnnnnnnnnnnnnnnnnnnnnnnnnnnnnnnnnnnnnnnnnnnnnnnnnnggcacgagcttaaatattttattttaacctaaaggatataaatatatattcattgacaatcagtcttttttaaagctaaatcttttatttgtgtatggatttctgagctccacattttctatcctggataaattacactacagtgcatcctatataatttccagcttagtttttttaaaaaaaaacaatttattaaatcatgtaaattacattaacaagtaaaactggcataaatagattggggacaaacatagtgacttggtaaaaatacagctcatctggtgggagcaaaaacgcatgagtgcaatagagacagtgttaaaaacacagaagagaaatggccatgtatatgctgatgttaaagaaaaatggcgtacagcaaaggccgnnnnnnnnnnnnnnnnnnnnnnnnnnnnnnnnnnnnnnnn

SEQ ID NO: 30262 - DNA, 584 bp, Homo sapiens
  misc_feature (1)...(584): n = a,t,c or g
tnnnnnnnnnnnnttgaanaccngnnnnnnnnnnnnnnnnnnnnnnnnnnnnnnnnnnnnnnnnnnnnnnnnnnnnnnnnnnnnnnnnnnggcacgagaatcaaatcatgaaatgagtggaaagtcactgcactaaacccattaagctgcattactaaatgtccaatgttacacacaatctataaataactttgtacttttagagttttatttcttcagtttgcttttcttgaagtaataatgatgttctgcttcagtgaataaagtaattttggagctgcctttgtgtttaatccacatattccttctgtatggagtaaagatggcaagtaataatcaaatcagtagaattctaaggattctgtggagtatctgtcatcaaccattttaaaaatcaagaggagtaccaaagacagtgaagggctaaaaaataattaatcactaggcttaataattttgtgaactgactttcctctggaggaataaaatgctgnttctataaagggcatctagtctttttcaaatcttgcaaaggaattcatattctggttaaaggacatcacttaactattggcttaaaaaca

SEQ ID NO: 30263 - DNA, 578 bp, Homo sapiens
  misc_feature (1)...(578): n = a,t,c or g
tnnnnnnnnnnnntttggnnnnnnnnnnnnnnnnnnnnnnnnnnnnnnnnnnnnnnnnnnnnnnnnnnnnnnnnnnnnnnnnnnnnnnnnnggcacgagggttgatgcatttgtgtcttagatcaccgttgtctacccaagatccttaggacattctcctttgttttcttttaaaagtttggtttactttattgagtctgcctggcgtcagttaggagtccaggttcccacctattattgttttctcggctccgcctgtggaagtcgtagtcaaggtaggactcatggttccacaggtggctccagtgtcactgtgccattgagctgccatctcagctcattgtacttctctgcaggttaaacctgtagctgatgaggaacagccctgagtgatgtgtgggggcccagttgttgagaagggccaaggaaaccgaagtactacacagagtgcttcaaggnaagaaagaagtactggagaacaacactgaatacatgctgggcactctgaaacgacacccagccacttacttnatgggaaangggcanngntnncnncnctgggnnntnccngnnnccaa

SEQ ID NO: 30264 - DNA, 552 bp, Homo sapiens
  misc_feature (1)...(552): n = a,t,c or g
annnnnnnnnnnnnnnnnnnnnnnnnnnnnnnnnnnnnnnnnnnnnnnnnnnnnnnnnnnnnnnnnnnnnnggcacgagatgagctcaataccctggaataagatctagtatttgatggcacaacaaacataatgtatttagatgttcaacattagtaagaaaaataagaaaaaccaaataagatgataatgacatgccgttttacacacattcaattgactcaaactcaaggaaagaggatgtgggcttgcaggatgtctacgatggttcagcagttccactccagcccaagagaaaagacaaccacagaagtgttcctnnnnnnnnnnnnnnnnnnnnnnnnnnnnnnnnnnnnnnnnnnnnnnnnnnnnnnnnnnnnnnnnnnnnnnnnnnnnnnnnnnnnnnnnnnnnnnnnnnnnnnnnnnnnnnnnnnnnnnnnnnnnnnnnnnnntaattttttaaaaatagccaggtattgtggtatgcacctgtaggcccagctactcaggaggggtgaggtgggaaaatcgcttgaccttggaagtgaactg

SEQ ID NO: 30265 - DNA, 511 bp, Homo sapiens
  misc_feature (1)...(511): n = a,t,c or g
nnnnnnnnnnnnnnnnnnnnnnnnnnnnnnnnnnnnnnnnnnnnnnnnnnnnnnnnnnnnnnnnnnnnggcacgaggagagattcaataccctgcaagttatcattagctccattttacagataagtaaactaaggctcaaaataattaaatgaccttcctaaggtcacagagctagtatatgtagtatagatgggatttgaactaaaagtctgttcagactactggtaaggatgaaaacttgataatatactgtgttatcaccctcctccaagtagaaaatctgaatttaaaataacatctagctaacagtttccannnnngtctctttcagcttctcaccaagatattcagggaacaataaaactgcttcatannnnnnnnnnnnnnnnnnnnnnnnnnnnnnnnnnnnnnnnnnnnnnnnnnnnnnnnnnnnnnnnnnnnnnnnnnnnnnnnnngcaggaattcnagaccagcctgccancatggngaaccctgctgcactaanaaat

SEQ ID NO: 30266 - DNA, 532 bp, Homo sapiens
  misc_feature (1)...(532): n = a,t,c or g
tnnnnntnataaatntgaatctncngaatccctttgnnnnnnnnnnnnnnnnnnnnnnnnnnnnnnnnnnnnnnnnnnnnnnnnnnnnnnnnnnggcacgagatccaggtgaccttgagcatgcttcctttggtgaggagagcacggtgaagaattgtcaatgtctccagcattctgggaagagttgctttctttgtaggaggctactgtgtctccaagtatggagtggaagccttttcagatattctgaggcgtgagattcaacattttggggtgaaaatcagcatagttgaacctggctacttcagaacgggaatgacaaacatgacacagtccttagagcgaatgaagcaaagttggaaagaagcccccaagcatattaaggagacctatggacagcagtattttgatgcccgtgataggagctttgtgggaagtgggatttgcaatttcctataagaatattattctgaagacctggaggaggaggtagcagcagcggtgaaaaatgggaatgacttctaatagttac

SEQ ID NO: 30267 - DNA, 523 bp, Homo sapiens
  misc_feature (1)...(523): n = a,t,c or g
tnnanttgaaaantntgaanncctatnnnnnnnnnnnnnnnnnnnnnnnnnnnnnnnnnnnnnnnnnnnnnnnnnnnnnnnnnnnnnnnnnnnnnggcacgagtgagaaatgacggatgtttaggattttgaggttttgagaaggaagaaaaatgtatggactttcagcagtatatatgggcttgaggttggtaaattttgtgtaggtgagttacttgtcctgttaccaaaaggagtcatactcatggtctcaaactgcagaggaactctgtattgatggtctcagactacagagaaagtagccagtcatgaagaaattggtactttcttcagaaaatggccaggattgggaaaatccctggtcacattactttagagaaaaagcacctgagtgtgatctcagagccaaagggtattttctatcaagtttacattctactcatagatttaatcatactgttttgtgagtgagaagacataggtttaactgctgatttggaaggagccagtttgaaagaagggg

SEQ ID NO: 30268 - DNA, 436 bp, Homo sapiens
  misc_feature (1)...(436): n = a,t,c or g
tntgaatccttnnnnnnnnnnnnnnnnnnnnnnnnnnnnnnnnnnnnnnnnnnnnnnnnnnnnnnnnnnnnnnnnnnnnnggcacgagattcactctgtgtaattgtttcctttactgtgcagaagctttttagtttgatgcaatctcattgcatatttttgcttttgttatctgtgctnnnnnnnnnnnnnnnnnnnnnnnnnnnnnnnnntagnnnnnnnnnnnnnnnnnnnnnnnnnnnnnnnnnnnnnnnnnnnnnnnnnnnnnnnnnnnnnnnnnnnnnnnnngaggcttgggggggtggaggagggatggggaaaagggnnnnnnnnnngncctnnatntganangtgggtgcanatcttnnngaaacnctgccgnnnnnatcatcnccctgnaannggacccnntgacaccatcnatnangtgaaggcc

SEQ ID NO: 30269 - DNA, 514 bp, Homo sapiens
  misc_feature (1)...(514): n = a,t,c or g
tggannncctatnnnnnnnnnnnnnnnnnnnnnnnnnnnnnnnnnnnnnnnnnnnnnnnnnnnnnnnnnnnnnnnnnnnnngnnnnnnnnnnnnnnnnnnnnnnnnnnnnnnnnnnnnnnnnnnnnnnnnnnnnnnnnnnnnnnnnnnnnnnnnnnnnnnnnnnnnnnnnnnnnnnnnnnnnnnnnnnnnnnnnnnnnnnnnnnnnnnnnntgaccgaagtaatactgaaatctctttctcttctctnataacaatctagccttaccatgcagctgagggngcatatctatctcctgacgttattcaaanattgtctnacnnnnnnnnnnnnnnnnnnnnnnnnnnnnnnnnnnnnnnnnnnnnnnnnnnnnnnnnnnnnnnnnnnnnnnnnnnnnnnnnnnnnnnnnnnnnnnnnnnnnnnnnnnnnnnnnnnnnnnnnnnnnnnnnnnnnnnnnattatccaggagtggtgnnnnnnnnnnnnnnnnnnnnnnnnnnnnnnnnnnnnnnnnn

SEQ ID NO: 30270 - DNA, 523 bp, Homo sapiens
  misc_feature (1)...(523): n = a,t,c or g
tnnntttgaaaaatntgaatcctatnnnnnnnnnnnnnnnnnnnnnnnnnnnnnnnnnnnnnnnnnnnnnnnnnnnnnnnnnnnnnnnnnnnnnggcacgagagcagatctaaattagctgggcatgccggtaccttcctatagtcctagctactcgattgcttgagcccagggggttgaggctgcagnnnnnnnnnnnnnnnnnnnnnnnnnnnnnnnnnnnnnnnnnnnnnnnnnnnnnnnnnnnnnnnnnnnnnnnnnnnnnnnnnnnnnnnnnnnnnnnnnnnnnnnnnnnnnnnnnnnnnnnnnnnnnnnnnnnnnnnnnnnnnnnnnnnnnnnnnnnnnnnnnnnnnnnnnnnnnnnnnnnnnnnnnnnnnnnnnnnnnnnnnnnnnnnnnnnnnnnnnnnnnnnnnnnnnnnnnnnnnnnnnnnnnnnnnnnnnnnnnnnnnnnnnnnnnnnnnnnnnnnnnnnnnnnnnnnnnnnnnnnnnnnnnnnnnnnnnnnnnnnnnnnnnnnnnnnnnta

SEQ ID NO: 30271 - DNA, 511 bp, Homo sapiens
  misc_feature (1)...(511): n = a,t,c or g
tntgaatccttnnnnnnnnnnnnnnnnnnnnnnnnnnnnnnnnnnnnnnnnnnnnnnnnnnnnnnnnnnnnnnnnnnnnnggcacgagaagaggcccacatccaggttggagtaggtgcctgagtgtaaggccggctgccctggtcatctgctcatccccagatggtggctcacgatctgccctgggctgttggaacatagatctcatatagagttggtccctgccttcatgctgctcatagactatgaagagactgagaaatgaacagataattgggacactgtatgataagagactgcacagaagagctaggccagccaaggcaagaaggggaccgagtctctctgaggagaggaagttttaggaaggtattccagaggaggtggcatttgagttgtgccttagagagctggacagataggcgagggaggaaaggcattccagggggaataggaaacacactgaaagacaggaacctcctggacatgttgctggcaactgaaactctgc

SEQ ID NO: 30272 - DNA, 522 bp, Homo sapiens
  misc_feature (1)...(522): n = a,t,c or g
tnnatttgaaacanntgaatcctatnnnnnnnnnnnnnnnnnnnnnnnnnnnnnnnnnnnnnnnnnnnnnnnnnnnnnnnnnnnnnnnnnnnnnggcacgaggatgttaattgatgttcatagtggtgtcttcaggatgtggctttgcctattgttaatcaaagaaagttaaaatcaccttcaattttgttttagtgttatatctgtcttaatcaagtttttttgaaaatgtagtaatagtctgtgctatatttgatagtatgttattaataagaatgtttgattcatcacaatgtcattctcttgttatcctggatcaaggtttctcctctaaggaaggtgaaatgtgctagaagcagttatctgtagcactaaaatacttacatttgagacttgtaggttatgatagttgttaacagataatcacagagcaataaaagctcaaattccaagtgtaacttctgtatttgntattaatacttgaattacaacatgttttaaggttggttttcctgatcatat

SEQ ID NO: 30273 - DNA, 492 bp, Homo sapiens
  misc_feature (1)...(492): n = a,t,c or g
nnnnnnnnnnnnnnnnnnnnnnnnnnnnnnnnnnnnnnnnnnnnnnnnnnnnnnnnnnnnnnnggcacgaggaagcaggtatgagtgtgtacagttttaaattagggttgtcagggaaggcttcacttaaaaaaaatgggatctgagcaaagatttgaggtgagaaagcaagccacgtggatgtctggaggaagaagtttctatgacgaggtaaggattcactgataattccttgccctcctgtggaactttgtggacttctgctgcagcttgtatttggttgtgccttattttataattcatcacatgcttatcaagctggatttgcccagtcttgagcacatgccattgatttagcagagttcacggctctggcgttttcaagtgtgtgcaattagaggactgccatgggcaaatcccacacccttgaatgggaacaaaaaggtggtctagggaccatgaatcctaagcaggagttaacactcgaccaca

SEQ ID NO: 30274 - DNA, 544 bp, Homo sapiens
  misc_feature (1)...(544): n = a,t,c or g
tnnnnnnnnncccttggannccttnnnnnnnnnnnnnnnnnnnnnnnnnnnnnnnnnnnnnnnnnnnnnnnnnnnnnnnnnnnnnnnnnnnnnnnggcacgagaagccctacctttccagtgtttgattgctacttttctgttaatgaattcccccagcaggatttaccatggaaatttatggtgcgttggtgttttatgggcctccatgtgcttggaaagttcccgagagttgtattcactatgtgctgcatctgtagagtgcacaggatcatctcggaagtttgttctatctctgagaacattatgtatccagggcaggggatctctccaaacattcatttttgtgctagtttggattggtttcaattccccctccatggttctgggcagtggctgccttcgtccttgagagaagaggcctagaactgtcgacagtcctgggtcttcctgcattccttgcatgccactcattggataatacattgctcacagttaggctgacccctttttaattcacagaaatattagattctacaattcaa

SEQ ID NO: 30275 - DNA, 507 bp, Homo sapiens
  misc_feature (1)...(507): n = a,t,c or g
tcccctttgaannngtgatgcccctnnnnnnnnnnnnnnnnnnnnnnnnnnnnnnnnnnnnnnnnnnnnnnnnnnnnnnnnnnnnnnnnnnnggcacgaggttatttttgctttcgcgtgtagtcttcctacacttaaatacgaaattgtaaccatagtgtttaatatcttggtaatttttttcacagaacacagtatcagatattttcttttctttttttcnnnnnnnnnnnnnnnnnnnnnnnnnnnnnnnnnnnnnnnnnnnnnnnnnnnnnnnnnnnnnnnnnnnnnnnnnnnnnnnnnnnnnnnnnnnnnnnnnnnnnnnnnnnnnnnnnnnnnnnnnnnnnnnnnnnnnnnnnnnnnnnnnnnnnnnnnnnnnnnnnnnnnnnnnnnnnnnnnataggnctttataactttttaaaatngaangtantntanccaangaaaatnnggaaaaanagnggaaaattntntntaacctccccagtaatanccatngnnggcatt

SEQ ID NO: 30276 - DNA, 492 bp, Homo sapiens
  misc_feature (1)...(492): n = a,t,c or g
tgaancctnnnnnnnnnnnnnnnnnnnnnnnnnnnnnnnnnnnnnnnnnnnnnnnnnnnnnnnnnnnnnnnnnnnnnggcacgagctttggcaattggtgtcctatgtgaataacaagtgcttctgtgttatactctgcatggttgcaatcacttcagtcttcatcctttgaaaggagaagtgtgggtgaaagaggaggagagacaaatccattcacacaatctgcaacttttcccatctgcctgagtgaatattcgttttgctttgccttaagattctgccaccagactttgattccagtgctgagtgactgtctggggtggcagaaggggttgggtgggggtgatgactctgacctctctgatattaagagtttatacagagaatagtatttgctgtgcattttaatcagcaaaatacacccccgtcagcagatgttaatttgcattctgacaatgctgccctggaacctgagaatgtgatgntggaaca

SEQ ID NO: 30277 - DNA, 501 bp, Homo sapiens
  misc_feature (1)...(501): n = a,t,c or g
tnnnntttnnnnttgaancccnnnnnnnnnnnnnnnnnnnnnnnnnnnnnnnnnnnnnnnnnnnnnnnnnnnnnnnnnnnnnnnnnnnnnggcacgagaaattttatctattatagttttaatttctataaaaactctattttaatatagagctctttggttctcttattgtttgattttcatagcattctgttcttgtttcatgaatacagtatcttatctccttggggatattaaatctatttttaaaagttgtttttctacttattgtattgcctccattttctttttctctgctcttacattttgatttgtcttttatgttggaggctttcctcaaatggctagtgctgcttggttttctgcttaaaaactcaaatactaaaaagctgattggaaggtctatgtgtatgtgtggcttattaattggcaagcttcacttagagtcatgttgcttgggatagacaggatggtgccctaggactgtatcttacatgttgg

SEQ ID NO: 30278 - DNA, 490 bp, Homo sapiens
  misc_feature (1)...(490): n = a,t,c or g
atnnnnnnnnnnnnnnnnnnnnnnnnnnnnnnnnnnnnnnnnnnnnnnnnnnnnnnnnnnnnnnnnnnnnnnggcacgannnnnnnnnnnnnnnnnnnnnnnnnnnnnnnnnnnnnnnnnnnnnnnctaaaattctgtttcttttaacagtattttcagaaagtacattgacttggaaacctgagttttcagttcataagtagcaggttaaagagaattgagaccctagactggaaaaagctcattatgggagtgaagtgcatcctttacttgccatgtcttggcaataggttatttccttataccagcaaaacagaataagccatcatgctttgctgggagatgtgttttactaaatttacacgagtttatgggtctggttagccagatctttgcagccaaaatgaaccaaagtttatgttattaatcgacgtggggctggcccaggccagggttgctagctgcagctccgctgatacttccaactctt

SEQ ID NO: 30279 - DNA, 506 bp, Homo sapiens
  misc_feature (1)...(506): n = a,t,c or g
tnnnnntttgannnttganncnnnnnnnnnnnnnnnnnnnnnnnnnnnnnnnnnnnnnnnnnnnnnnnnnnnnnnnnnnnnnnnnnnnnnnggcacgaggttcccatggctgtggctgctggacccccgcaccaggtgggctggcggctgtgtcccacacatgctctctagagcctgagaaatgctcatcctgcaggtgatttggggggtgtctgctcccaccttcactgctctcagaccaaatttctgcttcctgacagaatttgtaggatcctccctctgtcctcttagccaaggaggggagaagctctctccctccctcaccatgggggaggtcaccagtgggtggatttcatgacccacatacctcccagggctggcatgcggggtccagcagtcccagccacaactatgtcatcccgcttcctttcctctcacggtgaaggaggcggaagagaggttgttgctcccaccttttggatggggaaactgaggcttagagagca

SEQ ID NO: 30280 - DNA, 499 bp, Homo sapiens
  misc_feature (1)...(499): n = a,t,c or g
attgaatcctttagnnnnnnnnnnnnnnnnnnnnnnnnnnnnnnnnnnnnnnnnnnnnnnnnnnnnnnnnnnnnnnnnggcacgagggaattagtgctattaaaattcagacatagtatcactttactttgaaatgcacctaagttgagaaattttgatgcaaatttgaaattgcctttgaatcactgagtgccagattaaacatagcacttttacccaccagttctaaagggctatctgtaaattgaaagcacaaatgttgaaggcagtaaaacattctagaatgtgcaagttggccctttcattgccaaagaagtaaagtttctggaaagcaggaagacattaaaaaacaaaaacagaactcaacaccttttaaagtgatggatgtgatgtcaaacaaggtgctcattggactctactccatttcctttcctctgcaagctgctctgtccttctgctccagcctcctgacagtccctgcattgctggtgagaggtga

SEQ ID NO: 30281 - DNA, 486 bp, Homo sapiens
  misc_feature (1)...(486): n = a,t,c or g
annnnnnnnnnnnnnnnnnnnnnnnnnnnnnnnnnnnnnnnnnnnnnnnnnnnnnggcacgaggacttctacatggaggtctcaaagaccccttaaactcattatgtccaaaaccaaactcaaggatatggcctccatgccctcccccagcctgctctcagaaaccggggggtcatcctggatgccttcctctttctttcccttccccatcaccaatccctcctcaggttttctcacttcacttttcagacaccttgcaaacccatgtgcttccacaaacccagctccacctctgcctgtgtgttataagtgctatcatttcctccttccatgtctcctccacccctgggctccagccccctggactttccctggtgttttcaacctcctgacattgtccagcgctcttcccttctggactgccttctttgcactcatctgggaacactctccacgcttacccacttggcactccttgnttctttt

SEQ ID NO: 30282 - DNA, 534 bp, Homo sapiens
  misc_feature (1)...(534): n = a,t,c or g
cttgannccctnnnnnnnnnnnnnnnnnnnnnnnnnnnnnnnnnnnnnnnnnnnnnnnnnnnnnnnnnnnnnnnnnnnnnnnggcacgagcgcccacgccccgctccccgccccacactctgcagggccactggggaagcgacgtcaccatttcatttatttagcagatcactggtgtcttctggtcccctttccctgccacatccctctgcaccttgtccagcagccccgtgtgggcagcagctccttgggtgaggccannnnnnnnnnnnnnnnnnnnnnnnnnnnnnnnnnnnnnnnnnnnnnnnnnnnnnnngcttattccaattggacccatattggacctattccaatatggacccattttgcagtggttttagagatgtgcaaatgggcttccaaaaatttaaatagtgatgtacctctattannnnnnnnnnnnnnnnnnnnnnnnnnnnnnnnnnnnnnnnnnnnnnnnnnnnnnnnnnnnnnnnnnnnnnnnnnnnnnnnnnnnnnnnnnnnnnnnnnnnnnnn

SEQ ID NO: 30283 - DNA, 538 bp, Homo sapiens
  misc_feature (1)...(538): n = a,t,c or g
tnnnntttgnnntntganncccatnnnnnnnnnnnnnnnnnnnnnnnnnnnnnnnnnnnnnnnnnnnnnnnnnnnnnnnnnnnnnnnnnnnnnggcacgagttctcttcttaccccataacaagattgtttgccccagtcagaactattaccccaggtaaaaagccctttcctttgctctgcccaggaactttgtcaagaggaatgaatagaaacccccaacattccctaagttgggaccttgcgctctattctctcagaaagctcacagtcactgcctttgcttctcaaacaaagcttgtctaagcaaagtaaaattcggctctgagaacaaaagctttgggaaccaatggacagttggcgcctcatcgcatgcaataattgtatacttttcaacactgtgtgctgatgcaatctttgcttatttaaagcctggatttcctagggttacttgtcctactatgcactganacgtatttgttggangaatggtgaaatnaacagactcctctctaaaatgaaactgttgcaagagaaaa

SEQ ID NO: 30284 - DNA, 520 bp, Homo sapiens
  misc_feature (1)...(520): n = a,t,c or g
nnnnnnnnnnnnnnnnnnnnnnnnnnnnnnnnnnnnnnnnnnnnnnnnnnnnnnnnnnnnnnnnnnnnggcacgagcatagggctcggcgtgggaagacttttagaggtaacctgcgctattcattagtcaaggtcaaccacaagatttggggaggaacagaatataattatggtgagaggagcttcaccactgttacaaggcgtttgtggcctgcctgggcaggtgagtgaagtgtcttccagaggtggtggctgtctgttctcaatgtcaaggtcaggatattttgaactgaactgattcttgagaagtcagttgagtgggaagtccattagctttagaatcagtacagaacggtttgaattgcagctgtatccgacacttccagttgtaggaggttggcaagatacatggcttctagatttggnttatttataataaataaatttatctggagctaatgaccacctcataagggtgtgaggattaaatggncaatgcttgngaagactcatctaatg

SEQ ID NO: 30285 - DNA, 485 bp, Homo sapiens
  misc_feature (1)...(485): n = a,t,c or g
nnnnnnnnnnnnnnnnnnnnnnnnnnnnnnnnnnnnnnnnnnnnnnnnnnnnnggcacgagtagacaaaaaaattaaatgtatatattatagtgcttcggggaaagtattataaaaccaagccatgacacagtatcaacatttgaaaacttggggaattactaatattactgtagcgataaaatggaaattttgatgatacagacaatagtccacagagaattatgactaaaattattcttcctaccaaccattttaagttagtttgccatcttatgttggtgctcttggaggcttacaaattattattatttgagacaggatctccctctgtcacccgggtggnnnnnnnnnnnnnnnnnnnnnnnnnnnnnnnnnnnnnnnnnnnnnnnnnnnntagagtagccagaaccacaggcgtgagccacagcgcctggccaggaagcttacagattattaatgaaactttgttaagaaccctttacc

SEQ ID NO: 30286 - DNA, 491 bp, Homo sapiens
  misc_feature (1)...(491): n = a,t,c or g
atgatgnttttgaanaccnctntgacnnnnnnnnnnnnnnnnnnnnnnnnnnnnnnnnnnnnnnnnnnnnnnnnnnnnnnnnnnggcacgagcggcacgaggaaagaacaacaggaattctgacctcggaaggcctagcctcagacacgtcgctgatttgtgttatagaagatttctttgacactgcattgattatttccaggagtagtagtgaagggaaaattcagatgttggattccttcctacttagcttaggattcctggtgacagaaaagactgtaaatcatttgcttcaacaggaggaaagaccttgcatggacactcttgactgtgggtgcaggttgctatttctgaagcgctgtgtagactgacgattaaaaaatcaagggatgaacttgtccataaatggtttgatgatgaagtcattgctgaagctttcaaagaaattaaggatcgagaatttgagacggcagtagacgttttctcaatca

SEQ ID NO: 30287 - DNA, 485 bp, Homo sapiens
  misc_feature (1)...(485): n = a,t,c or g
atgntgtcntttgaannnnnnnnnnnnnnnnnnnnnnnnnnnnnnnnnnnnnnnnnnnnnnnnnnnnnnnnnnnnnnnnnnnnnnnggcacgagagtgggaggtgttggagctgtggtgcttgcctagaaggaccctcatcgagcaaatagaagcttctggcaggaagaagttaatgtcttgcgtgtgccctatgtaggttcattagggcctttaaagggggaagaaggtggtggctataaatgttacaatcttacctttggcccctagggattctgtctttcaaccttggttcagtaacaacttgtgactgcccaacagggcttcctttcgggagagaatggcttgttacattcaaatatgccatgaaagtatcaccatttaattcagtgtctgatgccccagcttgggcagnctgagcaggcttctgantgggtctgangaggcctttanagtanagatgaannaaggggngngatcctcaat

SEQ ID NO: 30288 - DNA, 488 bp, Homo sapiens
  misc_feature (1)...(488): n = a,t,c or g
attnggtccttnnnnnnnnnnnnnnnnnnnnnnnnnnnnnnnnnnnnnnnnnnnnnnnnnnnnnnnnnnnnnnnnggcacgagaaatagcattctggagtgtggttttgaacagaattctattctgcagatagcaaaacataagttacatgttgatgagattaaatgttcaaatcaaataatgaaatatatttatttagatacatttaatgtcttcttatataagttatcaagttgcattttttctagctgcatttaaatctatgtgcatttccttcctacttctcctgagattgatatgcagccagcatttcagttaccagcgtgaggaataaaccgggagagaggaaagatagtgaagcagctgtcttccattacaacgtgtctaaatggatagttctaccatgatgtttctttcaattccttccgggtttgggtgagaggggtggaaggaatgtttccattggtgaaatggtagctgactgccaa

SEQ ID NO: 30289 - DNA, 474 bp, Homo sapiens
  misc_feature (1)...(474): n = a,t,c or g
tnctgaanccttnaagncctnnnnnnnnnnnnnnnnnnnnnnnnnnnnnnnnnnnnnnnnnnnnnnnnnnnnnnnnnnnnnnggcacgaggttacttttgtgtttgatggattgtacttaggttcgtgctttccgggatgaaaccttctttggtatttaaaaggtagattttccttctatggttacgtgtttgatggttaatcatagaggaaaatccacgttttcagtatcaaatgctgccttgggatcatggctggactgaagccaccatcagggacgtgaggtggggctgagccctccagggtaagtggaaagatggtgggccgcagaacatgtgctgagttcgtgccatatgtctgctgaccatcacctttagaagccccctttcgctgaggagccagcttggtgcacaggctgtggtgtgttgtcacagctatgctacgggactgaaaacggttgctttactgcttgctt

SEQ ID NO: 30290 - DNA, 488 bp, Homo sapiens
  misc_feature (1)...(488): n = a,t,c or g
ttgnnttntnccaantnaatccncnnaagacccctnnnnnnnnnnnnnnnnnnnnnnnnnnnnnnnnnnnnnnnnnnnnnnnnnnnnnnnnnnnnnnggcacgagcggcacgaggaattactctcttaaattgtccaatctaaatttttattagctacattaacttaaagcatattctctctcttttctcttcacactttcttcctccttcccagggtcttcctctccctctttcatcacctacattgttccccttcccttttatactattcttattgtatgtactagctgttgttatttatacaaatactcatacatccttacatagcatgtttttaaacaaaagatactgtagtggtcttaacagtttacaattttatatttaaaaattattcaggaaatctggaaatccctgactttttacaccgtgctgatcacttgactcctgtcttagtccattctggctgctctctcagaataccagagac

SEQ ID NO: 30291 - DNA, 481 bp, Homo sapiens
  misc_feature (1)...(481): n = a,t,c or g
tntnntngatttgaatcaagnatcccttggnnnnnnnnnnnnnnnnnnnnnnnnnnnnnnnnnnnnnnnnnnnnnnnnnnnnnnnnnnnnnnnnnnnggcacgagtctaagagtgctgtgtatgtgggagttagaagataatgcttctgaatttgagatcagggactgagcatggaaagaggaagtaactatacttcctgaggagtgagtctagttcatggaccacatctggaactgctccaagggtttgttatctctgggctcagatgcttgggtgcctgggtagagggacagtacttttcagatcaagactgtgagtggctgctgtgacccgtggcagaggaatcttcttagagctgatcaggctgagatgcttcctgagatgatgactagaaactgtaggaaatccatggcccaaaatgcatctgtaggtgctttgtaattatttctaacttttattctagggttaggggtaccgtgt

SEQ ID NO: 30292 - DNA, 457 bp, Homo sapiens
  misc_feature (1)...(457): n = a,t,c or g
ttganncctnnnnnnnnnnnnnnnnnnnnnnnnnnnnnnnnnnnnnnnnnnnnnnnnnnnnnnnnnnnnnnnnnnnnnnnggcacgagggtcttttgagtctcttagggcaaatgcaggctgagaaaaatgatgtggagcagttctgagtgaagacttgttatgagacgaagagagcaggtgaacggtggggtccagctggtgtggatgaagcacctgctgtgtttgagacggagtggaagcagtactctgcttggcccattcatcccgtggcctaggcataactgagcatctcatgctttctttagtgggttcatcccgtggcctaggcataactgggtgtctggtgctttctttagtgggtaggttggggaggagttgatgggcttataattctacccagggctctgatatcacaggagtttacatggcatttggcttgntttgtgtaaatcatc

SEQ ID NO: 30293 - DNA, 490 bp, Homo sapiens
  misc_feature (1)...(490): n = a,t,c or g
gnnnnntnnnnttnnnnntncngantccctttcngaccnnnnnnnnnnnnnnnnnnnnnnnnnnnnnnnnnnnnnnnnnnnnnnnnnnnnnnnnnnnnnnnnggcacgagaaaagcttgaaaaaatgcctgagaaatatctatatctatctatatatataatattgctctattcaaagtagtttggcacctgctccatggaaataagacaccatgattgagagtattctttaatgtgtagtaaatacagcatttcaaaacagtgagggaaagaatggagtattccaaagagcatgtcattcctaacaatttggaatatagagatatatatagatcacacgtgataaaattcacatgtatacagtattgaaacatttaaacgagtataaatttttgaaaattgacannnnnnnnnnnnnnnnnnnnnnnnnnnnnnnnnnnnnnnnnnnnnnnnnnnnnnnnnnnnnnnnnnnnnnnntccttagagtcca

SEQ ID NO: 30294 - DNA, 467 bp, Homo sapiens
  misc_feature (1)...(467): n = a,t,c or g
annccttgaanccctnnnnnnnnnnnnnnnnnnnnnnnnnnnnnnnnnnnnnnnnnnnnnnnnnnnnnnnnnnnnnnnnnnnnnnnggcacgagggaaaaagtggaatctgctcagagtgaacaaaagaatcttttcctcgttatatttcagcggtttatcatgatcttgaccgagcacctagtacgatgcgaaactgatgggaccagtgtattaacaccatggtataagaactgtatagagaggctgcagcagatcttcctacagcatcaccaaataatccagcagtacatggtgaccctggagaaccttctcttcactgctgaattagaccctcatatcttggccgtgttccagcagttctgtgccctgcaggcctaagggtcattttttcctcatgtcaaggttttttttgatatcttaaaataatttgcttattttttgatggtttgaatgcttgctttcttg

SEQ ID NO: 30295 - DNA, 510 bp, Homo sapiens
  misc_feature (1)...(510): n = a,t,c or g
tttnaaatctgatnccctttnnnnnnnnnnnnnnnnnnnnnnnnnnnnnnnnnnnnnnnnnnnnnnnnnnnnnnnnnnnnnnnnnggcacgagaaaaagtatataaaaaattaattccagatatattgacctaaatgtgaaagttaaaacttcagagggtttatcttaaaatgtaagctaggagaatatcatcatggccttgaaatacttttcttagatcacataaagctctaatcataaaggaaaaaattgagacattggttactttaaaagtaaaacttctggctagcctggtggctcatgactgcaatcctaatggctttgggagggcaagacnnnnnnnnnnnnnnnnnnnnnnnnnnnnnnnnnnnnnnnnnnnnnnnnnnnnnnnnnnnnnnnnnnnnnncaaataaataaaagttaaaactctttttttaaagacaccgttaagagtgaaaagcannactggatgagagaatataattataacatataactgncngaggggct

SEQ ID NO: 30296 - DNA, 503 bp, Homo sapiens
  misc_feature (1)...(503): n = a,t,c or g
gaaatntgatnccatnttgacnnnnnnnnnnnnnnnnnnnnnnnnnnnnnnnnnnnnnnnnnnnnnnnnnnnnnnnnnnggcacgaggggcatttctgaggaggggttacccccattggcattgctgtagtttccaaaaattatttcacggagagaaggggagaggagcactatgaaccacttgttgatggcattgcccatggaactgtttcctctgtagatattcttcctcttacctgccatcaacaaggtgagtttaattgaattacagtggacaaaatgaaaacacatgtagattggaacagttaagtaagagagctttgagactctgtagaaggaaaaggtatgtgtttatgtctgaaacatggattacagtggtcacagtggtcattttgcagttatgcataaatctaacttttaacttgctggcaaataagggggaaaattagcgcanaatataatggattatatagttcaccttncagtgatttgagacataccag

SEQ ID NO: 30297 - DNA, 508 bp, Homo sapiens
  misc_feature (1)...(508): n = a,t,c or g
aaatntgattaccatnnnnnnnnnnnnnnnnnnnnnnnnnnnnnnnnnnnnnnnnnnnnnnnnnnnnnnnnnnnnnnnnnnggcacgagaacagcatcagaaagaataaaatactcannnnnnnnnnnnnnnnnnnnnnnnnnnnnnnnnnnnnnnnnnnnnnnnnnnnnnnnnnnnnnnnnnnnnnnnnnnnnnnnnnnnnnnnnnnnnnnnnnnnnnnnnnnnnnnnnnnnnnnnnnnnnnnnnnnnnnnnnnnnnnnnnnnnnnnnnnnnnnnnnnnnnnnnnnnnnnnnnnnnnnnnnnnnnnnnnnnnnnnnnnnnnnnnnnnnnnnnnnnnnnnnnnnnnnnnnnnnnnnnnnnnnnnnnnnnnnnnnnnnnnnnnnnnnnnnnnnnnnnnnnnnnnngtaacataaaataaaataaaatactgagaaataaatgtaacaaaagttcgagacttattcacaganaaccacaaaccattgctgctgagaaatagtaaagactg

SEQ ID NO: 30298 - DNA, 510 bp, Homo sapiens
  misc_feature (1)...(510): n = a,t,c or g
tttgaaatctgatgaccattnnnnnnnnnnnnnnnnnnnnnnnnnnnnnnnnnnnnnnnnnnnnnnnnnnnnnnnnnnnnnnnnnggcacgagcacagactatctgcacttctccaaagagtgcagcagagccctcctgaagatgcaatactgcccgcactgccaaggcctggcgctcactaagccttgtatgggatactgcctcaatgtcatgcgaggctgcctggcgcacatggcggagcttaatccacactggcatgcatatatccggtcgttggaagaactctcggatgcaatgcatggaacatacgacattggacacgtgctgctgaactttcacttgcttgttaatgatgctgtgttacaggctcacctcaatggacaaaaattattggaacaggtaaataggatttgtggccgcctgtaagaacacccacacaaagcccccgttgttcttttgatcagagcaaagagaagcatggaatgaagaccaccacaaggaacagtgaa

SEQ ID NO: 30299 - DNA, 532 bp, Homo sapiens
  misc_feature (1)...(532): n = a,t,c or g
tttgaanccnttgaanaccctnnnnnnnnnnnnnnnnnnnnnnnnnnnnnnnnnnnnnnnnnnnnnnnnnnnnnnnnnnnnnnnnnnnnnnnggcacgagccctcatggagaacctctgttaaggcaatgtggaaggggannnnnnnnnnnnnnnnnnnnnnnnnnnnnnnnnnnnnnnnnnnnnnnnnnnnnnnnnnnnnnnnnnnnnnnnnnnnnnnnnnnnnnnnnnnnnnnnnnnnnnnnnnnnnnnnnnnnnnnnnnnnnnnnnnnnnnnnnnnnnnnnnnnnnnnnnnnnnnnnnnnnnnnnnnnnnnnnnnnnnnnnnnnnnnnnnnnnnnnnnnnnnnnnnnnnnnnnnnnnnnnnnnnnnnnnnnnnnnnnnnnnnnnnnnnnnnnnnnnnnnnnnnnnnnnnnnnnnnnnnnnnnnnnnnnnnntnnnnnnnnnnnnnnnnnnnnnnnnnnnnnnnnnnnnnnnnnnnnnnaacttctcccacttgaaatgggtgtattcagccaatgcctgacctccgttg

SEQ ID NO: 30300 - DNA, 446 bp, Homo sapiens
  misc_feature (1)...(446): n = a,t,c or g
tttgactnngacaccgtnnnnnnnnnnnnnnnnnnnnnnnnnnnnnnnnnnnnnnnnnnnnnnnnnnnnnnnnnnnnnnnnnggcacgaggaaagcctcagccaagacccagactcccagggtcatcaacctcctcgggtcactaaccctccccagtgtctgtctacccctaagtccagagaacacgtcctctctaggctcgagccggaatcaatataggctacaagggcatcagttcaggctgcgcggaggagagaaggaagtgctgatgtggagaaactggcacagaagctgggcaccctggctcctctcctagtcccctcttccctctggatgccagtttaacactctcctggacaaggaaaagcctgctggaataagggtcacagccaaaggatccgtgaggntcatctatctgtagngcttctggccagagaaaaggccgt

SEQ ID NO: 30301 - DNA, 444 bp, Homo sapiens
  misc_feature (1)...(444): n = a,t,c or g
ccccnccccncnnngacccccnatngnacccncctnnnnnnnnnnnnnnnnnnnnnnnnnnnnnnnnnnnnnnnnnnnnnnnnnnnnnnnnnnnnnnnnnnnggcacgaggcagttttagattcacagcaaaattaagaaggtacggagatttccccccttacaatgatgaaccgacgtgaatatgtcattaccacccatagtttacattagggttcactcttggtattgtaggaaaccatgaatactaatagatttgactacctaaattttatatatcaaaaactaaaaacaaagtaaaattaaaaggcaaacaaactgtggaatacatttatgtcatgtattacaaaggaccaatgctgatatttgaagtgatcttacggatcagtaagaaaaagttgaatactttaggagaaaacaagtcaggttatcagtaggcaactcg

SEQ ID NO: 30302 - DNA, 431 bp, Homo sapiens
  misc_feature (1)...(431): n = a,t,c or g
tttgnccccccttngacccccctnnnnnnnnnnnnnnnnnnnnnnnnnnnnnnnnnnnnnnnnnnnnnnnnnnnnnnnnnnnnnnnnnnnggcacgagattgccaagcgctactgtgattcatgaatgaatttctcatagtcttctgcctgcagttttatagtttgaggggcacccatatttgtgggttagagttagtaagaatatgaatccagttatcaaagtattcatccctgaggttttgagttttattgtggtggtgattttctcatgagaaggtagacaacacttcagtttttcttgagggggaaaaaatgtacccgctaaccttttttcacccatgatttgagccctaaaacaacagcctttatgttttcagtgcaggatttcttggaatttcttgcttgtatcaatcctgatgatagccatcct

SEQ ID NO: 30303 - DNA, 427 bp, Homo sapiens
  misc_feature (1)...(427): n = a,t,c or g
ttgaccccccntnnnnnnnnnnnnnnnnnnnnnnnnnnnnnnnnnnnnnnnnnnnnnnnnnnnnnnnnnnnnnnnnnnggcacgagnnnnnnnnnnnnnnnnnnnnnnnnnnnnnnnnnccacctccacctcccaaagtgctgggattaacaggtataagccactggacccggcctcaaatcctgaagacttggtatgaaaaaaggattaaaatagccccataattttttacattgacgatatattggaatggtattattattatttcttatttttttatttttatagagacagggtttcactcttacccagactggagtgtagtatggccttatctagcttactatagccttgaactcctgggcttaagcaattctcttacctcaacatagtgaaaccctgtgtctattaaaaataccaaaaagcc

SEQ ID NO: 30304 - DNA, 431 bp, Homo sapiens
  misc_feature (1)...(431): n = a,t,c or g
cttgccccccctntgnccccntnnnnnnnnnnnnnnnnnnnnnnnnnnnnnnnnnnnnnnnnnnnnnnnnnnnnnnnnnnnnnnnnnnnggcacgagaactggaagtgggtggagctggccatggcctggctgagggtctctgggccttggtttccacagaacccagaagcagcctttacttcaagatcatcacagatagccctgggcatagctgttaccaggcatattcccagtatggtcttttcattctctgaaagcggtcagtcagggcaactgactgcaaaagccaaggctctcacatcagaggctgcgaaagaggaagaaggcttcggcccaggaggagtgtgcagctcagagccccctcngtgtgngcgctgcatccttccttcccattagtctgnctacctgaccccttagcctgcctctggac

SEQ ID NO: 30305 - DNA, 434 bp, Homo sapiens
  misc_feature (1)...(434): n = a,t,c or g
tccttgccccccaangnaatctcttnnnnnnnnnnnnnnnnnnnnnnnnnnnnnnnnnnnnnnnnnnnnnnnnnnnnnnnnnnnnnnnnnnnggcacgagaattgaatatgtttacaactgtttttgctttattaaaaaaagtttttctacaaaatttctaagcagtaagtggtatttcggaggtttttagagagctatcccttggagatacgtaataaaagtttgtaagaagggtgattgttttaaaagtttctagtgatacaagtagaaagctcctgtggtaaatatacccgtttgtaaagtatatgtatttgtatattcacactggtgcaatcttttagtagagttttgggaatgccatacaggatcaaattaattatgctttaatactttttatctctttcaggaatttanaggtgattttacaaagtcc

SEQ ID NO: 30306 - DNA, 440 bp, Homo sapiens
  misc_feature (1)...(440): n = a,t,c or g
tcnctcnccccnngtgatctctttggnnnnnnnnnnnnnnnnnnnnnnnnnnnnnnnnnnnnnnnnnnnnnnnnnnnnnnnnnnnnnnnnggcacgaggccgccccattccccaaaagtaaacgggagggttttcctttggaaattttcactgtaaatcttcttctgtgcccttctcctcctctcctttcttttgtgggccctacccatagcttagtctttccataaggaaagggattccagggcagagatgacaaagccaggtagcacaggcagccacgatttgcaatatgtgtgctgcagagtgcaggtttgagtgcactcatgaaccgtggtataggatactacagcagttcccaagagcccatcccaacaggagtcagcactccactgagatgttgccttgatccctgctgtcatctcttgaagaaggctattcct

SEQ ID NO: 30307 - DNA, 433 bp, Homo sapiens
  misc_feature (1)...(433): n = a,t,c or g
tctntgccccccccnnaaccctcttnnnnnnnnnnnnnnnnnnnnnnnnnnnnnnnnnnnnnnnnnnnnnnnnnnnnnnnnnnnnnnnnnnnggcacgagactggaagtgttttagatattgggcttttttacattttagaatatttgcattgtatatttactgcttgagcatcccaaatctgannnnnnnnnnnnnnnnnnnnnnnnnnnnnnnnnnnnnnnnnnnnnnnnnnnnnnnnnnnnnnnnnnnnnnnnnnnnnnnnnnnnnnnnnnnnnnnnnnnnnnnnnnnnnnnnnntatttacatagcactccaagaagatatctggggacaaagatttgccccataggtaaaatctgaaggcggataagtcataagagctgcctgggtccaaagcaaatggcacaacaaccacccagttcanagctcttt

SEQ ID NO: 30308 - DNA, 447 bp, Homo sapiens
  misc_feature (1)...(447): n = a,t,c or g
cnttggactccgctatnncntgaannnnnnnnnnnnnnnnnnnnnnnnnnnnnnnnnnnnnnnnnnnnnnnnnnnnnggcacgagttttactgtaactagaaagtcccccacttccagtagaaaagagatataaattcaggcaatgagtagcagatagaatcagcaggtctgaaattacaaagcaaaacttggtattatactgcttagtgaacattcccttatctcaggctcacattttaaaaagccaaacaattcccttgacttttggaagttatgcagtctttaaaggaagcctaaggtctgtagagtatctcttctgagctatatatctccttgnnnnnnnnnnnnnnnnnnnnnnnnnnnnnnncacagaggntaaataactcactnangctttatccagctgntagatnatagagctagagttgaaatcccatgnttcccct

SEQ ID NO: 30309 - DNA, 441 bp, Homo sapiens
  misc_feature (1)...(441): n = a,t,c or g
caccnnnnnnnnnnnnnnnnnnnnnnnnnnnnnnnnnnnnnnnnnnnnnnnnnnnnnnnnnnnnnnnnnnnggcacgagnnnnnnnnnnnnnnnnnnnnnnnnnnnnnnnnnnnnnnnnnnnnnnnnnnnnnnnnnnnnnnnnnnnnnnnnnnnnnnnnnnnnnnnnnnnnnnnnnnnnnnnnnnnnnnnnnnnnnnnnnnnnnnnnnnnnnnnnnnnnnnnnnnnnntggcttttcttttatttattgcattgaagatgaataatctctgtaaagataagtgctatataacgcaacatattaatttttaaacctaatgagataaagttgatcaaaattcatgatcagataaacgaagtcaggcaatctattagcttgtgttgaaaaggtacaaagctaattagttaatttgatccattctaagttttaggtgataattat

SEQ ID NO: 30310 - DNA, 513 bp, Homo sapiens
  misc_feature (1)...(513): n = a,t,c or g
gnnnnnnnntnnnnntnntnnttgnantntgattaccgtnnnnnnnnnnnnnnnnnnnnnnnnnnnnnnnnnnnnnnnnnnnnnnnnnnnnnnnnnnnnnnnnnggcacgannnnnnnnnnnnnnnnnnnnnnnnnnnnnnnnnnnnnnnnnnnnnnnnnnnnnnnnnnnnnnnnnnnnnnnnnnnnnnnnnnnnnnnnnnnnnnnnnnnnnnnnnnnnnnnnnnnnnnnnnnnnnnnnnnnnnnnnnnnnnnnnnnnnnnnnnnnnnnnnnnnnnnnnnnnnnnnnnnnnnnnnnnnnnnnnnnnnnnnnnnnnnnnnnnnnnnnnnnnnnnnnnnnnnnnnnnnnnnnnnncacagagggttgnnnnnnnnnnnnnnnnnnnnnnnnnnnnnnnnnnnnntaacattctatctctagaangcttaannctangagagaangcttgcntagagnntgtaattntgaagatgaatttcatagggnaacgataaatggngttganaaaanggat

SEQ ID NO: 30311 - DNA, 495 bp, Homo sapiens
  misc_feature (1)...(495): n = a,t,c or g
gtnnntnatttgatactntgaaaaccttttgacnnnnnnnnnnnnnnnnnnnnnnnnnnnnnnnnnnnnnnnnnnnnnnnnnnnnnnnnnnggcacgagcaggtccaattggtcaactgtcaagtgcaagtacagagtnnnnnnnnnnnnnnnnnnnnnnnnnnnnnnnnnnnnnnnnnnnnnnnnnnnnnnnnnnntgctgctattgtgtgnnnnnnnnnnnnnnnnnnnnnnnnnnnnnnnnnnnnnnnnnnnnnnnnnnnnnnnnnnnnnnnnnnnnnnnnnnnnngctaggtcttctggttgaattgtgtcctttatcattctataaggaatgctcttctttggccttaatgtttattncgntaaaaatatgttttannnnnnnnnnnnnnnnnnnnnnnnnnnnnnnnnnnnnnnnnnnnnnnnnnnnncggcggttngatcacgaggcaggagttnnaggccancctgaccacatggtngaaaccctgt

SEQ ID NO: 30312 - DNA, 524 bp, Homo sapiens
  misc_feature (1)...(524): n = a,t,c or g
gnnnnnnttncnttgnnnnctctgataccatnnnnnnnnnnnnnnnnnnnnnnnnnnnnnnnnnnnnnnnnnnnnnnnnnnnnnnnnnnnnnnnnnnnggcacgagcttgaagaaatacataagggcacaagacatatagtgaagacaccgttagtaaagtgtttaatgtttatattttgttttaagatcattttaaaaaatcagtagttttgacttgctctgtttaagactcattaatactggacatgaatagggtggattcatttggatttaaacttcatactgggccagttnnnnnnnnnnnnnnnnnnnnnnnnnnnnnnnnnnnnnnnnnnnnnnnnnnnnnnnnnnnnnnnnnnnnnnnnnnnnnnnnnnnnnnnnnnnnnnnnnnnnnnnnnnnnnnnnnnngtaaaaaataaaaataaattagtggggcatctttgctgcatgccattagtcccagcatgcagcatacttgggaggctgagatgggaggattgctgagcctgtgagatcgaggctc

SEQ ID NO: 30313 - DNA, 469 bp, Homo sapiens
  misc_feature (1)...(469): n = a,t,c or g
nttnncnccccntnnnnnnnnnnnnnnnnnnnnnnnnnnnnnnnnnnnnnnnnnnnnnnnnnnnnnnnnnnnnnnnnnnnnnggcacgannnnnnnnnnnnnnnnnnnnnnnnnnnnnnnnnnnnnnnnnnnnnnnnnnnnnnnnnnnnnnnnnnnagtctggcaacatagcaagagcctgtctacaaaaagctgggcacggtggcacacagctgtagtgtagctccctgnnnnnnnnnnnnnnnnnnnnnnnnnnnnnnnnnnnnnnnnnnnnnnnnnnnnnnnnnnnnnnnnnnnnnnnnnnnnnnnnnnnnnnnnnnnnnnnnnnncctatctcttaaagtagaaaaacaaaagtgagctatcttttttttttttctannnnttataaanccgaagngancttcnnttanaaaaaanttattggnggttaaaaaaaanccacggagacggatgcnttanctaagcc

SEQ ID NO: 30314 - DNA, 459 bp, Homo sapiens
  misc_feature (1)...(459): n = a,t,c or g
nnnnnnnnnnnnnnnnnnnnnnnnnnnnnnnnnnnnnnnnnnnnnnnnnnnnnnnnnnnnnnnnnnnnggcacgagctattgtaggcattgctatgaatgttttctaattagcattgttcatagtgcacctaaaggtgtggagagttacatgcttcatagttgaccaggagtttgcattggtttagtgattaggtggcagtgctcagccagttgttatgatgggcaagtgaatacatttagcagtcagggttgaggaaccaggctatttacagtttagccattctgtcagagttgagtaggaggagacgtgcaatagagatacccaaagaaatacatgaataattcaggagcagatttgcatttatccactggtactatttagttgtatttattagacagcttcctgccctctccaaaaagcttactgagctagtaactatttacagggttagccaaag

SEQ ID NO: 30315 - DNA, 525 bp, Homo sapiens
  misc_feature (1)...(525): n = a,t,c or g
tnnnntttgnnnnctttgaannccactnnnnnnnnnnnnnnnnnnnnnnnnnnnnnnnnnnnnnnnnnnnnnnnnnnnnnnnnnnnnnnnnnnnnggcacgaggctacatgctgctgctttgtttatgatcaaaaaataatggaaagccactctgttgactcttcattgcctaggaaataagaactaaatcctaatcagtaagtacctttaatgtgttctcaagctagttgttgaaacctatattctggtgagctttcaagatggccgaatagcaacagtggtggtctgcagctcccagtgagatcaatnnnnnnnnnnnnnnnnnnnnnnnnnnnnnnnnnnnnnnnnnnnnnnnnnnnnttgagactggttggacagtgggtgcagcctatggagggcgaaccgaagcagggcagtgtgtggccgttgcttcacctgtgaagtgtaaggggtgggggatttccctttcctagccaagggaagccatgagagtctatactgggaggaatgatacactcctaccc

SEQ ID NO: 30316 - DNA, 509 bp, Homo sapiens
  misc_feature (1)...(509): n = a,t,c or g
tttgaggctnttgaatcccttnnnnnnnnnnnnnnnnnnnnnnnnnnnnnnnnnnnnnnnnnnnnnnnnnnnnnnnnnnnnnnnnnnnnnnnnnnnnnnnnnnnnnnnnnnnnnnnnnnnnnnnnnnnnnnnnnnnnnnnnnnnnnnnnnnnnnnnnnnnnnnnnnnnnnnnnnnnnnnnnnnnnnnnnnnnnnnnnnnnnnnnnnnnnnnnnnnnnnnngnnnnnnnnaaaaaanaaactgaaaaaaanccaantgnaaacggnanggggattnccatntaaaanntanntaaaccaacaaaaaatanntnanttnaagnanccnaaagccacaaaantntantatcaccaaanggacctnagnacntgcagnanccntggttcnatggccggccagnacccaaaaggccncancaantgaaaggggnaaacnnnatnnctnattngnaaaaancnatggctagnatggaaaccgtggntcntnaccntgcaaaccntggnacttgag

SEQ ID NO: 30317 - DNA, 520 bp, Homo sapiens
  misc_feature (1)...(520): n = a,t,c or g
ntttgannctttgaanccattnnnnnnnnnnnnnnnnnnnnnnnnnnnnnnnnnnnnnnnnnnnnnnnnnnnnnnnnnnnnnnnnnnnnggcacgaggttaacagaaaatgctaaatttaatgtttttagaaagtaacctcnnnnnnnnnnnnnnnnnnnnnnnnnnnnnnnnnnnnnnnnnnnnnnnnnnnnnnnnnnnnnnnnnnnnnnnnnnnnnnnnnnnnnnnnnnnnnnnnnnnnnnnnnnnnnnnnnnnnnnnnnnnnnnnnnnnnnnnnnnnnnnnnnnnnnnnnnnnnnnnnnnnnnnnnnnnnnnnnnnnnnnnnnnnnnnnnnnnnnnnnnnnnnnnnnnnnnnnnnnnnnnnnnnnnnnnnnnnnnnnnnnnnnnnnnnnnnnnnnnnnnnnnnnnnnnnnnnnnnnnnnnnnnnnnnnnnnnnnnnngtaacctctgtgctttgtgtaactttttgctaaattcctgctttgcttcttggaacagtcttctacttggtacaggatcg

SEQ ID NO: 30318 - DNA, 503 bp, Homo sapiens
  misc_feature (1)...(503): n = a,t,c or g
annccnnnnnnnnnnnnnnnnnnnnnnnnnnnnnnnnnnnnnnnnnnnnnnnnnnnnnnnnnnnnnnnnnnnnnnnggcacgagtgtgtgccaaatgctctgcccttgggtcctcagcacaacttataggggtggatactattatgatcctattttacaaatgagaacactgaggcctaacagattaggtcagctttggtcagtttcctggcaaatatgcccttaaactatctcatgtgatgaccttttgtttgcggttttacagcttaagaaggtggcaaagctgaatcaggcaagtgagaagttcaaacatgatgacaaaggaggaggctgtgagaatagcgaggagaggctgtggccgtggaaaggccagccaggaggtggaggagcagaggttcactggttttaccatcaagcggattgtcagggttcagctcaggctctggtagtgggtctgctggnttcccctctccctctttccaaaacctgcagaggagggagct

SEQ ID NO: 30319 - DNA, 407 bp, Homo sapiens
  misc_feature (1)...(407): n = a,t,c or g
nnnnnnnnnnnnnnnnnnnnnnnnnnnnnnnnnnnnnnnnnnnnnnnnnnnnnnnnnnnnnnnnnnnnggcacgaggacccttgtggcagaatagttctaccaagttaaggggacaacaacttttttccaggtaatctgtagactagccaattaactaggcaatgaaatagaaagatctatgtcttttaaactagctatgtttcaaagttaaagggaatctatctgatttgtagctagttcactgaaatttattctacatattctatacatctgtaaatttaatcatttccagtcttacattgatagtatatagaaatatggctttttttttttctttttggtttttnnnnnnnngntttttgaaatggggtttnattcttgncgcccaggctggagngcaangggg

SEQ ID NO: 30320 - DNA, 474 bp, Homo sapiens
  misc_feature (1)...(474): n = a,t,c or g
nnnnnnnnnnnnnnnnnnnnnnnnnnnnnnnnnnnnnnnnnnnnnnnnnnnnnnnnnnnnnnnnnnnnnggcacgagagatatgaaaagagagagtgaaaaggaatggtattttggcaacgcagacaaagaaaggagtggcccgtatggatttcatgaggtatgtatcttggagatacttttggtgaaggtctcagcatttcttatgccctcctgcttagcacttacagaggcgtggaatgttttaaagctgtcatttaaattcctgttattagctccaagggccctgcaactcagtttccacatgaaaaatggagaaccaaacatacatataaaattatgccttcaaaccttgtttaaaagctgttgttatggagatagcactcaggtttttagtgatttttatgtaataatttctggctgggtgtagtggcttacacctgtaattccggcactgtgggaggatcgcttgaac

SEQ ID NO: 30321 - DNA, 636 bp, Homo sapiens
  misc_feature (1)...(636): n = a,t,c or g
anatannganntgnnntanagatctntnnanctanntgtannatnntnnatcannnaangangctngatngtnnanncacgagnantggagaatctttganacctttgaaaccntagaatgacacgaatnnnnnnnnnnnnnnnnnnnnnnnnnnnnnnnnnnnnnnnnnnnnnnggcacgaggagccactgtgcctggctggaagtaggcctaattctagcaatctcagcatcagtaggatttctctgcattggaggaagcaagactgaaggacgtctggctttatggacaatgtgcttagaagttcatgccataccttaggnnnngtctttgtgactgaaccaaccagacaggcctangctctgccctaagtggncagcctccgaggaggtagcactgcagggcctcacttcccactgnctctgacaatgggcatgngctgagagccattctctccccttatcagaggngttcccagctgcctggagtacaggagggttaatganatacctgnngagagattgngaangtaaacattcacgggggcanattnnngtcctactaacancngacatgnnctgatntnanaatactgntttancaacatctgagtaccnatacatctaannaacaac

SEQ ID NO: 30322 - DNA, 550 bp, Homo sapiens
  misc_feature (1)...(550): n = a,t,c or g
gnttantgntgattcgagatccctcctagagcccttggaannnnnnnnnnnnnnnnnnnnnnnnnnnnnnnnnnnnnnnnnnnnnggcacgannnnnnnnnnnnnnnnnnnnnnnnnnnnnnnnnnnnnnnnnnnnnnnnnnnnnnnnngcatgtannnnnnnnnnnnnnnnnnnnnnnnnnnnnnnnnnnnnnnnnnnnnnnnnnnnnnnnnnnnnnnnnnnnnnnnnnnnnnnnnnnnnnnnnnnnnnnnnnnnnnnnnnnnnnnnnnnnnnnnnnnnnnnnnnnnnnnaccatctttaactctggattnnnnnnnnntctgcccgttgtttggatctanaagcagtgcttacttgggcanttngtgggtaaaggcggtagatttgaacagagaacctttcctttctcccttttccttagtcanctnctgcatgccctttctnggaaagcccacatagtctngnccctctttccttancttgctagcatattnngntttcctngnananngnattnnggagtttgattctttgttcttcgcangaacc

SEQ ID NO: 30323 - DNA, 543 bp, Homo sapiens
  misc_feature (1)...(543): n = a,t,c or g
tnttggaannccatcnagaacccntttnacatgacnnnnnnnnnnnnnnnnnnnnnnnnnnnnnnnnnnnnnnnnnnnnnnnnnnnnnggcacgaggttcttcttaatcttaatgtttagaatatgcagcctataaaattaattttaaaataaaatgcatacagtcaatcttatttaactagaatacttaaccacttgattctgaatgttgcccattctggataagtgaagtagatgttgaatttaaaaccttgagaataatttgtatctaataggatcctaaccttgaatattatggctgcatatcgacttgggatcagtgtcctctcttagattgtcctctgcagtcattaatttttttctgctaatattcttggtgagcagtagggtgttgttaagtaaattgatgcatcagtgtgataaaatacatgcagccattaagaatgatgcttataaagacntagaaaaatgcttatatgatgctaggtgcaaaagcttaatataaagttattgccatgattgtcactacagcagagttagtgg

SEQ ID NO: 30324 - DNA, 544 bp, Homo sapiens
  misc_feature (1)...(544): n = a,t,c or g
tntttanataccatttgaaancccnnnnnnnnnnnnnnnnnnnnnnnnnnnnnnnnnnnnnnnnnnnnnnnnnnnnnnnnnnnnnnnnnnggcacgagaaaaaaaattcaaatattccatgtagacggctagtggtttaagaggctatgagctcttttctacctttttgaaaaacaaaataaaaataacactcttgataccaaaacttgcactgaaactctcaggatagctagatcaatgcttcctttatgttaattgcttccaaaccttccctgtctttagattgagtgggaatgatgacggagcgagaaagcgagacaatttaacacggaagaaggtgccaaatgggtaaaatattttgcagaaaattagctccaactttgcacattctctactgtcaaaaaataatgagtatttttcttttatagctgtaaagcaattgatgagtggtcaatccatttaaaaattatcaactcataataaaaagttaaaaaaaactgtaaacatttagtatgtgataagaccattgccaatggaaatttgc

SEQ ID NO: 30325 - DNA, 610 bp, Homo sapiens
  misc_feature (1)...(610): n = a,t,c or g
anncngnnnatatgcnnngnnnancananacnanncaangnatnnanagaangagngatacnnaanggtnnncgaatattgaacncntttgaaaccnttgaatgaccgaannnnnnnnnnnnnnnnnnnnnnnnnnnnnnnnnnnnnnnnnnnnnnnggcacgaggtatgcattgaagtatgagtcaaagctctagtaggataatcaggaaacaaaccaagtttgttggattgctgatgttgctacatagtccaccaacagggaatgcaggtaccatgaccaggtgccacactggcctgacccacgcacatcccagcagcacatttggcaggaatataaccagnnnnnnnnnngctagatattaaatatgtgngatangnccaaaaangggngcagtactctgacataagcaagtataacatttctacntgnatgataacaagaaatagaatatatcaatgtatgtaaattcactanccttttcantccaactttnctcttttctncacctactttgactctatagntttattaatagntgggttttttgtgatannaaaagctataatntgnaaaacaacagantttataaantcacaaanacaatttt

SEQ ID NO: 30326 - DNA, 486 bp, Homo sapiens
  misc_feature (1)...(486): n = a,t,c or g
ncnnnnnnnnnnnnnnnnnnnnnnnnnnnnnnnnnnnnnnnnnnnnnnnnnnnnnnnnnnnnnnnnnnnggcannnnnnnnnnnnnnnnnnnnnnnnnnnnnnnnnnnnnnnnnnnnnnnnnnnnnnnnnnnnnnnnnnnnnnnnnnnnnnnnnnnnnnnnnnnnnngcagtancggnaatgtgtgcaaaactatgngtatattgggttgcttttggngtaaaaaanggnaatgngtttgcagnggcatgcccctgtaatctcatctactcgggaggctgaaannnnnnnnnnnnnnnnnnnnnnnnnnnnnnnnnnnnnnnnnnnnnnnnnnnnnnnnnnnntgaaaaacagtctnnnnnnnnnnnnnnnnnnnnnnnnnnnnnnnnnnnnnnnnnnnnnnnnnnnnnnnnnnnnnnnnnnnnnnnnnnnnnnnnnnnnnnnnnnnnnnnnnnnnnnnnnnnnnnnnnnnnnnnnaaaaaaaaaa

SEQ ID NO: 30327 - DNA, 552 bp, Homo sapiens
  misc_feature (1)...(552): n = a,t,c or g
gngnaatcgnaacncttnnnnnnnnnnnnnnnnnnnnnnnnnnnnnnnnnnnnnnnnnnnnnnnnnnnnnnnnnnnnnnnggcacgagagcaattcaagtgggctaaaatctgaagtccatagcaggaagggacagcttcacgttcagtcagcaaatttctatttagctacaattacctcttcaccttagctcatctgttctctgatggatgtgctttttttttnnnnnnnnaattcccttttcctttnctntggaaangggngatngangtagccngggnattngttccctnnnnnnnnnnnnnnnnnnnnnnnnnnnnnnnnnnnnnnnnnnnnnnnnnnnnnnnnnnnnnnnnnnnnnnnnnnnnnnnnnnnnnnnnnagctnggnnctgtcctctcaatagggaangagtnctcctgaaanatggtngttnaaaagggtgnggcactcccccatngctctctngtnactgctttcgacatgtgacatccntgtncccttcgctntntgccatgattgaaagttcctaaggnttttccaaaactgagca

SEQ ID NO: 30328 - DNA, 498 bp, Homo sapiens
  misc_feature (1)...(498): n = a,t,c or g
ttgaantntgaanaccnttnnnnnnnnnnnnnnnnnnnnnnnnnnnnnnnnnnnnnnnnnnnnnnnnnnnnnnnnnnnnnnnnnggcacgagctcaatttaattgattttattatttattttttatatggttttgagacaaagtctctcgtnnnnnnnnnnnnnnnnnnnnnnnnnnnnnnnnnnnnnnnnnnnnnnnnnnnnnnnnnnnntgggctcacgcgaccctcctgcttcagcctccggagtagctggtactataatgtgtacannnnnnnnnnnnnnnnnnnnnnnnnnnnnnnnnnnnnnnnnnnnnnnnnnnnnnnnnnnnnnnnnnnnnnnnnnnnnnnnnnnnnnnnnnnnnnnnnnnnnntgcctggaatcccaccactttggaaggccgaggcngnnnnnnnnnnnnnnnnnnnnnnnnnnnnnnnnnnnnnnnnnnnnnnnnnnnnnnnnnnnnnnnnnnnnnnnncanaatttacttggggct

SEQ ID NO: 30329 - DNA, 497 bp, Homo sapiens
  misc_feature (1)...(497): n = a,t,c or g
ttganattgattgnnnnnnnnnnnnnnnnnnnnnnnnnnnnnnnnnnnnnnnnnnnnnnnnnnnnnnnnnnnnnggcacgaggtctttattggcttatgctgaaaagtccaggggtagtttggcttcaggtgcagctggatccaggaacccaaacagtgtcattaagaccttgcccttgggccgggcatggtggctcannnnnnnnnnnnnnnnnnnnnnnnnnnnnnnnnnnnnnnnnnnnnnnnnnnnnnnnnnnnnnnnnnnnnnnnnnnnnnnnnnnnnnnnnnnnnnnnnnnnnnnnnnnnnnnnnnnnnnnnnnnnnnnnnnnnnnnnnnnnnnnnnnnnnnnnnnnnnnnnnnnnnnnnnnnnnnnnnnnnnnnnnnnnnnnnnnnnnnnnnnnnnnnnnnnnnnnnnnnnnnnnnnnnnnnnnnnnnnnnnnnnnnnnnnnnnnnnnnnnnnnnnnnnnnnnnnntggncngnnaaataaaataccctt

SEQ ID NO: 30330 - DNA, 505 bp, Homo sapiens
  misc_feature (1)...(505): n = a,t,c or g
atttganattggatatgccnnnnnnnnnnnnnnnnnnnnnnnnnnnnnnnnnnnnnnnnnnnnnnnnnnnnnnnnnnggcacgagagaaaaacaagattacgcagctaaaaagattttaaagattcaggcttcaggggtggaccaatccatgtattcagctctcttggccacagttattgggcacaagagtcaaaggagtcaatgagacagagtgactcccaggactttgaatctattagaagagacatgttcttcctttctactgtgtgacttgagaatgttaggtctggactgcactgggcattttaccatcctgagagaaggacctcaagctgcttggaagctacttctatagaacctgaagatgaagtcaaaggaaggcagcacaaagagaaaactggatccttggtgacagcatttgaatcactagattaactcttgcctgaagccagacatctagactttttaattactaggtccaatatgnttcctttatganttaaa

SEQ ID NO: 30331 - DNA, 529 bp, Homo sapiens
  misc_feature (1)...(529): n = a,t,c or g
ntccctttgaancctaactnatactcctngnnnnnnnnnnnnnnnnnnnnnnnnnnnnnnnnnnnnnnnnnnnnnnnnnnnnnnnnnnnnnnnnnnggcacgagcggcacgagcagtttcagtagagtattgaggtggaaaccaacctgagaattgaggggatgaagagcaagcaaaggaattgaggggtagaccatcgttttcactccttaactctttggaatatagacagttctttcaagaaggtggacagaaaaagagaaaatagtgctaagagaatttgtttctataagaaaaggtctcttgagcatgctagtagtcagaggtttagggtggtcatcaggggaaaaggcaagactgaatatgctcaagagagggcagtgagcacaaggatgagtgaggacttcttgttctggtaagatggaataactggaactagtttactctcccatctaaaagaagaagaacaacaacagcaaccagctcatgaaatatacaaagcaacaattttcaagccaggaaacgcagt

SEQ ID NO: 30332 - DNA, 497 bp, Homo sapiens
  misc_feature (1)...(497): n = a,t,c or g
tggtgncatactnaacncntnnnnnnnnnnnnnnnnnnnnnnnnnnnnnnnnnnnnnnnnnnnnnnnnnnnnnnnnnnnnnnnnnnnnggcacgagcgaagcaatattgtatttttgtcgccattagatagcccaaaaagcatacctttccagcttccctcttaccttcaacacttgatataccttcctcaaactcttcataggatactttcctgagagccctgttctgccgcagattccactcccctgtctacagccttctgctgtctttacagaaacttgcctctccctgatcccagctcgcttgagacactgctcgttatcccataatctagagagatttgtaatcaaccattattggcatatttcgtttatccttaaaatgaaaacatttttagaaatcatgatagaaagacatgttgttgtaaaccattgcaacaatacagaataatatagagcaaaaactaagtttcttttccctttctcttctccagaga

SEQ ID NO: 30333 - DNA, 498 bp, Homo sapiens
  misc_feature (1)...(498): n = a,t,c or g
tntngaaacctttnaanccatnnnnnnnnnnnnnnnnnnnnnnnnnnnnnnnnnnnnnnnnnnnnnnnnnnnnnnnnnnnnnnnnnnnnnggcacgagagacttaaaatctactttctgagcaaatttccagttatgatatggtgttattaactataagcaccacctgtatgttagacctccagaacatactcctcctacctgatgaacactttgaccctttatcatatcacacttcccatgtcttcctctgcgaagtgggcacggcggggggctggagcattatgtacactgcacatgaagtgtttggcgcagtgcttggcatgggataaacaccagtcgaagtaggcacttannnnnnnnnnngtttcgctgcatttgtcaccagtgctataccttactcatttactcatcttcttattcctgtcacctggcactgcattggaacanaganatacacatatcnggcaaactgaactctacaaagatttgtgtccaa

SEQ ID NO: 30334 - DNA, 495 bp, Homo sapiens
  misc_feature (1)...(495): n = a,t,c or g
tttgannccttggctcnnnnnnnnnnnnnnnnnnnnnnnnnnnnnnnnnnnnnnnnnnnnnnnnnnnnnnnnnnnnnnnggcacgaggtcttaatctcctctcctcctgtccccaccggaggcagagccccaggctctatgcgacccaaagaagaaaaaaatgggtgcacagtgatggctccaggtctccccacccagatgctaccacgaaatccctggcatccacgaagcttccccctgttccatggtggaaattgggggaaaatggacttgtgtctccaagcagggtccatggacactggacgatgcctgaaatcccctgggaggcagggaaaaaaggcgcactgaacgctcaaccggggtataaggagtgatttttttttctctgctggcagcaggcaggaacctggggtttgaatgtccccttctctgtcgccacctcacgcagacttcagaggctctcaaggtttcctggagagggggaaatcgtccccg

SEQ ID NO: 30335 - DNA, 506 bp, Homo sapiens
  misc_feature (1)...(506): n = a,t,c or g
tnnnnttnnnnctntgannccctttnnnnnnnnnnnnnnnnnnnnnnnnnnnnnnnnnnnnnnnnnnnnnnnnnnnnnnnnnnnnnnnnnnnnggcacgaggtgtataaacctagtctttattttcaaagaaatccatagaaacagtttgtaattaatttcagacatttggttaaaaagtagaatagaaattattctatggtagggttttactgaattcacttttattctccattataagaatggaatccttatctggattacaaaaatgtgaaaagcagaggtttctcttttaaaaaaatttgtagtagatttcctgtagcaattttatggcacggaattcaccagaaggtaggtttatcaagttggtttattactagaagtattaaaaaataattggnnnnnnnnnnnnnnnnnnnnnnnnnnnnnnnnnnnnnnnnnnnnnnnnnnnnnnnnnnnnnnnnnnnnnnnnnnnnnnnnnnnnnnnnnnnnnnnnnnnnnnnnnnn

SEQ ID NO: 30336 - DNA, 484 bp, Homo sapiens
  misc_feature (1)...(484): n = a,t,c or g
tntgaancccttgtnttgtncactnatccctttggnnnnnnnnnnnnnnnnnnnnnnnnnnnnnnnnnnnnnnnnnnnnnnnnnnnnnnnnnnnnnnnnnnggcacgagnnnnnnnnnnnnnnnnnnnnnnnnnnnnnnnnnnnnnnnnnnnnnnnnnnnnnnnnnnnnnnnnnnnnnnnnnnnnnnnnnnnnnnnnnnnnnnnnnnnnnnnnnnnnnnnnnnnngtggcatttttaaaaccatatattagatcatcgcttttgtgtttgggaacctccaagggctttgcatcatatatcaagttgacacctctcctacccaagcctggctctttcctgctcctctgtcctctcagcccctccacccattgttcatgctgcttcagccacactggccttcttgccatgccacatttgtgctaagcccacatccaatctcggggcctttgcactcgcatttcctctgcttggcatgctgtacccc

SEQ ID NO: 30337 - DNA, 461 bp, Homo sapiens
  misc_feature (1)...(461): n = a,t,c or g
anttgantcctntnnnnnnnnnnnnnnnnnnnnnnnnnnnnnnnnnnnnnnnnnnnnnnnnnnnnnnnnnnnnnnnnnnnnnggcacgagagaaatatttcctagcactgtgctacctcttagcagtaggagttgcaatgtacaacttacactttgctatgaacgggatgtcccagtgtgctcaagatgtccagacccctgaaagcttaaaaggtggcaggctcctaaaactttgtatgcttgtcttccatcctctgaggtgcatgtgttttattaaggcagccagagtaatttccacttatttgtcaggtccaaatatcatgtcaacaatatagtgagccagtgttaggttctgcagaatgccagggtgatactggtccctttagtctatataataacactgggaagaatcggcctaagcatttcttaatggatcttctattttaattggataaaattat

SEQ ID NO: 30338 - DNA, 474 bp, Homo sapiens
  misc_feature (1)...(474): n = a,t,c or g
ttgaancctttnnnnnnatntgaatccntnnnnnnnnnnnnnnnnnnnnnnnnnnnnnnnnnnnnnnnnnnnnnnnnnnnnnnnnnnnnnnnnnnnnnggcacgagtgcccaggctggagtgcagtggtcnnnnnnnnnnnnnnnnnnnnnnnnnnnnnnnnnnnnnnnnnnnnnnnnnnnnnnnnnnnnnnnnnnnnnnnnnnnnnnnnnnnnnnagaagcctcatcagtgccaagtctgtgggaagaccttctctcagagtggaagcaggaatgtgcatatgagaaagcatcacctgcagctgggagcagctgggagtcaagagcaggagcaaactgctgagccactaatgggcagtagtttgcttgaagaggcttcagtacccagtaaaaacctggtgtctatgaattcccagcccagccttggtggagagtccttgaacctaccaaataccaattctatcctgggagttg

SEQ ID NO: 30339 - DNA, 483 bp, Homo sapiens
  misc_feature (1)...(483): n = a,t,c or g
tnnnntnnnnnanntgaatccatcagctatgntgngatnccnnnnnnnnnnnnnnnnnnnnnnnnnnnnnnnnnnnnnnnnnnnnnnnnnnnggcacgagctttttttttaatttaaaaaactaattttatcccagagtttagaaaaactagtttttcaccaacccgaaagacccctctgctgagtctcttgaggagttcttcattgctctttaaaacctaatttgggtgtgcttttaactacagacaccctctcacccttccctctcccgctggagtttaccatgtccttctctctgcttttgctctctgtgtattatacatacttatatcacttcgtaatgtcattttttttcttattaaattgagcttcttaaaggtaggagccatggtttatgcattccctgtgtcaaaaaatggagtctggcttatagtagactaaccataaaggttttcattgaaaatatccacatctctatttatt

SEQ ID NO: 30340 - DNA, 516 bp, Homo sapiens
  misc_feature (1)...(516): n = a,t,c or g
ttgacnccattnnnnnnnnnnnnnnnnnnnnnnnnnnnnnnnnnnnnnnnnnnnnnnnnnnnnnnnnnnnnnnnnnnnggcacgagcacacatttaagaagaaagcaagctaattttggctgagtgaggttgctcccacctataatcccagcagtgtggggatgctgcannnnnnnnnnnnnnnnnnnnnnnnnnnnnnnnnnnnnnnnnnnnnnnnnnnnnnnnnnnnnnnnnnnnnnnnnnnnnnnnnnnnnnnnnnnnnnnnnnnnnnnnnnnnnnnnnnnnnnnnnnnnnnnnnnnnnnnnnnnnnnnnnnnnnnnnnnnnnnnnnnnnnnnnnnnnnnnnnnnnnnnnnnnnnnnnnnnnnnnnnnnnnnnnnnnnnnnnnnnnnnnnnnnnnnnnnnnnnnnnnnnnnnnnnnnnnnnnnctagcagatttgaggctcacttagactataaggatgtgttttctctaaatggttagaatagaaagacctgcatgtttcagcatttagtcc

SEQ ID NO: 30341 - DNA, 515 bp, Homo sapiens
  misc_feature (1)...(515): n = a,t,c or g
tttgaccccttggctaccnnnnnnnnnnnnnnnnnnnnnnnnnnnnnnnnnnnnnnnnnnnnnnnnnnnnnnnnnnnnnggcacgaggagaacacaatttttaaagtttaaaaatttttgcctaattaagttgaatcatagtgtacgagaatcatttataattagcatattaaatgccatagaaggcactacctaagtgattttttttaagtgcaaaaatgtgtaatatcagtcccgtgtctttctctggactagaacactatatatgttacactgaagctgttcttgatgaaataaactcctttgagaggccaaaaaaaagttttttatctggctaatccttttataccactaatttggttagaaaaccagctttactgctaatacctggcctagactgaaattcgtagaggtttccagtttatcatgtaagtcaaatattttttgtgttcgaagttttagaacctacttatgaatttttcttaaggcatatcttttccctagttaaaaccaat

SEQ ID NO: 30342 - DNA, 533 bp, Homo sapiens
  misc_feature (1)...(533): n = a,t,c or g
gnncncctcncntttgtnaccanctgatactccttggnnnnnnnnnnnnnnnnnnnnnnnnnnnnnnnnnnnnnnnnnnnnnnnnnnnnnnnnnnnnnnnnnggcacgagagaaggccatctggtcccaagtttagaagttacatagaatttttgctaagtgaccgggtgacttaagttgcatgatgccctgtttgtcatgcgcttcccagagggaggaagaggcctaacttgctgctgagatactggcctcttgtgtcagtgtatctaaccgcctcaagtggagcagacagcttttaaatccagagctggcggtttagtttctgcacttggttcggatttgcctaatctttgctgtagccatattgtatttaacatgtttgggaatcttttgaaatacttactgaaaatactaactactcagagttgtcacatagttcctttaaattctgaaataactttttagttatttaacattttgttatgtggttcttagcctgactttacttcattaaagatcttttggagacatta

SEQ ID NO: 30343 - DNA, 460 bp, Homo sapiens
  misc_feature (1)...(460): n = a,t,c or g
gcnnngnttncnttnccnctttgatttccgatccgtnnnnnnnnnnnnnnnnnnnnnnnnnnnnnnnnnnnnnnnnnnnnnnnnnnnnnnnnnnnnnnnnnggcacgagctggttaacttgtaaaatataaaaatccataaaaaagagcccaaaatttaatatattatccaataccataaagtaatcannnnnnnnnnnnnnnnnnnnnnnnnnnnnnnnnnnnnnnnnnnnnnnnnnnnnnnnnnnnnnnnnnnnnnnnnnnnnnnnnnnnnnnnnnnnnnnnnnnnnnnnnnnnnnnnnnnnnnnnnnnnnnnnnnnnnnnnnnnnnnnnnnnnnnnnnnnnnnnnnnnnnnnnnnnnnnnnnnnnnnnnnnnnnnnnnnnnnnnnnnnnnnnnnnnnnnnnnnnnnnnnnnnnnnnnnnnnnnnnnnnnnnnnnnnnnnnnnnnnnnnnnnnnnnnn

SEQ ID NO: 30344 - DNA, 454 bp, Homo sapiens
  misc_feature (1)...(454): n = a,t,c or g
ttnnnttnnnnccactgaatnccttccgtnnnnnnnnnnnnnnnnnnnnnnnnnnnnnnnnnnnnnnnnnnnnnnnnnnnnnnnnnnnnnnnnnggcacgagttctctgctgagcaagaggatatcaggattaactagattaatacatgtgaagagcttgttttggacgatcagagagatttgtcttcaataaggtaaatgtgagtgaagtcttaatagtctgtcctggagtttcatctagccctggtaattgggcatcctgatgtaatttcaagctaatcatttcctctctaaatggcaaaagcttttatctgaagagcagatttcatgaattggtgatgctgagtaaggaaatggtagcaaccgaagtctttgcagtatcctctgcttagctgttttatttatacagacagagctggacacatagtaattctgnaatcccagcactttggga

SEQ ID NO: 30345 - DNA, 448 bp, Homo sapiens
  misc_feature (1)...(448): n = a,t,c or g
tnnnnttgcgtctttgaaannatcccttnnnnnnnnnnnnnnnnnnnnnnnnnnnnnnnnnnnnnnnnnnnnnnnnnnnnnnnnnnnnnnnnnnnnnggcacgagggcacccaccaccacaaccagctaaaaagtttttgtatttttaatagagacagagtttcacttttttggcaactnnnnnnnnnnnnnnnnnnnnnnnnnnnnnnnnnnnnnnnnnnnnnnnnnnnnnnnnnnnnnnnnnnnnnnnnnnnnnnnnnnnnnnnnnnntgtgcagtctttcttaatcttctagtctatgataggaatttaaaaattacaatgcctgaaatttttcctaataatttgtaactttctggattatttaggaagatatttcaaaaatattttagaggtcagaacttttactgagcaagtgcttatatgagagctagattcttaagctttg

SEQ ID NO: 30346 - DNA, 452 bp, Homo sapiens
  misc_feature (1)...(452): n = a,t,c or g
gnnnnnntnnnntnnnnnntntgattccaatccntnnnnnnnnnnnnnnnnnnnnnnnnnnnnnnnnnnnnnnnnnnnnnnnnnnnnnnnnnnnnnnnnnggcacgaggaccgaacctactgatctccttcctattgtgcccacattataagtgagctgaaatgactgattcaaaatcacaaggtaaatgaacctctaaaagacagtgtaccagcatggacagtggtgagaatacaattataacatcttgtgcctgagtatgctgtagtgtcagccaagcactttcttgacctctgacaaggtcgctgagcagaccatccctcaggccacctgcctccacgtggactcgtggaaccatactttgtgccagcagtggagatgacattgtctgatgaccacaccccaacaatccttgatcctgcagtcgtccagtcttgaatttgtctcttgtt

SEQ ID NO: 30347 - DNA, 460 bp, Homo sapiens
  misc_feature (1)...(460): n = a,t,c or g
gnggnggnntgntnanntcgtntctatgctgntgatcttnntganctatccnnnnnnnnnnnnnnnnnnnnnnnnnnnnnnnnnnnnnnnnnnnnnnnnnnnnnnnnnnnnnggcacgagaaactcagaaatcttgtgcatgggtaatagtgatagctaatgtcgattaagttcttttgcagcatcttatatacattaactcacttcacaaaaaactctcatcttacagatgccttggaaactagggtaccagcaattagagagccagcaagtgtctgagcagatttttactgtagagtccaaaactcttagcctgtttcctagacatgttttataggcatttgggtactttttatgttctcgattgctgttgtggagtaactaagaggttctctgacatgtactaatatataaactgggtggggcacaaatttgaatccctttcactgaagagttggtc

SEQ ID NO: 30348 - DNA, 452 bp, Homo sapiens
  misc_feature (1)...(452): n = a,t,c or g
gnntgnttnnnttgtntctctgattntaatctcttgnnnnnnnnnnnnnnnnnnnnnnnnnnnnnnnnnnnnnnnnnnnnnnnnnnnnnnnnnnnnnnnnnnnnggcacgagcaaatttccttttcagagttcatgttcttaccatggcttgtatataaatactaggttgactgtcaatatggttacatcactatttgacctgccatagtagattgctgaatttgtccttgtgttaatactcattcacataaaaaccataatacaaggcagcatttagatcctgtgaagataatgaccagggctttccctgtgtatatatataaattgtatcaacttgttttctcttactagttttttttatttcaggctgaaagaatattctcagaggttagaaggattgagaattatagagttgaaggcatggagatctactctacaacactttggcatc

SEQ ID NO: 30349 - DNA, 447 bp, Homo sapiens
  misc_feature (1)...(447): n = a,t,c or g
tnnnnttnnntctntgatcnncaatccntnnnnnnnnnnnnnnnnnnnnnnnnnnnnnnnnnnnnnnnnnnnnnnnnnnnnnnnnnnnnnnnnnggcacgagctcagtcagtaaagtgacccatagattatattcagtaagacaccacgttatgtgcttagagagaattaagccagtgattaggcctgccagaaactggtcatctcgctgaacaggtgaaacggatgcataaagtaacagggccaggctggaatggtgtggacaggaagtgctgcaggagctcaggtgagcgggagacctcaaacttggggcagtttgaactgggccttacaagatgggtagggtttgtaaggcatagagaaagaacattcctgaacaaccatgtatgaagtcattgaaggtcaatgagaaagcctgtttgttgaaacagggtgtgtggacaaaatt

SEQ ID NO: 30350 - DNA, 452 bp, Homo sapiens
  misc_feature (1)...(452): n = a,t,c or g
ttnnttntntntntgatntcatncccnnnnnnnnnnnnnnnnnnnnnnnnnnnnnnnnnnnnnnnnnnnnnnnnnnnnnnnnnnnnnnnnnnnnnnnnggcacgagccaccatggtgctgtctcctgccgacaagaccaacgtcaaggccgcctggggtaaggtcggcgcgcacgctggcgagtatggtgcggaggccctggagaggatgttcctgtccttccccaccaccaagacctacttcccgcacttcgacctgagccacggctctgcccaggttaagggccacggcaagaaggtggccgacgcgctgaccaacgccgtggcgcacgtggacgacatgcccaacgcgctgtccgccctgagcgacctgcacgcgcacaagcttcgggtggacccggtcaacttnaagctcctaagccactgcctgctggtgaccctggccgccacctc

SEQ ID NO: 30351 - DNA, 506 bp, Homo sapiens
  misc_feature (1)...(506): n = a,t,c or g
annnnnnnnnnnnnnnnnnnnnnnnnnnnnnnnnnnnnnnnnnnnnnnnnnnnnnnnnnnnnnnnnnnnnnggcacgagcttgtttattctaaaaatgttttttgaaaaaaagagaagataaagggaaaaaacccctaccattcagggtagcatctgttaatacttgagtgtgtattactctaatccttttttaaatgcacttgtgtttgcataattttcaacttagctagtaattatatgttacttactgttttgtaacctgcaatatgatggtttctccatgtcattaaatagtcttctacatgaggtactttatcatttaatatcattgaatgtttaatcaatatcctgttgttggctatttgtagtggtttagtgtatggactttgaaaccaaatagacatgagtttgaatctctggggtagcattacctaaatcagtcctgcatgaccattaaatgaggtaatatacgttaagcatttagtgcagtgcttgggccattgta

SEQ ID NO: 30352 - DNA, 529 bp, Homo sapiens
  misc_feature (1)...(529): n = a,t,c or g
ttnnnntntnanccaagtgaanctcttnnnnnnnnnnnnnnnnnnnnnnnnnnnnnnnnnnnnnnnnnnnnnnnnnnnnnnnnnnnnnnnnnnnggcacgaggacttagaatatacttttatagggtcacattatatattagagatgtttcattgcatctttgacaaatgtggaaatagttttgtaaaaaagaaactgtctcaaaagtgacttgagtcagagcacaagcccattaattcctggggttggtgggagaggtcattatttggaagagagaaggaacttataactgatgccaggggactcttttgtgaatgtgtcttatttgaaaatatgtgtgcatatgtgtgtttgtatgtttgtgttgatcttgggtactgtgaccttgttgaactctcatctattcttggattgtgtttgtgtgtagattctttgggattttctacttaggcaataatgttattgacagacaggaacagtattatttcctaacttacttggtatttgcagaacttaggctgcagtgtac

SEQ ID NO: 30353 - DNA, 498 bp, Homo sapiens
  misc_feature (1)...(498): n = a,t,c or g
atttgattcannnnnnnnnnnnnnnnnnnnnnnnnnnnnnnnnnnnnnnnnnnnnnnnnnnnnnnnnnnnnnnnnnnnnnggcacgaggtatgcacagggaaagctgcacaaggaaacttgctgtggtgatagatgtgttctttatctcaaaggtagcagatatgtaaattatacatgcaaactaatatttatgaaagaacgaatnnnnnnnnnnnnnnnnnnnnnnnnnnnnnnnnnnnnnnnnnnnnnnnnnnnnnnnnnnnnnnnnnnnnnnnnnnnnnnnnnnnnnnnnnnnnnnnnnnnnnnnnnnnnnnnnnnnnnnnnnnnnnnnnnnnnnnnnnnnnnnnnnnnnnnnnngagaacagggtttcacaannnnnnnnnnnnnnnnnnnnnnnnnnnnnnnnnnnnnnnnnnnnnnnnnnnnnnnnnnnnnnnnnnnnnnnnnnnnnnnnnnnnnnnnnnnnnnnnnnnncaaatatttaaatataggtaag

SEQ ID NO: 30354 - DNA, 528 bp, Homo sapiens
  misc_feature (1)...(528): n = a,t,c or g
gnnnnnnnnnntnnnnnnnnnnnattggannccatnnnnnnnnnnnnnnnnnnnnnnnnnnnnnnnnnnnnnnnnnnnnnnnnnnnnnnnnnnnnnnnnnnnnnggcacgagattcaggtatctcaacttgaagcttctcatcttgagcttaattttacattgctaatgtttgattgttttcaagaatttagaagctgtattcaaaatagcactgtagatgatatccatgactactgctgatgggcttgtgtctagtaagctaaattggttnnnnnnnnnnnnnnnnnnnnnnnnnnnnnnnnnnnnnnnnnnnnnnnnnnnnnnnnnnnnnnnnnnnnnnnnnnnnnnnnnnnnnnnnnnnnnnnnnnnnnnnnnnnnnnnnnnnnnnnnnnnnnnnnnnnnnnnnnnnnnnnnnnnnnnnnnnnnnnnnnnnnnnnnnnnnnnnnnnnnnnnnnnnnnnnnnnnnnnnnnnnnnnnnnnnnnnnnnnnnnnnnnnnnnnnnnnnnnnnnnnnnnnnnnnnnnnnnn

SEQ ID NO: 30355 - DNA, 511 bp, Homo sapiens
  misc_feature (1)...(511): n = a,t,c or g
tnnntttganncnttggatnccnnnnnnnnnnnnnnnnnnnnnnnnnnnnnnnnnnnnnnnnnnnnnnnnnnnnnnnnnnnnnnnnnnnnnnnggcacgaggcgtgggttctgaatctatggagaaaggtaatgggctctggtgggaggacttccacagcaggatttcgctactcagaagctgggagggagagtacaggattggcagagtattgctgaaatgagggactatgaaatacaagatggacaaaatagggagtgaagaataggctaatggattgggatgaagaagtgactgtccacaagggaaggactcatgttgtccactgacacaaccacagttagaacagcgcttggtccagagaaagcagatacccagaatgaaggaaaagagatcctaataatgttgaaaaatagttaaaactagagtagctgaagaaataagtttgagagacggaaggctttggtcagactaagaaagaaacatcatcattcttangtttttaacataa

SEQ ID NO: 30356 - DNA, 495 bp, Homo sapiens
  misc_feature (1)...(495): n = a,t,c or g
atnnnnnnnnnnnnnnnnnnnnnnnnnnnnnnnnnnnnnnnnnnnnnnnnnnnnnnnnnnnnnnnnnnnnggcacgaggtaacactgctcagacaagaggtccaagacctacaggcttcacttaaggaagaaaaatggtactcggaagaattaaagaaggaattagaaaaatatcaagggctgcagcagcaagtaattgcttttaactacttaaagcatgtttattagttgtttatttttattgttgaaaactaaacttaatacctttttgcaagcaggtggcggcctgatataaataacttcctaatttgtttctctgtgttgaattctgatgaatgcaaacaaatgtatgaggagtgaagatgtaattttttaaaaggtgttccattaaaaatgagttactggatnnnnnnnnnnnnnnnnnnnnnnnnnnnnnnnnnnnnnnnnnnnnnnnnnnnnnnnnnnnnnnnnnnnnnnnnnnnnnnngcaacacag

SEQ ID NO: 30357 - DNA, 468 bp, Homo sapiens
  misc_feature (1)...(468): n = a,t,c or g
antcctacagctanttgatgactnnnnnnnnnnnnnnnnnnnnnnnnnnnnnnnnnnnnnnnnnnnnnnnnnnnnnnnnnnnnnnnnnnnnnnggcacgaggaacagaattattttattcatgtgaaccccagtttgcatcccccttaaggtggcgatctgtagggtgggggaatcaatccacaagtattccttccaaacccaagtgctctgttagagcagataaccaccctgatggagaaggatggttatttttaggcaacacataaatatgtagcatgtatagacagctatatacattacattttatattctttatctgctgcatggtgataatagcttaagcaaaactaggagtccttgtgttcagtgatagatggggaattaatatttcattatacctgggaaagccagtgattcagctctcactgtccaattgtacttagattaaatacagttcttctgcaat

SEQ ID NO: 30358 - DNA, 504 bp, Homo sapiens
  misc_feature (1)...(504): n = a,t,c or g
ttganncccatnnnnnnnnnnnnnnnnnnnnnnnnnnnnnnnnnnnnnnnnnnnnnnnnnnnnnnnnnnnnnnnnnnnnnggcacgagacaatgttgtatattaatagtattggaagttaatcctgattagaagtgttaatcaacttactaactttaatagcttgtcctttaaatgtttataactgtcttgaattcatcagagtcaaatgtaagtcaggattcaaaagaaacaatttaaaaagtcacatttagcattttggaaagatgaagtaggatagaaagtaccatagtggatcacagtaagggaagtaagtgaaatattttgttacagttttatacaccccccctctccacacacaggtacacagctttttaaaaaagtttttgaatcaaaatatgaaaaacttaggtctagaataataaatagctatgtagatatttcatataaggcctaaaagagttttagatttncttgacttcttcctggcctcgnttctcctccc

SEQ ID NO: 30359 - DNA, 497 bp, Homo sapiens
  misc_feature (1)...(497): n = a,t,c or g
nccnnnnnnnnnnnnnnnnnnnnnnnnnnnnnnnnnnnnnnnnnnnnnnnnnnnnnnnnnnnnnnnnnnnnnnnnggcacgagcactcattctattgcttttcctttgaactcaacattatacatttatggtataaaacaaaagagtttacagtaactgttcagtaagtgcttctttagtttttcagtaatttagagtaataggtagagcttcaacatttaaggaaaaattttctgctttagaaaaaaatagtgattggctcacctggccttttttccctgtgcttccgtcaacattgtacttttccttcttgataatacagggcataaacaaaacaagaacactgccccaacaaaaaaaccccaaaactatgataccatctggcattaattttttttggaaattccaactcttgttaacaagtctgcatgatgagtcttcatgaactgcctccaagatttatgngnatttttccttcctgagtttatgtaataaga

SEQ ID NO: 30360 - DNA, 380 bp, Homo sapiens
  misc_feature (1)...(380): n = a,t,c or g
nnnnnnnnnnnnnnnnnnnnnnnnnnnnnnnnnnnnnnnnnnnnnnnnnnnnnnnnnnnnnnnnnnnnnnnggcacgagtgatgggccctttccatctagaaactcccatctttcagttcaggggctttttcttaatttatctatttgactcccctactctgcatctctgtttggaactgttgttgggacattggacctctggaaccagtcttccaatttttttcattttctctactgtttcccatctttcttttctactttctggaagatttcttctactttatcttctagcacttctattgannnnnnnnncccgtttctgctgtcaagagctatcaagctatgcaagagctgntaagnctntgaatgctgnctttga

SEQ ID NO: 30361 - DNA, 383 bp, Homo sapiens
  misc_feature (1)...(383): n = a,t,c or g
nnttggannccnnnnnnnnnnnnnnnnnnnnnnnnnnnnnnnnnnnnnnnnnnnnnnnnnnnnnnnnnnnnnnnnnnnnnnnggcacgagtatttatcatgacaggaaaggaaagcatagctttgtgcaccccatcccacaccctccaccccctacaaattttactaacactgtttctgggttcagaatttttttgcctgagttggtacctcaaatcacttgagttaaactgcagatgaatcacacataatgcagataaaatgacttcatgccctaatttctagaacgtgacctgaatgtgaactagacattcgttttcctaaaccccatgagacccaggtattcttgacatgtgtagagaggattnnnnnnncccgangctg

SEQ ID NO: 30362 - DNA, 409 bp, Homo sapiens
  misc_feature (1)...(409): n = a,t,c or g
nccnnnnnnnnnnnnnnnnnnnnnnnnnnnnnnnnnnnnnnnnnnnnnnnnnnnnnnnnnnnnnnnnnnnnnnnggcacgagagatctttttgtataaaattgaatagcaataggaagagataatagattaaaagactatatagtttcatggttcatagctccattcgcagatttgagaacagtgttaaaattaagacgcttgtgaacccaaatctttttttggttcataaatttaaatattttgaaaggttgtgactagacataatggttcaagaggtatcagtacgttaagagcttgccctcctgtttggaaactggaatctatgggaacatgaccaannnnnnnnancatntacatnngncctatganactannngatgannnnctnantnnnctttnnncnccct

SEQ ID NO: 30363 - DNA, 262 bp, Homo sapiens
  misc_feature (1)...(262): n = a,t,c or g
ttgnnnccnaacngnttgacntnnnnnnnnnnnnnnnnnnnnnnnnnnnnnnnnnnnnnnnnnnnnnnnnnnnnnnnnnnnnnnnnnnnnnnnnnggcacgagcgcccttgatcccatggactgacccctgcataacgttttcacaggtgcaagtgtgcatttccactggtgcacatgtgcaagttatactcttgaaattagagtagatttcaagtaggatagcaaattttagttttnnnnnnnctttttgngannnnttat

SEQ ID NO: 30364 - DNA, 321 bp, Homo sapiens
  misc_feature (1)...(321): n = a,t,c or g
gccttgactcaacagctatgacnnnnnnnnnnnnnnnnnnnnnnnnnnnnnnnnnnnnnnnnnnnnnnnnnnnnnnnnnnggcacgagagaaaaaaaaagcaaaaaaaaatctcnnnnnnnnnnnnnnnnnnnnnnnnnnnnnnnnnnnnnnnnnnnnnnnnnnnnnnnnnacagacaaaaaagtagagaggtggnnnnnnnnngctgggggcaggngagcgnatttgaaaacagaatcttgcatatgatggntgcttggngncaattntacatnnnannngcctncangganaacattatgnngaggatgntntgngcgg

SEQ ID NO: 30365 - DNA, 481 bp, Homo sapiens
  misc_feature (1)...(481): n = a,t,c or g
ttganncccatcanccttgactcaaacnnnnnnnnnnnnnnnnnnnnnnnnnnnnnnnnnnnnnnnnnnnnnnnnnnnnnnnnnnnnnnnnnnnggcacgagccgggatcattacctggcctctgggaacacaagtgtggccccctgcaccgacttcttcagctttgcctgtggaagggccaaagagaccaataattcttttcaggagcttgccacaaagaacaaaaaccgacttcggagaatactggaggtccagaattcctggcacccaggctctggggaggagaaagccttccagttctacaactcctgcatggatacacttgccattgaagctgcagggactggtcccctcagacaagttattgaggagcttggaggctggcgcatctctggtaaatggacttccttaaactttaaccgaacgctgagacttctgatgagtcagtatggccatttccctttcttcagagcctaccta

SEQ ID NO: 30366 - DNA, 552 bp, Homo sapiens
  misc_feature (1)...(552): n = a,t,c or g
ttgaanatttgaaatccnnnnnnnnnnnnnnnnnnnnnnnnnnnnnnnnnnnnnnnnnnnnnnnnnnnnnnnnnnnnnnnnnnggcacgaggaaggcggccaagcccagcgtccccaaagtgcccaagggccgcgaagtgagcgtgtcggccggtcagagcggccggcgtgggcttttcggtgtttttgtttttctaccccaagtgacgtagattttgtacggctcacgccggccggggccgcgaggcctggtctgagcctcagggaggggccccgggtcctctcagtctttcccctcccccaacgatgtagcgtttttcgttgtttgctttaggtttttgaaacagccccggcgacgcctctattggctctcggccttggcaacggccgtcgtcatggttactggcccctaggcgccgatggccgaggccgcgcctgcccaccgggcggggtcgctggttggccgggcccaggcgcgcggggacgcggaggccgcgcattcttttccagcttcccacctcttgcnttgggtgcgcgacaaaaatngttcgg

SEQ ID NO: 30367 - DNA, 533 bp, Homo sapiens
  misc_feature (1)...(533): n = a,t,c or g
tttgaaaaccctttgagacacnattacgaatttaatacgactcnnnnnnnnnnnnnnnnnnnnnnnnnnnnnnnnnnggcacgagctgatagaaaatatatatacgctatggaagaaattttgaaaatacagataagcaaaaacaaaatgatgaaataaaataatctttaacttcccacattcagatgtgaagcactgcttatattttgtttttatgatacaaaaagaagtctgtaatgcaagctgtccttcccttagcagtctgacaaatgtattgcannnnnnnnnnnnnnnnnnnnnnnnnnnnnnnnnnnnnnnnnnnnnnnnnnnnnnnnnnnnnnnnnnnnnnnnnnntatatttggctcgagttaaaaatattttttaaatgattaaaagtaaacactaatctatcatataggacttacagcttanaaatattaaatacacaaattttctgcctcagtaagctaacatctcaggttttatatgacttatatgaatgaaatgccatgtgttatttttgaaagcttat

SEQ ID NO: 30368 - DNA, 479 bp, Homo sapiens
  misc_feature (1)...(479): n = a,t,c or g
ttgaaaacntttgacnnnnnnnnnnnnnnnnnnnnnnnnnnnnnnnnnnnnnnnnnnnnnnnnnnnnnnnnnnggcacgagactggatattaaaaatctatgcttttaattgtatgctaattatacctcaattttttttaaaaggtctacccgtcnnnnnnnnnnnnnnnnnnnnnnnnnnnnnnnnnnnnnnnnnnnnnnnnnnnnnnnnnnnnnnnnnnnnnnnnnnnnnnnnnnnnnnnnnnnnnnnnnnnnnnnnnnnnnnnnnnnnnnnnnnnnnnnnnnnnnnnnnnnnnnnnnnnnnnnnnnnnnnnnnnnnnnnnnnnnnnnnnnnnnnnnnnnnnnnnnnnnnnnnnnnnnnnnnnnnnnnnnnnnnnnnnnnnnnnnnnnnnnnnnnnnnnnnnnnnnnnnnnnnnnnnnnnnnnnnnnnnnnnnnnnnnnnnnnnnnnnnnnnnnnnnnnnnnnnnnnnnnnnnnnnn

SEQ ID NO: 30369 - DNA, 527 bp, Homo sapiens
  misc_feature (1)...(527): n = a,t,c or g
tttgaaanccttnnnnnnnnnnnnnnnnnnnnnnnnnnnnnnnnnnnnnnnnnnnnnnnnnnnnnnnnnnnnnnnnggcacgagggattacagagagggaagcaatagcagggacaagtgtcagaacagaggtctgggagcaatagccacaagttggcagaagttgtaagacaaaggagagttaggggtcagttcagcagtagcagcaggtgtgggaaatgcatgagtagagtgttgagtcaatgaaatggtgggatccttattaaagagtggtggatggcttatggtgaaagtggctcctggaccatgtcattctcagattcatcacccttttagccacatagcctttggataaacccttgcatgggtaagttaaaaattacttgaattgccttttaaaatgagcatgcctgaaattgtatcttggtatatctaaatgtgaccttncaccagcgaatgcaactggttgaacccggtgtgagcagatcctgctgccanagctaggtattgaaagttgggtattttga

SEQ ID NO: 30370 - DNA, 513 bp, Homo sapiens
  misc_feature (1)...(513): n = a,t,c or g
annnccnnattgaaancgnttgacnnnnnnnnnnnnnnnnnnnnnnnnnnnnnnnnnnnnnnnnnnnnnnnnnnnnnnnnnnggcacgagctgcacctggacccaaaaaggacatttatactgacaaggaggtcaaaaggagatagcagctgagtggtcttgtgagtcacacagggttcagtgaggggagaggttatggaactgtttctgaggggcacagaggtctctaatatgcctgtccaggatcctggcaaccctcgtcagggccctgctggcaatgctatggatccttaagcttgactggtaggctcagactgtgtaagtgtgtattactgttaaaggttattatgatgggaagtggnnnnnnnnnnnnnnnnnnnnnnnnnnnnngcaggggttggggtgcctctggacaaggggaggaagagaaaagcagctaagtttaaccctaggcatccatcccnnnnnnnnnnnnnnnnnnnnnnnnnnnnnnnnnnnnnnnnnnnnctatct

SEQ ID NO: 30371 - DNA, 512 bp, Homo sapiens
  misc_feature (1)...(512): n = a,t,c or g
ttgaaancntttttangancnnnnnnnnnnnnnnnnnnnnnnnnnnnnnnnnnnnnnnnnnnnnnnnnnnnnggcacgagccattggaaatttatacagtgaggaacatgttctgtatctatgctgttcaatacaatagccactacccatgtgtaattcttttttttaattcagtttttttcctgacaatagtttgttgtttgaccagtgaacatacattttaagtgcatattcctgtgcttagaatttcatgagacannnnnnnnnnnnnnnnnnnnnnnnnnnnnnnnnnnnnnnnnnnnnnnnnnnnnnnnnnnnnnnnnnnnnnnnnnnnnnnnnnnnnnnnnnnnnnnnnnnnnnnnnnnnnatctcaaggaaaaaaaatttnnnnnnnnnnnnnnnnnnnnnnnnnnnnnnnnnnnnnnnnnnnnnnnnnnnnnnnnnnnnnnnnnnnnnnnnnnnnnnnnnnnnnnnnnnnnnnnnnnnnnnnnnnnnnnnnnnnnnnnnnnnnn

SEQ ID NO: 30372 - DNA, 508 bp, Homo sapiens
  misc_feature (1)...(508): n = a,t,c or g
aaaccgcttntcnnnnnnnnnnnnnnnnnnnnnnnnnnnnnnnnnnnnnnnnnnnnnnnnnnnnnnnnnnggcacgagttgagagagagctgtagtagtggtctgaggtggcgattgtattatccagtagtcaggtcccacggcaaagcatgttggagaaatgatcaggctccagcaaagggcatcaggaaacaaatcaagaatgagaaggggtgagaagaataggcagatctacacttccaagctcaagtggtctccctgctgatgctggttgctgctccacatgtagcaactgtctggtaagaggtattcctggagccaagcttgtccagcagaatgtggctggcagattctcaacttggcctataattgctttcagacccggacttctttttagttcctgttgtttcagagctccaactcatgcagcatgagaagaatctgagcctcttctctttatcagagacaaggttggccaggtgcggtggctcttgcctgcaatccacac

SEQ ID NO: 30373 - DNA, 552 bp, Homo sapiens
  misc_feature (1)...(552): n = a,t,c or g
aantcccttnntttgaaacccctatgacnnnnnnnnnnnnnnnnnnnnnnnnnnnnnnnnnnnnnnnnnnnnnnnnnnnnnnnnnnggcacgaggaaatgagtgctctttctcatgatcagcaacaagtgtgttatatctcgcaatacacactgccttacagaaggtaactgtgttctaggacacaatccaccagtggtctacctggtcgtattctctttctttttttctttccctctccctacctcttaggaagcgcttaacctctacctgtagtttagacctggctcagtattgaggctaattctttacaaagcaggatatatgtaaggagcatcaggtcagtcatgctgcgtgttctcctttcagtgtatacccaatttcaggtcctaggcccctaccctgtccctgccttggagccttcctggtacccccgttactccaagactgaaattctgctttccccctaaccccggtcatttcagggaccgtgtcctcatatgatgctaggcagtgtatagaaacaaaaatatacctgacttttgttactggg

SEQ ID NO: 30374 - DNA, 496 bp, Homo sapiens
  misc_feature (1)...(496): n = a,t,c or g
nttttgaacnntntgatnnnnnnnnnnnnnnnnnnnnnnnnnnnnnnnnnnnnnnnnnnnnnnnnnnnnnnnnnnggcacgagaacacaatttagaaagctggttaaaaaaaacatgaaaattctagaattattttaataagaaccaaattatgaagctggaaactaaaggaatgttcaactctagagnnnnnnnnnnnnnnnnnnnnnnnnnnnnnnnnnnnnnnnnnnnnnnnnnnnnnnnnnnnnnnnnnnnnnnnnnnnnnnnnnnnnnnnnnnnnnnnnnnnnnnnnnnnnnnnnnnnnnnnnnnnnnnnnnnnnnnnnnnnnnnnnnnnnnnnnnnnnnnnnnnnnnnnnnnnnnnnnnnnnnnnnnnnnnnnnnnnnnnnnnnnnnnnnnnnnnnnnnnnnnnnnnnnnnnnnnnnnnnnnnnnnnnnnnnnnnnnnnnnnnnnnnnnnnnnnnnnnnnnntaagactacatctcaaaaaaaaaaaaaa

SEQ ID NO: 30375 - DNA, 544 bp, Homo sapiens
  misc_feature (1)...(544): n = a,t,c or g
ganntccttnnattgaaaccctntgacnnnnnnnnnnnnnnnnnnnnnnnnnnnnnnnnnnnnnnnnnnnnnnnnnnnnnnnnnnggcacgaggataatatttcatacatttgctaagagggctagtaaatcaagtgttactctttgcattttctatgttgtaatccactgtggtgtctcatcaaacggtatgcaaataacattccaaaatcgaaatgtgaacctaatctttgcttgtgttctgttacgttgtgatgagctctatgtatataatatttaaaataaatggagatctttatttttatatcccaaatgttagacaattacaatgtatatttcttggctgtatactttgtcattcttgtgcattgcaatttacctgttctatggaataggttttatttagtgaatattgaggtttttcaaagtcatttcagttatttgggtacctattatagtgaaaagtcacgggactgaaagtcaagaattgtggatctagtacctgcctgttagtgccttcaagtaaatggtagttccttcgttg

SEQ ID NO: 30376 - DNA, 543 bp, Homo sapiens
  misc_feature (1)...(543): n = a,t,c or g
ttnatttgaaanccctntgacnnnnnnnnnnnnnnnnnnnnnnnnnnnnnnnnnnnnnnnnnnnnnnnnnnnnnnnnnnggcacgagggacaaaattggcactaaaaaaccaatacaaaagatcaacaaaatgaaaaattcattatttgagaagataaacaacaaaccatggcaaaataaccaaggaaaaagtgaaaagatccaaataaagtcagaagtgaaaaaacgagacattatgataccacagaaacacaagggattnnnnnnnnnnnnnnnnnnnnnnnnnnnnnnnnnnnnnnnnnnnnnnnnnnnnnnnnnnnnnnnnnnnnnnnnnnnnnnnnnnnnnnnnnnnnnnnnnnnnnnnnnnnnnnnnnnnnnnnnnnnnnnnnnnnnnnnnnnnnnnnnnnnnnnnnnnnnnnnnnnnnnnnnnnnnnnnnnnnnnnnnnnnnnnnnnnnnnnnnnnnnnnnnnnnnnnnnnnnnnnnnnnnnnnnnnnnnnnnnnnnnnnnnnnnnnnnnnnnnnnnnnnnnnnnnnnnnnnnnnn

SEQ ID NO: 30377 - DNA, 526 bp, Homo sapiens
  misc_feature (1)...(526): n = a,t,c or g
atttgaaaccnttnnnnnnnnnnnnnnnnnnnnnnnnnnnnnnnnnnnnnnnnnnnnnnnnnnnnnnnnnnnnnnnggcacgaggacgagatctgctgctggtccttttatggccagggccgtaagctggcagaggtgtgctgtacctccatcgtgtatgccacggagaagaagcagaccaaggtggaattcccagaggcccgaatctatgaggagacactcaacgtcctactctatgagactccccgcgtccccgacaactccttgttggaggccacaagccgtagccgcagccaggcttcccccagtgaagatgaggagacctttgaactgcgggaccgtgtccgccgcatccacgtcaagcgctacagcacttacgatgaccggcagctcggccaccagtctacccatcgcgactgaccagaccctcagggagtcagggcacgggaggccctatctcccatcctgtggaacccgcccattggcaccccatgctgctgctgcctgggtctctgtctacacccaa

SEQ ID NO: 30378 - DNA, 544 bp, Homo sapiens
  misc_feature (1)...(544): n = a,t,c or g
gtgngccncctttganacccctttgactgcnnnnnnnnnnnnnnnnnnnnnnnnnnnnnnnnnnnnnnnnnnnnnnnnnnnnnnnggcnnnnnnnnnnnnnnnnnnnnnnnnnnnnnnnnnnnnnnnnnnnnnnnnnnnnnnnnnnnnnnnnnnnnnnnnnnnnnnnnnnnnnnnnnnnnnnnnnnnnnnnnnnnnnnnnnnnnnnnnnnnnnnnnnnnnnnnnnnnnnnnnnnnnnnnnnnnnnnnnnnnnnnnnnnnnnnnnnnnnnnnnnnnnnnnnnnnnnnnnnnnnnnnnnnnnnnnnnnnnnnnnnnnnnnnnnnnnnnnnnnnnnnnnnnnnnnnnnnnnnnnnnnnnnnnnnnnnnnnnnnnnnnnnnnnnnnnnnntgtacagtttacagagaaatactagacacaggtaagttgaaaataaatagattgaaaagcatattttaagaaaacagtaaaagattgaagtgactatattaatatcaggtaaaatagattgcaacagaaaaattttgtatcangtaatgggggattct

SEQ ID NO: 30379 - DNA, 417 bp, Homo sapiens
  misc_feature (1)...(417): n = a,t,c or g
nnnnnnnnnnnnnnnnnnnnnnnnnnnnnnnnnnnnnggcacgagtaatcatatctaccctctcctcttttcttggaggcaaaaatttggtgtgggttcctccactccccttctaaaagattgaagatgctnnnnnnnnnnnnnnnnnnnnnnnnnnnnnnnnnnnnnnnnnnnnnnnnnnnnnnnnnnnnnnnnnnnnnnnnnnnnnnnnnnnnnnnnnnnnnnnnnnnnnnnnnnnnnnnnnnnnnnnnnnnnnnnnnnnnnnnnnnnnnnnnnnnnnnnnnnnnnnnnnnnnnnnnnnnnnnnnnnnnnnnnnnnnnnnnnnnnnnnnnnnnnnnnnnnnnnnnnnnnnnnnnnnnnnnnnnnnnnnnnnnnnnnnnnnnnnnnnnnnnnnnnnnnnagggtggggaacatcgc

SEQ ID NO: 30380 - DNA, 536 bp, Homo sapiens
  misc_feature (1)...(536): n = a,t,c or g
ttgaannccctttgaaancccttgacnnnnnnnnnnnnnnnnnnnnnnnnnnnnnnnnnnnnnnnnnnnnnnnnnnnnnnnnnnggcacgaggctaacagcatcagtcactgaggccattcctgtatcacgagactgggagctgcttcccagtgctgctgcctctgctgagccacaatccaagaacctggattctgggcactgtgtcccggagcccagctcctcaggccagcgcctgtatcctgaggttttctatggcagtgctgggccttccagttctcagatctctgggggagccatggactctcaattacatccaaacagtggaggcttccgccctgggacaccctcactgcacccttacagatcacagcccctatacctacccccgggcccagcccctccctcagcactgttctctggggtagctctcaagggccagtttctggatttctccacaatgcaagctacagagctggggaagttgccggctggaggagttctctaccctccaccttccttcctctactctccggc

SEQ ID NO: 30381 - DNA, 414 bp, Homo sapiens
  misc_feature (1)...(414): n = a,t,c or g
nnnnnnnnnnnnnnnnnnnnnnnnnnnnnnnnnnnnnggcacgagaggcaggaggaggccaggagctcaagacccagccatggcaagatggtgagatctgtctcnnnnnnnnnnnnnnnnnnnnnnnnnnnnnnnnnnnnnnnnnnnnnnnnnnnnnnnnnnnnnnnnnnnnnnnnnnnnnnnnnnnnnnnnnnnnnnnnnnnnnnnnnnnnnnnnnnnnnnnnnnnnnnnnnnnnnnnnnnnnnnnnnnnnnnnnnnnnnnnnnnnnnnnnnnnnnnnnnnnnnnnnnnnnnnnnnaataccccagctcagtagccctgaaagcaagctgtccctgtcttcagtggcacacccttgcatgcaggaggctgccggaggtctgctgcatgggcactctggcccctgtgggaactg

SEQ ID NO: 30382 - DNA, 544 bp, Homo sapiens
  misc_feature (1)...(544): n = a,t,c or g
gnnntnnnnnnttnnnatttganatttgaataccgttatgacnnnnnnnnnnnnnnnnnnnnnnnnnnnnnnnnnnnnnnnnnnnnnnnnnnnnnnnnnnggcacgagaggctccagtgcagtggcacaacnnnnnnnnnnnnnnnnnnnnnnnnnnnnnnnnnnnnnnnnnnnnnnnnnngtttgttgatgaaaaagagtcaaactctggctgagcccnnnnnnnnnnnnnnnnnnnnnnnnnnnnnnnnnnnnnnnnnnnnnnnnnnnnnnnnnnnnnnnnnnnnnnnnnnnnnnnnnnnnnnnnnnnnnnnnnnnnnnnnnnnnnnnnnnnnnnnnnnnnnnnnnnnnnnnnnnnnnnnnnnnnnnnnnnnnnnnnnnnnnnnnnnnnnnnnnnnnnnnnnnnnnnnnnnnnnnnnnnnnnnnnnnnnnnnnnnnnnnnnnnnnnnnnnnnnnnnnnnnnnnnnnnnnnnnnnnnnnnnnnnnnnnnnnnncgaaaaccnaaacnaaacanggcnagcgccgggggttaacncttgaatcc

SEQ ID NO: 30383 - DNA, 457 bp, Homo sapiens
  misc_feature (1)...(457): n = a,t,c or g
anncccttnnatttgaananccnttgacnnnnnnnnnnnnnnnnnnnnnnnnnnnnnnnnnnnnnnnnnnnnnnnnnnnnnnnnnnggcacgagattgtaaccaatacttctgagggccacctgtatgtggtgtccaacgctggctgctgggagaaagatttggccctcatgcaggacaaggtcagggagcttcagaaccagggcagagatgtgggcctggaggtgttggataatgccctgctagctctgcaaggccccactgcagcccaggtactacaggccggcgtggcagatgacctgaggaaactgcccttcatgaccagtgctgtgatggaggtgtttggcgtgtctggctgccgcgtgacccgctgtggctacacaggagaggatggtgtggagatctcggtgccggtagcgggggcagttcacctggcaacagctattctgaaaaaccca

SEQ ID NO: 30384 - DNA, 447 bp, Homo sapiens
  misc_feature (1)...(447): n = a,t,c or g
tatgacttgattaccaatttaatacgactcnnnnnnnnnnnnnnnnnnnnnnnnnnnnnnnnnnggcacgagnnnnnnnnnnnnnnnnnnnnnnnnnnnnnnnnnnnnnnnnnnnnnnnnnnnnnnnnnnnnnnnnnnnnnnnnnnnnnnnnnnnnnnnnnnnnnnnnnnnnnnnnnnnnnnnnnnnnnnnnnnnnnnnnnnnnnnnnnnnnnnnnnnnnnnnnnnnnnnnnnnnnnnnnnnnnnnnnnnnnnnnnnnnnnnnnnnnnnnnnnnnnnnnnnnnnnnnnnnnnnnnnnnnnnnnnnnnnnnnnnnnnnnnnnntgccttgggattttttaatgttctctggagacgtgtttgagcttttccagtctggtggtgaaagaatatattgaaagggaaattggcaatgagaactaaattttctagataccagaatttagtgg

SEQ ID NO: 30385 - DNA, 456 bp, Homo sapiens
  misc_feature (1)...(456): n = a,t,c or g
anncttgatnacngntatgacnnnnnnnnnnnnnnnnnnnnnnnnnnnnnnnnnnnnnnnnnnnnnnnnnnnnnnnnnnggcacgaggacctgttcacggatggtgggactggggctgctttacagtttgatacgtgtagataattaagcattttgtgatgtttggacacactggagaaaaggcagtaggaattatttactgaaacatctaggagcttactgaaatatgaaaaggcaaattttatacaaattatttttcctttttcctttctttcttgtccaagttcaggttaaaatcttagaaaattaaatgaaaggtcatttacagttccaaagaagaatattaaacatttttcacttaagttgagatttttgctttaaagagcttttaatgagtttttctgttatcataattttggtccggttattcacttgagttgttgcttatactggtgc

SEQ ID NO: 30386 - DNA, 502 bp, Homo sapiens
  misc_feature (1)...(502): n = a,t,c or g
tttganaccgnttgacnnnnnnnnnnnnnnnnnnnnnnnnnnnnnnnnnnnnnnnnnnnnnnnnnnnnnnnnnnggcacgagaacatgattctgacacaggatgatacctgctacagtagaggtaagaacagaggctttgggaggctgtgaatttgtacctcagtcaggatggagagaaggcttcttggaagaggtgacatctgagatctgagcagagtttttgaagataatttagaacgggtgctgggannnnnnnnnnntgactntngcnntnacacntttnatgctctgnagtggtgcatgnnctantnttgnnttganncnctattttntngacttttgcntgcnntgnncttanttgctnatnncgntntnnctntatttttngtnntgccctttgtcatncactntnntantttntgagctngntatctatntnanttngccttnntncntnatnctnntttncantntgtcngntntcttcnntctnntnntacc

SEQ ID NO: 30387 - DNA, 430 bp, Homo sapiens
  misc_feature (1)...(430): n = a,t,c or g
nnnnnnnnnnnnnnnnnnnnnnnnnnnnnnnnnnnnnnnnnnnnnnnnnnnnnnnnnnnnnnnnnnnnnnnnggcacgagctggtgctctcccactagctgctgtatttacatacacttctgttcatcatctctgcccgtttcaggagtagctgagagcttgaataggtggcggtaagctcccaccaccaccccatgcccagtgcagctacccgcctgaatgaaggcagctcctgggacatgtgaggtgtgaggagtggggggaagatccagggaagtcagctgctttgtatttgggtttgtgggatgtaatggccttggcaggaatggtggggcctgaactggtatcctgcagagaaatgcttctatatccatctatcacctccttgccctctgtcttcccaatgctaagcccatctggtcttccttgg

SEQ ID NO: 30388 - DNA, 440 bp, Homo sapiens
  misc_feature (1)...(440): n = a,t,c or g
ttggnntcnattgnanacctntatgacnnnnnnnnnnnnnnnnnnnnnnnnnnnnnnnnnnnnnnnnnnnnnnnnnnnnnnnnnnggcacgagagcaaatgatattttaatttccaagcgtaaatgtaacttatggnnnnnnnnnnnnnnnnnnnnnnnnnnnnnnnnnnnnnnnnnnnnnnnnnnnnnnnnnnnnnnnnnnnnnnnnnnnnnnnnnnnnnnnnnnnnnnnnnnnnnnnnnnnnnnnnnnnnnnnnnnnnnnnnnnnnnnnnnnnnnnnnnnnnnnnnnnnnnnnnnnnnnnnnnnnnnnnnnnnnnnnnnnnnnnnnnnnnnnnnnnnnnnnnnnnnnnnnnnnnnnnnnnnnnnnnnnnnnnnnnnnnnnnnnnnnnnnnnnnnnnnnnnnnnnnnnnnnnnnnnnnnnnnnnnnnnnnnnnnnnntt

SEQ ID NO: 30389 - DNA, 422 bp, Homo sapiens
  misc_feature (1)...(422): n = a,t,c or g
annacnnnnnnnnnnnnnnnnnnnnnnnnnnnnnnnnnnnnnnnnnnnnnnnnnnnnnnnnnnnnnnnnnnnnnggcacgagtgcctttgagctcccccacagctctgaaactccagcttgggagcagggagagtgcaatctgtgacctgtaaaggggcgctgggcaaaagggcccgagagaaggcgtcctttccattcccttcccatctcaagctgagttcagaaatgacacgaaataatttaatcaactatcagtcaaggtcnnnnnnnnnnnnnnnnnnnnnnnnnnnnnnnnnnnnnnnnnnnnnnnnnnnnnnnnnnnnnnnnnnnnnnnnnnnnnnnnnnnnnnnnnnnnnnnnnnnnnnnnnnnnnnnnnnnnnnnnnnnnnnnnnnnnnnnnnnnnnnnnnnnnnnnnnnnnnt

SEQ ID NO: 30390 - DNA, 416 bp, Homo sapiens
  misc_feature (1)...(416): n = a,t,c or g
ttgannacagcttgacnnnnnnnnnnnnnnnnnnnnnnnnnnnnnnnnnnnnnnnnnnnnnnnnnnnnnnnnnnggcacgagggcaatgtctggagacattgttggttgtggtgcggtgacataactattggcatcgagtggatggagggcaggtgtgctactaatcgccctctattgcacagggtggcccttaccacagagaactatgcagctctaaacatgcgcagccccaaggctgagaattgttgatctaggggaagatgtgatttcattcttcatgcttgtaaattattatttaagctgtgaataccctctcttttcccactgaagttgtggttgtaagattctcagagttgagcagactcggcaacattacagaaaaaaaatcaagatgtaaaaaggatttagacgtcct

SEQ ID NO: 30391 - DNA, 417 bp, Homo sapiens
  misc_feature (1)...(417): n = a,t,c or g
annacnnnnnnnnnnnnnnnnnnnnnnnnnnnnnnnnnnnnnnnnnnnnnnnnnnnnnnnnnnnnnnnnnnnnnggcacgagattatataaaaaaagcatggaaactgggcattttaattagcaagtacagccttgacacaaataaaggcatggctttggttatgcagtgcatttatttggttttcttgaaataagaaaaaaagatatcttctccatcaccagagttgctgagtttgacagtgtgaatgagatgacctctaaggcctctacttatagatctgcacggttgggcctgggagctgtactacctcagctggtgggtgataacttactcacagtctgtgctgtgtcctgcactgtccattatctgcaggggtggtactgctgtccccagggaagagaatgctgtccacaaa

SEQ ID NO: 30392 - DNA, 422 bp, Homo sapiens
  misc_feature (1)...(422): n = a,t,c or g
annacnnnnnnnnnnnnnnnnnnnnnnnnnnnnnnnnnnnnnnnnnnnnnnnnnnnnnnnnnnnnnnnnnnnnnggcacgagccaccatggtgctgtctcctgccgacaagaccaacgtcaaggccgcctggggtaaggtcggcgcgcacgctggcgagtatggtgcggaggccctggagaggatgttcctgtccttccccaccaccaagacctacttcccgcacttcgacctgagccacggctctgcccaggttaagggccacggcaagaaggtggccgacgcgctgaccaacgccgtggcgcacgtggacgacatgcccaacgcgctgtccgccctgagcgacctgcacgcgcacaagcttcgggtggacccggtcaacttcaagctcctaagccactgcctgctggtgaccctggccgc

SEQ ID NO: 30393 - DNA, 431 bp, Homo sapiens
  misc_feature (1)...(431): n = a,t,c or g
tnttnnntctgaaancccnttnnaccagtccnnnnnnnnnnnnnnnnnnnnnnnnnnnnnnnnnnnnnnnnnnnnnnnnnnnnnnnnnnnnnnnggcacgaggaaatatcagggatattaaccctgcttatcacatatatggcaaatatttttttccatacattattgtttcttttggctttgaagtctcaagccacgtaagaattgtgtcttttttttttttnnnnnnggnnnntnatggntnngcccccnngncngnaggncangggnccaanntnacctantngaaccctngnccnccgggntcaanncaatnnncnngcntaacccnccnangtagtggaantnncgggggggncccncngccccnagntaanttttggnattttaacnaaaancgggnttnaacnggntnacccngnngggcccaa

SEQ ID NO: 30394 - DNA, 466 bp, Homo sapiens
  misc_feature (1)...(466): n = a,t,c or g
ttggnnnntttnnnnnnnnnnnnnnnnnnnnnnnnnnnnnnnnnnnnnnnnnnnnnnnnnnnnnnnnnnnnnnnnnnnnnnnnnnggcacgaggagagagctagcaccatgcttcatacctgaccgctctttacaattcaaccctctattcctcatctttcagcctgtctcctaatggcagaaagtcttgtaaggttgcttgtatgcagagtctcattcctcatccctctgcagtcttgacttttgctccatcactcccctgaaatagccttcatgaaagacactgatgacttacaggtccgaaatctgaaaaccactttttttttagatgggnnnnnnnnnnnnnnnnnnnnnnnnnnnnnnnnnnnnnnnnnnnnnnnnnnnnnnnnnnnnnnnnnnnnnnnnnnnnnnnnnnnnnnnnnnnnnnnnnnnnnnnnnnnnnnnnnnnnnnnnnnnnnnnnnnnnn

SEQ ID NO: 30395 - DNA, 470 bp, Homo sapiens
  misc_feature (1)...(470): n = a,t,c or g
nnttnnnnnntttgnananccgttatgacnnnnnnnnnnnnnnnnnnnnnnnnnnnnnnnnnnnnnnnnnnnnnnnnnnnnnnnnnnggcacgagagttatcagaggtaactgaagtcatattattattgatgaaggatttaatctaggaaactaagaaaaaaatggcacaaacatggagttaataggggaagctggtttccagaataactaagaatcatgtagaatccctggcgttgaagatgaaatggtggagaagggaaaaccttgcccttcactgtcctcacccctactcacagtcacagagtaagaagaagagtttggcaccactggtaggagagatctgtaaggcaatggaaacaattaaataggaaaagtggtttctaggtttccaggaaaatcctgaggaaagagtgctattcttaagttctgttctaaaacaagattattaaatgttagcttgttttacat

SEQ ID NO: 30396 - DNA, 536 bp, Homo sapiens
  misc_feature (1)...(536): n = a,t,c or g
naattggnnnnnnnnnnnnnnnnnnnnnnnnnnnnnnnnnnnnnnnnnnnnnnnnnnnnnnnnnnnnnnnnnggcacgannnnnnnnnnnnnnnnnnnnnnnnnnnnnnnnnnnnnnnnnnnnnnnnnnnnnnnnnnnnnnnnnntccccccgcccctgccccaataaaaatttaaaaatgagctgagcgtgnnnnnnnnnnnnnnnnnnnnnnnnnnnnnnnnnnnnnnnnnnnnnnnnnnnnnnnnnnnnnnnnnnnnnnnnnnnnnnnnnnnnnnnnnnnnnnnnnnnnnnnnnnnnnnnnnnnnnnnnnnnnnnnnnnnnnnnnnnnnnnnnnnnnnnnnnnnnnnnnnnnnnaggcgggcgcagtagctcacgcctgtaattacagtgcnnnnnnnnnnnnnnnnnnnnnnnnnnnnnnnnnnnnnnnnnnnntcttgangtcangggttcgagaccagactggncacatggtgaaaccccgtntttattaaaacccaaaaattanccggcctggtggccggcncctttat

SEQ ID NO: 30397 - DNA, 553 bp, Homo sapiens
  misc_feature (1)...(553): n = a,t,c or g
tnnnntntccccctttnganantngnnnnnnnnnnnnnnnnnnnnnnnnnnnnnnnnnnnnnnnnnnnnnnnnnnnnnnnnnnnnnnnnnnggcacgagctggaatcctatgcgagatctacaagccatggaccgggcccatcgcattgggcagaaacgtgtggttaacgtataccgattgataaccagaggaacattggaagaaaaaataatggggttgcagaaattcaagatgaacatagcgaatactgttattagccaagagaattctagtttgcagagcatggggactgatcagcttcttgatctgtttactcttgataaggatggcaaagcagaaaaagctgacacctctacttctgggaaagcaagtatgaaatcaattcttgaaaacctgagtgatctttgggatcaagagcagtatgattcagagtacagcctggaaaattttatgcattctctcaagtaactatcaaatattgtnaatgcaattgctgctagtccagntacatttttgcngaattcccaantttttaaanttanggggaccttt

SEQ ID NO: 30398 - DNA, 563 bp, Homo sapiens
  misc_feature (1)...(563): n = a,t,c or g
gnnnnnnnngnnnnttgnnttntnnnctntnggatactcgtatgacnnnnnnnnnnnnnnnnnnnnnnnnnnnnnnnnnnnnnnnnnnnnnnnnnnnnnnnnnnggcacgaggagggaagacgggggatggaaggaggggtcagagaaagggagggagctgcagctcaccctgttctccccactccccagttcataggcacagcctcccttatcgtgtgtgtgctggccattgttgacccctacaacaaccccgtcccccgaggcctggaggccttcaccgtgggcctggtggtcctggtcattggcacctccatgggcttcaactccggctatgccgtcaaccctgcccgggactttggcccccgcctttttacagcccttgcgggctggggctctgcagtcttcacgtgagtacagcccccacccagctcaccccagcctgcctctcctctgcctgcccccatgtncctgactatgantgctgtccccccaggaccggccacattggggngggtngccatcgggncccaattctgggnncatttgggggggctttcggacc

SEQ ID NO: 30399 - DNA, 568 bp, Homo sapiens
  misc_feature (1)...(568): n = a,t,c or g
gnnnnnnnnggnnnnttgnnnttnnnnctcttgatacncttatgacnnnnnnnnnnnnnnnnnnnnnnnnnnnnnnnnnnnnnnnnnnnnnnnnnnnnnnnnnnggcacgagaactggcagagggaacagcaagtgccagtgctctgagccatgagcctgctggcacattttacaaaccataaggaagtcaatatggctggattgcagaccagcagaagttcagtgataggacatgagctcacagaggctgtaggagccagaccacacagaggtgtgcagtctgtgatnnnnnnnnaggatcttggtcttggtaagatgggaaagtcattctgaaaaggaagaagattatcccgcttacatcttaacagaatcagtctggcttgaaacngancttttagaantgaaaggccnagttnaaaagactccccgaaagccagtgcttgattggggctccanatggcaatggctttggtgaaaangntagtnaaaaaagnggggagaatttttttaaaaggntnnnaaaacttgcccctttggnttttttaccttaaaaantttanaaaaaat

SEQ ID NO: 30400 - DNA, 551 bp, Homo sapiens
  misc_feature (1)...(551): n = a,t,c or g
ggnntnnnnnttnnnnnttgnctnnganaccgttatgacnnnnnnnnnnnnnnnnnnnnnnnnnnnnnnnnnnnnnnnnnnnnnnnnnnnnnnnnnnggcacgagagtatattaggataagccacatttgtaacagctaacggagaaaacataactgaatgtcagtgttacacagtgaactttgtagagcagtgattcccaattctgagatgttgtaagaggaatgtcagaattcctaaaacactcatcctccaacctttcaaattcagtgctgtggtgagccattgttactgataagggtatatcccacttgtgatttctttgttttgggtcaagannnnnnnttgtagaagccagtgtaaaatggcatgcatataattaatttcctcatcttttcctcataaaatcagaggccttttatcgatggtggtttgaaagtctggggtattcagatttggcagcagaaagngggtttttttgnggggggngataactaagnggattgctaattctgattgnggaancnaanggttggncccaacccangcctt

SEQ ID NO: 30401 - DNA, 546 bp, Homo sapiens
  misc_feature (1)...(546): n = a,t,c or g
tncnccttngactncnaatacccttatgacnnnnnnnnnnnnnnnnnnnnnnnnnnnnnnnnnnnnnnnnnnnnnnnnnnnnnnnnnnggcacnnnnnnnnnnnnnnnnnnnnnnnnnnnnnnnnnnnnnncttcttgacagttactttgaagcctaccagcacacgttggaccctgaggagaggtttaccttagcacaagtgatgacggacatcgtgcaccgacgcccgaggtttgatctcagtcacccctatttcattaaggcctaccacgaggaatgcacctgnnnnnnnctncacctgcagttagtgaggggcatcctcaaccagcagatanaacgtnagcgggagtatgtccanaggctttggcgagaggatcatnnggacaatagcantacatttggacttccccttaatataggttgcaaacaacttatttccatcaacaatagctgcccagcttcanaaaatgtttatctgctggagttccacccttccntnacctgnnanantttttcccnangccttaaannnnttttncaaaaag

SEQ ID NO: 30402 - DNA, 546 bp, Homo sapiens
  misc_feature (1)...(546): n = a,t,c or g
ggtgttnnntacnnnagctnagtgnnctcttacgaatttcnnnnnnnnnnnnnnnnnnnnnnnnnnnnnnnnnnnnnnnnnnnggcacgagctggaagagaaagatgccatgttcctggtacaagtaaaaatgaaagccacctcagtggatctgagaaacacatactgccaaagaaagtagagaaagggcagaattggaatggatttagttactgtgggtctgtctagacattatttgagggctagcgctggcttcactcacctctatgccatgcgtggctagtgccagtggctggcacatagcagcatatgagctgaatgagtataaagcagtctaatttttaggcagtaaaagttttgtttcattttatttttacctgggtagcacagacattgaaatgtgttaatcaacaaatgcagagtatgagattaaaaactaatgacattttcctgttggcatcaaagacgaataatttgagacaagtcatgggaactagatggcaagtcttaaacatgataaaataaagcccttcattgctctgtcaa

SEQ ID NO: 30403 - DNA, 554 bp, Homo sapiens
  misc_feature (1)...(554): n = a,t,c or g
agnnnttgnncantnatcaacgnnatacnctnnnnnnnnnnnnnnnnnnnnnnnnnnnnnnnnnnnnnnnnnnnnnnnnnnnnnnnnnnnnnnnnnggcacgaggactcccccagcagggagggaggagaccagttccaatctcccagggaaggagcacccgggaaggccaccaagctcgccaacggatgccactattgggcagtatgtgaagaagatccaggagctcctgcaggagcagtggaactgcctggagcatgggtacccggagctggccagcgccatcaagcagccagcctccaagctcagcagcatccagagccagctgctgagctccctcaacctgctgctgtcggcctactcggcccaggctcacccacccaaggagccgccggcctcctcctcctccccgccagtggagatctccccatcgaccagccttaaatccataatgaaaaagaaagactatggcttccgtgcaggaggtaatgggaccaaaaagaaccttcagtttgttggggttaacggtgggtatgagaccacctcaagtgagga

SEQ ID NO: 30404 - DNA, 531 bp, Homo sapiens
  misc_feature (1)...(531): n = a,t,c or g
gtgnngnatttgaacctttgacnnnnnnnnnnnnnnnnnnnnnnnnnnnnnnnnnnnnnnnnnnnnnnnnnnnnnnnnnnggcacgagctcatgatacttgaccaaaattaaagtgaaattcctgccgggcacagtggctcatgcctgcaannnnnnnnnnnnnnnnnnnnnnnnnnnnnnnnnnnnnnnnnnnnnnnnnnnnnnnntgccttaaatttttaataatcattgtgcaaattatttagcactccagtgttttgattttttctcctctgctgggtaggaataacaataatactgttattcaccatggtggtgtgggaagtttcaaagagcacatgtctataaagtgcttagtgcaaggcttggcatgcagttaacacaaaataaatgcgagctgctgtcattaacaatactgactacacggcactgtgatgcttatgtaaatgccaggctgtgtgtctgtaacctgaggtatttgtgtaaatattttcctaaaataaatctaactaaggtggtcntctcacttg

SEQ ID NO: 30405 - DNA, 312 bp, Homo sapiens
  misc_feature (1)...(312): n = a,t,c or g
tttgaantcccatnnnnnnnnnnnnnnnnnnnnnnnnnnnnnnnnnnnnnnnnnnnnnnnnnnnnnnnnnnnnnnnnnnnnnggcacgaggtagcagcaggtggcaggctgttaaaagacaggctgcctgaggagcctggagcaggtggaaacaggtggaagaaaccggccacagccctgctttaccgggctcacctctagggcattccagcacgaggctgatgcaggagaatggccagcaccaaaggacatttaaaagagtttttgggtttttttgtttgtttgttgttggtgtttgtttttttttttttt

SEQ ID NO: 30406 - DNA, 541 bp, Homo sapiens
  misc_feature (1)...(541): n = a,t,c or g
tnnnnnnnnccccctttggaataccgtnnnnnnnnnnnnnnnnnnnnnnnnnnnnnnnnnnnnnnnnnnnnnnnnnnnnnnnnnnnnnnnnnggcacgagatgagagttcaccagattttggaaatattttctattctgtaacctaccttttcatttacataacagtgataaaagctttaagtttgatcacatccaattaatcacattttttaatagttatgnnnnnnnnnnnnnnnnnnnnnnnnnnnnnnnnnnnnnnnnnnnnnnnnnnnnnnnnnnnnnnnnnnnnnnnnnnnnnnnnnnnnnnnnnnnnnnnnnnnnnnnnnnnnnnnnnnnnnnnnnnnnnnnnnnnnnnnnnnnnnnnnnnnnnnnnnnnnnnnnnnnnnnnnnnnnnnnnnnnnnnnnnnnnnnnnnnnnnnnnnnnnnnnnnnnnnnnnnnnnnnnnnnnnnnnnnnnnnnnnnnnnnnnnnnnnnnnnnnnnnnnnnnnnnnnnnnnnnnnnnnnnnnnnnnnnnnnnnnnnnnnnnntatggtctaagaa

SEQ ID NO: 30407 - DNA, 535 bp, Homo sapiens
  misc_feature (1)...(535): n = a,t,c or g
tnnnnnnnnttggntttgnataccgnnnnnnnnnnnnnnnnnnnnnnnnnnnnnnnnnnnnnnnnnnnnnnnnnnnnnnnnnnnnnnnnnnggcacgaggaatattccaaacatttcatcctttcttaataatgaacagtctttatagatgtgaattattatactttacatactaagcatagttaagcttactaagtttattaagtttagtaatagtgactactctcttcagcatttattctgttataccttaaatgtttattgagctcttactctgctatatgcttagtccagtgctttgcattcattatttacttttatcctagctttctgttgaagatccctataagctaaaaaacttcctcaaggacatagggctagtaaatgacagagctggtattggaacccatgtctgtttgatgccaaatcccactcttaaacactgtacattactatattcttgctctgtcacaaagaaggttactactaatcctcagaactgtcaaaaggtattatttttattttaacaaatgca

SEQ ID NO: 30408 - DNA, 542 bp, Homo sapiens
  misc_feature (1)...(542): n = a,t,c or g
ttnnnnttctatccanntnattcncttacnacatgattacgaatttaatacnnnnnnnnnnnnnnnnnnnnnnnnnnnnnnnnnnnnnnnnnggcacgagnnnnnnnnnnnnnnnnnnnnnnnnnnnnnnnnnnnnnnnnnnnnnnnggaggaaagggcagtcagacttcacaaaagggctggaacacaggtgttttccagtggggtaaattcctgtcaggggtagtgtttcccaccgtgggaagctatcaacccccaggttttccctcccactcccagtcccacccccgccccagcccccactgagccatctggcttgtgaaataggaaccttttcagctccacttccagcttttgcagagttaacagtaatgcaagctaagggggttgccaaggtgacttggggggtctgcggtgaacanagagtgganccgaaggctcctgttcccaaggngtccttgtcaccacacacgcaccctttnactccataaaanagaggagggcattctgccacatgctnanancacggggaaggacaaaaa

SEQ ID NO: 30409 - DNA, 526 bp, Homo sapiens
  misc_feature (1)...(526): n = a,t,c or g
ttgatttggataccgtnnnnnnnnnnnnnnnnnnnnnnnnnnnnnnnnnnnnnnnnnnnnnnnnnnnnnnnnnnnnnnnnnggcacgagccaactttcaagaaacctccaaaacttcaaaaaagaaaatgaaactctgaaatctgatctgaataatttgatggagcttcttgaggcagaaaaagaacgcaataacaaattatcattacagtttgaagaagataaagaaaacagttctaaagaaatcttaaaagttcttgaggctgtacgtcaggagaaacagaaagagacggccaagtgtgagcagcagatggcaaaagtacagaaactagaagagagcttgcttgctactgaaaaagtgatcagttccctggaaaagtctagagattctgataagaaagttgtagctgacctcatgaaccagatccaggagctaagaacatcggctgtgagaaaacagaaactatagacaccctgaaacaagaactgaaggacataaattgcaaatacactctgctttggtgaca

SEQ ID NO: 30410 - DNA, 553 bp, Homo sapiens
  misc_feature (1)...(553): n = a,t,c or g
gnnngnnnnnttnnnttnnncnccttttgntttgcataccgnnnnnnnnnnnnnnnnnnnnnnnnnnnnnnnnnnnnnnnnnnnnnnnnnnnnnnnnnnnnnnnnnnggcacgagtccttatctgcatctgcctttgtacagaagctccagtgtgaaataacttttttcttgttgtgtaagtaatacatgttcacagtgttctttctatttaagaaaggaaaagaaaaggctgcacaaagaagaaagcgaaaatcccctgtgtcattgctctgagttagtcctgtttagcacgttaccagtgaggcgtttcctttgaaatagaggactcaggcgcgcttgctgagcacttgctgctcatgttttaagcacggtgcagcattttccttcagcccacatcaccctgctctggggcacttgccccgtggtgcaaaggggaaggcgagctttgcagatcaggtgacttttgcagatcaggtgacctgtccacactcacagtcatgacagcctggacccaggatttgaacctgggccttttccccactgcatgtgaat

SEQ ID NO: 30411 - DNA, 523 bp, Homo sapiens
  misc_feature (1)...(523): n = a,t,c or g
tnnnnntnnnnnnntcngaatcccatnngcntttgacatnnnnnnnnnnnnnnnnnnnnnnnnnnnnnnnnnnnnnnnnnnnnnnnnnnnnnnnnnnggcacgagcagaagttgtgcttaaaacatcttgatctaataaagcttctactttttaactgacagatttgtgtttaggtgaagatcacatgcagtgtacaggcagtttacaagtctaccctgcnnnnnnnnnnnnnnnnnnnnnnnnnnnnnnnnnnnnnnnnnnnnnnnnnnnnnnnnnnnnnnnnnnnnnnnnnnnnnnnnnnnnnnnnnnnnnnnnnnnnnnnnnnnnnnnnnnnnnnnnnnnnnnnnnnnnnnnnnnnnnnnnnnnnnnnnnnnttgtgccacttgcacttcagtgtaggcaactgagcgagaccctgtctcatttgaaaaaaaaaaaaangtcntgaaagcanncncaancaaaaaactgattgttgaaacntgactaccaaatgcaattcataatctgggattaatccca

SEQ ID NO: 30412 - DNA, 517 bp, Homo sapiens
  misc_feature (1)...(517): n = a,t,c or g
atttgaaanctgataacgttatgacnnnnnnnnnnnnnnnnnnnnnnnnnnnnnnnnnnnnnnnnnnnnnnnnnnnnnnnnnnggcacgagaaattaccacaaaattacatatattacccaataaaagaaaattaagnnnnnnnnnnnnnnnnnnnnnnnnnnnnnnnnnnnnnnnnnnnnnnnnnnnnnnnnnnnnnnnnnnnnnnnnnnnnnnnnnnnnnnnnnnnnnnnnnnnnnnnnnnnnnnnnnnnnnnnnnnnnnnnnnnnnnnnnnnnnnnnnnnnnnnnnnnnnnnnnnnnnnnnnnnnnnnnnnnnnnnnnnnnnnnnnnnnnnnnnnnnnnnnnnnnnnnnnnnnnnnnnnnnnnnnnnnnnnnnnnnnnnnnnnnnnnnnnnnnnnnnnnnnnttaagaaagaangaaagaaaaaaattaancagtagcatttaaaaacaagtaaaatacttggtgnnnttnntnatnntgntgtgntnttantnattngnttgnaataattttt

SEQ ID NO: 30413 - DNA, 510 bp, Homo sapiens
  misc_feature (1)...(510): n = a,t,c or g
nnngnnngnnnnnntnnnnnnnttgnattgnanacngctnnnnnnnnnnnnnnnnnnnnnnnnnnnnnnnnnnnnnnnnnnnnnnnnnnnnnnnnnnnnnnnggcacgagccaatttcccccaatctctagccctaagcaaccactactctacaaatgcacaaatctctatatagatttatcttgggctaattttaagtatatgaagtaaaatagagaaaatcaattattttgaaatacagttctatcctcagagcccaattaaggactctgattttaaaaataatactcttagcccttcatattcaccttttctgcatccgaggattcaagcaaccatggattgaaaataaatagtannnnnnnnnnnnnnnnnnnnnnnnnnnnnnnnnnnnnnnnnnnnnnnnnnnnnnnnnnnnnnnnnnnnnnnnnnnnnnnnnnnnnnnnnnnnnnnnnnnnnnnnnnnnnnnnnnnnnnnnnnnnnnnnnnnnccgcctggtgctgcggctca

SEQ ID NO: 30414 - DNA, 507 bp, Homo sapiens
  misc_feature (1)...(507): n = a,t,c or g
gnnttnnnttnnntnntttggtttgcctaccatnnnnnnnnnnnnnnnnnnnnnnnnnnnnnnnnnnnnnnnnnnnnnnnnnnnnnnnnnnnnnnnnnnggcacgagggaagcttcttatttacaccaccaagtgacatcctaaaaatcaannnnnnnnnnnnnnnnnnnnnnnnnnnnnnnnnnnnnnnnnnnnnnnnnnnnnnnnnnnnnnnnnnnnnnnnnnnnnnnnnnnnnnnnnnnnnnnnnnnnnnnnnnnnnnnnnnnnnnnnnnnnnnnnnnnnnnnnnnnnnnnnnnnnnnnnnnnnnnnnnnnnnnnnnnnnnnnnnnnnnnnnnnnnnnnnnnnnnnnnnnnnnnnnnnnnnnnnnnnnnnnnnnnnnnnnnnnnnnnnnnnnnnnnnnnnnnnnnnnnnnnnnnnnnnnnnnnnnnnnnnnnnnnnnnnnnnnnnnnnnnnnnnnnnnnnnnnnnnnnnnnnnnnnnnnnnnnnnnnnnncgggttacgaagtc

SEQ ID NO: 30415 - DNA, 499 bp, Homo sapiens
  misc_feature (1)...(499): n = a,t,c or g
gnntnnnttnnntnnattgntctgagtaccatnnnnnnnnnnnnnnnnnnnnnnnnnnnnnnnnnnnnnnnnnnnnnnnnnnnnnnnnnnnnnnnnnnggcacgagggattcacagggctcccccccgcctctgacttctctgtccgaagtcgggacaccctcctaccacctgtagagaagcgggagtggatctgaaataaaatccaggaatctgggggttcctagacggagccagacttcggaacgggtgtcctgctactcctgctggggctcctccaggacaagggcacacaactggttccgttaagcccctctctcgctcagacgccatggagctggatctgtctccacctcatcttagcagctctccggaagacctttgcccagcccctgggacccctcctgggactccccggccccctgatacccctctgcctgaggaggtaaagaggtcccagcctttcttattccaaccaccggcaggaaacttcgagagga

SEQ ID NO: 30416 - DNA, 518 bp, Homo sapiens
  misc_feature (1)...(518): n = a,t,c or g
aanaccnttatgactgatatttnanntactnnnnnnnnnnnnnnnnnnnnnnnnnnnnnnnnnnnnnnnnnnggcacgagctccagagactgaactgggaaactcaggcatggtcatgcttgtcctttgtttcccagggagctctgtggtctcatgtcgttgtgactttgctcctgtgctccattcttggcttccgcagacacctggccttgtctgcatctttatggcttctcttccctccctggagctttatctctgaggcagccttgtctcttggtggggttcattttgcatgcatggaacttaacaggctccacaaaatctggagagaaactctggcttagttgagcccagagagtcacaaactacctgtagtctaatgggctgtgatggggaaaaaaggaacacagtcaaaattangtaccaggactgttagtagaagccaggtctcttcgaangggatgtaagtggggaaggcagngacttgcatttttatacngatggggattaatgacatc

SEQ ID NO: 30417 - DNA, 495 bp, Homo sapiens
  misc_feature (1)...(495): n = a,t,c or g
atacgactcnnnnnnnnnnnnnnnnnnnnnnnnnnnnnnnnnnggcacgaggacaaggtagggttggggtgggtgatgtttttagatcggtggctggtgtaagaacctgaataaagaatattctagtctaaatgagcttgggataaggctagtatgtctgaagggagcacagctggtggtcaagggcggtggttgttagaaacatattgggaaattccggcaagaaccagattggggtaaggtcttaacggtgcaaggagaggagtttgaannnnnnnnnnnnnnnnnnnnnnnnnnnnnnnnnnnnnnnnnnnnnnnnnnnnnnnnnnnnnnnnnnnnnnnnnnnnnnnnnnnnnnnnnnnnnnnnnnnnnnnnnnnnnnnnnnnnnnnnnnnnnnnnntacttangagccgacgcaggagaatncttgacctggnaagccanattgcccctgncttcagtcttgcgacanagganctctntttcaaaaaaaaa

SEQ ID NO: 30418 - DNA, 517 bp, Homo sapiens
  misc_feature (1)...(517): n = a,t,c or g
gnnnnnnnnnnnnnnnnnnnnnnnnnnnnnnnnnnnnnnnnnnnnnnnnnnnnnnnnnnnnnnnnnnggcacgaggaaaaaaaaagtcacaatggaaaatgttcttttttaaaaacttaaaagggatatggatttatattcnnnnnnnnnnnnnnnnnnnnnnnnnnnnnnnnnnnnnnnnnnnnnnnnnnnnnnnnnnnnnnnnnnnnnnnnnnnnnnnnnnnnnnnnnnnnnnnnnnnnnnnnnnnnnnnnnnnnnnnnnnnnnnnnnnnnnnnnnnnngcgctaccactcccannnnnnnnnnnnnnnnnnnnnnnnnnnnnnnnnnnnnnnnnnnnnnnnnnnnnnnnnnnnnnnnnnnnnnnnnnnnnnnnnnnnnnnnnnnnnnnnnnnnnnnnnnnnnnnnnnnnnnnnnnnnnnnnnnnnnnnnnnggatttattttcaaatactaacaaagctattgatacattattttcacaaacttccagctgaaatgtacatttccttcaacaat

SEQ ID NO: 30419 - DNA, 451 bp, Homo sapiens
  misc_feature (1)...(451): n = a,t,c or g
tttgananccntnnattnnnnnnnnnnnnnnnnnnnnnnnnnnnnnnnnnnnnnnnnnnnnnnnnnnnnnnnnnnnnnnnnnnnnnnnnnnggcacgagatgtaagagcaaaagaataagaatgaaaacaattatacttctaagcattcattttgacaaagattactttagaaagtaagcaaattaaagtaaaacagaataaacaatgataagtttaattagaaatgtgaccaccattcccttggtgctcagttcagacttaagtcctctatttattttgtattgtgattttctattttattcttactcatagtaataattacttgaaaatattttataaaaacattaacatatactccctgtttggtcacacaatttggtgttttatggagagaaataattttattcacaaatatttattgaacatctagtgtgtgtttatctcagttgg

SEQ ID NO: 30420 - DNA, 460 bp, Homo sapiens
  misc_feature (1)...(460): n = a,t,c or g
gtgnnnnnnnatttgaaacccttnngattnnnnnnnnnnnnnnnnnnnnnnnnnnnnnnnnnnnnnnnnnnnnnnnnnnnnnnnnnnnnnnnnnnnnnnnnnnggcacgagtatcattactgacctcactgtgggctttgaaaattgagctacatttttgctcttccttctgcatttggtattaacaattattgaatgttagagatggaagggaacccagattatctggtatatgcttttcctcatacagagaggaaactggtatcaggagtccagtgatttgcccagggtaccagagccaggactagagaccctgtcttcctcctgactcgtgccatctcctccgaatatcctggtctggtttctccagttcagtgtttcagattaaatcccctgacacagtaaaactcatgtgcactgacttctcctccgaatatcctgctttggnttctccagttca

SEQ ID NO: 30421 - DNA, 443 bp, Homo sapiens
  misc_feature (1)...(443): n = a,t,c or g
ccnnnnatttgganaccgntatgacatgattacgaatttaatacnnnnnnnnnnnnnnnnnnnnnnnnnnnnnnnnnnnnnnnnnggcacgagcagagtttgaagaaagtaaaaaaacacacaaattatgctagttgtttttgttgatggagcatcaaacatcaccatgatgaacaacttgaattcatcagggtattctactatgtctagatatttggcattataaagacattttgatgattaatggaatttaccctttattggcagctgccaaagagctagctgttgtttctttactagcacccagagtggctgagaggtgtccttttggaggcctagagcaatgtaaccctttcttaatatgtgaagtctggagaaggaagataaagcccttggttcaggggctttctttagggctgcatttagagcaaagtcagtttttt

SEQ ID NO: 30422 - DNA, 456 bp, Homo sapiens
  misc_feature (1)...(456): n = a,t,c or g
gagntgnnnnnnnttgnaaccnnnnnnnnnnnnnnnnnnnnnnnnnnnnnnnnnnnnnnnnnnnnnnnnnnnnnnnnnnnnnnnnnnggcacgagcatctccaattgcttgaaactacaggcgtgggctaccacactcagctactttttaagttgccatattttttccactcaggattgttctttttttaaaaaaaaatcttgtatcaattctgtgatacttatagggcaagaatatcatctgatttttgtagataagataactaaggtacagtagtcttcccttatgcatgggagatacattccaagaccctggtcaatgcctgaaaccatgggtagcactgaaccctatgtatactgtacatacatacctatcatacatacatacttacnnnnnnnnnnnnnnnnnnnnnnnnnnnnnnnnnnnnnnnnnnnnnnnnnnnnnnnnnnnnnnnnn

SEQ ID NO: 30423 - DNA, 446 bp, Homo sapiens
  misc_feature (1)...(446): n = a,t,c or g
anccntnngattnnnnnnnnnnnnnnnnnnnnnnnnnnnnnnnnnnnnnnnnnnnnnnnnnnnnnnnnnnnnnnnnnnnnnnnnnnggcacgagnnnnnnnnnnnnnnnnnnnnnnnnnnnnnnnnnnnnnnnnnnnnnnnnnnnnnnnnnnnnnnnngctatacaattctactttcaccctttgttcccaggtcttgttactcccgaactaagcacatggtgatggctttgagcagagctgattattggagttgctcaaatcatccccactccattgtcccttctctgtggatctgaggtctgggctgggactcagcatttggaacttggtggggagtgggagacaatgggggagagcattgtagcttgaagcatttgcagtgcctgagtatgaaattggcctgagcataaatgtgccatgagggaccctgcaactgaaggtgga

SEQ ID NO: 30424 - DNA, 505 bp, Homo sapiens
  misc_feature (1)...(505): n = a,t,c or g
nnnnnnnnnnnnnnnnnnnnnnnnnnnnnnnnnnnnnnnnnnnnnnggcacgannnnnnnnnnnnnnnnnnnnnnnnnnnnnnnnnnnnnnnnnnnnnnnnnnnnnnnnnnnnnnnnnnnnnnnnnnnnnnnnnnnnnnnnnnnnnnnnnnnnnnnnnnnnnnnnnnnnnnnnnnnnnnnnnnnnnnnnnnnnnnnnnncaataaatataaataataaaaaactaggcacagtaagaggttaacaataaaactaannnnnnnnnnnnnnnnnnnnnnnnnnnnnnnnnnnnnnnnnnnnnnnnnnnnnnnnnnnnnnnnnnnttacagtatcttattctgctgcactcacctatattcagaccacagaaagcaaaaccatgaattagagggcattactgtgcacgtgtagagattgaagcactttacacagaacacacttatgtaaccggcacccagaccaagtcatggaacaccaggagcacccgccgagacctggggacccat

SEQ ID NO: 30425 - DNA, 417 bp, Homo sapiens
  misc_feature (1)...(417): n = a,t,c or g
nnnnnnnnnnnnnnnnnnnnnnnnnnnnnnnnnnnnnnnnnnnnnggcacgagcatgctacagaagtccatgcctttagagcattctagaacacaatttacattaaaatgctactaggtaacagaaggagcagcagtgtatgtggattagagtcacctcaggatttccatcgtttctcagaacacactgttttgtttgtgggtggaataaaggaggctgccatgttcagnnnnnnnanngaaagcaggaggttttctcaaagagcaggcattggtacaacntgtcatttaatagtnaagaggtgggggaaggtancctaatgggttatgccagccacttatctttaggatagtcnggatnacanatanaannctatttntcatgtcctctgcttatgcttgnntcccatacnccatc

SEQ ID NO: 30426 - DNA, 499 bp, Homo sapiens
  misc_feature (1)...(499): n = a,t,c or g
tacnnnnnnnnnnnnnnnnnnnnnnnnnnnnnnnnnnnnnnnnnnnnnnnnnnnnnnnnnnnnnnnnnnnnnggcacgagcggcacgagaattgatggactcttgtgagatgcaacaatgaaaggattttaaaaaagaaattaaataggaagatactttgaagtctatattagctcaatgattatatctgaaaacacaaaactgagaacattaaaggagacattaacacactataaataaaacattaacactatagataaaatatcattaagggaatatatttttgcctttagatctgtgcagttttgagttgtgatcaaaactatcatatgacacttctgagttaatttttgtatatggtgaggggtgtggatcacctatataagtcaaagtttattttgnatatggaaatacnatcattccagtaccaactgttgaaagggtattgntttgctactgaattgcctgtgtagctntgttatagntggcnatagatggc

SEQ ID NO: 30427 - DNA, 452 bp, Homo sapiens
  misc_feature (1)...(452): n = a,t,c or g
nnacccttgacttgattacgaatttaatacgactcnnnnnnnnnnnnnnnnnnnnnnnnnnnnnnnnnnggcacgagtgggaacataagagagacaggaggttgggggcaagagagggacatcaatttcggcctgctgactgaggagaggagggggttttagtcaaaaagaattgccattcaagaaccacagatattcagtatggcgcgggtgtgatgagggagcctgctagagctgttcccgtgctgagttctgaaaggtcaggaattcatcctggggccagaaatggccaataggtaacaccggtgccatcacttaccctgtgacagctacctcagactgtactaatctatcagtaatttgtcctcttgagttggtctccacatttttctcaacagcgtgcttactgtcctgtaagttaaaacacatttgtcattgtggatgtagggaat

SEQ ID NO: 30428 - DNA, 456 bp, Homo sapiens
  misc_feature (1)...(456): n = a,t,c or g
ttgaacccttgatnnnnnnnnnnnnnnnnnnnnnnnnnnnnnnnnnnnnnnnnnnnnnnnnnnnnnnnnnnggcacgaggtacccccttatagtgccgaagggtagaggctgccccaggtcacacgtccgggtctgctggccttggaggccaagctcttctcccatcatccctggggggccctggggaggcgggcctggccacgtagatcctgagcagcagtgccctccaggatcctgaagcagtacagccaccccaacatcgtgcgtctcattggtgtctgcacccagaagcagcccatctacatcgtcatggagcttgtgcagggtgagcgcggggcgctgagctccaggtagggcgcgcagcctggtcaggtggcagccttacctcaggaggctcagcaggggtcctccccacctgcagggggcgacttactgaccttcctnnnnnnnnnnnn

SEQ ID NO: 30429 - DNA, 452 bp, Homo sapiens
  misc_feature (1)...(452): n = a,t,c or g
anaccnnnnnnnnnnnnnnnnnnnnnnnnnnnnnnnnnnnnnnnnnnnnnnnnnnnnnnnnnnnnnnnnnnggcacgannnnnnnnnnnnnnnnnnnnnnnnnnnnnnnnnnnnnnnnnnnnnnnnnnnnnnnnnnnnnnnnnnnnnnnnnnnnnnnnnnnnnnnnnnnnnnnnnnnnnnnnnnnnnnnnnnnnnnnnnnnnnnnnnnnnnnnnnnnnnnnnnnnnnnnnnnnnnnnnnnnnnnnnnnnnnnnnnnnnnnnnnnnnnnnnnnnnnnnnnnnnnnnggaatctgtatttttaacaagtttcctggaggacgaattcagcatagaaattgctgatctagttccacaccctacaccatgcagccaccctttacagcctccctagtaggtgattatctacttctgctcaaatacctctggtgacagggagctcatcccctcccagg

SEQ ID NO: 30430 - DNA, 524 bp, Homo sapiens
  misc_feature (1)...(524): n = a,t,c or g
tttgannacccttnnnnnntttgganacccnnnnnnnnnnnnnnnnnnnnnnnnnnnnnnnnnnnnnnnnnnnnnnnnnnnnnnnnnnnnnnnnnnnggcacgagagtaagtgttatgtcatgtcttggctggagccaggtaaaggaaaaatgaaccatcgtctctggacaggggctctgaaccctggccaaacgttagagtcacctgggagctttcaggaacacagcactgcccccgtcccaccccagacaagttagtctgtggggtgagaccaggatgtgccgggtgattctaacgtgcagccagggttgagaatcactgaggcaaactgcccttgtcacatttccatgttggttgtcagagtttctaatccactgtgttgaggagggtgttactgggagctcagatgccttctgagtctagtgtgtctgaagagctgtgagtggtgggcagcctgtgggggacctgagagggcagctgctctaagattcaaacctgtgtaatggcccacttggcacttaag

SEQ ID NO: 30431 - DNA, 515 bp, Homo sapiens
  misc_feature (1)...(515): n = a,t,c or g
tttganancngnttgacnnnnnnnnnnnnnnnnnnnnnnnnnnnnnnnnnnnnnnnnnnnnnnnnnnnnnnnnnnggcacgaggagactgcatagggctcggnnnnnnnnnnnnnnnnnnnnnnnnnnnnnnnnnnnnnnnnnnnnnnnnnnnnnnnnnnnnnnnnnnnnnnnnnnnnnnnnnnnnnnnnnnnnnnnnnnnnnnnnnnnnnnnnnnnnnnnnnnnnnnnnnnnnnnnnnnnnnnnnnnnnnnnnnnnnnnnnnnnnnnnnnnnnnnnnnnnnnnnnnnnnnnnnnnnnnnnnnnnnnnnnnnnnnnnnnnnnnnnnnnnnnnnnnnnnnnnnnnnnnnnnnnnnnnnnnnnnnnnnnnnnnnnnnnnnnnnnnnnnnnnnnnnnnnnnnnnnnnntaagtttctcaaaaccatcactactgtagtnccanctacctgggaagctnaagcaggangattgtgtgagaaccatnaattannggacnccttnttnncagntnnnaacc

SEQ ID NO: 30432 - DNA, 489 bp, Homo sapiens
  misc_feature (1)...(489): n = a,t,c or g
anaccgnttgactnnnnnnnnnnnnnnnnnnnnnnnnnnnnnnnnnnnnnnnnnnnnnnnnnnnnnnnnnggcacgagctcattttgaggaccccaggttcaaaagtaaaagcagtggccctgctttggggtccaagaataggagtgatgggtgaagggacctaagctggccaatagccctctgccccagacatgggatgtggatccttgaggtttctggtgaaatctgcacatctgtgtttttatatctgttccctaccctgtaatccctaccacgtgcacttgttctgtggttttggtctcttgtttaattgcacacaagtaatactactgggtaaccagaatcaggtgtgaatgtgttgagattttttactgttttgcatgataggaaaattgagaaagaatacgtataaaagatagagaggcataacatcaatgcagagttggaagttggctcccaagggctgacatggtgtgaatgtgngggtg

SEQ ID NO: 30433 - DNA, 525 bp, Homo sapiens
  misc_feature (1)...(525): n = a,t,c or g
gnnnnnnntttgantncccttnnnnnnatttgaanaccntnnnnnnnnnnnnnnnnnnnnnnnnnnnnnnnnnnnnnnnnnnnnnnnnnnnnnnnnnnnnnnnnnggcacgaggagaaagcattaccaggcctccaggttacttagcctagctctccaatttgtttcctctgatcgtactgcatactgtgtgctcagggccttagcagactctctgcagggttccaaaaacattgagggaagagaggtacaacttcctgaggtacagtacactgtccacatttaattagctggctcattgtggaaacttcactttctcgtcaacaactaaaagttaagtatgtgataaatgatatagtggttgatgactataaatgcagggaaggggagctgagtatcgtccagtggataaagtgaggtcgggtaaggctcataccgtgagcagcgtgtgctggtggaggcgagaaaggtggtggggctttagttgtggacacctttgaaagtgtcacaggagtttggactgggg

SEQ ID NO: 30434 - DNA, 543 bp, Homo sapiens
  misc_feature (1)...(543): n = a,t,c or g
ggtgnntnnnaattgaaaccttngactnnnnnnnnnnnnnnnnnnnnnnnnnnnnnnnnnnnnnnnnnnnnnnnnnnnnnnnnnggcacgagcttcgnnnnnnnnnnnnnnnnnnnnnnnnnnnnnnnnnnnnnnnnnnnnnnnnnnnnnnnnnnnnnnnnnnnnnaaatagcgagatnnnnnnnnnnnnnnnnnnnnnnnnnnnnnnnnnnnnnnnnnnnnnnnnnnnnnnnnnnnnnnnnnnnnnnnnnnnnnnnnnnnnnnnnnnnnnnnnnnnnnnnnnnnnnnnntggttaacatgcagtgttatgcaatgctcgatggagtcaagaatcaaatattttttcagtacctactatgtaccaggctctgttgagggcactggacaagacagaggaggtgacattgggctgtgacctgaagaagtcagccatacagagggctggagaaagggcattccacatggagggcacagtgagcacaaaagctcagaagtgggaaggaactggaagatttanggggaccaaaaangangatggagga

SEQ ID NO: 30435 - DNA, 555 bp, Homo sapiens
  misc_feature (1)...(555): n = a,t,c or g
gntngnnnntgnnnttggaaacatntgnaaacctnnnnnnnnnnnnnnnnnnnnnnnnnnnnnnnnnnnnnnnnnnnnnnnnnnnnnnnnnnnnnnnnnggcacgagtttttacagatttacaaaatgtgtatattctgtcatgaaaactccacaccaacattatacacttggaaaaaaatacaaacaggatatattacaaatttatgcagcaataacttagttcacaccatgcaataaaaagtacattaatcaagatacacaagcttttgtaggttctaaactgaaggacttttttcttttttttctgcagaatccttaaaacctgtggcacttaaaatttgttagcctttctaatgagaggtaaattatacacaacaatgatgaaaaagattaacagaccagttgnctattatgaatcattccagctttgttcaacaatggccgaaactcttttctcatattctcgtttgttttcctgataaagctgtgctgcctggctattggctggactgttanggattcggtcatccagcagagactgaattgatggtaa

SEQ ID NO: 30436 - DNA, 517 bp, Homo sapiens
  misc_feature (1)...(517): n = a,t,c or g
gagnnnnttntttganaccatttgaatacccntnnnnnnnnnnnnnnnnnnnnnnnnnnnnnnnnnnnnnnnnnnnnnnnnnnnnnnnnnnnnnnnggcacgagcaaatgtttaaaataagtataaatatgccgtatgtgatctattaatgtccagtttgacacttcgttctccagtgcccagcattggaataccacccattccaactagtaataagattcagttgatatttgttgaataaattttcatgcctacatacaatttaacacttagaaacacaacgtccccctccaaactttttctaaaaagttcttctaaaggaagagtttgaacacaaacccgaggtctcttaccttgagaatgtgggaacgttctttacatggctttgtaaaaaatttagatataattcacataccattgaaattcactcttataaagtatacaatctatggctttgtgtgtgttcacaaaactgtgcaatcatcaccattacctaattccagaatatttttatcac

SEQ ID NO: 30437 - DNA, 515 bp, Homo sapiens
  misc_feature (1)...(515): n = a,t,c or g
gtgtgaatnattganacatntgaaaccntttgactgattacgaatttaatacgactcnnnnnnnnnnnnnnnnnnnnnnnnnnnnnnnnnnggcacgaggtgtatatatacatacatatgatggaatactcaccaataaaaaggaatttctgattcatgcaacatacatgaatctcaaaagcattttgctgagtgaaagtagttcagacataaaagtctacactctttatgattctatttatgtgaaattctagagaaggcaaaactatgtagtaatagcagatgagtgttggtggactgtatgggggagtggtgatattggtagtgaattaactgcagagaagcccaagagaagtttttggagtgataaaaagttatttatcataagttacgttagttccaaaactgtatgtatgtacttgtcagaactcaaatggattgnacatttaaattgggcgaattttgncatttgtaaanttataccttaaaantggtanngatgncctaagnatctt

SEQ ID NO: 30438 - DNA, 506 bp, Homo sapiens
  misc_feature (1)...(506): n = a,t,c or g
gtgnnnattacttganancattgaanaccnntnnnnnnnnnnnnnnnnnnnnnnnnnnnnnnnnnnnnnnnnnnnnnnnnnnnnnnnnnnnnnnnggcacgagcttgttccccagaagtagagggctctgggtgcccatttcttgggggctttccagtcttatgctgtgggtgtcagctagctctttaataggtgccctcagggcaccacagggctgactgcacaaagctggacccatccttcggtctgaccttagcatggggctagattaatgaagctgggctgaggccaacttatggcagagggcggcgcctgggttccccaggcacctgttggcacgtgacaggttggcacctgtcctattcctgaaacagcctctctcaccaagttcccttgcctaagaaggccactccctcccaccccactgaagtgggggatagtcgntgtcctagcatgcctcanggcctctggtggctctggcccagacagtatttgcagttcttgtg

SEQ ID NO: 30439 - DNA, 480 bp, Homo sapiens
  misc_feature (1)...(480): n = a,t,c or g
ntttggnnannnnnnnnnnnnnnnnnnnnnnnnnnnnnnnnnnnnnnnnnnnnnnnnnnnnnnnnnnnnnnnnnnnnnnggcacgagggcccttcagtcaagaatggggggcactgcagagccaccatctggctccagctccacactgagttgtgctgcacagggtactctcatcaggtcgcttttctcttcaaggatctgatgcttgcagctgggtgcagtgacttatacctataatcccagcactaagctcaggagttcaagactggcctgggcaacannnnnnnnnnnnnnnnnnnnnnnnnnnnnnnnnnnnnnnnnnnnnnnnnnnnnnnnnnnnnnnnnnnnnnnnnnnnnnnnnnnnnnnnnnnnnnnnnnnnnnnnnnnnnnnnnnnnnnnnnnnnnnnnnnnnnnnnnnnnnnnnnnnnnnnnnnnnnnnnnnnnncccacaacaaccatctcaattaaaaaaaaaaaaaa

SEQ ID NO: 30440 - DNA, 481 bp, Homo sapiens
  misc_feature (1)...(481): n = a,t,c or g
nnnnnnnnnnnnnnnnnnnnnnnnnnnnnnnnnnnnnnnnnnnnnnnnnnnnnnnnnnnnnnnnnnnnggcacgagcacctttgattcttcagcacttaatagtctgcctggcactaagtgctcaataaattctgaactcaaatcactaacagcaaaagaaaaattaatgaccagctatttaagacagatatataggatgaaatttctcattacattatttatgcattccccttaattgtgtgcctaacacgtttaactgccttannnnnnnnnnnnnnnnnnnnnnnnnnnnnnnnnnnnnnnnnnnnnnnnnnnnnnnnnnnnnnnnnnnnnnnnnnnnnnnnnnnnnnnnnnnnnnnnnnnnnnnnnnnnnnnnnnnnnnnnnnnnnnnnnnnnnnnnnnnnnnnnnnnnnnnnnnnnnnnnnnnnnnnnnnnnnnnnnnnnnnnnnnnnnnnnnnnnnnnntccangctggncttga

SEQ ID NO: 30441 - DNA, 483 bp, Homo sapiens
  misc_feature (1)...(483): n = a,t,c or g
ccnnacnnnnnnnnnnnnnnnnnnnnnnnnnnnnnnnnnnnnnnnnnnnnnnnnnnnnnnnnnnnnnnnnnnnnnggcacgaggcatgggtgcttcctgggactacatgtgggcaagtggggagcaagccagtgtattctcttccagggactgccataaaacattatctcaaatggaagggtttataccaacacatattaattttttcacagctctggaggtcgaaagtctgaaatctggttgttggcaggattgcttcctttggaagttctgagagacaaactgttccatgcctccctcctagctctcagcaactccaacgcccctcggcattttctgacttgtgggtgtgcaattccaatcctgcctccatcatcacgtggccttctttcctctgcctcagcatctttgttttctcttcttataaggacacctattattggattagaaaccactctaatctagtatgatttcatcttaaac

SEQ ID NO: 30442 - DNA, 480 bp, Homo sapiens
  misc_feature (1)...(480): n = a,t,c or g
ttgaatttccntnnnnnnnnnnnnnnnnnnnnnnnnnnnnnnnnnnnnnnnnnnnnnnnnnnnnnnnnnnnnnnnnnnnnnnggcacgaggcgaccctgagctggtgcagtggaagaaggagctgcgcgacgcctaccgcgaggcccagcagctggtgcagcgggtgcccaagatgaagaacaagccgcgctcgcccgtggtggagctgagcaaggtgccgctggtccagcgcggcagtgccaacggcctctgacccgcccacccgccttttataaacctctaatttattttgtcgaatttttattatttgttttcccgccaagcggaaaaggttttattttgtaattattgtgatttcccgtggccccagcctggcccagctcccccgggaggggcccgcttgcctcggctcctgctgcaccaacccagccgctgcccggcgccctctgtcctgacttcaggggctgnccgctccaatg

SEQ ID NO: 30443 - DNA, 517 bp, Homo sapiens
  misc_feature (1)...(517): n = a,t,c or g
ttgaanaccnttggaacaccattacgaatttcnnnnnnnnnnnnnnnnnnnnnnnnnnnnnnnnnnnnnnnnnnnggcacgagcggcacgagatttatagttaaacatctgagtggccacttgtctgcaagtactgtcataagtactcattaaatcctattcctgtccacaaggattgcaagggcgcaaacagatgataagaatcagtgatcactcactgattgtgtccttgcagtctctgggtggctgcagggcacaaaggatagcatgaacctcgccattggctgcagggcacaaaggatagcatgaacctcgccatcctcaactacatcattggcttaagcaggattttataagacagtctggatacctcactgccaagttccaaatagcagattttgctcactataaaattaatgtgtctgctagaaaaatggaaacacagagaaaagtatgacaggannnnnnnnnnnnnnnnnnnnnnnnnnnnnnnnncactttgggaagctgagcaagg

SEQ ID NO: 30444 - DNA, 467 bp, Homo sapiens
  misc_feature (1)...(467): n = a,t,c or g
nnnnnnnnnnnnnnnnnnnnnnnnnnnnnnnnnnnnnnggcacgagggcannnnnnnnnnnnnnnnnnnnnnnnnnnnnnnnnnnnnnnnnnnnnnnnnnnnnnnnnnnnnnnnnnnnnnnnnnnnnnnnnnnnnnnnnnnnnnnnnnnnnnnnnnnnnnnnnnnnnnnnnnnnnnnnnnnnnnnnnnnnnnnnnnnnnccctggcccttgtttcttccagtttctagaggtatcagctcctagcagcttatgaacacatatgcttgcttggccannnnnnntggtgtgtnnnnnnnnnnnnnnnnnnnnnnnnnnnnnnnnnnnnnnnnnnnnnnnnnnnnnnnnnnnnnnnnnnnnnnnnnnnnnnnnnnnnnnnnnnnnnnnnnnnnnnnnnnnnnnnnnnnnnnnnnnnnnnnnnnnnnnnnnnnnnnnnnnnnctactcaggagcttgancaggagaataag

SEQ ID NO: 30445 - DNA, 527 bp, Homo sapiens
  misc_feature (1)...(527): n = a,t,c or g
gnnngntnnnnnnnnnatntgaaacctttgacnnnnnnnnnnnnnnnnnnnnnnnnnnnnnnnnnnnnnnnnnnnnnnnnnnnnnnnnnnggcacgagagacatataattactagtgaaattaaacatcattttgagtttattggccacttgcttttcttgaagtagaattgccatctgtccaggttccattcctatcactgttcgttgcagactttcctctatcaaggaggcaaaatgtgggaagaaccttgcaaaggggaagcagattggtgaaatctgctcatccaatgaatgaagaatgatatactgtgcagaataagcagttcaacttggcttatgggattccaactcctctcttggcatgccctccagttcctatttgttttagagcagattgaatccaggctctttgtcatgagacatttgttctgtggcatctgaaaggaagctgtaagcacaaacagcttgggtagaatgaaaagatgtccccgcttggttggattgaggaaagagaaaggggaatgt

SEQ ID NO: 30446 - DNA, 524 bp, Homo sapiens
  misc_feature (1)...(524): n = a,t,c or g
ggnngntnanttaaatcnnaaaccctttngactnannnnnnnnnnnnnnnnnnnnnnnnnnnnnnnnnnnnnnnnnnnnnnnnnnnnnnnggcacgaggttgatagctgtttaagacttgttttgaaaagtgtcagtctttctcccacttcatccccccacttctccctcttggaggcttgcttttagcttattatttttgcatttacctccatgttcttaacagcattcttgtattctgatttcttgatttctcagcttcaggtatcttttgatttccattgtggcacttgaggatttagttcttttttctcatccccaggaatgtttttgtnnnnnnatttccctggtataggtatttataacattgcttagactagtattctagtattcaagtgttgacacattaagactgaaagtgcatgttaagattcacagttaagtcatgtagtaantgtgactacttttactttattacttttggttttccatgaaattaatgtttntctttattggaacttttcc

SEQ ID NO: 30447 - DNA, 533 bp, Homo sapiens
  misc_feature (1)...(533): n = a,t,c or g
ntttgnanaccgnnnnnnnnnnnnnnnnnnnnnnnnnnnnnnnnnnnnnnnnnnnnnnnnnnnnnnnnnnnnnnnnnnggcacgagcaataacaggatggcatttgagccattcattcattcattcatgcattcagcaaatcctgaccaccctctcaccatggtcaggtattgttttaagagcaggggacacagtagtgaacaaaacaaaatccctactcccacaaagcttatatccaagccaaagagacaggtaatcagcaaataaacacaaaggttgtaataggttgtcaaggagtaagggatttcaagaataaaaataaaatagggtaaagagatggagaatgccaggaatgctagtttagatagagtatttaaggatgttctttctgaggctgcaatggttgaatagagacttgaaaacagtgagtgaggcgacagctgggcaagctagtagaacattccaggtacgggactggcaaatgccaaggcataaggtagaagtttgctcaaagtgtttgaggaaaataaaaa

SEQ ID NO: 30448 - DNA, 481 bp, Homo sapiens
  misc_feature (1)...(481): n = a,t,c or g
nnnnnnnnnnnnnnnnnnnnnnnnnnnnnnnnnnnnnnnnnnnnnnnnnggcacgagaactggagttgattttgtccccacccctaccccaaccccccagggacatctgacaatgtctagagacatgtctgttgtcacaactgggatggggnnnnnnnnnnnnnnnnnnnnnnnnnnnnnnnnnnnnnnnnnnnnnnnnnnnnnnnnnnnnnnnnntccacaacaaagaatcatctagcccaaaatattaataatgttaagcttgataaactgttctgtttggatgttattcatgaccctgaatacaaactcttataaaaggcttcccaggaaaacctctataaactgcacttcacctaatatattacacaaagaacatcatttctccttcctatgaacaaatggtgatttgttcctcccaggcacattgggggaaagtctccatcttttaggctgcagcagagctaggagttgggggaag

SEQ ID NO: 30449 - DNA, 482 bp, Homo sapiens
  misc_feature (1)...(482): n = a,t,c or g
nnnnnnnnnnnnnnnnnnnnnnnnnnnnnnnnnnnnnnnnnnnnnnnnnggcacgagggaagggctttcaaaatatgacacaaaatccaaaagctataaaataaaaaattgaaagttcaactacattaaaataatgtttgtgttgnnnnnnnnnnnnnnnnnnnnnnnnnnnnnnnnnnnnnnnnnnnnnnnnnnnnnnnnnnnnnnnnnnnnnnnnnnnnnnnnnnnnnnnnnnnnnnnntataacaaggttgcannnnnnnnnnnnnnnnnnnnnnnnnnnnnnnnnnnnnnnnnnnnnnnnnnnnnnnnnnnnnnnnnnnnnnnnnnnnnnnnnnnnnnnnnnnnnnnnnnnnnnnnnnnnnnnnnnnnnnnnnnnnnnnnnnnnnnnnnnnnnnnnnnnnnnnnnnnnnnnnnnacctcgaaaaaaaaaagtttatattggataaaacaccatnngcaaagtcaaacnaatgagcaag

SEQ ID NO: 30450 - DNA, 540 bp, Homo sapiens
  misc_feature (1)...(540): n = a,t,c or g
gnnnnngtnnnnnttnnnnttttggannaannggaatacccgtnnnnnnnnnnnnnnnnnnnnnnnnnnnnnnnnnnnnnnnnnnnnnnnnnnnnnnnnnnnnnnnnnggcacgagtgaagcttccagcatctcattgtttggatgtggtgatctggtgaatttcagttctttgatattttttgagagcagaaggtcatttcctgaggaagaaactcagagcagaaggttgttccctgaggaaggaactcagataaatataagttttaagcttaaaataatttctatgtttgtattaaaaaactgtgggactgttggagttggtttcaatatgtgtgcagttctcttgtatatatacctagaagtcaaattgttagatcatgttatctttgtatttcactttttaaggaactgacatttttctctgaagtggctgcactgttctgcattcccactagaaatgtttgagggtctgcagtttctccatattcttatcaacacagcccttcacctcacttttcattatagcattctaagtggg

SEQ ID NO: 30451 - DNA, 522 bp, Homo sapiens
  misc_feature (1)...(522): n = a,t,c or g
tnnnnnttgganatttgnataccgtnnnnnnnnnnnnnnnnnnnnnnnnnnnnnnnnnnnnnnnnnnnnnnnnnnnnnnnnnnnnnnnnnggcacgaggaaagaaaagctatccttaaggttgggaacaggttgtattctcctcattagtaaaggacagcatccattaataagttggattaataagaaatattaattatacaaatgggcagttgaagcttacagaaaacctagaagagcttcaagggcaaataggccaatgaggaagagcttagacaaaaagctaaaactcctagagggaattttatactgacatatcaaacatgtctgacaactttgtcaaaagatgaaaaccagacttaagagactatgctaggtgagaatggaaagccagtaactgcaatagtttgaaatttgaatccanaagataataaggaacctctgatgggttaagagcataatgttctggtctgaanaaganagatatntnaagagagagagagagaggccangcgcggtggct

SEQ ID NO: 30452 - DNA, 535 bp, Homo sapiens
  misc_feature (1)...(535): n = a,t,c or g
nnnnnnnnnnnnntnnnnntttggannttnggannnnnnnnnnnnnnnnnnnnnnnnnnnnnnnnnnnnnnnnnnnnnnnnnnnnnnnnnnnnnnnnnnnnnnnnggcacgagcagtaatgaatggaaaccttattnnnnnnnnnnnnnnnnnnnnnnnnnnnnnnnnnnnnnnnnnnnnnnnnnnnnnnnnnnnnnnnnnnnnnnnnnnnnnnnnnnnnnnnnnnnnnnnnnnnnnnnnnnnnnnnnnnnnnnnnnnnnnnnnnnnnnnnnnnnnnnnnnnnnnnnnnnnnnnnnnnnnnnnnnnnnnnnnnnnnnnnnnnnnnnnnnnnnnnnnnnnnnnnnnnnnnnnnnnnnnnnnnnnnnnnnnnnnnnnnnnnnnnnnnnnnnnnnnnnnnnnnnnnnnnnnnnnnnnnnnnnnnnnnnnnnnnnnnnnnnnnnnnnnnnatcttactggctcaaggggcttaagcacaacttctgatctatcagtagctgactgctaacctgtactgcgtaaggatgacccttaagaa

SEQ ID NO: 30453 - DNA, 523 bp, Homo sapiens
  misc_feature (1)...(523): n = a,t,c or g
ttganactggatgacnnnnnnnnnnnnnnnnnnnnnnnnnnnnnnnnnnnnnnnnnnnnnnnnnnnnnnnnnnggcacgaggggggcttggatgcactgcccagatccttcttctggaaggaagggtcaggtttctgcagctactcccagctgtcagcctttcaggtttgtgggggctaaagaaaatggccttgtccaaagttgcatctggatctggtatccaatcaatgcagaggcataaaagccttgtcccttgtgctaactcggaagaagggctccttggcttcagagctccctgtgggttggctggggcatttgtcagatatgctttgcagctccgtgcaatcctgcctcttctctgcactttcacaggtggtaagcagaagagactccctaataagcatccagggtgttaaactctacctcagggtcagcttcctggggaagcccacccaccacagtcccttttcactnacttttctttcacataccccttacggcancaaggccccttgcnccttta

SEQ ID NO: 30454 - DNA, 603 bp, Homo sapiens
  misc_feature (1)...(603): n = a,t,c or g
aaatccctttnacatgacnnnnnnnnnnnnnnnnnnnnnnnnnnnnnnnnnnnnnnnnnnnnnnnnnnnnnggcacgnnnnnnnnnnnnnnnnnnnnnnnnnnnnnnnnnnnnnnnnnnnnnnnnnnnnnnnnnnnnnnnnnnnnnnnnnnnnnnnnnnnnnnnnnnnnnnnnnnnnnnnnnnnnnnnnnnnnnnnnnnnnnnnnnnnnnnnnnnnnnnnnnnnnnnnnnnnnnnnnnnncccagtgcccattggctgtcactcggtttcccctcccctgggccctagtaaccccttgtctaggtcctggttctatgagatttgcctacagtggatatttcatgaaaacaggctcagacagcgtttgtccttttgtaatcagctttcctcgctcagcatggngtctctgaggtccacccacgtggcagtatggccttcctgtttatgggcaaatgatattctgtggcatggatggaccacaacatgctcatntgttgatgggctgtttgcccgtgatgctggcaggcacgccggtgtcacgtctgtgtccccgngccctggtcctgtngctgannnccagggcccgaanncnttttggngggt

SEQ ID NO: 30455 - DNA, 542 bp, Homo sapiens
  misc_feature (1)...(542): n = a,t,c or g
gnnnnagnnnntttgatatcgttnanagagacncttaggaattncnnnnnnnnnnnnnnnnnnnnnnnnnnnnnnnnnnnnnnnnggcacgagnnnnnnnnnnnnnnnnnnnnnnnnnnnnnnnnnnnnnnnnnnnnnnnnnngnnnnnnnnnnnnnnnnnnnnnnnnnnnnnnnnnnnnnnnnnnnnnnnnnnnnnnnnnnnnnnnnnnnnnnnnnnnnnnnnnnnnnnnnnnnnnnnnnnnnnnnnnnnnnnnnnnnnnnnnnnnnnnnnnnnnnnnnnnnnnnnnnnnnnnnnnnnnnnnnnnnnnnnnnnnnnnnnnnnnnnnnnnnnnnnnnnnnnnnnnnnnnnnnnnnnnnnnnnnnnnnnnnnnnnnnnnnnnnnnnnnnnnnnnnnnnnnnnnnnnnnnngggagcttnaaactnaaattannccttgatggggcccttggancnttacccnaaaaatttctnnttggaaggnnccctaccttnttnaacnttaaccttactaaaaagggggtccttaaacctttcnccctta

SEQ ID NO: 30456 - DNA, 536 bp, Homo sapiens
  misc_feature (1)...(536): n = a,t,c or g
ccttnnnnnnnnnnnnnnnnnnnnnnnnnnnnnnnnnnnnnnnnnnnnnnnnnnnnnnnnnnnnnnnnnggcacgagctgccttggcatcctcttgaataggaagatcgttccaccttctacgcaattgacaaacccggaagatcagatgcaattgctcccatcagggaagaaccctatacttggtttgctacccttagtatttattactaacctcccttaagcagcaacagcctacaaagagatgcttggagcaatcagaacttcaggtgtgactctagcaaggctcatctttctgcccggctacatcagccttcaagaatcagaagaaaggccaaggtgctggactgttactgacttggatcccaaagcaaggagatcatttggagctcttgggtcagagaaaatgagaaaggacagagccagcggctccaactcctttcagccacatgccccaggctctcgctgcctgtggacaggatgaggacagagggcacatgaacagcttgccagggatggcagcccaacagcactttt

SEQ ID NO: 30457 - DNA, 532 bp, Homo sapiens
  misc_feature (1)...(532): n = a,t,c or g
ttgaaaccnttangacncnnnnnnnnnnnnnnnnnnnnnnnnnnnnnnnnnnnnnnnnnnnnnnnnnnnnnnnnnggcacgagggaaaccaaagctaaaaccagctcctctccctctgttctcttctccttcttacctcagggttctcaatgctcatagggcagcaggagcacctggggagaggcattcgatactgacggaagtagaatcagaatctatgggtgaggcttaggcatcagcatttaaagccttcctgggggggtgagnnnnnnnnnnnnnnnnnnnnnnnnnnnnnnnnnnnnnnnnnnnnnnnnnnnnnnnnnnnnnnnnnnnnnnnnnnnnnnnnnnnnnnnnnnnnnnnnnnnnnnnnnnnnnnnnnnnnnnnnnnnnnnnnnnnnnnnnnnnnnnnnnnnnnnnnnnnnnnnnnnnnnnnnnnnnnnnnnnnnnnnnnnnnnnnnnnnnnnnnnnnnnnnnnnnnnnnnnnnnnnnnnnnnnnnnnnnnnnnnnnnnnnnnnnnnnnnnnnnnnnnnnt

SEQ ID NO: 30458 - DNA, 444 bp, Homo sapiens
  misc_feature (1)...(444): n = a,t,c or g
tttganaccctttgatttgganacngttatgacnnnnnnnnnnnnnnnnnnnnnnnnnnnnnnnnnnnnnnnnnnnnnnnnnnnnnnnnnnggcacgagggcacaggagcctcggaacaagggggcgcaataaagggaatggcccgtccccttccagaaccagcccaaagaagcctggggggtgaggagtggcccccactcctccatgaggggctgatgaggggtgggcagcctaggggaggctttcctcgcaagcacagagctctgaggctcagccccctggcacaggcggtcacgcatcaggacggttcctactcctcagcaccttccgtgcagttaccagtgccctgggaggtcacactgcccgtcggaccttggcatgctccattcagctgacctgctgaggacaggcatcgccgagactccttgggtcctccccgcccg

SEQ ID NO: 30459 - DNA, 435 bp, Homo sapiens
  misc_feature (1)...(435): n = a,t,c or g
tttganaccntttgacntgattacnaatttaatacgactcnnnnnnnnnnnnnnnnnnnnnnnnnnnnnnnnnnggcacgaggacaaatnnnnnnnnnnnnnnnnnnnnnnnnnnnnnnnnnnnnnnnnnnnnnnnnattgtggagtgatcaaatcagacctaattaacatatccatcaaaggtgatattaaaatggaaacctgatgaagtatgagagcaaccatgttattattagggggaagagcgctcaaggtaaggagaacagcacgtgcaaaggcgctgaggtgggagtgttcttggagtgttaatggagcagtaggaagctcactgtggctgagtagaatgaacaaggggaagatgagtagaagatgagattggagagattagcagatgcagggtgtacaaggccctgagcccatgataagttttctttt

SEQ ID NO: 30460 - DNA, 433 bp, Homo sapiens
  misc_feature (1)...(433): n = a,t,c or g
tttgaaaccctttgatnnnnnnnnnnnnnnnnnnnnnnnnnnnnnnnnnnnnnnnnnnnnnnnnnnnnnnnnnnggcacgagccgaaggggtgcgagggacacctgggacccagtcccactgacacggtggcggctgcacaacagccctgcctgagaagccccgacacacggggctcgggcctttaaaacgcgtctgcctgggccgtggcacagctgggagcctggttcagacacagctcttccagggcagcggctccactttctcatccgaagatggtggccacagactgacccccatctgagctggggggatgttctgcctctccctgggtctggggacaggcccgcttgctgggtacctggtccccactgctgagctggcccttggggagaggtgattctcagggctgggagcctggggtgtcctacagt

SEQ ID NO: 30461 - DNA, 429 bp, Homo sapiens
  misc_feature (1)...(429): n = a,t,c or g
tgaanaccnnttgacnnnnnnnnnnnnnnnnnnnnnnnnnnnnnnnnnnnnnnnnnnnnnnnnnnnnnnnnnnggcacgagcataaacaattttttcttataattttttcacttgtaatacatacagagctcattgtattcatataatgttctgtaagtgttaagcagctcccctactttgagcaatgtgttttatataaaatatcttaatcatcccagcaaaaaggcaggtattattttcattttataagaaatgcagctcaaggagattaacacatttgcctatggccacataattaataaaaggtagagttaggtttgaacccagagttgcttggctccagattcatgctgccacataggtcagaagagtcacatttagttaatagaggagtaaaatgaagtgaaatgcccatgtgatgaactgag

SEQ ID NO: 30462 - DNA, 512 bp, Homo sapiens
  misc_feature (1)...(512): n = a,t,c or g
aaaccgnttnnnnnnnnnnnnnnnnnnnnnnnnnnnnnnnnnnnnnnnnnnnnnnnnnnnnnnnnnnnnnnggcacgagtgattcctattcattcatcagatagtttaagtactaggaagccttagaggatacaaataattacaagatactgctcaaatgtcaaacaactccggctctacatgtagagagacgacaaatatccagaaatgataaaatgtaaggctctgtgtgtcaaagcagaaaagcagccaatgagtaacacctcttctagtttcccccttgaaccagaacctagaagaggcttcatattcccgaaaaggaaattctggttcactcttattcctaaagtacacactgtcagtgctttctggtcccttatgcatgaacctcgctcctagacctcaagagccaatgtgagtcctagaagtctcagccaggaatcagagagagagtgtggatcccatcctntnttatgaaaaaccnnggcttaccgngaaagggnanttttttc

SEQ ID NO: 30463 - DNA, 530 bp, Homo sapiens
  misc_feature (1)...(530): n = a,t,c or g
ttgaaaccnttnnnnnnnnnnnnnnnnnnnnnnnnnnnnnnnnnnnnnnnnnnnnnnnnnnnnnnnnnnnnnnnggcacgagcggcacgaggcagggaactctcctaagaagaagtgacattacacaggcatgatcgattacaccactggccactgatgagcaactcgaccttcagcccctctttcctccctggaggttgggtgccactgctgaaaggcccgaccctctaatcctgccctggtcattctggtgaccagtcctcatcttgaagctaccttggagctgccagcctccaatcaactcattagcctacaaaaagacatcactttggagatnnnnnnnnnnnnnnnnnnnnancngcctggaaannnnggtgaaancnncatgtgtactnntacagcgtcanattacngcgctangcntgtannggttaccacanngattnntnannatgaancangataactgcttgaantnggaagnnaagntanncnctagcattantatgaccttacttanannccggcct

SEQ ID NO: 30464 - DNA, 447 bp, Homo sapiens
  misc_feature (1)...(447): n = a,t,c or g
tnnnntnattgatttgattcctttgaatacgcnnnnnnnnnnnnnnnnnnnnnnnnnnnnnnnnnnnnnnnnnnnnnnnnggcacgagggcggcgggcctgctgctcggcgcgggcgcctgctactgcatttacaggctgacccggggtcggcggcggggcgaccgcgagctcgggatacgctcttcgaagtccgcagaagacttaactgatggttcatatgatgatgttctaaatgctgaacaacttcagaaactcctttacctgctggagtcaacggaggatcctgtaattattgaaagagctttgattactttgggtaacaatgcagccttttcagttaaccaagctattattcgtgaattgggtggtattccaattgttgcaaacaaaatcaaccattccaaccagagtattaaagagaaagctttaaatgcactaaataacc

SEQ ID NO: 30465 - DNA, 439 bp, Homo sapiens
  misc_feature (1)...(439): n = a,t,c or g
atttnaanacccgnnnnnnnnnnnnnnnnnnnnnnnnnnnnnnnnnnnnnnnnnnnnnnnnnnnnnnnnnnnnnnnnnnggcacgagccattcattcatttcaacaagtatgtattaaattcatactatgtgccaggtattcgtaggcccaacgtatagcactgtaaacaaagtacagtttttaacctcatggagtgttcctgtctaaaggtctccaggtatcagtgggttagtttttattttccctcatttcagagtcagaattgaataaattatttagaaaagaggaaaacttttctcttaatgacctatctatgctatcaagnnnnnnnnnnnnnnnnnnnnnnnnnnnnnnngttctattctatctagtctatatggattttctcagggttatgttcatgtacttgtttcaataaaaagtaaatgcttttttttt

SEQ ID NO: 30466 - DNA, 436 bp, Homo sapiens
  misc_feature (1)...(436): n = a,t,c or g
atttgataccgttnnnnnnnnnnnnnnnnnnnnnnnnnnnnnnnnnnnnnnnnnnnnnnnnnnnnnnnnnnnnnnnggcacgagtgttgagcaaattacttaacctctctcattcttcatgtgggaattataataatacttaaagaattgtgagaattaaatgagatcctatatgttaaatgcttatcatatattttgatacagttaataatacaaatagtaacttacatgttttcgtctgctaactacagcccattaagtgatttgattaatttagccttcattgaacaagcatttactgaatgattgctatgcagaaagcactcgttgactgtacagagcagaagtttctgggcccaaaaattgatgcatgaaaaacacttcttttcagtccctttatatgggtaataatacctactcctgtgatagttatgaa

SEQ ID NO: 30467 - DNA, 523 bp, Homo sapiens
  misc_feature (1)...(523): n = a,t,c or g
gngnnnnnnttgnnacngtttgacnnnnnnnnnnnnnnnnnnnnnnnnnnnnnnnnnnnnnnnnnnnnnnnnnnnnnnnnnnggcacgagcggcacgagcatagggccnnnnnnnnnnnnnnnnnnnnnnnnnnnnnnnnnnnnnnnnnnnnnnnnnnnnnnnnnnnnnnnnnnnnnnnnnnnnnnnnnnnnnnnnnnnnnnnnnnnnnnnnnnnnnnnnnnnnnnnnnnnnnnnnnnnnnnnnnnnnnnnnnnnnnnnnnnnnnnnnnnnnncctgattatctacctaaaacaatcaagttttctttaaaaatagttnnnnnnnnnnnnnnnnnnnnnnnnnnnnnnnnnnnnnnnnnnnnnnnnnnnnnnnnnnnnnnnnnnnnnnnnnnnnnnnnnnnnnnnnnnnnnnnnnnnnnnnnnnnnnnnnnnnnnnnnnnnnnnnnnnnnnnnnnnnnnnnnnnnnntccaggcatggtgatgcacgcctgtggctcagctattcgggaagctgaaatgggag

SEQ ID NO: 30468 - DNA, 604 bp, Homo sapiens
  misc_feature (1)...(604): n = a,t,c or g
annantnnnngnngnanntatnnanannntcnntntcntannnnnntnnntnanannannnncnaaatattnnatnannngtgngnnnatntttgatnnccntttgaataccttntnnnnnnnnnnnnnnnnnnnnnnnnnnnnnnnnnnnnnnnnnnnnnnnnnnnnnnnnnnnnnnnggcacgagctcattcacagcccatgatgttcaaacagatctgtacagattcccttcagtctgtgattaacttgcttactccttgaagttgatgccttttagcagggtaaattgtagccagtgttaaataggtgactccttcagggatttttgtaattaccgaaagaggaaagatgtcaggtctcttacagagtcattgggaatggttgttcctaaaagaaatgaaacagatggaacccattttgtaaatttgcttttcattgattcatttgtactttatttgtgtcctgtgccatacttgacactgaggaagaacatacatgattgtccctaccctcaaggagctctggntccagaaggagaagcangccaatgatttcagtgtgctgggaaaatngtttacngtgactgagaaacngagaaggc

SEQ ID NO: 30469 - DNA, 460 bp, Homo sapiens
  misc_feature (1)...(460): n = a,t,c or g
ggtgntttgnntttggaaatncttatgacnnnnnnnnnnnnnnnnnnnnnnnnnnnnnnnnnnnnnnnnnnnnnnnnnnnnnnnnnnggcacgagtgttcctgcagtgtcccaaaatgtatgaccttgggtaaatcactttgctatctctaaacttgattaccttatctatactgactcagtttcctcccagaaataaaagcctatagaatcaaacaaacacttgacaacaagagcgtccttcacgcaaagtcgatgtttgagatggatggcaattttcacccaatcaccccttaaaacaacaagggatgacagtaaggacaccctgaaaactcaagtaacaacatttaccttgtgcaaaccacaatgtgaattgagttctctgtgcccagactgaagttgtcttttgggtcaggctgacctcttatattctagaggacagattgnnagntaaagaaaga

SEQ ID NO: 30470 - DNA, 335 bp, Homo sapiens
  misc_feature (1)...(335): n = a,t,c or g
cctttnnnnnnnnnnnnnnnnnnnnnnnnnnnnnnnnnnnnnnnnnnnnnnnnnnnnnnnnnnnnnnnnggcacgaggatcaagtgcactcaacatagtttgatggggaaatgcaagatgattcagataggggttttgccctcagtccagctgggagagccttgcatgtctacacaagacctgatggctctcccatgaaacatgccaaaaatgaagtatgaacacattatgtgtaagctattagtttgcccctccagccactataatcacattagctactttctcagacagtaaaacgatttcttaattttctttcttttctttttttttttttt

SEQ ID NO: 30471 - DNA, 492 bp, Homo sapiens
  misc_feature (1)...(492): n = a,t,c or g
gnnnnnnntttnannccctnnnnnnattgaanacnntttgacnnnnnnnnnnnnnnnnnnnnnnnnnnnnnnnnnnnnnnnnnnnnnnnnnnnnnnnnnnggcacgagacatagcttcctcacactcacccccattctttgtatttctttctggaaagctgtgctattacttgaaaggtttcatgtccagaaattggccctagaggagctgccaactcccagagtggagaggccaggtcctgctagttgaagaattggggccaggttcttccttggaatgtatgcaaatattttaatccaggtatgcttgaccatgcattattgccatgtatttaagtatagacccaatgtctcacttacccaattattgtttttcccactgaaatgtagatataacatgctttcccccgctgccttcatcacaaagtaagattttgctttggtattctgataaaatgttcacgacctaggtttttgatttttcagatattg

SEQ ID NO: 30472 - DNA, 548 bp, Homo sapiens
  misc_feature (1)...(548): n = a,t,c or g
gatgntntnnnctttgaaanctnnnnnnnnnnnnnnnnnnnnnnnnnnnnnnnnnnnnnnnnnnnnnnnnnnnnnnnnnnnnnnnnnnggcacgannnnnnnnnnnnnnnnnnnnnnnnnnnnnnnnnnnnnnnnnnnnnnnnnnnnnnnnnnnnnnnnnnnnnnnnnnnnnnnnnnnnnnnnnnnnnnnnnnnnnnnnnnnnnnnnnnnnnnnnnnnnttgagttatctttttttcttactggtttataggagctctttcctaagtgctttttattatggttttaattctttggaaattggccgccttagtgccgtttatggaagctagcccaggcaagaaatggagtgtattgaaggctccgagggaagtcccagtaacctcaggggaaacggacaagtggaagctgcgggaacccagagcctctgttcggctccagcctcagcgccatcctgcagtcctgcanagcgccccagctgctccggcgtgtgtgaggccatcgccacccaccaggctggtcaagggccaagtgcttgccgtcgtccctg

SEQ ID NO: 30473 - DNA, 469 bp, Homo sapiens
  misc_feature (1)...(469): n = a,t,c or g
tnatttgattcaaagngaaccctttnnnnnnnnnnnnnnnnnnnnnnnnnnnnnnnnnnnnnnnnnnnnnnnnnnnnnnnnnnnnnnnggcacgaggtgatttttaacctctgtagtttccctgaactttcaatatcacttcctttcctttgtagaagtgagttaaaggagaaagttggattcctgttctgtgtagtctaagccagaggaggttatacttgagaactggggtggaatatgtttcttctcccacattaaagctgaaatgggtgtatactctctaatgccaattaattcaacctcaagcctcatatgtccatattcacaaaaattccacgtgatcaaaagaccaaaaggacattctgacactgctctctttcttagaagctgaataagtgtacagagggattctanaatcaattgtctctgcatgtctgngntcatacaagcatattnactacacccagcc

SEQ ID NO: 30474 - DNA, 514 bp, Homo sapiens
  misc_feature (1)...(514): n = a,t,c or g
ngtgttgntnntnatntganacctntgaaaccnnttgacnnnnnnnnnnnnnnnnnnnnnnnnnnnnnnnnnnnnnnnnnnnnnnnnnnnnnnnnnnggcacgaggaaagggactgagatccagttcttgggatagtcaagaagtcaaggaaaggactgaggaaaatgttgccttttataatgatttctaaatcatttactttcttactttaggattaatctgtccttttgtttgaaggtgaatgtttaaatattttggttcaaaaataaaaatgagatgacagttttaatactttattctgaattatgaatattgatcttatgaaactgcaactcattgtcttgatagcttatgacaaagtaaatgcagaacagaaatagaagacaggcttcacacttaaaaataatcagtcnnnnnnnnnnnnnnnnnnnnnnnnnnnnnnnnnnnnnnnnnnnnnnnnnnnnnnnnnnnnnnnnnnnnnnnnnnnnnnnnnnnnnnnnnnctttgggaaac

SEQ ID NO: 30475 - DNA, 427 bp, Homo sapiens
  misc_feature (1)...(427): n = a,t,c or g
aattcggcacgagttaggcgggccaagaggggagggaaaagtgctccaggaagaggaaatctacacataagaaggtctcaaagtgggagaacagggtaatctagaagaactagagaaacttaagcagctgtgtcaggtcaaacagtgggtgggaatcacgaggctggagcccagctgatcaggaaggccgtcgagtgccaggttgagagctgggacttatccccaggcagggaggcctattgggagactgctctgagagtccagaagcaannnnnnnnnnnnnnnnnnnnnnnnnnnnnnnnnnnnnnnnnnnnnnnnnnnnnnnnnnnnnnnnnnnnnnnnnnnnnnnnnnnnnnnnnnnnnnnnnngctcagcctccagagcactgggactgcagaccgnccacagagcccanccttgagtcttt

SEQ ID NO: 30476 - DNA, 501 bp, Homo sapiens
  misc_feature (1)...(501): n = a,t,c or g
nnnnnnnnnnnnnnnnnnnnnnnnnnnnnnnnnnnnnnnnnnaattcggcacgagatagtgtcctcaagatatatcatgttgtatcatgtcagaattttcttcccctttaagactgaataatactccattttatggatatatcacttttgttcatctgttcnnnnnnnnnnnnnnnnnnnnnnnnnnnnnnnnnnnnnnnnnnnnnnnnnnnnnnnnnnnnnnnnnnnnnnncctcttcaagatctgctgtcacttctttgggatgtgtacactgaaatgaaattgttggatcatatggtatttctgtttaatttttggaggaaccaccataccattttccaaaccactgcagnnnnnnnnnnnnnnnnnnnnnnnnnnnnnnnnnnnnnnnnnnnnnnnnnnnntgctaacactttttctgtctttactttcttttcttttttttgagacagggccttgctttgcacccaggctggagtgcagcccatgatctttgactc

SEQ ID NO: 30477 - DNA, 457 bp, Homo sapiens
  misc_feature (1)...(457): n = a,t,c or g
gnnngtnnnnnttganatttnnnnnnnnnnnnnnnnnnnnnnnnnnnnnnnnnnnnnnnnnnnnnnnnnnnnnnnnnnnnnnnnnnnnnnnnnnggcacgagatcccaaagaaataaaaacagggtctgaaacagatacctgtacatctacattcaaaataannnnnnnnnnnnnnnnnnnnnnnnnnnnnnnnnnnnnnnnnnnnnnnnnnnnnnnnnnnnnnnnnnnnnnnnnnatatacaatggaacattactcagtcttaaagaggaaggagattttctgcactaacttgacccagctcctctgacatgattcgcatgagcctctgattcccacactagagtggaagctccttagggagaaggcctgtgtttttcttgtctttgttgccttttcccctaacctcagcttaacacgatgattgcacaaagtgctcgttaaggcttttaaatgag

SEQ ID NO: 30478 - DNA, 446 bp, Homo sapiens
  misc_feature (1)...(446): n = a,t,c or g
ngntgnnnattganaccttatgacnnnnnnnnnnnnnnnnnnnnnnnnnnnnnnnnnnnnnnnnnnnnnnnnnnnnnnnnnnggcacgagctcacagagttcatggagaacggcgccctggactccttcctgcggctaaacgacggacagttcacagtcatccagctcgtgggcatgctgcggggcatcgcctcgggcatgcggtaccttgccgagatgagctacgtccaccgagacctggctgctcgcaacatcctagtcaacagcaacctcgtctgcaaagtgtctgactttggcctttcccgattcctggaggagaactcttccgatcccacctacacgagctccctgggaggaaagattcccatccgatggactgccccggaggccattgccttccggaagttcacttccgccagtgatgcctggagttacgggattgtgat

SEQ ID NO: 30479 - DNA, 425 bp, Homo sapiens
  misc_feature (1)...(425): n = a,t,c or g
ggccctcgaggccaagaattcggcacgagtttctaaaaaccatttaaagctaactgggtcttagcatcctcctgtgtatggaagagacaggtgaccgctccaggttgggtgctcacagaacccttttcctgactctcatggaagatggtggaaggaaaatagactgtctcatcaaccctcctgtgtcctctgaagcaatctcagtttttattaaccacctcttctgtgtttctggtagctatttaacctgtatttaatctgtacttcctatgccagcctcaattttatttgatttttaaaattattctcttctaaccaatgaagtgtttgtcagtatgccccaaagcttgctcttttgtgctcccttttgaataactttctatccnaaaaaaganattntttggganctgganaattgcagggat

SEQ ID NO: 30480 - DNA, 540 bp, Homo sapiens
  misc_feature (1)...(540): n = a,t,c or g
tgaanntnnnggaanccctttgacatgatcnnnnnnnnnnnnnnnnnnnnnnnnnnnnnnnnnnnnnnnnnnnnnnnnnnnnggcacgagtctggagctagtgttttgacaatgctttgggttttgacatgccttttccacaaatctcttgccttttcagggcaaagtgtatttgatcagaagtggccatttggattagtagccttagcaatgctacagggttataggcctctcctttcacattccagacaatggagagtgtttatggtttcaggaaaagaactttgtggctgaggggtcagttaccagtgaccttcaatcaactccatcacttcttaaatcggtatttgttaaaaaaatcatntattttatttattgagtgccgactgtagtaaagccctgaaatagataatctctgttcttctaactgatctaggatggggacgcacccaggtctgctgaactttactgttcctctgggaaaggagcagggacctctggaattcccatctgtttcactgnctncattccataaaactc

SEQ ID NO: 30481 - DNA, 540 bp, Homo sapiens
  misc_feature (1)...(540): n = a,t,c or g
ttgnaantntnnnnnnnnnnnnnnnnnnnnnnnnnnnnnnnnnnnnnnnnnnnnnnnnnnnnnnnnnnnnnnnnnnnnnnnnnggcacgagccctaaaagcccttcattgctgttaacaatttggtctgtatctttcaacactttttcttcttcatatgttcatatttccttaacaaatatttatagagtactttcaatgtgccaggtacgctaagttcttgggttgtgaggttatgtaatatgaatatcatatatattcccttaaggtttacaatctaatggaagatgaagaaagataaagaggtggttacaatatgatatgtgatatatgctctgctattgtgggagtacctagaataggcacataactcacacttgcagggagtcagaagttaaaaagaggaggaagaaaaaaataatctgtanagcagaacttctaatagtgtagacttcagacataccactactggaaagaacaganaatcagaaaacgacctggaggaaagaatattggaggtcaaaggaacagcangttggaa

SEQ ID NO: 30482 - DNA, 519 bp, Homo sapiens
  misc_feature (1)...(519): n = a,t,c or g
anancnnnnnnnnnnnnnnnnnnnnnnnnnnnnnnnnnnnnnnnnnnnnnnnnnnnnnnnnnnnnnnnnnnnggcacgagtatatacagagacagtagggggaaggtgtggctcattgactttaatccatttggtgaagtcacagattcactgctgttcacctgggaagaactgatatctgagaacaacttaaacggcgattttagtgaagttgacgctcaagagcaggattccccagctttccgttgcacaaacagtgaagtgacagtccagcccagcccctatttgagttaccggctacccaaggactttgtagacctctctactggggaggacgctcacaagctaatagacttccttaagctgaagagaaatcagcaggaggacgactgatgagcgtgctggaactggagaagaggaggccccgccccaccgctccgggagctgctcatcagccgcaacttcctgccgaccctgatgcgggtggccgagcatgtggacatnanccntttttatatt

SEQ ID NO: 30483 - DNA, 518 bp, Homo sapiens
  misc_feature (1)...(518): n = a,t,c or g
tttggaaatccnttatgacatgatcacgaatttaatacnnnnnnnnnnnnnnnnnnnnnnnnnnnnnnnnnnnnnnnnnggcacgagatcaaatgaggaaaacttactttcctatagtcattatttttctatatagtgaaaaggaaaggacagtggattcttagatttgtttcatgttttacttttctaattagttgatgcctttacctgtggttaagatatggaaaaagcaataaattatttaggattttctgctcactgaattttattgtgtttaaaagcatttaaaaacaattaagtatatacgtgcacttataagaaatttgatgcaagcaaatgagactaaatgttggctccttagagattttttaatgtttcctttgtcttccctcttcagtggaagcattgacatttcctccttcttctggaaagtcattcatcatgggagcagatgaacccttngaagtgaactgggacttggagaactagcagccttacggtggcccatgaagcaactc

SEQ ID NO: 30484 - DNA, 515 bp, Homo sapiens
  misc_feature (1)...(515): n = a,t,c or g
ttggaaatcnttnnnnnnnnnnnnnnnnnnnnnnnnnnnnnnnnnnnnnnnnnnnnnnnnnnnnnnnnnnnnnnnggcacgaggaacgagattctttatagcctaaatgattaccacagttccctcatggtttaatgtcttcctactgaaaagtaagtcccaaatcatccagataataaaaggttttacttagacatattctatttcataaaggcatttgcatgtgcttgctgggttttttattcattaaataatttatatagtaagtggtgctgatagcattccctgtcactaaagagttcaagcagagaccagtttgccaagtggtaggaggctgaagagaagattctagtactacgtgagtgactggactaggagaccattaacatttccttatgactctgaatacctgtcattccaaagatgacagtcctagtgacaaccatatatactgaagtatctggcatctcccagcttctaccccagctttcctcaatctgccacctgctttgtgg

SEQ ID NO: 30485 - DNA, 479 bp, Homo sapiens
  misc_feature (1)...(479): n = a,t,c or g
atttgataccgctatgacatgattacgaatttaatatnnnnnnnnnnnnnnnnnnnnnnnnnnnnnnnnnnnnnnnnnggcacgagaaaaaatgttagatgatgctgacgtggtggtgcatgcctgtggggctactccgagggccnnnnnnnnnnnnnnnnnnnnnnnnnnnnnnnnnnnnnnnnnnnnnnnnnnnnnnnnnnnnnnnnnnnnnnnnnnnnnnnnnnnnnnnnnnnnnnnnnnnnnnnnnnnnnnnnnnnnnnnnnnnngatatgataggtgaaagatgaccctaaacttaaaaggcagtgaaaaaaatcatcacaggtgtaaaagttagcaatgcatggaacaagattagtacaatgtttaggtcttggggtctggaatacccaggttcaaatgccatctctgnactatcatttcctcatttgaaataatncccatttcatnagggtactntgngnaattaattccga

SEQ ID NO: 30486 - DNA, 477 bp, Homo sapiens
  misc_feature (1)...(477): n = a,t,c or g
ntttcgataccnnnnnnnnnnnnnnnnnnnnnnnnnnnnnnnnnnnnnnnnnnnnnnnnnnnnnnnnnnnnnnnnnnnggcacgagctattttctactctatgagtttgacgtttccagattcttcatgtaagtgaggtcatatggtatgtctttctgtannnnnnnnnnnnnnnnnnnnnnnnnnnnnnnnnnnnnnnnnnnnnnnnnnnnnnnnnnnnnnnnnnnnnnnnnnnnnnnnnnnnnnnnnnnnnnnnnnnnnnnnnnnnnnnnnnnnnnnnnnnnnnnnnnnnnnnnnnnnnnnnnnnnnnnnnnnnnnnnnnnnnnnnnnnnnnnnnnnnnnnnnnnnnnnnnnnnnnnnnnnnnnnnnnnnnccttgacataactgatttnnnnnnnnnnnnnnnnnnnnnnnnnnnnnnnnnnnnnnnnnnnnnnnnnnnnnnnnnnnnnanggnttnanaaaccntccgactgt

SEQ ID NO: 30487 - DNA, 470 bp, Homo sapiens
  misc_feature (1)...(470): n = a,t,c or g
atcnnttgacnnnnnnnnnnnnnnnnnnnnnnnnnnnnnnnnnnnnnnnnnnnnnnnnnnnnnnnnnnggcacgagaaaagggaacccaggagctagcagagagagcagttcgttcactgaggcacaatttggatggttataatatgcacctgctcaaacacctgatctctactctggtccctttgatcttggtaccatattcatgtttcttaagcagctaacatttagtcagaatgccaggtagaacttaggtgcttttcagtttggaaatccataccctttttcattctatcactccaaaaactgatgtgtgggctgcagactttatttgccaagggttaggtggacaggagaggtaaaagctgtataatgacatggcaccacctccatttgctgtaagcaaacagccaggncctttattacccttgaaacaggnactttggganncaaggttgacttcccgaaccag

SEQ ID NO: 30488 - DNA, 539 bp, Homo sapiens
  misc_feature (1)...(539): n = a,t,c or g
tgnntntnnnnatttgaaaatttnnnnnnnnnnnnnnnnnnnnnnnnnnnnnnnnnnnnnnnnnnnnnnnnnnnnnnnnnnnnnnnnnnnnnnnnnnggcacgaggattgagcaggtcgtttgttgtaggctgacaccccttcagactgagttatacaagaggtttctgagacaagccaaaccggcagaagaattgcttgagggcaagatgagtgtgtcttccctttcttccatcacctcgctaaagaagctttgtaatcatccagctctaatctatgataagtgtgtggaagaggaggatggctttgtgggtgccttggacctcttccctcctggttacagctctaaggccctggagccccagctgtcaggtgacccttttcctaccagtatttgggcttctctaggaggagggtgggagattttnttttgtgctagggctgcctgtttcanggnaggatatnangagttngaagcctgggccattgggacagncanttangggactgctggntgctgctnttccaggnanaagctgg

SEQ ID NO: 30489 - DNA, 547 bp, Homo sapiens
  misc_feature (1)...(547): n = a,t,c or g
tnnnntnnnnnttggnnntttnnnnnnnnnnnnnnnnnnnnnnnnnnnnnnnnnnnnnnnnnnnnnnnnnnnnnnnnnnnnnnnnnnnnnnnnnnggcacgaggctagaagtactgtgaagctcgcagatggccttgtggactttagcacttcaggtgaggccccatcctcccagagccaagaccggagcctagatgccagaggcagtgatattctgcttgcgccctcacgtgggacagagccaactaacaccacatgctgggagattgatgaactcgagaccagagaaaccctcaggcaggagccagcagcaactggagagcccagcaggcaggagaagagggcagccaattctgccatctgccctgggtaccccgagaaggaggaggcatgagtgagaaaatcccacccgtttgtaaagaaccanagagcacatggaattttgcaggaagaagacaagtcanagatagtcctattaaacactcaagggtttagaagtccacattcaagtttgttttaatgagcccaggggaaaacaangaaaggg

SEQ ID NO: 30490 - DNA, 475 bp, Homo sapiens
  misc_feature (1)...(475): n = a,t,c or g
ttnnnntttgaaatntgtatgaccnnnnnnnnnnnnnnnnnnnnnnnnnnnnnnnnnnnnnnnnnnnnnnnnnnnnnnnnnggcacgagatggtttccaaaagcatccctgtgctctgcgtgctggatgtcgagagtggcaacatctctgtgcttgagggggtccctgagaatgtgtcccctggacaggcattttgggcccctggagatgctggtgtggtgtttgtgggctggtggcatgagcccttccggttgggcatccgcttttgcaccaatcgcaggtcagccctgtattatgtggacctcatcggggggaagtgtgagctcctctcggatgactccctggctgtctcttctccccggctgagcccagaccaatgtcgcattgtctacctgcagtacccatctctgatcccccatcaccaatgcanccagctgtgcctgtatgactggtataccaaggttacctcatggtg

SEQ ID NO: 30491 - DNA, 474 bp, Homo sapiens
  misc_feature (1)...(474): n = a,t,c or g
tnnnntttggannatttggananccnnnnnnnnnnnnnnnnnnnnnnnnnnnnnnnnnnnnnnnnnnnnnnnnnnnnnnnnnnnnnnnnnnggcacgagctggtgattttaaaacgaagcctctgagaggatggtataaatgcttgtagaatattcattaattttttcttatagtacttttagttgcttatactcttatactttgactaaagtttctttttaattactttttannnnnnnnnnnnnnnnnnnnnnnnnnnnnnnnnnnnnnnnnnnnnnnnnnnnnnnnnnnnnnnnnnnnnnnnnnnnnnnnnnnnnnnnnnnnnnnnnnnnnnnnnnnnnnnnnnnnnnnnnnnnnnnnnnnnnnnnnnnnnnnnnnnnnnnntttccatcttaaatacactacattgntatttgctatagtcaccctactgtataatagaacaccctactgtataatagaatagaacaata

SEQ ID NO: 30492 - DNA, 463 bp, Homo sapiens
  misc_feature (1)...(463): n = a,t,c or g
aaaccttnnnnnnnnnnnnnnnnnnnnnnnnnnnnnnnnnnnnnnnnnnnnnnnnnnnnnnnnnnnnnnnnnggcacgagagtgtattaactttttatttttgnnnnnnnnnnnnnnnnnnnnnnnnnnnnnnnnnnnnnnnnnnnnnnnnctcacaatttcccttggtctggggtcagattatggcttagctgggttctctgctttaggttgccaccaggctgcagtcaagatgttgacggccttcattcttatccaggggcttgacttaggaagaagccacttccaagctcattcagggtgttggcaggattcatttccttgtgacagtagaatccatggaggcttgcttcttcatgttcagcaggagagcccctggttccagtctgccgagagagtctcctgtataacaaaatgtaatcataggagtgacacccatcacctttgttcaattctgntgggg

SEQ ID NO: 30493 - DNA, 474 bp, Homo sapiens
  misc_feature (1)...(474): n = a,t,c or g
tnnnnttttggaaatctgnaaaccntatgacnnnnnnnnnnnnnnnnnnnnnnnnnnnnnnnnnnnnnnnnnnnnnnnnnnnnnnnnnnggcacgagaacgtagttcctaatattgggggttactcaagataaccacccagtgggatcaccctgcagaaaactccagagctgacaaacaccatccatgtacacaaagctccacgttagctttttggtctttcgctcgtaagtataagcaacagtcagtgatttcatgtgacatttcaggagaactctagcatgaaagattgaaatcaaaacagattggaggaaataagaactatgccagaaggaaaagtctttttannnnnnnnnnnnnnnnnnnnnnnnnnnnnnnnnnnnnnnnnnnnnnnnnnnnnnnnnnnnnnnnnnnnnnnnnnnnnnnnnnnnnnnnnnnnnnnnnnnnnnnnnnnnnnnnnnnnnnnnnnnnnnnn

SEQ ID NO: 30494 - DNA, 471 bp, Homo sapiens
  misc_feature (1)...(471): n = a,t,c or g
ntttggaacccnnnnnnnnnnnnnnnnnnnnnnnnnnnnnnnnnnnnnnnnnnnnnnnnnnnnnnnnnnnnnnnnnnggcacgagcgtggctgattccttcataaattaaaagctgagaaactaaataaataaataaaagttgctgccccagaatgacctacttcctactacccctggccccactctgcacattctctctactgacgaatggtaatataatatctccctcccaatggtagtatnnnnnnnnnnnnnnnnnnnnnnnnnnnnnnnnnnnnnnnncatcctgggtttggaannnnnnncannnnnnnnnnnnnnnnnnnnnnnnnnnnnnnnnnnnnnnnnnnnnnnnnnnnnnnnaaatctgaaatgctcaataaacatttccttttgagtgccatgtcagcactcaaaaagttctcgatttgagagtactttgggtttaaggatttangatgctcaacccg

SEQ ID NO: 30495 - DNA, 475 bp, Homo sapiens
  misc_feature (1)...(475): n = a,t,c or g
tnnnnnnntnnnatttgggaaacnnnnnnnnnnnnnnnnnnnnnnnnnnnnnnnnnnnnnnnnnnnnnnnnnnnnnnnnnnnnnnnnnnnggcacgagnnnnnnnnnnnnnnnnnnnnnnnnnnnnnnnnnnnnnnnnnnnnnnnnnnnnnnnnnnnnnnnnnnnnnnnnnnnnnnnnnnnnnnnnnagtctgtacttgtgcagttcagatgcaaccatctgtttttttctggaatatttttgatttgcctttggttgaatccagtgatgcagaacttatggatatggagggccaagtgtatttagatatttgtgtgctatcatttatatacaagatcaaagatgatatactacattgacatgtattccacattatgttttgagctagttnnnnnntttttgctttgaaataaaagatttgtctttttttctttttcaaaanattttanagtacagttgaatgagttgnttctgg

SEQ ID NO: 30496 - DNA, 508 bp, Homo sapiens
  misc_feature (1)...(508): n = a,t,c or g
gngtggtanaaatntgaaacctttgaactcnnnnnnnnnnnnnnnnnnnnnnnnnnnnnnnnnnnnnnnnnnnnnnnnnnnnnnnggcacgaggggagtcccagccacagtgctccagaccctgatggacttccccatttcatggagactcctcttcagcccccacctccagtgcagcgagttatggacccaggcttcctggacgtgtcgggaatttctctcttggacaacagcaatgccagtgtgtggcccagcctgccctcttccacagaactgaccaccacagctgtctcaacctcagggccagaggacatctgctccagcagcagttctcatgagcggggtggtgaggctacatggtctgggtcagagtttgaggtctccttcctggacagcccaggtgcccaagcccaggcggaccacctgcctcagctgactcttcctgacagtctcacctctgcagcctcaccagaagatgggctgtccgccgactgcttgaanctcaagc

SEQ ID NO: 30497 - DNA, 509 bp, Homo sapiens
  misc_feature (1)...(509): n = a,t,c or g
gtgtanntattgatancancgnatacctnttgactgnnnnnnnnnnnnnnnnnnnnnnnnnnnnnnnnnnnnnnnnnnnnnnnnnnnnnnnnggcacgagagcattttgggaggcttaggcgggtggatctnnnnnnnnnnnnnnnnnnnnnnnnnnnnnnnnnnnnnnnnnnnnnnnnnnnnnnnnnnnnnnnnnnnnnnnnnnataacttcttatttcttgcatggattgtatgcattgactagggacacacaatatattccagttttttgacatataggatagcgcactatacacattgctttgcattttgcttttttcacttagcatatctgggtaggtcattatttaatcagtgccatatttaagtacatttgtttccagcctttggtttttttgagtaatgctgcaattaatatcccttatctgtgtcatttcacgcaggtgcaaatatacctgtaaaatgaatttctggaagcagcattactgactcaagggtatctacttt

SEQ ID NO: 30498 - DNA, 533 bp, Homo sapiens
  misc_feature (1)...(533): n = a,t,c or g
tgaacctttnnnnnnnnnnnnnnnnnnnnnnnnnnnnnnnnnnnnnnnnnnnnnnnnnnnnnnnnnnnnnnnggcacgagatagtgccaccatgcctggctaatttaaattttttttgtgtgtgtgtgtgnnnnnnnnnnnnnnnnnnnnnnnnnnnnnnnnnnnnnnnnnnnnnnnnnnnnnnnnnnnnnnnnnnnnnnnnnnnnnnnnnnnnnnnnnnnnnnnnnnnnnnnnnnnnnnnnnnnnnntcctgtgctaggctcttaacgtccttcccagatgttatgtcccttcccttggtggctgctgctttctgccacattttaccttgccgttccgcaccttctaccatgtctccttttccagcctcattccctgagatgtagccggagttccagttcagccaacctgcccgttgttttctctcctggagctgggtgtttgagtctcctgcatggagtgntcttccttccagctaaagtcctggtcatcccatttcatctgaaaaggccccttgttcatgaacctctatg

SEQ ID NO: 30499 - DNA, 494 bp, Homo sapiens
  misc_feature (1)...(494): n = a,t,c or g
attganatcgntnnnnnnnnnnnnnnnnnnnnnnnnnnnnnnnnnnnnnnnnnnnnnnnnnnnnnnnnnnnnnnggcacgagaggagaaataatttttggtcagtaacttagtgaataaattgaccatttgtgctgcttccctgggcgagggcatagagaatggtacaaagtaggctacggtagccagattatcttgtatgtaattttgagctgttattccggagaatggcatgctcagattagagttacaattttgcttaaccaaggagagcgtgatctagtacaatagaagactgttgtctagaactcattccttgagaatgctcccctgcttgctctgctcattccagcagcaatcaactctacattgtattccagggagttgattatcatttggaattatttgccaagctaacgtttggacaaataatggtttgtatatttaacattaaaactctgacattgacatccattcattttggaacattatatt

SEQ ID NO: 30500 - DNA, 493 bp, Homo sapiens
  misc_feature (1)...(493): n = a,t,c or g
attnnnnnnnnnnnnnnnnnnnnnnnnnnnnnnnnnnnnnnnnnnnnnnnnnnnnnnnnnnnnnnnnnnnnnnnnnnggcacgagcatctccacatctgttttcatggagtggcaaaacctggccgagtgccattaatagtctcagaatgccttacctattacaannnnnnnnnnnnnnnnnnnnnnnnnnnnnnnnnnnnnnnnnnnnnnnnnnnnnnnnnnntcagatccnnnnnnnnnnnnnnnnnnnnnnnnnnnnnnnnnnnnnnnnnnnnnnnnnnnnnnnnnnnnnnnnnnnnnnnnnnnnnnnnnnnnnnnnnnnnnnnnnnnnnnnnnnnnnnnnnnnnnnnnnnnnnnnnnnnnnnnnnnnnnnnnnnnnnnnnnnnnnnnnnnnnnnnnccttggaaaccaccatcttattccacagtgcagactttttattaatggagaaaatntnnngaaagccactagatcttaaatcctatggccaga

SEQ ID NO: 30501 - DNA, 497 bp, Homo sapiens
  misc_feature (1)...(497): n = a,t,c or g
attgganacccgctnnnnnnnnnnnnnnnnnnnnnnnnnnnnnnnnnnnnnnnnnnnnnnnnnnnnnnnnnnnnnnnggcacgagactttattactttattattaattataggtggccggtgagaattataggctgatcagatgtagctggtgaggaatgcatgagttgggacctggattttccttgtggaaatggatccagtaatgtggatgcagttaaatcttggtccttggcattataatgctctaataaaaagacggttcatcaactcaatactaccttttaatctttctgcaattaggttggatttatgatttatgagtttttcttcttgctttttttgcaagccattagcattttatcaatcaccagatgtcctctttctctttttgaaaagataaggcgtaggactgtggtaagtgttggccttcaggggtctgtaaccctgattctgcctctgcggcctcggctgcccatgagatgcttggcctcctgc

SEQ ID NO: 30502 - DNA, 497 bp, Homo sapiens
  misc_feature (1)...(497): n = a,t,c or g
anattcgatnnnnnnnnnnnnnnnnnnnnnnnnnnnnnnnnnnnnnnnnnnnnnnnnnnnnnnnnnnnnnnnnnnnnnnnggcacgagcagccatgctgaggctaaactactttttagaattttgataaacaaattatgtaaatactctaaagaattgacttatccctgtgtaccagatagggccttggtgagaaacagacggtacattcaatggggacaatgaagagagtttaatgaatggacttcattatagagggatgggtggtagtgcagaatgcaaccattgaacaatagtgaagtgcccagggactagcaacagtgggatgtcatcatagcctgatggcagaaggaaaaagaggtgggaatggaattacccattctggtgagagctagaattatgggagcggggctagtggacagggaaataggactgtggatagctgaatgtagttgctccaaaaaagtgcctggtgggggtatggagtgcaacaaatac

SEQ ID NO: 30503 - DNA, 370 bp, Homo sapiens
  misc_feature (1)...(370): n = a,t,c or g
atcnnnnnnnnnnnnnnnnnnnnnnnnnnnnnnnnnnnnnnnnnnnnnnnnnnnnnnnnnnnnnnnnnnnnnggcacgagaccctgggaactcatacgctgccacttggtggcttctcctgctatctcctcatttcttaaggcaaaccnnnnnnnnnnnnnnnnnnnnnnnnnnnnnnnnnnnnnnnnnnnnnnnnnnnnncttcctcttttgctttacagttgtcatacagtgactttgctttttctctaattgtattagcatctacaggtatgcctttttttnnnnnttttttttnngaaacggagggncattttnnnannaggctgnaancnnnnncannnnnnnanntcctgnannnntnnnaacg

SEQ ID NO: 30504 - DNA, 490 bp, Homo sapiens
  misc_feature (1)...(490): n = a,t,c or g
attggattnccgttatgacnnnnnnnnnnnnnnnnnnnnnnnnnnnnnnnnnnnnnnnnnnnnnnnnnnnnnnnnnnggcacgagactatatgagaataaaaaaagaggtgacacaaagtgtttggagcaattcttgacatgtagtaagagcttaactaaatagtagtaatgacatgcacgtccaactgcctgcctgttctgtctatatccccagcatctagcatggcacctggcatatagtagctgctaattaaatgtttgctgactgttagagtgagtgtgagtttattttacaagtagaattaataccattgttcgttttcacatgtctcctccattcatatttttctttttctcttttttttttttnnnnnnnnnnnttgctgggtctntaggntgaagtgcactggtgcnatctcactnatngcaaactcctcccctggggtttaagcgatnttntgcctaagcctnccaagnacctgggacaaa

SEQ ID NO: 30505 - DNA, 495 bp, Homo sapiens
  misc_feature (1)...(495): n = a,t,c or g
atngctnnnnnnnnnnnnnnnnnnnnnnnnnnnnnnnnnnnnnnnnnnnnnnnnnnnnnnnnnnnnnnnggcacgaggtatcatgcaagtactgaggatacacaacagcaaatgtgtatcctccaaatccttccaaacaacatttgcttggaaacgggagaaaagtgatgagccacctaagtaaatcaacatagaagatttccaaggttgagatggaaaatctcaagtggatttgcaaaactggaagcacaaaacaaaaccatttgttttcagtttgtttcagaagcttaacaagacaaaataatcaatgaagactagttcccaggcacctagtggccacatgggtgagagatgcatgtggagctgggagaggaggcaggcaggatgttagcagcatcgcagcaggctttctgctggcccacttgcccaacacaaccattttggtggcgtcaggactagtgatcgggactatttacccaggcattcttangatct

SEQ ID NO: 30506 - DNA, 415 bp, Homo sapiens
  misc_feature (1)...(415): n = a,t,c or g
atttgaacnccttnnnnnnnnnnnnnnnnnnnnnnnnnnnnnnnnnnnnnnnnnnnnnnnnnnnnnnnnnnnnnnnggcacgagcggggagcagagccaggtggcccacggtaccaatggcattcatgtcaccggcgggtctatgactatcactggcaacatctacatctacaatggaccagtactggggggaccaccgggtcctggagacctcccagctacccccgaacctccataccccattcccgaagagggggaccctggccctcccgggctctctacaccccaccaggaagatggcaaggcttggcacctagcggagacagagcactgtggtgccacaccctctaacaggggcccaaggaaccaatttatcacccatgactgactgagtctgagaaaaggcagaagaagg

SEQ ID NO: 30507 - DNA, 423 bp, Homo sapiens
  misc_feature (1)...(423): n = a,t,c or g
nnnatttgaannncntttnnnnnnnnnnnnnnnnnnnnnnnnnnnnnnnnnnnnnnnnnnnnnnnnnnnnnnnnnnnnnnnnnnnnnnnnnggcacgaggtctggacaggcatcccagagatgggagctggtagtcaagaatcagagtggctccccttggcctctctccagggcctcagatccgcttcatgagcctgcgctgcaccttcccgtctgcttcccctgctgcccctcctgcatgtggaacttcagggtgtgctggcccacaccccacaggacctttcagctccagtccccaccatcagtggatgacctcactctgacttttggtttacatctccaagacagaattgtactagtttctcttcgggacagaaatccttccttgcccaaaagccagccctaccctttctccttaaacag

SEQ ID NO: 30508 - DNA, 414 bp, Homo sapiens
  misc_feature (1)...(414): n = a,t,c or g
tnnatttgannnctttgaancctttgactgattacgaatttaatacgactcnnnnnnnnnnnnnnnnnnnnnnnnnnnnnnnnnnggcacgaggagtgaacagtattcttcagtttgctatatttgataataataatagcagcagcaaacatattgtgctgtgtgataggcacttaagacnnnnnnnnnnnnnnnnnnnnnnnnnnnnnnnnnnnnnnnnnnnnnnnnnnnnnnnnnnnaggaaactgaggcacagagagatgaacttgtccatggtctactgccaggaagtggtaaatctgattttcagactggacagtctggtcccatgtacatactcttagcctctacgtggtactgcctccagtacgtcagtttctgagtctctnnnnntcagccttggcccaggtactc

SEQ ID NO: 30509 - DNA, 398 bp, Homo sapiens
  misc_feature (1)...(398): n = a,t,c or g
cacnnnnnnnnnnnnnnnnnnnnnnnnnnnnnnnnnnnnnnnnnnnnnnnnnnnnnnnnnnnnnnnnnnggcacgagcggcacgagcggcacgagcaaaactgtccaagtccctggtccaataggcccgcatcactgagctggcatcattgtctcatggctgtaaccagatctgattgatatttggccagtgagtccctttttaatataggatttgttaagatatggaagtgctctcgaactggttccagcctcctagctggacaaggagcccagggccctgctccaggggctgttcctattggtcacttagcttagctgtaggaggaccctgcttgacttcttaaaattctttcctgagtcctctttcctttctccctcccttcctttctnnntncc

SEQ ID NO: 30510 - DNA, 404 bp, Homo sapiens
  misc_feature (1)...(404): n = a,t,c or g
aacccctttgacnnnnnnnnnnnnnnnnnnnnnnnnnnnnnnnnnnnnnnnnnnnnnnnnnnnnnnnnnnggcacgaggactcatttcttttattttgatgctatgctaccttttaccttttatattgactgatgatgctgatattttggctgatcctatgatgggctaaaccttaattattgtccctatttatgtatccacttctgtagatgatcatgtgtaagtctgggctccaaaccatgcaagtggcaagactgcagaggaaaattcgtatcctcaaatcaaaatagtttacaagtatctttgaacatgatttcataggaaaaatttagtattaggtttcagagataaattctgagtcttaaatttgattgactgaggagatggacactcctaagatgga

SEQ ID NO: 30511 - DNA, 525 bp, Homo sapiens
  misc_feature (1)...(525): n = a,t,c or g
ggtnnnnnnnattgnanaccgctatgacnnnnnnnnnnnnnnnnnnnnnnnnnnnnnnnnnnnnnnnnnnnnnnnnnnnnnnnnnnggcacgagtgaaattattagacattagtaatctgttttcaaaattgtagcaccaagaagtatatccttttactttgtaatatgtggtcttgctcttcattttcccatttcagtacatctatttttcaaatagatgctttctggaaaaccagctcttactctgttctctttgaggtgataaatactcttgctttgtcacatacattttccttgcatttctggatcagagctgctttgtgtgtgtattctttgtgtgatggtttttagcataatacttgtatacttcagaggaaagataagctttgagctaaatctgtttgaagtagatctagactaatgattggcctaaaggtgaaaattacatattgnctttgatgggatggngtganttttattnnnaangnngnanaannnctttnnaannnnnnnnntnnnnaaaa

SEQ ID NO: 30512 - DNA, 541 bp, Homo sapiens
  misc_feature (1)...(541): n = a,t,c or g
gtnnnntnnnattgnanntntgganaccgnttgacnnnnnnnnnnnnnnnnnnnnnnnnnnnnnnnnnnnnnnnnnnnnnnnnnnnnnnnnnnggcacgagggcgaataacagaaagtagcaagcaaaagaactaaaaggtgggttgaaaccaaagcacagacagctcagcagccacagttgagtttaaatttattcttcaggcattaaggaaccactgaaagtttattttggaaacagggttttaacagatacctggcaggacacttttaaatgatccatctgcaggagcagctctggtccccaccaaggggtatgtggaaaaggggaagaggggcatattggttgccccaacgtctgggacaattattagaatttaggaccagaggatagaatattcaacacatgtaatgcaaaggtcagccccgcacaacaaagaaatgcccatcaacttgtatgttgagctgataccatgttggaccttcatgaaaagcttgcttaaactagganggggaccatnagcccanccaantctgttttgt

SEQ ID NO: 30513 - DNA, 543 bp, Homo sapiens
  misc_feature (1)...(543): n = a,t,c or g
gnnnnnnnaggnnttnnangttntgtgnctggaagnnanacttannngnaacnaccnnnnnnnnnnnnnnnnnnnnnnnnnnnnnnnnnnnnnnnnnnnnnnnnggcacgagcagtaggatatgagatagagaatggggcagaatctaaagagacaacagcttagagttttccacatcgaaggataccatttcatagttaagcccatgaatgacagacatatgtttaataaaaataaaatctacacctagaatacacagtgaaactgtagaaaacatcttagacaaagaaaacctcttaaaaacagcaggagtaggaatgggaatcacctaaaaagagaccgtagattacttctcaatagcgacagtggaagccaaaatataatgacaccaacagataatgaaataaccttagtgtgctgaaagaatataattgcaacctaggtttctattccagcgaaaatcctttcaagaaaaattttttagcaaacaaaaccgtttgtcccagaggacngnggancccaaagaatgggccnttttttttt

SEQ ID NO: 30514 - DNA, 521 bp, Homo sapiens
  misc_feature (1)...(521): n = a,t,c or g
tttgaannttcgantatcncatgattacnnnnnnnnnnnnnnnnnnnnnnnnnnnnnnnnnnnnnnnnnnnnnnnnnnnnggcacnnnnnnnnnnnnnnnnnnnnnnnnnnnnnnnnnnnnnnnnnnnnnnnnnnnnnnnnnnnnnnnnnnnnnnnnnnnnnnnnnnnnnnnnnnnnnnnnnnnnnnnnnnnnnnnnnnnnnnnnnnnnnnnnnnnnnnnnnnnnnnnnnnnnnnnnnnnnnnnnnnnnnnnnnnnnnnnnnnnnnnnnnnnnnnnnnnnnnngggagctatttttaaacacaacatttaccccacgcacatccacattaagcatattttaggcatgtcaaaaattagggagtatggaaagcatgttttgcttgacacacattccactgtaaagttctggtgagttaagtatcttgatacacatttacctgattgtaattgagtaccactgtttnaggcnatagganncttttgaananntttananaaatcaanatctanantagnggat

SEQ ID NO: 30515 - DNA, 506 bp, Homo sapiens
  misc_feature (1)...(506): n = a,t,c or g
tnnnnnnnnnnnattgganaccgcttgacnnnnnnnnnnnnnnnnnnnnnnnnnnnnnnnnnnnnnnnnnnnnnnnnnnnnnnnnnnggcacgagctcatttccttcatgattaggaatactactttgaaatgagagacctgtactgtatctgttaattccaaattccctggcataaagactcagtacattgtttaaagagaatgcatgaagttaactgcattaccttttggagggttcatttgtgaatttggggccaaagtaaggggagttactggtattctaatagcatcaaacaaatgaattcatttcatcttttgggtgaggtggagggaataaggtctaaccttgtcgcccatgcaggctggagggccnnnnngtgatctcagctcactgcagnctcacctgnctcaagcgatcttncgccttanncttctgantanctgnnactgnnnnnccaccnccncccaggtnatttttgaatgnncngnnnanctggnnntggcc

SEQ ID NO: 30516 - DNA, 497 bp, Homo sapiens
  misc_feature (1)...(497): n = a,t,c or g
cnnnnnnnnnnnnnnnnnnnnnnnnnnnnnnnnnnnnnnnnnnnnnnnnnnnnnnnnnnnnnnnnnnnggcacgagggaaattgtaatttgtagccaggttctccaagaaggtattaaggagtctctaagaaggtgcactccacacagttaacttacatagctcaggtagcatctacattcttaaaaagtgaacccagaataagcaaatcaaagatgctcggtgttccttcttgttttgtggagaaaggttaagattcattcctctctgtctgcaacaaataaacatggnnnnnnnnnnnnnnnnnnnnnnnnnnnnnnnnnnnnnnnnnnnnnnnnnnnnnnnnnnnnnnnnnnnnnnnnnnnnnnnnnnnnnnnnnnnnnnnnnnnnnnnnnnnnnnnnnnnnnnnnnnnnnnnnnnnnnnnnnnnnnnnnnnnnnnncatcacctgtggcccacttgttaggaanctnaggtgaaaagnccnttgatctcaaag

SEQ ID NO: 30517 - DNA, 524 bp, Homo sapiens
  misc_feature (1)...(524): n = a,t,c or g
gnnnnntnnnnttnnnnnatttgantccgtnnnnnnnnnnnnnnnnnnnnnnnnnnnnnnnnnnnnnnnnnnnnnnnnnnnnnnnnnnnnnnnnnggcacgagcataggggtggaatgtttaatggtgtcttcatggcctgggctggtatcagtacaacatatctgtgggttgatcagagctaggatacctgcaggtgtcaaattctagagccctcagcttcccatactttgtatgcctaagaaaaaagagaggctctagggttagcaatttgaaaggacttaattatagcattaaaaaaaaaatcagggagagtggaatgttgaaagcagaaatgtcaaactgtaagttgattgtttacattgcccaggcctgggacttcctttgctctgccatggtggaaacttccaaagtgactcagtttcatcttatgtatgttttagtgaaagtgatanatttccagttctcaaattctactttccccttaaggncccccnaattaatgggggacntatggcccccaat

SEQ ID NO: 30518 - DNA, 350 bp, Homo sapiens
  misc_feature (1)...(350): n = a,t,c or g
gnnnngnnnnnnttnnnntnttgnactnggaatacncgtnnnnnnnnnnnnnnnnnnnnnnnnnnnnnnnnnnnnnnnnnnnnnnnnnnnnnnnnnnnnnnnnnggcacgaggtaatttggttacttatttctaaattgttaaattgttaatagttttaaatttatgcatgttaatcttaaatgcaaatattaatgaatatgtatacttacaactttttaaattaaatgtttatatttagctgattgcttctttaaaaatctattttagaattaagggtgggaatagagttaaaacgtgctattgtttggggtgggggtaaataatatatttaaggggggnnnnnngctg

SEQ ID NO: 30519 - DNA, 306 bp, Homo sapiens
  misc_feature (1)...(306): n = a,t,c or g
tttcgantaccatttgtgacatgattacgaatttaatacnnnnnnnnnnnnnnnnnnnnnnnnnnnnnnnnnnnnnnnnnggcacgagggattttcagaaatccagtaaaacctgtgtttactggattttcagaaatacttctgggccagtacaattgatacttgaacctcagacattcactgtgtgtgcctaagagcctaggatctacgtaaagtggaatgaaaatggttgagcattttccatcacattggtggatgttgttcagttcgtggcctgaggttatgactgtaatttttttttttttt

SEQ ID NO: 30520 - DNA, 545 bp, Homo sapiens
  misc_feature (1)...(545): n = a,t,c or g
ggnnnagganntganntttttgaanccggnatgcctntngaaaaatccnnnnnnnnnnnnnnnnnnnnnnnnnnnnnnnnnnnnnnnnnnnnnggcacgagggggggtcaagaagagagagaaggaatgaaacagaggcaagtagcaaacccatggaaagtaaagaaaggctgtttttctggggacatgtatgacccagctgggaatcgggagcacagggtcatttggggagcatctgtataacaggatctcatttcttgctgggtttttcatcaagctcagtactctagtcaaatacaagttaagccctgtcttgcagggctcttgatagaactctctgagaagcagtgcagaaggagaatgattcctgcagtaagaagctgggggcaaacagactcaggctcaagtctcaactctgccactgaccttancctgatttatgtgacttttctgagcttgnttacccatctataaaatgggcacagtaagacctatgtgcttaaggttgctctggagctnttaattaattcatanctggaaaaaat

SEQ ID NO: 30521 - DNA, 525 bp, Homo sapiens
  misc_feature (1)...(525): n = a,t,c or g
tctggaaaccnttatgactgantacgaatttaatatnnnnnnnnnnnnnnnnnnnnnnnnnnnnnnnnnnnnnnnnnggcacgagttaaattgaaaagcaagctaacccctcttgataaaaatgtggattgagatcaagaagcagcttctctgctccttctggaatctccacctggtttagcctgctgcctccactcctgcctccaccatgtccatcagggtgatccagaagtcctacaaggtgtccacctttggcccccaggctttcagcagccacccctacactagtgggcccagtgcctgcaccagctccttgagcttctccctagtggggagcttcactgtgcagcttctggggtggcctgggcggaggctatggtggggccagcagtatgcgaggcatcaccaccatcacggtaaaccagagcctgctgagcccccttaacctggangtggactccaacattcangctgtatacacccaggagaaggagcagatcangacctnatcaaccaanttggccg

SEQ ID NO: 30522 - DNA, 511 bp, Homo sapiens
  misc_feature (1)...(511): n = a,t,c or g
ttganaaccgctatgacnnnnnnnnnnnnnnnnnnnnnnnnnnnnnnnnnnnnnnnnnnnnnnnnnnnnnnnnnnggcacgnnnnnnnnnnnnnnnnnnnnnnnnnnnnnnnnnnnnnnnnnnnnnnnnnnnnnnnnnnnnnnnnnnnnnnnnnnnnnnnnnnnnnnnnnnnnnnnnnnnnnnnnnnnnnnnnnnnnnnnnnnnnnnnnnnnnnnnnnnnnnnnnnnnnnnnnnnnnnnnnnnnnnnnnnnnnnnnnncagaaaatgtctgagcagtgggttctcctgtcactgacttttctgtcattgcttggcttgtaacattggatccacgtgtgtgctgtttatagaggaaccttacaacaggcagagagcttatgagactttagagttcagtaaactcagagttgcctcttagttgaccatctattaactgtttaaatttggacaagtgtctcaacctttctgaatctcagcttcttcatgtataaaataggggcagttacacctc

SEQ ID NO: 30523 - DNA, 506 bp, Homo sapiens
  misc_feature (1)...(506): n = a,t,c or g
aaatttggaaatcngnnnnnnnnnnnnnnnnnnnnnnnnnnnnnnnnnnnnnnnnnnnnnnnnnnnnnnnnnnnnnnnnnnggcacgagtaaaaaatttagtcagaaacatctgcaattgaatgaaacaagtactgctaatcatatacacagtagaaaagacacatgatctggattttctgtttgccacatccctggactcagttgcttatttgtgtaatggatgtggtcctctaaagcccctcattgtttttgattgccttctataggtgatgtggacactgtgcatcaatgtgcagtgtcttttcagaaaggacactctgctcttgaaggtgtattacatcaggttttcaaaccagccctggtgtagcagacactgcaacagatgcctcctagaaaatgctgttnnnnnnnnnnnnnnnnnnnnnnnnnnnnnnnnnnnnnnnnnnnnnnnnnnnnnnnnnnnnnnnnnnnnnnnnnnnnnnnnnnnnnnnnnnnnnnnnnnna

SEQ ID NO: 30524 - DNA, 524 bp, Homo sapiens
  misc_feature (1)...(524): n = a,t,c or g
gnnnnnaggnnntnaanataaaatntgaaanttgaaaccctttgacnnnnnnnnnnnnnnnnnnnnnnnnnnnnnnnnnnnnnnnnnnnnnnnnnnnnnnnnnnggcacgagagaattaattggacctgaacctacagtatctgtaaggtatgtacaaacagggaaaggaaggaattaagagtgacttttgaagggtagacacacaaggtcgctattgtgtgattttgtgnnnnnnnnnnnnnnnnnnnnnnnnnnnnnnnnnnnnnnnnnnnnnnnnnnnnnnnnnnnnncagggcctggaggagaggggatgggagtgactgcgaatagttaagggttgtctttttggggtgataaaaaatgtcctggaatcagtagccatcatggttccatgccttgtggatatactaaaaaccacggagttgtatactttnnnnnnnnnnnnnnnnnnnnnnnnnnnnnnnnnnnnnnnnnntaaanaataaaagaatggtccgggtgcagtggctcacacctgtctcca

SEQ ID NO: 30525 - DNA, 498 bp, Homo sapiens
  misc_feature (1)...(498): n = a,t,c or g
tnnnntttgaaanttgaanacngtttgacnnnnnnnnnnnnnnnnnnnnnnnnnnnnnnnnnnnnnnnnnnnnnnnnnnnnnnnnnnggcacgagggacatggttcaagcgctgcttagctgccaggcagatgtcaatctgcaggaccacgatggatcctcggccctcatgctggcctgtcaccatggcaacgtggacctggtgcggctgctcctggcacacccagcctgcgacagcagcctgactgacaaggctggccgcacagctttgtccatcgctctgaagtcacccacccatatggaaattgctgggcttctgagagcccacgcggagcagggcaggtccctggggctgtaggggctgcagaagaactggccgtggggaacaaaagccttcttctctggactcctccctcgcccttgaagagggcagaggtcacaggccagagagccacccttctagagaagaaactatgtcaaatatgcacatacattcctg

SEQ ID NO: 30526 - DNA, 469 bp, Homo sapiens
  misc_feature (1)...(469): n = a,t,c or g
nnnnnnnngnnnnnnttnnnnnnnnnnntntgganattcnnnnnnnnnnnnnnnnnnnnnnnnnnnnnnnnnnnnnnnnnnnnnnnnnnnnnnnnnnnnnnnnnnnggcacgagcctgaacggcgccttggggctagcgagaaagatgcagaggatgtaaaaaagcacccatttttccggctaattgattggagcgctctgatggacaaaaaagtaaagccaccatttatacctaccataagaggacgagaagatgttagtaattttgatgatgaatttacctcagaagcacctattctgactccacctcgagaaccaaggatactttcggaagaggagcaggaaatgttcagagattttgactacattgctgattggtgttaagttgctagacactgcgaaaccaagctgactcacaagaagacctcttaaaaatagcaacccttcatttgctctctgtgccaccaat

SEQ ID NO: 30527 - DNA, 438 bp, Homo sapiens
  misc_feature (1)...(438): n = a,t,c or g
tgnanatncgcttcacnnnnnnnnnnnnnnnnnnnnnnnnnnnnnnnnnnnnnnnnnnnnnnnnnnnnnnnnnnggcacgagaaacaaacaaaaaataagtaaaaaatacaaaaaaattaaaaatgttctgttttcatacgcacatgtctgcctcactcatagttttatttttataaattcaagcacacagtagagactctctttctgactttatttgcagctacttttagaaaaaagaatctgactggctcagcacagccaatggttttgcttccctagtgccaagtgttcattcctgatccaagtagctgtggtcaagggagcaggatcacaggggatgagcatgtctccagggccacactgctgggtccaagtgggggaagttttcagaagagaggggtgtagattggacagtatcataaaatgaatgtagtaca

SEQ ID NO: 30528 - DNA, 471 bp, Homo sapiens
  misc_feature (1)...(471): n = a,t,c or g
gnnnnngnngnnnnttnnnnttnnnnntntganttncaatacncnnnnnnnnnnnnnnnnnnnnnnnnnnnnnnnnnnnnnnnnnnnnnnnnnnnnnnnnnnnggcacgagatagattagatgctgttgttccctaaagctgttgagaacacagcacctgccttcaaggaactcagaaacaaggcagagtgcattgcgtttttatctatcaccagcaaaggagtacaaaacatcagaagttttcccatgcccaccctaatttttctggaaaaatacagaggtgaaaagaaaataagtaaagctcatctcttctccatatgtccctattttgtatcacttttgtatgtgtgtgattgtttttctaaaccaaactattagaagccaggtcatggaataggaagaaagcctgttaagtcaggcgcataaatgtagaatgttctgatccaagagagagtgtccttcataaaggca

SEQ ID NO: 30529 - DNA, 492 bp, Homo sapiens
  misc_feature (1)...(492): n = a,t,c or g
gnnnnnnncgaggnttnnnnttntnnnatttgnanncctttggacancnnnnnnnnnnnnnnnnnnnnnnnnnnnnnnnnnnnnnnnnnnnnnnnnnnnnnnnnnnnnnnnnnnnggcacgagcggcgtggaacaagtgaacggagctcagaggagcttgtgtaaggtgtgaagtggtaagaattgggaggaggatcaccagcagcatgaaggggaaggaggcagagtcggctctctcagagggacctggcaggtctgaatctgagaatcacagaacttttgaacttgaggaactcagcggccatggtgcccttcccagcttagtcacgtactctcagttaacctctctgagcctcccttttctccatgtaaaacctatggtccatttgaatcatgtgacgatactctgtatcctgtgtattgttgcataaaatgttaaatgattatttttattgttcatcttaagaaactgcagactaagaaagtaaaaaa

SEQ ID NO: 30530 - DNA, 325 bp, Homo sapiens
  misc_feature (1)...(325): n = a,t,c or g
tatcggganaccctttnnnnnnnnnnnnnnnnnnnnnnnnnnnnnnnnnnnnnnnnnnnnnnnnnnnnnnnnnnnnnnnggcacgagactttttctcctggtctgtatttgatctataattatcaaaaggactaaaatctggtggcagatatttattacatttgtaataaaaatagcttacatttgtatttcacattagagtttattaagtacttccacgtgcattctgtgttattttacagctatcctgtgaagtcagaaaaatctctttatcagatgtggttaagatcaaagagtggctggttaactacaaaaaaaaaaaaaa

SEQ ID NO: 30531 - DNA, 471 bp, Homo sapiens
  misc_feature (1)...(471): n = a,t,c or g
tnnnngnnnnntnattgnanaccnnttnnnnnnnnnnnnnnnnnnnnnnnnnnnnnnnnnnnnnnnnnnnnnnnnnnnnnnnnnnnnnnnggcacgaggtagcacttcataggcaagcaggttaacctgcatccacttttcagccagttggctttccgagaataggtgcttagggttacttgaatgagaaggtagaaggagggacagagggctggataagccttgctgctgcctaataaatagccatgggagggcccaggctcatattactcatcctggtgtttccctgcaagctgcatggagcagcctatggcaaaggcatctacctgagccccatctccagtatttcctttggatactcatgtaagaaatattctgtggccaccttgactctatttacattgcctccatttgtgaatacatgatttgtgctgctgttcctccctcattatggatacttggctgtgtcaa

SEQ ID NO: 30532 - DNA, 465 bp, Homo sapiens
  misc_feature (1)...(465): n = a,t,c or g
tnnnnnnnnnnnattggaaacnnttgactgattacgaatttaatacgactcnnnnnnnnnnnnnnnnnnnnnnnnnnnnnnnnnnggcacgagagttcaagtaatattggacattgctgttttaacgaatgtgttttgagtgtgaaggaacaaaatactgtaggattagatttatgagggtaagccaagtaaaatgtggatgcccagtagtaagacctttctactgtatcaaacatgaattagacatgttgaaagcctcttaaatttattaaataagaatatgattgggaaagggtgaaggctctgtaaactgtaaagcccctgtaaatgtctccttggtatactacactgattggtttcttaagctacttagcacccatatgactaccattgtgttttgtgtgtgtggaagaggacatagctgtgggggtcacattactaacatggcagatgggggcagtggaa

SEQ ID NO: 30533 - DNA, 468 bp, Homo sapiens
  misc_feature (1)...(468): n = a,t,c or g
tnnnntnnnnnnattgnaaaccntnnnnnnnnnnnnnnnnnnnnnnnnnnnnnnnnnnnnnnnnnnnnnnnnnnnnnnnnnnnnnnnggcacgaggttttcatgatacctaaatgagggagcaaaagtatatttagtatatgacagtatactgtcatatactactgaattttcataaggttctaggagcctttttttttgttctgggaaagggagggaggaagaggatggcactgttacccaaatgtgagttagttgattcagaagagtaaagaatagtccaatagtccagtagttaaaaatttatgtctgtaatccagatttaaataccagtttatcttctagctttataaacagtcttaatgagaagtaggggacaaaaaagaagcaggattgcccttaggttagagaatagaaatatctacttggcttaacgtttttatgaaagatgtccagcaaaactgtggtg

SEQ ID NO: 30534 - DNA, 477 bp, Homo sapiens
  misc_feature (1)...(477): n = a,t,c or g
gnnnnnnnnnnnnnttnntttggnnnncctntggannnnnnnnnnnnnnnnnnnnnnnnnnnnnnnnnnnnnnnnnnnnnnnnnnnnnnnnnnnnnnnnnnnnnnnnggcacgagggccaggcctccactctagacaggaagtctagtctagagtctatatggtcccagccaggactatgtagccatttgggagggagaactctatgttcttcccggcaaaaacgtgtgggcctggccggccacgcttcgctttggaggggtgcaggtgacttgtgtcttagagctgacgcagattgttgcgagatcattgcggagaggcaggcctgcagcgtgacctgctgcgggtccggcccctctcccttttccagagccctggtcagcatcccagagcttcgtaaccccttgactcctgtcatgggaatggatattgcagttaacaaggcggccgcggggtggggagtgaaagagtctgaccc

SEQ ID NO: 30535 - DNA, 464 bp, Homo sapiens
  misc_feature (1)...(464): n = a,t,c or g
tnnnntnnnnnatttgannccntttgactgcnnnnnnnnnnnnnnnnnnnnnnnnnnnnnnnnnnnnnnnnnnnnnnnnnnnnnnnggcacgaggcaaaatctggcccattggaaaggcagctatgtatcagtgtgggcatgagaagaataatggtaaacctttcctaggatcaccatcattatattttgttaagtaaatatatgtatatattttatgtttttgtaatgacagaaactcacttntnttccccagctgaantnaanntcctggttnaaacngancntcctggcttaacctcccaaatgcttgggaatacngattgtgagcccctggncccagtcaagggaatattttttaatgtaagggccaacacataagactgccaggaagataggctcccagggttgtatttagtcacagaacttgctctatttctgatcatggcaagtgggtgaactcttt

SEQ ID NO: 30536 - DNA, 541 bp, Homo sapiens
  misc_feature (1)...(541): n = a,t,c or g
gagggnnntnnnnattgaacccttgacnnnnnnnnnnnnnnnnnnnnnnnnnnnnnnnnnnnnnnnnnnnnnnnnnnnnnnnnnnggcacgaggtagtcactaccgaaactaccaaacagtttagtcactaaacaaaaactaaatacctgaggagtatatctgggttcagagtgaggaccatttaatagcgagattagtactgttcatctgaaaaagaacaaagcatatcatgggattctgagaacctcttttagaagtagttatttctgttcattttttggtagcattctgcttattcatttaactttttaaatccaaataacacatccagtactcctcttcttgtatattggtagttcaaatggatattatctcttacacaggtttgtaaagtttttgaagggctttaatgaaagtgaaaggtaataggttttgtttaaatgccagagtgaaaatttttaaagattatcttttacttatagtcatggagatgtccttggcagtatgatataagttgngtttaagaagtcatactcttgg

SEQ ID NO: 30537 - DNA, 523 bp, Homo sapiens
  misc_feature (1)...(523): n = a,t,c or g
nnnnnnnnnnnnnnnnnnnnnnnnnnnnnnnnnnnnnnnnnnnnnnnnnnnnnnnnnnnnnnnnnnnnnnnnggcacgaggagacaacatactgagcagtaccccaccccctgccctgcacctcccgccagccgttgctctccccaggggtaactgctctcctggcttgtatcagtgtctaatggttttgcccgcttgtgaactccacatctgtgcagttgtttggcatgtatgattttgtctggcatttttcccatgacatattagtgtgactttaagagtaagttgctggaaacttcaggaccagtcatggcagaactgggctacagactcagagcagggtcccccctgctcaccgtcctggccgtcacaatgttcacgtgtgagcctgccttggcctggagtgtcggggcatcctgagaaataaagttggatagaaacgccccatatnnnnnnnnnnnnnnnnnnnnnnnnnnnnnnnnnnnnnnnnnnnnnnnnnnnnnnnnnnnnnnacttgaggcca

SEQ ID NO: 30538 - DNA, 541 bp, Homo sapiens
  misc_feature (1)...(541): n = a,t,c or g
aggaggagcttatgtttttgacatgtntntcttnatgngaataccctnnnnnnnnnnnnnnnnnnnnnnnnnnnnnnnnnnnnnnnggcacgagcagcactgaggcttacattttaacctgagtttgggagaggaggaattttaaaccagagcctgtagattctaaagcaaaatattctgggtctcctgcttgtagaatggttgtgagtgtgacttccnnnnnnnnnnnnnnnnnnnnnnnnnnnnnnnnnnnnnnnnnnnnnnnnnnnnnnnnnnnnnnnnnnnnnnnnnnnnnnnnnnnnnnnnnnnnnnnnnnnnnnnnnnnnnnnnnnnnnnnnnnnnnnnnnnnnnnnnnnnnnnnnnnnnnnnnnnnnnnnnnnnnnnnnnnnnnnnnnnnnnnnnnnnnnnnnnnnnnnnnnnnnnnnnnatgcaagcagggcttaaaaccnnnnnnnnnnnnnnnnnnnnnnnnnnnnnnnnnnnnnnnnnnnnnncctatgtaaccaacctgcatgttcctgatatggatcttgcaacttaa

SEQ ID NO: 30539 - DNA, 540 bp, Homo sapiens
  misc_feature (1)...(540): n = a,t,c or g
gtnnnnnnnnntttganncccttttganacagcttgacnnnnnnnnnnnnnnnnnnnnnnnnnnnnnnnnnnnnnnnnnnnnnnnnnnnnnnnnnnggcacgagttggaatacgttcaatatccatgggctaagagtcagcaagagatgtacacagacttttaatgtagaatannnnnnnnnnnnnnnnnnnnnnnnnnnnnnnnnnnnnnnnnnnnnnnnnnnnnnnnnnnnnnnnnnnnnnnnnnnnnnnnnnnnnnnnnnnnnnnnnnnnnnnnnnnnnnnnnnnnnnnnnnnnnnnnnnnnnnnnnnnnnnnnnnnnngccttctagttgaaaaggttttacatgtcctatttcatgacttgtcatttggtgtaccagagttttgttagttcaaatcgagaaagacgtttcctaacatgacatatgcgttagtaaggttttctttggagggggaactctgtatatgctaggtgtttcttaaactttcccaagagtttgggtcaaatttctgcttatggctgggcgtggtggtcatc

SEQ ID NO: 30540 - DNA, 529 bp, Homo sapiens
  misc_feature (1)...(529): n = a,t,c or g
ttgacanccnatttgaatancgnnnnnnnnnnnnnnnnnnnnnnnnnnnnnnnnnnnnnnnnnnnnnnnnnnnnnnnnnnnnnnnnnnggcacgagcagaagagtgacaaaattcattcagaccgcacatgttagaggcagggaatgaagaaggtactgtgggccatggccacacctgatgcgtttttggtgggcctacttggtgcagtgtgctgtccagagagacctgctgacccagtctgggacaggcacagtgggagctgccacagtgccccttgctggccgccctcaggagggggcctctggaccgtcagtgtggcgtaagcagtgggtctgcttcagggaggcagcctcttgactttgtcacaacggttgcactgaagatggcccccacaagcccagttgtgaatatcaaggtgaccctgccctggctgggagctcccctggggctntggaacctgaagccctgagaaggagagcttngaangagctgagctctttacttgnggctttncatcttggctctgca

SEQ ID NO: 30541 - DNA, 545 bp, Homo sapiens
  misc_feature (1)...(545): n = a,t,c or g
gnagtgnnnnnnnnnntttganaccgctntgacatgattacgaatttaatacnnnnnnnnnnnnnnnnnnnnnnnnnnnnnnnnnnnnnnnnnggcacgagggaagacaaatgtgagacagagtgcagaaccacagcaaaagaactggacagcttcctcggctgccaattcaatactgattgattgacggagatcagcaaatgcatgtacttccaacagcttaagcctttacctctcccctgctatgtttggttctaataaataataacaaaccttctcaagatatgaaataccccacagttaaagtcaaactcaaaagattctgatattatgttcatttgtttcaaactttttgcaccaaaatcaaaaaaaaaatgagtcattaatcacaaagaaaaaaatgtttaacctcacagtacaaaaacctgacacgtcatcacctcaaccaagagatcaaagttcacgttcaccagaagaagacatatctatatcacatacctcctcatatgatgcactgagaaggacatgatttcacccctgggcta

SEQ ID NO: 30542 - DNA, 501 bp, Homo sapiens
  misc_feature (1)...(501): n = a,t,c or g
ccctttggataaccgcttgacnnnnnnnnnnnnnnnnnnnnnnnnnnnnnnnnnnnnnnnnnnnnnnnnnnnnnnnnnnggcacgagcctgagttaaattttagaaagcttatatatccctataagggtggtcagaatattgacccaagtctccctttatttgcataaggtcctataatgagaaggaaacttgaaccctagtggcatcatctccattgggcatttcctgtaggggtaagagtgaaattgggtaagtggaaagttttagagatggtggaactggaggagttgatggcttggttggaggaagccccaaataagaaggcttccagggaaggaataggcagcaatcttggnnnnnnnnnnnnnnnnnnnnnnnnnnnnnnnnnnnnnnnnnnnnnnnnnnnnnnnnnnnnnnnnnnnnnnnnnnnnnnnnnnnnnnnnnnnnnnnnnnnnnnnnnnnnnnnnnnnnnnnnnggaaatagcattancatcaaccag

SEQ ID NO: 30543 - DNA, 539 bp, Homo sapiens
  misc_feature (1)...(539): n = a,t,c or g
gagntgnntnnnnnattgaaacccttgacnnnnnnnnnnnnnnnnnnnnnnnnnnnnnnnnnnnnnnnnnnnnnnnnnnnnnnnnnnggcacgagtcnnnnnnnnnnnnnnnnnnnnnnnnnnnnnnnnnnnnnnnnnnnnnnnnnnnnnnnnnnnnnnnnnnngttaataaaaaaaaatgcnnnnnnnnnnnnnnnnnnnnnnnnnnnnnnnnnnnnnnnnnnnnnnnnnnnnnnnnnnnnnnnnnnnnnnnnnnnnnnnnnnnnnnnnnnnnnnnnnnnnnnnnnnnnnnnnnnnnnnnnnnnnnnnnnnnnnnnnnnnnnnnnnnnnnnnnnnnnnnnnnnnnnnnnnnnnnnnnnnnnnnnnnnnnnnnnnnnnnnnaactactccttgtgatttctggttgcttctgcagcagagaccatgggcaaaatcccggtgctgaaataaacatatgccctgatgtattantggacacgttggtaatctactttgnatggcttggtttggttggtttgaaaatcacataatacagccct

SEQ ID NO: 30544 - DNA, 541 bp, Homo sapiens
  misc_feature (1)...(541): n = a,t,c or g
ccgctnnnnnnnnnnnnnnnnnnnnnnnnnnnnnnnnnnnnnnnnnnnnnnnnnnnnnnnnnnnnnnnggcacgaggttgattgtcaccattgtggttattatgctagttctggggttggctgtggccttctgctgtctccactttgatctgccctggtatctcaggatgctaggtcaatgcacacaaacatggcacagggttaggaaaacaacccaagaacaactcaagagaaatgtccgattccacgcatttatttcatacagtgaacatgattctctgtgggtgaagaatgaattgatccccaatctagagaaggaagatggttctatcttgatttgcctttatgaaagctactttgaccctggcaaaagcattagtgaaaatattgtaagcttcattgagaaaagcttaagtccatctttgtttgtctcccaactttgtccagaatgagtggtgccattatgaattctactttgcccaccacaatctcttccatgaaaattctgatcacataattcttatcttactggaacccattc

SEQ ID NO: 30545 - DNA, 542 bp, Homo sapiens
  misc_feature (1)...(542): n = a,t,c or g
cnnnnnnnnnnnnnnnnnnnnnnnnnnnnnnnnnnnnnnnnnnnnnnnnnnnnnnnnnnnnnnnnnnnggcacgagcccttgaactaagtttatagaaatatgtatgggtgaacgtgtcatatttaacaggaaagttaatagaaatatccacaacctcacagcattttttttaatttgagttggtatccaaccaaataccataaaaacacaataatgaagaccatctcatatacaaaagatgcaaaatttaatggggggaaaaaaaaaccctttcaaataaccatgcagaagccctagcaaggcagttattattcccagagcatcgccactatcccatcctccagaactatgtttattatgacttattagattttggagcaattgtcctctgaagagcacaaaatgctgcaaaatattataacttttaaaactgtgcaaaaactttacgaggaacacttctaaagctaaagtatcgctgaaaattgccagagaagatggcagcaagagataaggaagtggatggaaagaaagacagcagggg

SEQ ID NO: 30546 - DNA, 525 bp, Homo sapiens
  misc_feature (1)...(525): n = a,t,c or g
nnnnnnnnnnnnnnnnnnnnnnnnnnnnnnnnnnnnnnnnnnnnnnnnnnnnnnnnnnnnnnnnnnnnnnnggcacgagggggttctgagggctagtctctctgagaatgatccccatttctgtctcattgcagaaggagctgagcctgccacgccgaggacgtgggtgagttcacctgggactggcgggctgggtgggccccagtggtcttggaagtggatatttcagcaacagccactgaattgtgaatgtatttaataattacagcaacacatctcatgttcattcttgccctcgtgtttgcaaagtgcttcacaagcacctggcctctcaccacaaacatgggaggccatgccagtttgcaaatgannnnnntgaggtgcaaaggggtttcatcaccagctaangacactcanctgggaangaganaaacttgtctggaatccanagtncanatgntgaatttanctgangtgnnttnnaactgnntngaancctctcatnannnnnanntnnctnctttt

SEQ ID NO: 30547 - DNA, 502 bp, Homo sapiens
  misc_feature (1)...(502): n = a,t,c or g
cnnntttnnnnnnnnnnnnnnnnnnnnnnnnnnnnnnnnnnnnnnnnnnnnnnnnnnnnnnnnnnnnnnnnnnnnnnnnnggcacgagaaaacttctagaaaatagtttattaaaacattcnnnnnnnnnnnnnnnnnnnnnnnnnnnnnnnnnnnnnnnnnnnnnnnnnnnnnnnnnnnnnnnnnnnnnnnnnnnnnnnnnnnnnnnnnnnnnnnnnnnnnnnnnnnnnnnnnnnnnnnnnnnnnnnnnnnnnnnnnnnnnnnnnnnnnnnnnnnnnnnnnnnnnnnnnnnnnnnnnnnnnnnnnnnnnnnnnnnnnnnnnnnnnnnnnnnnnnnnnnnnnnnnnnnnnnnnnnnnnnnnnnnnnnnnnnnnnnnnnnnnnnnnnnnnnnnnnnnnnnnnnnnnnnnnnnnnnggaattcttgtgangccnggcacngtggttnacgcctgcnnncccagnnntttgngangncnnggnngcannnnacttgnngcnggag

SEQ ID NO: 30548 - DNA, 466 bp, Homo sapiens
  misc_feature (1)...(466): n = a,t,c or g
ttggnnnnccnnnttgganaccgctatgacnnnnnnnnnnnnnnnnnnnnnnnnnnnnnnnnnnnnnnnnnnnnnnnnnnnnnnnnnnggcacgaggtaggagtgaagccagctgcaggtaggctgccctgggctcattttctgcctgtctccttgtcccgtggcaagagtgtcctcctggagtccagacccagctacaggcccagcccggccactcaatgctgccagagtgcatttccctcaccttaaaataaggaagagnnnnnnnnnnnnnnnnnnnnnnnnnnnnnnnnnnnnnnnnnnnnnnnnnnnnnnnnnnnnnnnnnnnnnnnnnnnnnnnnnnnnnnnnnnnnnnnnnnnnnnnnnnnnnnnnnnnnnnnnnnnnnnnnnnnnnnnnnnnnnnnnnnnngnntgcacctgtnatcccanctattccnnangctgnngnnnnanannnnntancctg

SEQ ID NO: 30549 - DNA, 422 bp, Homo sapiens
  misc_feature (1)...(422): n = a,t,c or g
tttggaancccctnngtttggataccnnnnnnnnnnnnnnnnnnnnnnnnnnnnnnnnnnnnnnnnnnnnnnnnnnnnnnnnnnnnnnnnnnnggcacgaggggagaatgcgatgaacaaagacctactagtgggaagctgagaaactctgtgagggctcctgacttggagcaggatgggtggattgcggggagagtgaccttgcccctggcctagtagggcactatgagctgaggaaaatggccatgaggctttgcctggcctaggtttnnnnnanttntnatnntcccnattgcttncntntcngncnatnttnccntccccnnttccttctttntnnntnttntncgnaccnnnttttgtnccnttcccaccgtnnnnctngnctccngngnnnnnncnnncttcngnnctnnnntccc

SEQ ID NO: 30550 - DNA, 488 bp, Homo sapiens
  misc_feature (1)...(488): n = a,t,c or g
ttggannaccnnnnnnnnnnnnnnnnnnnnnnnnnnnnnnnnnnnnnnnnnnnnnnnnnnnnnnnnnnnnnnnnnnnnggcacgagaactggaatagtgtggaccttaaatggagtaataatggcttcctcatgggaagagaagaagagacagagacacacaggggagaaggccacatgagaatgaaggaagagaatggaatgatgtggccacaagccaaggatttccagcaaccaccagaagccannnnnnnnnnngaaggattcatccctggagacttcnnagggagcncagccctgcccatttcagacatccncttccataactggtnnaganngactntctgtngcctnacntncntttncnnnnctnccncggcntnnccnctntcnnnctttnctctncnnctngngcntncntnngnttgnttcgnttgtntccncgnncgnnntnctttcntctnncatnnttnatccntttngncgccc

SEQ ID NO: 30551 - DNA, 143 bp, Homo sapiens
  misc_feature (1)...(143): n = a,t,c or g
tttgnanaccnnnnnnnnnnnnnnnnnnnnnnnnnnnnnnnnnnnnnnnnnnnnnnnnnnnnnnnnnnnnnnnnnnnggcacgagcaaacatggcagaatagtcacaatgtgtcaggtatttattgaactttttttttttttt

SEQ ID NO: 30552 - DNA, 537 bp, Homo sapiens
  misc_feature (1)...(537): n = a,t,c or g
gtnnnnnnnnattganacntntatgacnnnnnnnnnnnnnnnnnnnnnnnnnnnnnnnnnnnnnnnnnnnnnnnnnnnnnnnnnnggcacgagcggcacgaggtgagacgttctctttggtggtcaacccggatgggtgacaggctggatggccttgtgaacttgagctcagtgtatgctaggcaacaattctcccgctccagaccctcaccgaccacctgtcctgggaccaggctgggaggggagtgtggcagggaggaggaagaggaaggtgagaatgagtagaacagttttgtattctactccctacaagccattttgaacttctgccctcaccggactctgggctgtgactggggcaccaaactcagcacatgagtctcccctagctctcgtggggagagggatgctatttattcagtttggggcaggagggagaggagggaaagtatttctgaccctgatgccaacagccgggtggctgtccaacaggattgcaggggacacagggaagcactgcccaccctgctggttgcc

SEQ ID NO: 30553 - DNA, 518 bp, Homo sapiens
  misc_feature (1)...(518): n = a,t,c or g
gnnnnnnnnnnnttnnnnnnnnnnntctgannaccgnnnnnnnnnnnnnnnnnnnnnnnnnnnnnnnnnnnnnnnnnnnnnnnnnnnnnnnnnnnnnnnnnnggcacgagatccaaaacagaaaaaccacactaaagcaattataattttttaannnnnnnnnnnnnnnnnnnnnnnnnnnnnnnnnnnnnnnnnnnnnnnnnnnnnnnnnnnnnnnnnnnnnnnnnnnnnnnnnnnnnnnnnnnnnnnnnnnnnnnnnnnnnnnnnnnnnnnnnnnnnnnnnnnnnnnnnnnnnnnnnnnnnnnnnnnnnnnnnnnnnnnnnnnnnnnnnnnnnnnnnnnnnnnnnnnnnnnnnnnnnnnnnnnnnnnnnnnnnnnnnnnnnnnnnnnnnnnnnnnnnnnnnnnnnnnnnnnnnnnnnnnnnnnnnnnnnnnnnnnnnnnnnnnnnnnnnnnnnnnnnnnnnngcaattataattaaattggtgaaaactagtggtagagcattttgaaagccacta

SEQ ID NO: 30554 - DNA, 512 bp, Homo sapiens
  misc_feature (1)...(512): n = a,t,c or g
gnnnnnnnnnnntnnnnnnttgnnattgaanaccgtnnnnnnnnnnnnnnnnnnnnnnnnnnnnnnnnnnnnnnnnnnnnnnnnnnnnnnnnnnnnnnnnnggcacgagcggcacgagaannnnnnnnnnnnnnnnnnnnnnnnnnnnnnnnnnnnnnnnnnnnnnnnnnnnnnnnnnnnnnnnnnnnnnnnnnnnnnnnnnnnnnnnnnnnnnnnnnnnnnnnnnnnnnnnnnnnnnnnnnnnnnnnnnnnnnnnnnnnnnnnnnnnnnnnnnnnnnnnnnnnnnnncaagcaaacaaaaaaccgctgtggccatgtaactcagaagtttgcccaccatgccttcgctgtgactgtatgctgaggcgtggggcagctggaggttagagcagatcccacaactggggcaggaacagtggcgtgctggaactggtccagcagcgtatgagagcagattgtcacactttcaggaaattgggggccggntattacagacattattaacaattaag

SEQ ID NO: 30555 - DNA, 519 bp, Homo sapiens
  misc_feature (1)...(519): n = a,t,c or g
gnnnnnnnnnnnttnnnnnntttgnnattngaanacnnnnnnnnnnnnnnnnnnnnnnnnnnnnnnnnnnnnnnnnnnnnnnnnnnnnnnnnnnnnnnnnnnnnnggcacgagggcgtggcaagacattctcattacctacgaaagggnnnnnnnnnnnnnnnnnnnnnnnnnnnnnnnnnnnnnnnaattaacagcaggcttgaaggtactgtccccaagttgttacatcctgttttgatggaatttttcagacatctttattcttcacaaaaccccataaatattcagcatgccacatagaagaaatgtgacaagaaattgctgaagaaagaatcctcaggccaatactagatcagaccacgcggtttaacaacagagtgggaagagacaggatgggggtttggcagaggcccattctgctccacgctccagtccacctcaggagttgtatattcaggtctgaccacctgcaggcactgaacacccagcaacacgtccatcaaaatgaccaagatgg

SEQ ID NO: 30556 - DNA, 503 bp, Homo sapiens
  misc_feature (1)...(503): n = a,t,c or g
tnnnnnnttgnntttgaanaccgtnnnnnnnnnnnnnnnnnnnnnnnnnnnnnnnnnnnnnnnnnnnnnnnnnnnnnnnnnnnnnnnnnggcacgagggcgtcgtgataacacagactttcaaggaccaaggattggaggttttaaagcaggaaacagcagttgttgaaaacgtccccattttgggactttatcagattccagctgagggtggaggccggattgtactgtatggggactccaattgcttggatgacagtcaccgacagaaggactgcttttggcttctggatgccctcctccagtacacatcgtatggggtgacaccgcctagcctcagtcactctgggaaccgccagcgccctcccagtggagcaggctcagtcactccagagaggatggaaggaaaccatcttcatcggtactccaaggttctggaggcccatttgggagacccaaaacctngggnctctaccagcctgtccacgcttgcttgggccaagc

SEQ ID NO: 30557 - DNA, 487 bp, Homo sapiens
  misc_feature (1)...(487): n = a,t,c or g
aanaccngtnnnnnnnnnnnnnnnnnnnnnnnnnnnnnnnnnnnnnnnnnnnnnnnnnnnnnnnnnnnnnnnnnggcacgaggtgggaagcaaggggacattattcctcatttctgcatttcttttaggtttatattttcaatctccttctccctgtgtccacataagagcccatatatgagatcctccttgatttgagactctctgattctagattcttatctggaaaaatccttccaatatggactaatcccaagaatggaaatgtcttttgcgagatcttctggtccattgctgtattagggaggcagcattctggaacacaggctttggttagaagctccactctgctgcttactagcttgtgttcatgaacaaattatttaaatttttttgagctggctaggcatctgaggtgcagtattaacacttacttcacatatttattgtgagttttagagaaaattaggaagaaaaaatcactctg

SEQ ID NO: 30558 - DNA, 485 bp, Homo sapiens
  misc_feature (1)...(485): n = a,t,c or g
ganttcgatnacnnnnnnnnnnnnnnnnnnnnnnnnnnnnnnnnnnnnnnnnnnnnnnnnnnnnnnnnnnnnnnnnnnnnnggcacgagctgtgaaactagagtttttttatttcattttttggtattataaacagttctatgtcaaacatccctgtagctatgttttgtgcacatgagtgacgaattccttatgacaaactcctaaaagtgaaatttctgggtcaaaaagacaaaattgaaggagatatatatatctaaatggaggcttctacttataaagctcacttcttgcacacttacaaatatttagtacttttttttagtttgaatttcttctgagttgaaccctttttcagatttattgaccatttgtatttcttctttgctaaactgtctacaggttcacatcctttgcctctctttctaatgggtatttgtcgttgncttcttttggatctccaaacattttcccactttaaaaag

SEQ ID NO: 30559 - DNA, 504 bp, Homo sapiens
  misc_feature (1)...(504): n = a,t,c or g
tnnnnnnnnnnnnatttgannnnnnnnnnnnnnnnnnnnnnnnnnnnnnnnnnnnnnnnnnnnnnnnnnnnnnnnnnnnnnnnnnnnnnnnggcacgagtgaaccccagcttgaagctagtcagtcagaagttctggaggcctggacttgtaaatttcactgaagagggcaannnnnnnnnnnnnnnnnnnnnnnnnnnnnnnnnnnnnnnnnnnnnnnnnnnnnnnnnnnnnnnnnnnttggaggacacccagttggtggctgctgcagaactgattgattgcttgatgatggggagaacctcctcatacctnnnnnnnnnnnnnnnnnnnnnnnnnnnnnnnttgttgtgttggtctgagagcagaggaaaaacatggtttaagcgtttacaaacaaatacctctttgataaagttttatcattttggttttggtaatatagaatcagtcataaaaatcttttaaatgtaactaaataccacactgtcttataagaaattga

SEQ ID NO: 30560 - DNA, 435 bp, Homo sapiens
  misc_feature (1)...(435): n = a,t,c or g
gnnnnntgnnnnnnttnnatttganancnncngaaaaccttttgannnnnnnnnnnnnnnnnnnnnnnnnnnnnnnnnnnnnnnnnnnnnnnnnnnnnnnnnnnggcacgagactggggtgagcaatgaacctggactcacggaacactgggctctgtgaccgtttccctgaatggcctaagctgttgcctcctgtcacttctctgaggtcattttccaaatgcgcacgggcatagagaacccatccactctgcctacttcccagggatgccttgagcactgaggatacctgggggacatgaagtcgcactgtcctgggggtcgggacaccccagccagggacagagcatggcacagggacatcgaggcccagtgagccgaccctttgtcctcctctctgagagcactagtccccagcaggcctcagggtgctga

SEQ ID NO: 30561 - DNA, 440 bp, Homo sapiens
  misc_feature (1)...(440): n = a,t,c or g
gnnnnnnngnnnnngnnnnnnttnntttgannnntntgaaaccnttgacnnnnnnnnnnnnnnnnnnnnnnnnnnnnnnnnnnnnnnnnnnnnnnnnnnnnnnnnnnggcacgagcaaaacttgattctaaagtttatatgaaagaacgaaaatgaaacttttcacaaaaattatgaaaatctgttcatgagggaggtattagtgctgtgaaatattaaagtgtatgttgaagccaaaccaatttgagcatcagatcactggcacagagctgacagcactgaagtagcctcatctatagaaatgttttatgtggtcaacagtggtatatgtgatgaaaatagtgaattccttagtaaatggtattgggtgaactgagtagccattgggaaaaaaagagaactatcttgctatctcactccagcctgggcgacagagcgag

SEQ ID NO: 30562 - DNA, 471 bp, Homo sapiens
  misc_feature (1)...(471): n = a,t,c or g
gnnnnntttgaancccttntntgaaaccctttgacnnnnnnnnnnnnnnnnnnnnnnnnnnnnnnnnnnnnnnnnnnnnnnnnnnnnnnnnnnggcacgagcggcacgagctggaagactgtaaagatggtaggttaagattacatgctctggaatcagaatgactacttggattcaaataacaattctgctacccactagctatataaacttgaataattcaatttctctgtgctttgatttgctaatctctaaaatgggaatacaagtggtagctataggattcttgtgaataataaatgacaagatatgtgaaggacttagaatggagcctagcatataacaatattaatactaacagctagaattagtgcatgcttacaatatatgttaccttattttcaataaacactagctgttattatttaattatctaagtttacatgaagaaataactttttctatgtcagg

SEQ ID NO: 30563 - DNA, 480 bp, Homo sapiens
  misc_feature (1)...(480): n = a,t,c or g
gnnnnnngnnnnntttggannccctccnctgganacccttnnnnnnnnnnnnnnnnnnnnnnnnnnnnnnnnnnnnnnnnnnnnnnnnnnnnnnnnnnnnnnnnggcacgagctgtttgagtttttgcctttctcaaacttgccatttttcatatattatcttacgttttaaatttaattttaatgtgttttctgttcacaaaaatagtgtgtgattacagtcaattcatttttatcaagagagccaagacaattcaagaggaaaagaatagtctttgcaacaaatggtactggaaaaactgtatatgcagttcgatgaaagaatgaaattagactcttgattcatagcctgtgcagaaattaactcaaaatttgattttaaatgttaagagctaaactacaaaactcaaaacatacagataaatctttacgacttagattaggcagtagtttcttagatatgacaccaacagcataagc

SEQ ID NO: 30564 - DNA, 471 bp, Homo sapiens
  misc_feature (1)...(471): n = a,t,c or g
gnnnnnnngnnnnttggaanccctnattgaaacccnttgacnnnnnnnnnnnnnnnnnnnnnnnnnnnnnnnnnnnnnnnnnnnnnnnnnnnnnnnnnnggcacgagcccagactagcagcatccgtatcacctggggacatgttaggaatgcaagttcttgggtnnnnnnnnnnnnnnnnnnnnnnnnnnnnnnnnnnnnnnnnnnnnnnnnnnnnnnnnnnnnnnnnnnnnnnnnnnnnnnnnnnnnnnnnnnnnnnnnnnnnnnnnnnnnnnnnnnnnnnnnnnnnnnnnngacaaaaaagtgcaaatttgtgaannnnnnnnnnnnnnnnnnnnnnnnnnnnnnnnnnnnnnnnnnnnnnnnnnnnnnnnncaccctttccagcaattctgatgcagctaaggtttggaaactactgccttagaacatagtaaatgttcagctctttcaatggtggtaatggcaatg

SEQ ID NO: 30565 - DNA, 466 bp, Homo sapiens
  misc_feature (1)...(466): n = a,t,c or g
tnnnnnnnnnnnttggaacccnttgtctgattacgaatttaatacgactcnnnnnnnnnnnnnnnnnnnnnnnnnnnnnnnnnnggcacgagaattaaacatatcttttgtgttctttcctcctaactgaacatttacccagtcactaagcaaaaataatttaatgatcactgaaagtttgctgtgtttaaatattagcagcacaggtaaatattacctgcaattttaattcatttgtttttcacattggagaaaagaaggcatagaaaatgcagatttcctgcaagtcctgaggaaagtctttagaagttaggtgggattagcttcttcccctccaaatactttgttttgtttgtagattcaagttcacatgctattgagtatttcattttaaatatgggcaattgtcggccaagactttgaatgctgtggtttgctttacatagcttttaaatcatgagttgtg

SEQ ID NO: 30566 - DNA, 444 bp, Homo sapiens
  misc_feature (1)...(444): n = a,t,c or g
tgntatgttggaaaacnagatccctttgtgacatgcctacgaatttaatatnnnnnnnnnnnnnnnnnnnnnnnnnnnnnnnnnnnnnnnnnggcacgagggagcccagctgcccaccctctggacattcacccaaccaggtggtctcgtcacctcagaggctccgccagactcctgcccaggccaggactgaggcaagcctcaaggcacttctaggacctgcctcttctcaccaagatgaactcactggtttcttggcagctactgcttttcctctgtgccacccactttggggagccattagaaaaggtggcctctgtggggaattctannnnnncaggccagcagctagaatccctgggcctcctggcccccggggagcanagcctgccgtgcaccganaggaagccagctgctactgccaggctganccgtcggnggacc

SEQ ID NO: 30567 - DNA, 457 bp, Homo sapiens
  misc_feature (1)...(457): n = a,t,c or g
gnnnnngnnannttntnttntnnntacngnantncttatcannnnnnnnnnnnnnnnnnnnnnnnnnnnnnnnnnnnnnnnnnnnnnnnnnnnnnnnnnnggcacgagggcatcctgctctttggcacaaaggcccagaaagaaaaatacctccccaagctggcatctggggagactgtggccgctttctgtctaaccgagccctcaagcgggtcagatgcagcctccatccgaacctctgctgtgcccagcccctgtggaaaatactataccctcaatggaagcaagctttggatcaggcaacctgcctcccatttctccccttctcctccgcccaattccaggccccactgctccccgtcctccacgccctgaatatcccattcttccacagtaatgggggcctagcagacatcttcacggtctttgccaagacaccagttacagatccagccac

SEQ ID NO: 30568 - DNA, 452 bp, Homo sapiens
  misc_feature (1)...(452): n = a,t,c or g
gggnnagnnnnttntttgttntcggnantnnctttccnnnnnnnnnnnnnnnnnnnnnnnnnnnnnnnnnnnnnnnnnnnnnnnnnnnnnnnnnnggcacgagggagaagactgtctcttcacaagtaatctgtagttgttagtcttgaaagtgggttaattcattgtctttctagagaaaatgattgcatggcctaatagtcttccagttagtctgtgtggcnnnnnnnnaagccaggagtggattcttagctcctgttgagtgctgctgtcctgaatcanagatcttctctcccgggccactttgtcatgagcaggattttgaaccaagaccttttcttcacctgtctcgggggccctcaccgtgggctttgtgatcccctgacanntccaaaagcctttatcctcattcantatctgggtgaacaagctgacacctcctgggantcgtt

SEQ ID NO: 30569 - DNA, 458 bp, Homo sapiens
  misc_feature (1)...(458): n = a,t,c or g
ggnaggtnnnatgananngtttgccnnnnnnnnnnnnnnnnnnnnnnnnnnnnnnnnnnnnnnnnnnnnnnnnnnnnnnnnnnggcacgaggcagtcttgtgagactctctttcattcttggaaagattttgaagtttgctcttctgcgctgagttgcttgtcccaggtgtcagttcatttgcagggcctagagtccttgttcattcttccagggatggaggttgagcaaagagactcacaaatggcactagttgaaagtctggaatatgtaagaggagaaattagtaaagccatggctgactttactacctggaagacccatctgcttacttcagatagccaaggaggaaatcaaatgttggacgaaggatttgtggaagatttttcagagcaaatggaaattgccatccgagccatcctctgtgccatccagaacttagaagaaagaaagaatgaa

SEQ ID NO: 30570 - DNA, 463 bp, Homo sapiens
  misc_feature (1)...(463): n = a,t,c or g
gnngtnnnnntttganttganacagctnnnnnnnnnnnnnnnnnnnnnnnnnnnnnnnnnnnnnnnnnnnnnnnnnnnnnnnnnnnnnnnggcacgagagaagtctcctctgccagatccttctcctcttgtctgacctcgagatgacaaaatctccagggctgagtcatggccttcttaatttctccatctgtacccttttttaggtgagctcagatctgacctgtttttctgagctgcagacttgtttatctaattgtctaattgacatccacttgatgtctgatagttatcccagatctaacattggccaaatcgctcttttttccccccaaatctcccttgatttctcctttaaaacccccttctcaaagctatgctcaaactaaaattcttaggagtcattctagatatttntttttgntcttaccccacttattncatcnnntntgnnntttnttta

SEQ ID NO: 30571 - DNA, 461 bp, Homo sapiens
  misc_feature (1)...(461): n = a,t,c or g
gnagttnnntntnannngatacctttgactgattnnnnnnnnnnnnnnnnnnnnnnnnnnnnnnnnnnnnnnnnnnnnnnnnnnnnggcacgaggagggcctggataaccaggagggaggggtgtgccagacaagagccatgaagatcctcatgaaagttggacaagatgcaagttctgctggatcaaccaggaataaagatccaacaagacgtccagaactagaagctggtacaaatggaagaagttcgacaacaagtccctttgtaaaaccaaatccaggttctagcacagacggcaacagcgccggacattcggggaacaacatcctcggttccgaagtggccttatttgcagggattgcttcaggatgcatcatcttcatcgtcatcatcatcacgctggtggtcctcttgctgaagtaccggaggagacacaggaagcactcgccgcagcacacga

SEQ ID NO: 30572 - DNA, 458 bp, Homo sapiens
  misc_feature (1)...(458): n = a,t,c or g
gnagttnnnattgcnngntaccgtttgactgattacgaatttaatacgactcnnnnnnnnnnnnnnnnnnnnnnnnnnnnnnnnnnggcacgagctggaagaatttttttaagtaaaagattattgcatatttatggattctttacacaatttttttattctatagtagatcctttagctcctgtatttaatatacagcagaatatactttttagtttccttggaaaggaacagttttcactgtctggtaataaaacgcaagatgcaataaatttaatccaaaataagttacagtaaaatagggcacttactagtttgaaagaaaatattaaatgattctgttagttcacagtgtggtcaatacctgtacatatgaacttcagtaggaaatttagtcccaggaaggaagaaaggtttaaagtgttccagccagtcttgtctcaagaattccaatcgtc

SEQ ID NO: 30573 - DNA, 461 bp, Homo sapiens
  misc_feature (1)...(461): n = a,t,c or g
gnagttnnnnatgagtnngtnnnnnnnnnnnnnnnnnnnnnnnnnnnnnnnnnnnnnnnnnnnnnnnnnnnnnnnnnnnnnnnnnggcacgagnnnnnnnnnnnnnnnnnnnnnnnnnnnnnnnnnnnnnnnnnnnnnnnnnnnnnnnnnnnnnnnnnnnnnnnnnnnnnnnnnnnnnnnnnnntagtatgggggaaatcgttcccatgactcaagtatctccacctggccctgcccttgtcacatgggggttatnnnnnnnnnnnnnnnnnnnnnnnnnnnnnnnnnnnnnnnnnnnnnnncaggcatgagctaccacgcccgccagcatgtcttttttaaacattttaaaatctattctttatcttgtttcagagaggatttggagttacagaaacacattagannnnnnnnnnnnnnnnnnnnnnnnnnnnnnnnnnnnncagaggtttctcctagtg

SEQ ID NO: 30574 - DNA, 366 bp, Homo sapiens
  misc_feature (1)...(366): n = a,t,c or g
gnagtgtnnnctgannttgattnnnnnnnnnnnnnnnnnnnnnnnnnnnnnnnnnnnnnnnnnnnnnnnnnnnnnnnnnnnnnnggcacgaggtgaaatgaggatggtgacagatttttccttgtaaagttcttgtgacaatgaaattagctcatgtaccacaaggtccagctcagcaaactatagttgctgttaaatccatgagccctctcagacatgtctacagctgggaagatctctttgcctttatcccttccagttactttctatcttattctataacttgtcctgccccaactagaacaacatggaagaagtactaggttttcttttacttgattagtcattacggtttttttttttttt

SEQ ID NO: 30575 - DNA, 458 bp, Homo sapiens
  misc_feature (1)...(458): n = a,t,c or g
gnnagttnntnatgagnangattccntgannnnnnnnnnnnnnnnnnnnnnnnnnnnnnnnnnnnnnnnnnnnnnnnnnnnnnggcacgagctcagatacatcccggcctcagctcccctgtccagccgctagggagaggtttcctgatgggccgctctccctcaggcctcttcctttcttcctttctcaggtgtataatgaacagatccatgacctcctggagcccaaggggccccttgccatccgcgaggaccccgacaagggggtggtggtgcaaggactttctttccaccaggtgtgggattgggctcgggtaggatgatcggccccatgggtccttggggttccctcacaaaactgtttggggatgccctgggtcctgtgatggtggtagcagtggtggtggtagcaagggggtgatgtanattctgaagagcagnccttcctgttangggaa

SEQ ID NO: 30576 - DNA, 461 bp, Homo sapiens
  misc_feature (1)...(461): n = a,t,c or g
gnnagtgnnnntttgacnttgnanaccgntatgacnnnnnnnnnnnnnnnnnnnnnnnnnnnnnnnnnnnnnnnnnnnnnnnnnnnnnnnnnnggcacgagtggaagagtatttttcaatagttctccatattgtacatactaataagtaatgtttctgctgggttgatgtgcttcctaacaggtgagagagaaaataattaatcctggctttttaagaatgaatataagtgagaagccttcaaatgacttcaaaatcactgttgtatttagactgtgaatattatggtacaggatcaataaaaatttatgttttaagtaacgtaactatagaaaagtactattttccatatggtaggctatgtacaacaccatgaaacgaagtgagaaagtanaanaataactgatctaanagtgagaaaaactggntctagngccaattctganttantaatgctatca

SEQ ID NO: 30577 - DNA, 481 bp, Homo sapiens
  misc_feature (1)...(481): n = a,t,c or g
tttgaaccccttgntngattaccaatttaatacgactnnnnnnnnnnnnnnnnnnnnnnnnnnnnnnnnnnnggcacgagagatccctgagcttcccagtcctatattcatatgcccttccaccctaaacagggaagtcagtcttttggtaagaagtgacagttattgcccaaagtatcttctgctgttagcaccatggccccttggattcctaagtggctcaaagcctctgttaaaaagactaattttgtaaattattaggacccaccagtttactttggcagctcccattgtttatcagcccttcagagctgtgtgatatgagatgggcctttagtagattctttgaagttgcttctttctctccacctataaccctgaatcactaccttaggaaatgttagagttagttaattcatagattatttgtaacctaaagtacagttaaggagancaggtgtattctggcaagctctctgaa

SEQ ID NO: 30578 - DNA, 482 bp, Homo sapiens
  misc_feature (1)...(482): n = a,t,c or g
tttgaaccccttgttggattccnnnnnnnnnnnnnnnnnnnnnnnnnnnnnnnnnnnnnnnnnnnnnnnnnnggcacgagataaatccttctatgagccaaatcaatgtggtatgggactttctgcaccaaggaaattaatgttctacagaaaaataacaaactctattaaagggatgaaactgaacataattattttactttagagaaaaactactggactgcaggcatactgggtaacgaaaacaacattcaggaaaacatctgcttttatttcctaagtattttctactgtggacagctcttaggaaaaataaaaaacctacgaaggtaccatgtatagctggccttatctacagagtgaataggatttcaccgaagcatagcactgacactaacaattttacttctgcaatctttcttttgtaactgaaatgaagaagtcctcaaaccctgttctggcccacgcaaaattctcccatg

SEQ ID NO: 30579 - DNA, 481 bp, Homo sapiens
  misc_feature (1)...(481): n = a,t,c or g
ttgaaccccntgntngattaccaatttaatacgactcnnnnnnnnnnnnnnnnnnnnnnnnnnnnnnnnnnggcacgagtttttttttcttttctcaaaattaccagtaataacatcaagatactcatcccttattttaaaatgtagaagtaagtatctcaagtaacacagtctctctttttttaaactataaccaagaattacaagggccacaaaaattgttgatatcctaaacactatgtaaaattaacttatctctgtggaagaattcaatagaacctggtcaagtttttgaagtaaaaaaagatgtatgtgccaaggcaaaaacatatagcagtctcaatgactttattatttgttgatagtatttaatatcatatttttgcttctgtaacttaaaatttccttgtaataaaaataagctacagcacataaaagaagaaaaattattgaactttcaataattccattacaattctga

SEQ ID NO: 30580 - DNA, 505 bp, Homo sapiens
  misc_feature (1)...(505): n = a,t,c or g
tttgaaaccttnnnnnnnnnnnnnnnnnnnnnnnnnnnnnnnnnnnnnnnnnnnnnnnnnnnnnnnnnnnnnnnnnggcacgaggaagagatgaaggttgggcttgcccttggagggtgcgtagcgatggaagggcatcccagagaaagagaagatgtggaatgatgatgagaggggtgcgcatcatgcatatgggggccagttgggagacagcctgtgctagcgtcattctgtgagtggcgagaataaaatgaattcagtaggttgtggtcagataataaaaacagtgacagccaaacagctaattttacatttgatgttttggctataggaatctctgttaggtacctgagccaggaagtactgttatgaaagcactgttttcatgggttggaggaggggagcagggagacttctanaaggcggttagaacagtccaggcaccctgtgatgaggacaaagacttctaacagctggaaaggcaagaaagtgactctgcaaatga

SEQ ID NO: 30581 - DNA, 526 bp, Homo sapiens
  misc_feature (1)...(526): n = a,t,c or g
gnnnnnnngnnannttnnnttgttgactcantgaactnctggaaattcctacgacttnnnnnnnnnnnnnnnnnnnnnnnnnnnnnnnnnnggcacgagctggaacccaaggcacgtgactcttggacttactacccaagactgacctttcccctttacccacaccatctgcccctcgacaggtcaccttaatctctacacacagaatcggccggtgctctgcaaagcggtaggtttggagtctggttaaattaggaaggcacatagcgtaaccactgagagtatccaggtccttgtcacagcgagactctggaaaacagagcaagggtcacacagagcaaggtcagtgagagagatgagatgatccctgccaaaacaggccccgccttgtccctggttccagggggcatctctgtaccttgatgaaaacctcatgtctccctggggattgtgggacacacacagtaacaacgtggtttaagccangtgaagtggctacacctggtatccaacactttgggaggcc

SEQ ID NO: 30582 - DNA, 519 bp, Homo sapiens
  misc_feature (1)...(519): n = a,t,c or g
tttggaaaacctttatgaacnnnnnnnnnnnnnnnnnnnnnnnnnnnnnnnnnnnnnnnnnnnnnnnnnnnnnnnnnngcacgagcnggcgcctgccnnncgntggccttctgganctgccntgnncanncgnnggannnctactgacaggagcngtttctancnntgatcangcgnntngtggacngcctgaggatggaccagcnactgggctcagagtcanggcctgganggactngtacganngaatgaggannncnaaanggatccanganggangannccntnngntacacngtgaaatgcgnngcntaggagannnnttnnanctggccatcccagntcntgacncacngnatnancnncatgccatctgccttccaaaagaaagnggcgctncccanaatnttggcnnttatcnttacnacnnatactgacganncatggcagagngacttgaacttgggccaagccctngatgacttgncgacgatananctngaccttaaaaattttgtc

SEQ ID NO: 30583 - DNA, 509 bp, Homo sapiens
  misc_feature (1)...(509): n = a,t,c or g
aanncnttggannnnnnnnnnnnnnnnnnnnnnnnnnnnnnnnnnnnnnnnnnnnnnnnnnnnnnnnnnnnnnnnnnnnnnnnggcacgagggagaactgctgctctgctgcatcttgagccacctagaagaatgtctgatgctttgtagttacagagtaatgttttttagctgtcatactgactggtcttagattttggaatctggattcagctgtataccagaaatctctggccaggttaattcatgcaagatagcatccatcctttagctgtggaagctaagtatcatgttgcctaaataagatagggcatcaggttttagggagaatgctgaggcagaaggaagatgagtcagattagggcccacagactattcctttcccttagagataccctttagttgccatccctctgtcagagaaagagagaggctgggacataccaggttacaaatccagggagtcttctgaagggtcatagaacacctttattgcttcacctactttc

SEQ ID NO: 30584 - DNA, 503 bp, Homo sapiens
  misc_feature (1)...(503): n = a,t,c or g
ganacctttgaagaccnttnnnnnnnnnnnnnnnnnnnnnnnnnnnnnnnnnnnnnnnnnnnnnnnnnnnnnnnnnnnnnnnggcacgagctttagagtgaacttccaaagaggcccagactggttaaaaactctcaattaagggctaagcaaattgctgttggagggccagctctagtctgtggcctgtttttacacagccctcatgctaatggtttttgtatttgagaagggttgttaaaagaaaacaagaaattttttaaaagaatatgcaacagagaccttatgtggtcccagaagccccaaaatatgtattacctggcctttacaggaggtccgaatgtcctctgaaatttatatacgaagagataccaaaccattgaaaacagtccaaatgtctagcaacagagaaatggttagtcaatatgttaaaatacttttgcagctattaaaataatttagtacagttgtagaaacnagaaangaattaggaatttggtaaa

SEQ ID NO: 30585 - DNA, 500 bp, Homo sapiens
  misc_feature (1)...(500): n = a,t,c or g
ncctttgaananccgtnnnnnnnnnnnnnnnnnnnnnnnnnnnnnnnnnnnnnnnnnnnnnnnnnnnnnnnnnnnnnnnnnggcacgagaaaagaaacacaaccagaaaagccagtctcccattttcatctgtttaaggaattatgtagccacaaggatctttagaagcaagtcctcttaggagaaaatgacaacctctatgggatttcaacaatggagttccttttgaaaagcagtggtgcagcccacacctcctaaattgccgtactttcttcgccttttgttgagtctgtatgagatcctcattaacaagtttaacaattcctggagactgaggcttttgtcaattatgacgagacttcccatttcctagaccatggtctccgttagcatttttgtgtgtgtagttactgttttgaatccatttccctctgnctttaaatgnttttcctttggtatttgaatttgtccttgngaatcaccatgagtccatttttgga

SEQ ID NO: 30586 - DNA, 515 bp, Homo sapiens
  misc_feature (1)...(515): n = a,t,c or g
tnnnntttgnanaactttggannacccgtnnnnnnnnnnnnnnnnnnnnnnnnnnnnnnnnnnnnnnnnnnnnnnnnnnnnnnnnnnnnnnnnnggcacgagaaaaaataannnnnnnnnnnnnnnnnnnnnnnnnnnnnnnnnnnnnnnnnnnnnnnnnnnnnnnnnnnnnnnnnnnnnnnnnnnnnnnnnnnnnnnnnnnnnnnnnnnnnnnnnnnnnnnnnnnnnnnnnnnnnnnnnnnnnnnnnnnnnnnnnnnnnnnnnnnnnnnnnnnnnnnnnnnncaatcttatctagtcagtcatccccattttatttgtgaagaaattgaagtctaaaagtttaagcaaggtatccagattcgcacagctggtacacagttggagctgggatacaagccagttgtttttgactgtgaattttgtggtcatactgtattattttaaccccctgattattccatactcatagaacatcctcgatgcttaccagggcctctgaagtggctggagcaag

SEQ ID NO: 30587 - DNA, 537 bp, Homo sapiens
  misc_feature (1)...(537): n = a,t,c or g
tttggaacccnttgaccgattacgaatttaatacgactcnnnnnnnnnnnnnnnnnnnnnnnnnnnnnnnnnnggcacgaggggaaaataaagttttcaaataaaacccttgatttcaaacacaatagatgcgaaatagcatttagtagctcttaatgacattttcaatgaaaaaaactatattttacacccaaacaattgtcagccatctttttttttnnnnngtncttcattttagttcagtnccatttgaanaanggattttanctgttcttcaggggctacagcttcctaaanatgaaaggnctgtaggcaattaattnctatngtaaatacttngttttgtaaaaangatntnctattttaaaatagactacancaaaactttgctatttgctatgangtttnatatcgaaataaatnctttagtaaangatcatnccacattttgaanaatttcaaagctgtaaatnatttctcagtaaaactgttcnccagggttataaaatttaatccctatcaatggnggaattattt

SEQ ID NO: 30588 - DNA, 534 bp, Homo sapiens
  misc_feature (1)...(534): n = a,t,c or g
ctcnnnnnnnnnnnnnnnnnnnnnnnnnnnnnnnnnnnnnnnnnnnnnnnnnnnnnnnnnnnnnnnnnnggcacgagaaaaactgaaagtgaaagtccagaaactgttcccacctgctggagtgaaggggccaaggagggtgagtgcaaggggcgtgggagtggcctgaagagtcctctgaatgaaccttctggcctcccacagactcaaatgctcagaccagctcttccgaaaaccaggccttatctccaagaccagagatagtggggagacttcttggcttggtgaggaaaagcggacatcagctggtcaaacaaactctctgaacccctccctccatcgttttcttcactgtcctccaagccagcgggaatggcagctgccacgccgccctaaaagcacactcatcccctcacttgccgcgtcgccctcccaggctctcaacaggggaaaatgtgtgtttcctgcaggccaggccagctgccttcgcgtgatcaaagccacactctgggcttcagaatggggatgacatgc

SEQ ID NO: 30589 - DNA, 429 bp, Homo sapiens
  misc_feature (1)...(429): n = a,t,c or g
ttgantttgataccgttatgacnnnnnnnnnnnnnnnnnnnnnnnnnnnnnnnnnnnnnnnnnnnnnnnnnnnnnnnnnnggcacgagaaggcatcctccccttgtcacaaaccagaagctaagccccccattcctgggatgtccagagaggctgggtaagaagatgtgctgtgaacacagagctcattcgctcttctcctccttcagcctagcagtggcgggacacatgcagtgtccctctctggagggaaaaggcagctgagcaaacatctcactctcttgattcttttctaaatgggactcctgaggnnnnnagtcctgaaccatctttcccagagccaagcctctgctggtgagagtgggnacagggttttatnagtnatgnccncnaatccattgnntggagacttctggttnaggannaaagg

SEQ ID NO: 30590 - DNA, 442 bp, Homo sapiens
  misc_feature (1)...(442): n = a,t,c or g
tnnnntnnnnttntttgaanaccgnnnnnnnnnnnnnnnnnnnnnnnnnnnnnnnnnnnnnnnnnnnnnnnnnnnnnnnnnnnnnnnnnnggcacgaggaagaaccgaaatgtcaagattgggaagatcacagtgtcagagaagtggcgggaatcggtgttccgccagatcaccaacgccaatgagctcaagtacctggacgagttcctgctcaacaagataaatgacctccgttcccagaagacgcccattgagagcttgtttatcgaagccaccgagaagttcaggagcaacatcaaaacgatgtactctgtcccgaacgggaagatccacgtgggctacaaggatctgatggagaactaccagatcgttgtcagcaacctgnnnnnnnngcgtggccagaaggacaccaacctggtcctcaaccttttccagtcactgc

SEQ ID NO: 30591 - DNA, 449 bp, Homo sapiens
  misc_feature (1)...(449): n = a,t,c or g
anacccgtttggacaccngtnnnnnnnnnnnnnnnnnnnnnnnnnnnnnnnnnnnnnnnnnnnnnnnnnnnnnnnnnnnnnnnnnggcacgagtcacaagaatgtttaaacatcagataagtttgatcataagactgtttcctagtatttattttataatgctctagaatttctccaaatatattagagggtggcatagcagtctaaaaaaatattaatttttttatttttttaatgccatagaacatttttgctcaaatcaaataatgatggtattgcaattctgaaaatgtttggagttactggcctaaaggtaaggggagcaagattagttgataagttgaatgaatagacagggcagagccagtatacctttggtgaactagtaagtttatttgcgtgggacattttttttctctttgcagtactggcatagctgggtgcagtgg

SEQ ID NO: 30592 - DNA, 449 bp, Homo sapiens
  misc_feature (1)...(449): n = a,t,c or g
ttggaanaccgnttnnnnnnnnnnnnnnnnnnnnnnnnnnnnnnnnnnnnnnnnnnnnnnnnnnnnnnnnnnnnnnnggcacgaggagagctagcataccctgcaatctagacccagagatggcacatcaattgagaagctcagggcccaagaaagatagaagcttagcatctgatgctagcccttgaagctctctctgcttcacatttgggcagctgttgctaggtggatagtggtatctggtttacggctaccctggccaatgtgccagggattcccttggcatggataccttaatctcagattatagtatccacttaattgtgtttcctcaaaatctaaaagcttaattctttttatcaaaataagggttccagtttgagaaagtggggtataaaaaagcagaggattttactgatactgggatctcattttatctccatgtacct

SEQ ID NO: 30593 - DNA, 441 bp, Homo sapiens
  misc_feature (1)...(441): n = a,t,c or g
ntttgnannnnnnnnnnnnnnnnnnnnnnnnnnnnnnnnnnnnnnnnnnnnnnnnnnnnnnnnnnnnnnnnnnnnnnnnggcacgagcaattttaagtactgtgtttaatagggagacacactgtattaagcaactaaactaaggctttattcagcaaattagggtatcctttgcccagcatcatgccaagcactaggcatttagtggtgacaaaaattactgtggtttctgctttcattgaactgtctaatcaaagactgatgacaccaaagtgaggcagatgccatgatggagcaatgtggttgatggcagatattaaagccatgactgagtgtataccctagttaaaatgatcaggggagacttaactgaaaggggtaattgagctagatttgaaggatgaggagtancagactantcaaagaaaggganagaagaac

SEQ ID NO: 30594 - DNA, 460 bp, Homo sapiens
  misc_feature (1)...(460): n = a,t,c or g
gaagtgnccccntnnaacccttattgatgacccctaagnnnnnnnnnnnnnnnnnnnnnnnnnnnnnnnnnnnnnnnnnnnnnnnggcacgagcgaagcccccatcgctgtcctgctgtgtgaattcccaggttggcctggtggccatgtcgcctgcccccagcactcctctgtctctgcttttgcctgcacccttcctcctcctttgcctaggaggccttctcgcattttctctagctgatcagaattttaccaaaattcagaacatcctccaattccacagtctctgggagactttccctaagaggcgacttcctctccagccttctctctctggtcaggcccactgcagagatggtggtgagcacatctgggaggctggtctccctccagctggaattgctgctctctgagggagaggctgtggtggctgtctctgnnccttcactgnctttcaaga

SEQ ID NO: 30595 - DNA, 461 bp, Homo sapiens
  misc_feature (1)...(461): n = a,t,c or g
gnnnnnnattggaaaccctntttgnagancnnnnnnnnnnnnnnnnnnnnnnnnnnnnnnnnnnnnnnnnnnnnnnnnnnnnnnnnnnnnnnnnnnnggcacgaggccaagcacacagtgcacagctcctcttcactcagcacatgctttacggggttgctgatagcttacatttactaaccttttcaagcactaattcttcagggttcctttcaagatgtctttccacgacatctgaaaacacaataaatttcaaaaacatgttcaccacttgaatctgaatatcgagaaggccaagtgtaagactccaaagcctctcaaagggattttccagatggcaaaatgataacagctttcagattagaaacgtaaacctaagtgcagtttttcaccgtgtcagactcancanataccctattagtgngnnaaccacactggngagacnttcnngncgnanatca

SEQ ID NO: 30596 - DNA, 486 bp, Homo sapiens
  misc_feature (1)...(486): n = a,t,c or g
ggtgntnnnattggaaccttggaacccctatgacnnnnnnnnnnnnnnnnnnnnnnnnnnnnnnnnnnnnnnnnnnnnnnnnnnnnnnnnnnggcacgagaacacattttgattttgattttagatactctttaatgcgttttattataaaagttatttaattatcattttgaagtctaaggactttcatatctcaacaacagaccagtaaaattcagtgcatatttgggtattgacaatacaaatttaaagtatttattaatctattcatatttgacaggcatctgnnnncnttggtccatttttttcatagcttcanaactagctaagatgtcacnaagattaggtataagcaaaactggntaccagtctccccagagctttttaaaattgggaagtgaccttcttgtaggaaccctgcacacatgagcaactgtccatgagcagtgatgaatgggacactgaagggttagccgcagcattggg

SEQ ID NO: 30597 - DNA, 479 bp, Homo sapiens
  misc_feature (1)...(479): n = a,t,c or g
gagntnnatttgannctntggaaaacccttnnnnnnnnnnnnnnnnnnnnnnnnnnnnnnnnnnnnnnnnnnnnnnnnnnnnnnnnnnnnnnnggcacgagattggttttattggagaactccagaaccaagcagagaaggaagggacccatgacagcattagcatttgacaatcacacatgcagtggttctctgactgtaaaacagtgaactttgcatgaggaaagaggctccatgtctcacagccagctatgaccacattgcacttgcttttgcaaaataatcattccctgcctagcacttctcttctggccatggaactaagtacagtggcactgnnnnnngaccaagtgttcccggggttcctgtgngcccttatttcttnctggactttncatttaagcttcaagcncnanntctggggggctnntgnatanctctngctcaatcnagntgngaatgngtaccccatctttaat

SEQ ID NO: 30598 - DNA, 485 bp, Homo sapiens
  misc_feature (1)...(485): n = a,t,c or g
gagntnnattgaaanctttnnnnnnnnnnnnnnnnnnnnnnnnnnnnnnnnnnnnnnnnnnnnnnnnnnnnnnnnnnnnnnnnnnnnnnnnnggcacgagtgacaggcagccgccagtccttccagaaggctatggggaacccctgcgagttcttcgtggacatcatgtgactcgtggcgcatgccccagccctgcctgaggtggggagctggcggtcctgccgcatgcagagctcgcgtgggcttgccttcgtgggggccannnnnngaggcagggtggggggcaggctggaccaccaccatctgccctggcagcctggctgctccagctcctgacagcacctgtgtctgagcagccgtgttgggggcgctccctctctgccctcagngagagcctcggacctcccaaccccttgtgtctggtggggatccctcttgggatgaggaagaccccctcgggctctcggntgacccccanctnctgg

SEQ ID NO: 30599 - DNA, 522 bp, Homo sapiens
  misc_feature (1)...(522): n = a,t,c or g
ttgganacccgntttgactnnnnnnnnnnnnnnnnnnnnnnnnnnnnnnnnnnnnnnnnnnnnnnnnnnnnnnnnnggcacgaggaaaaattaagtggaaagtacagggagttcccatatatctatctccagacagcctggtatatttgttacaattgatgagcccaccttaatgcctcagtatcatccaaagtccgtagtttacattgggattcactgttggagttgtatagtctatgagttttgacagattaaccactcattttgtagtaaagaaaataaaatccaaaagattttgtgaagtgacttgttccaaatcatacagctggggagtggcagagcaagtccaggaaccaatctttccttccctttcactctccctttctgtgtttaaaaaagatcatatttgcacatggtacaaatttaaggacaaaaaactttatagngaaaagttagtctctttctaaccttggttccctgcactggcaataattctttctggaaacatccatgngtaattga

SEQ ID NO: 30600 - DNA, 521 bp, Homo sapiens
  misc_feature (1)...(521): n = a,t,c or g
ttnnnnnncntttggnnnnnnnnnnnnnnnnnnnnnnnnnnnnnnnnnnnnnnnnnnnnnnnnnnnnnnnnnnnnnnnnnnnnnnnnnggcacgagggtagggattatatcccagcatagtgaacagcttaaaatgcttttatttagaagttttttggacattcccactgctggaaatttcttgacttttttttttnnnnnnagtctnagccctgttgcctgctgctgggcctttctttacccatngggngnccttatatctccagcttctnactccntgcactacgttacngctaacccctntacaactttcctgcaaacttcaaaattcagctttccttccttaaatctgccccattcaaatcaagctntaaaaggggctggcttcacttttctcagtttcacaggcgcactgggngttttgcaaagngcaagcatgaatcatgtgaggggctaaagcggcttgaacccttacagttacccatgagtaaaaggtatatggncccgttggaacctcaaaa

SEQ ID NO: 30601 - DNA, 590 bp, Homo sapiens
  misc_feature (1)...(590): n = a,t,c or g
nntcnnnnnnnannnnngnnnnnnnaanttgnnnnngnnnnnantnnntannanaangnnanaggtngnnnatcttgaatccttganaccgtttgactgatacgaannnnnnnnnnnnnnnnnnnnnnnnnnnnnnnnnnnnnnnnnnnnnnnggcacgagcagaagtttgggtcagttcaattactgaactaaaacattgtttcccaacatgtccatgttttacaagatgatggggttgttatctgtgatgccattgcaaagatcttgatggttccaaaacactctaagcatcacataagccatgttatacctgtcgccccaaatttaccaaaccatttggattaaaactctcagtaaggacctctgaggcacaaagatctatgaataactccttaacccctttgctcttactcttcaggtacaatttcaaattttcacttttccctttctgcactgaccttgggaaagtcactttatctctgtgatctaattttccacatcaataatgtatctatacttggcataagagagttatganaataaaataataacatatatgggagatttctnggaataccaattgtacca

SEQ ID NO: 30602 - DNA, 531 bp, Homo sapiens
  misc_feature (1)...(531): n = a,t,c or g
tnnnnnnnnnntttgnanaccgntatgactgattacgaatttaatacnnnnnnnnnnnnnnnnnnnnnnnnnnnnnnnnnnnnnnnnnggcacgagtgcgtgggtcactcaagaacagccatgtacttccatggccctgccaccctggtctcagatgggcacctgagggtttgggggcaatgatctgtcccctgcaatttttagactagagtacagctagtcaggtcaatctttcttcagtggttgaagctataagctgtacagtttgtggccactgctttccgccttgtgagttataatggaaatctaccatgtgtggctgcccaaatcttgtaaatatttccacatttcagtagtgccatgtttcgtgaatcttgtcacctcaaggtaggttccaaaaaccgtaaaccaaccagccaacctacaattcccagcttccattgcagcaagagagtagaatcatggtctaggttctcctaaccagataatcctatgtggaattttgatttgcaaatatgtgagaaagcagtt

SEQ ID NO: 30603 - DNA, 519 bp, Homo sapiens
  misc_feature (1)...(519): n = a,t,c or g
ttgnanacccgttnnnnnnnnnnnnnnnnnnnnnnnnnnnnnnnnnnnnnnnnnnnnnnnnnnnnnnnnnnnnnnnnggcacgagcatcctttgttgcatctgaaaaggtagagaagttccagaggaatcagccaaaagccaagaagacaaacggagtgggaagcatactccgggggaaaactgggacctaattagggaacactaattatatccaaaacagagggatctcacagtattttcccagcagaatttcagatttcctagggaataatgactgccaactcacctgttaagtatccaatttcttaatttcactataatagttaaagtatgttgtatttttctgccactatttttaaaaattgacaggtaaaaattctatgtgtttatggtgtgcaacacaatgttttgatgtacgtatacactgtggaatggctaaatcaagctatttaccataccacctcacatacatatttttattttgtggtgagaacccttaaagctactctcttagtaat

SEQ ID NO: 30604 - DNA, 512 bp, Homo sapiens
  misc_feature (1)...(512): n = a,t,c or g
ttgnanaccgtttgacnnnnnnnnnnnnnnnnnnnnnnnnnnnnnnnnnnnnnnnnnnnnnnnnnnnnnnnnnnggcacgaggtatcagtcactgctcttaaaaatcttattgtctcattaagccaaaactgtttatatttcttttgagccttaacccatcccatgaggtaggcagtttaggtggtaggagctccattttatggatgggcaaactgggactctgagaggctgtaggacttgattaatgtaacacacaggaaactcagaactaaaatgcagaccttttttcattataatatgctgtctctgtgacttctattgagatgatctgggttttttaagatacggatatacagtatctttaagatatacatatcttttaagatatagatatacagtgggtatatccatcatttagaagtcaatatgtattaccatagaggattccagaagtgtgatcattgtgcccttctctttgttccccccaaactgntttggtagtgtaagttta

SEQ ID NO: 30605 - DNA, 451 bp, Homo sapiens
  misc_feature (1)...(451): n = a,t,c or g
aacccctatgttatgattncgaatttaatacgactnnnnnnnnnnnnnnnnnnnnnnnnnnnnnnnnnnnggcacgaggtgagccattgcgcccagccatctcccttcttttaaccaccctgccagaaacccctttgcacacatcacctgctatttccggggggcacagttcgaagcatggaattctggggtcctagggccatgaacagttatagagcggcccgtcactctgggttttggctggtagttctccctggtgggacagaatcgggggtggcttgaactccaaggcttttgcctccatgggtgacttctgtcgtgaaacagcctctccccaggcccttgtctctagggaaggttggaaactccatatttgagccctttggatgggagtttgtttagaagaaagtgaagctactggccccttcactctgatgggctccccaggtgc

SEQ ID NO: 30606 - DNA, 450 bp, Homo sapiens
  misc_feature (1)...(450): n = a,t,c or g
ccccttgncnnnnnnnnnnnnnnnnnnnnnnnnnnnnnnnnnnnnnnnnnnnnnnnnnnnnnnnnnnggcacgagcgtgggtgtgtgaagggagaggaagggagcacatgggcactgcccagggacaaggactgcactttggagtcaatgtaatcagcatgccacactatcacatcatcaagtttctgcacaaaaaattcatgttctgtttcctttattagcaggcatgaggaaatcacatcttttaaacattcatatctatagtaccagtgctatctatctagatagcatgaactttccatttctttttatgctgcaatcaatccaacaccacgtggtgtggcctttacaatctctctacagatctcattgtcacaaatgttatatgacaaacaaaaagcacgttgatatancatgtatagattgagactgaacattcagcatgtttag

SEQ ID NO: 30607 - DNA, 453 bp, Homo sapiens
  misc_feature (1)...(453): n = a,t,c or g
ttgaaccccttgtntgattcgaatttaatacgactnnnnnnnnnnnnnnnnnnnnnnnnnnnnnnnnnnnggcacgagggagcggcagaaggacgagccgccgtgcaaccaccacaacaccaaagcctgcccagacagcctcggcagcccagcccccagccatgcctaccacgggggcgtcctgtagctatgccagcggggctgggcaggccagccgggcatcctgaccgatgggcaccctctcccagggcaggcggcttcccgctcccaccagggcccggtgggtcctgggttttctgcaaacatggaggaccactttctgataggacattttcctttcttctttttttttttttcccttggtttngncaaaagccnttttnccgggaanntttttnaannnggaantttnnaaaanaacnnaaangnaggnnggnaaancngnaaanaggg

SEQ ID NO: 30608 - DNA, 437 bp, Homo sapiens
  misc_feature (1)...(437): n = a,t,c or g
tnnnnnnttnnnntttgaanacngcttgacnnnnnnnnnnnnnnnnnnnnnnnnnnnnnnnnnnnnnnnnnnnnnnnnnnnnnnnnnnggcacgagaaaaattaatatctgcttgttggttttaccatctgttaaattgagatggaactaaatgatgggtaatgttagcaaattggcttcttgaatttaaaacgtagaacttcaaagctgttcctacactatgagagttcccgtcttctgccggcggctccatcagcgctgtgtcagcaagcgcttcctgagggactcggagtcctgggccaaggggcagatctcccccagcatgcctgatacgtggctgtcttcagggtcctccctctccagggaactctcctctaggccttcatctccttcccccttggggtgtctgtggatgtgctggtgactcccaaagccgt

SEQ ID NO: 30609 - DNA, 429 bp, Homo sapiens
  misc_feature (1)...(429): n = a,t,c or g
tttganaccgttnnnnnnnnnnnnnnnnnnnnnnnnnnnnnnnnnnnnnnnnnnnnnnnnnnnnnnnnnnnnnnggcacgagcctagttgaagaaatcgtgatgtaacattgacagtcgttgggtataatgtgataacaggagcaagaaatgagtaatcaataaataccaattttattgaaataacagtgtttatttctctaaagaaagtaggagaatgagtctttagacttaaggagcatatactttaatgaaagagacagtacagatatcgtagaacaagtgactgaaagcacatgtctatttgtaaatgtctagaaagaaacattcaccctgagactaatcagtctgtgtagctatttagtgaatatttttcagtcaagggaaggaattaagactttaaatttaaaaaacaaaattgatctgggag

SEQ ID NO: 30610 - DNA, 440 bp, Homo sapiens
  misc_feature (1)...(440): n = a,t,c or g
ttggattacngttatgacatgattacgaatttaatacnnnnnnnnnnnnnnnnnnnnnnnnnnnnnnnnnnnnnnnnnggcacgagctcaaaggatgaggaggaagaagaagaagaaggagacaaaataatggcagaactccaggtatgtggatgaggtgactgacattggctccttgcctcccgcctgggtctctccagccatggcactcacagatttgttagcgagaaggccagggaagcgcatggaccgggaccatagaagctgtgtcttctggccttagcctttgctttcccaagatggcgctgaacaaggctctcaggatgcctataagatgtgcaaggaatgaccatttcacaaaacaactcacgctttcctacctctggctgtaaaattgactttcctttctttccatcttaagagattctgcttcatttcaa

SEQ ID NO: 30611 - DNA, 433 bp, Homo sapiens
  misc_feature (1)...(433): n = a,t,c or g
ttngaccaccgtnnnnnnnnnnnnnnnnnnnnnnnnnnnnnnnnnnnnnnnnnnnnnnnnnnnnnnnnnnnnnnnnnggcacgagactggctatctgtcccttcttcatcatcacgaccccaaatgacccactggtgaggggtgctgtgagggaaggactcttcccttcatcactactgctgtttccaattacagagctggcagaactgtgctacccaggctctgcccatgcctttcctctctcccttttacacctgacggtggcagaatttccattattgaacagaagaaactattgggttaaaaactctagaaatcagtatctctccaacatcagcattactttaacaattaacttggagatgtagttaccgggccactagatcatgctgngnttttcctgnncttggccctgtctccaggagaaaagggc

SEQ ID NO: 30612 - DNA, 437 bp, Homo sapiens
  misc_feature (1)...(437): n = a,t,c or g
ttgnttaccngtnnnnnnnnnnnnnnnnnnnnnnnnnnnnnnnnnnnnnnnnnnnnnnnnnnnnnnnnnnnnnnnnnggcacgagtaaaaaatgacaacccaacctagcgccatccctcattggatgatgagctccctccttacctgcttaccagagtacaaagggagcccttttttgtcttttttataggtaggtaataacattatataaggactctatagtgtttagcatgcagtaaagaattatgagacatgctaagaagcaagatcatgtgaatcataaacaaggcaataaaagcaggccagcaggtgagtcagatattggagttagcagacaataactttaaaataactatgaatcatatgttcaagaaaaaagagaaaaagatggacaaaatagatgaagggatacataatttcaggataatttgaattta

SEQ ID NO: 30613 - DNA, 430 bp, Homo sapiens
  misc_feature (1)...(430): n = a,t,c or g
ttancngtnnnnnnnnnnnnnnnnnnnnnnnnnnnnnnnnnnnnnnnnnnnnnnnnnnnnnnnnnnnnnnnnnggcacgaggtgcctggtttaataacaaaataaaactgttttcccgtaagtctccacactgaataagtgagtaaaacagatacttttgaggttcccactttattatgctgacaaaggagcacttctctgcagcacagagatagaacatttttcccttgtcctgagaggcggcccaaaggctagagcagatgtgactcttctgaggcagtgcaccagaacccgagggatgggcagggcctgaaagctgcccgctctgaccgnnnnnctctggctaggaatngtccatctccgagtctaggagtgcccccactaatcccacccgccaggtttgccaccagagctntttantagtcccggg

SEQ ID NO: 30614 - DNA, 436 bp, Homo sapiens
  misc_feature (1)...(436): n = a,t,c or g
tttgattaccngtnnnnnnnnnnnnnnnnnnnnnnnnnnnnnnnnnnnnnnnnnnnnnnnnnnnnnnnnnnnnnnnnnggcacgaggggcttgtccttgtcctagcatcccagatccaccttctgggaagtcatcagattggaggtgatgttggcagcttttgtaaacaaagggtagtgttgtaagctgttgtgtctgcctatgtgtgtgtttgtgtacttggtctcatctctgcagactggtgacatggcttccagatatgcccgacgatgtcctgtggttgcagtgggtgacctcacaggtgttcactcgagtgctgatgtgtctgctccccgcctccaggtcccaaatgccagtgagcagccaacaggcctccccatgcacacctgagcaggactggccctgctggactccctgctcccccgagggctgtcct

SEQ ID NO: 30615 - DNA, 292 bp, Homo sapiens
  misc_feature (1)...(292): n = a,t,c or g
cngtnnnnnnnnnnnnnnnnnnnnnnnnnnnnnnnnnnnnnnnnnnnnnnnnnnnnnnnnnnnnnnnnnggcacgagactgactcaatctgatgaatgtggacagtcttttaaacttaacagttcccataatcatcattatcttaggtaaggcagcttaaaaaataatttgctcacagtcccttcttcctgaagctactcctttatcattgaagaagacttgagaaatgctcatttcatcatcannnnnnnnnnnnnnnnnnnnnnnnnnnnnnnnnnnnctttttcttttt

SEQ ID NO: 30616 - DNA, 353 bp, Homo sapiens
  misc_feature (1)...(353): n = a,t,c or g
tttgnanacctttnnnnnnnnnnnnnnnnnnnnnnnnnnnnnnnnnnnnnnnnnnnnnnnnnnnnnnnnnnnnnnnggcacgagaagttgtaacaccagatgttgatggatgttcacaacatttgcggtgaactgaggtcactagaaatgttttgagatgtatgtgcttgtgtattttgtatactcctgtgtggttcagatcagcctggatgcaatgttctgcatttacttaangntttatgtnnatgatnntnncnttntgctcnannntttncnctatnnaanantnncnttnnaacnatnntngcatnttttanacanntattntagcaanncagactgnnctttntctt

SEQ ID NO: 30617 - DNA, 462 bp, Homo sapiens
  misc_feature (1)...(462): n = a,t,c or g
tggnnnncttggnnnnnnnnnnnnnnnnnnnnnnnnnnnnnnnnnnnnnnnnnnnnnnnnnnnnnnnnnnnnnnnnnnnnnnnnnggcacgaggaatatttctttatatctgaaggggaaaagccatcaaaatatgtgaattaaatacctaaaattctggttgtcaaaacgtcacacttaaccataactttaaaggtagaaaaacccttacaagtgaccaacccactcattggatagctaaggaaacacaaaactcaaataatttgctacacatcacagattggggtcttagtcttatgtcttctaactttataatggtatactatttttttcatgtttttattaaaatgttttcttaaatccttagccaaagatttttgtttgataagtcaaaaataaggtcttgnttactttgnttacttttttgnattcannantnacttanagtannaccannttatc

SEQ ID NO: 30618 - DNA, 463 bp, Homo sapiens
  misc_feature (1)...(463): n = a,t,c or g
nnnnnnnnnnnnnnnnnnnnnnnnnnnnnnnnnnnnnnnnnnnnnnnnnnnnnnnnnnnnnnnnnnnnggcacgagggtcaccccattccctatgtcctgtgacctacaaggtgactgtgcttgtcgggacccccaggcccaagaacacagccggaaagacctccggggatacagccatggctaaggaaggacaagaagttgtcaaagaattcccaacgccaggacccacatccctttggtattgatttcacagtcngctgctcaacngaatggcctctncacaccagggatccttagcacccaaccggtctgctttaattntacctaggatggactcacattggggnnatagaacctgtttctngntgcttgnataatggatnnngntncaannnatatttnctttatgnttggtntnnttgtntnntnttnatntnntttcngtnattnntnttntttttg

SEQ ID NO: 30619 - DNA, 457 bp, Homo sapiens
  misc_feature (1)...(457): n = a,t,c or g
gngnnnattgataccgnttgactgattcgaatttaatacgactcnnnnnnnnnnnnnnnnnnnnnnnnnnnnnnnnnnggcacgaggagattcagaagattgcaaaagaatattacaagtaactttgtgctaataaatatagtagcttaaataaataaaatggccaaatttctggacaaaagtaatgtaacaaaatggacccaagaagagacagccttaatagtccaaaaaccatagaaaaaatagaatcagtagtcaaaatttccacacagaaataatttcatgatctaatagttttactgacaaattctactaaacataggaaacaaatatttcagaatataagaaaagaagtgtgaaaaaaccttttaaatggtccattttcaagacatgataaatcnngtactgacnnncatcctgcnatgnnncaaactgntnantnatgnncctanaaggt

SEQ ID NO: 30620 - DNA, 553 bp, Homo sapiens
  misc_feature (1)...(553): n = a,t,c or g
gnnnnnnnnnnnnttngnnntttgganancnnnnnnnnnnnnnnnnnnnnnnnnnnnnnnnnnnnnnnnnnnnnnnnnnnnnnnnnnnnnnnnnnnnggcacgagnnnnnnnnnnnnnnnnnnnnnnnnnnnnnnnnnnnnnnnnnnnnnnnnnnnnnnnnnnnnnnnnnnnnnnnnnnnnnnnnnnnnnnnnnnnnnnnnnnnnnnnnnnnnnnnnnnnnnnnnnnnnnnnnnnnnnnnnnnnnnnnnnnnnnnnnnnnnnnnnnnnnnnnnnnnnnnnnnnnagttgtttttaaatgttaatatagaaaacagtgaaggattagctgaaaatatatgagcaggtgacattgaggtttactgaaatagccaatttgactggtgcttagactattgtgcagtaaacctaaaaggtagtggagaattgcttcctgctagcaggaagccttcatcttcttgagtacccaaaccaggcttcaggtgtcctttgaggatagccaggtttgaaatttttagtttctcaggaagagctcttctatgtggcaggggctga

SEQ ID NO: 30621 - DNA, 535 bp, Homo sapiens
  misc_feature (1)...(535): n = a,t,c or g
gnnnnnnnnnnttnnnnnttggnnnnnnnnnnnnnnnnnnnnnnnnnnnnnnnnnnnnnnnnnnnnnnnnnnnnnnnnnnnnnnnnnnnnnnnnnggcacgagaagcagctcctatgtctccctggcatttagagaaatgaagaaccagaagcagaagatgccagggctatcatttggagttgccataaaccagaagttcctgagaacagcgacgcctggggtgttgtgcctgccctgagacttataaatccatcctatgcagtgttcaaaggctcattgcctccaaccagatctactatttggaattatctagtgaattatttatggtttacatatttgacaggggctcatggctgggtttgaaaattctctttcctggcttgctgcttgggcctaaaaatgtctggaaaaccaaggctcancgaagttaagttgctaaagctctntgagctagtaaagggcatngnagttttgaacaaagggnnntgnatnttaagttncttctccnttaccanaaacccggngtgtttcttt

SEQ ID NO: 30622 - DNA, 517 bp, Homo sapiens
  misc_feature (1)...(517): n = a,t,c or g
anttganacngnttgacnnnnnnnnnnnnnnnnnnnnnnnnnnnnnnnnnnnnnnnnnnnnnnnnnnnnnnnnnnggcacgagaaatgttcctgttattttttcagaatgaacttaataattacctgttggtttgttgttaattatcctccctcccttcttttgtgatgatatattggtacaagtagacagatttacatttctggaagcagtctctgagtttacgccccaaggtaaaattaatctggccaggtctttgtttttcacctgcatcagtttcatacatcatcatatttctgattagtaagaagaggcagccagaagtgagatacagattttcattaggtgaggtagaatgaacatggcagaaaataggataggacaacatatctttttatttaaatacataggtaacaaagaaaatatcaaattattcatacctggtaaaaggtaatatgtaatgtgtcttggtttaaagcttgttaagggtaaaaaatacaggtaatatgtcctntgct

SEQ ID NO: 30623 - DNA, 543 bp, Homo sapiens
  misc_feature (1)...(543): n = a,t,c or g
gtgtnnnnnttganattgaagaccgttnnnnnnnnnnnnnnnnnnnnnnnnnnnnnnnnnnnnnnnnnnnnnnnnnnnnnnnnnnnnnnnggcacgagtacaaaggagaacggaggcacagaacagtcaggacacttgcctgaggccccacagttagggaatgaaatcaccagcattccagcccagagtctgtctccacagtctgcgctgtcaaggactcctgaggccaccctgggccagccctgtccatactacatcctgactttgccactaaagcctatcaaagtgtgctcaaaggcaaggtaggcttttgtgtcctggagatttaactgcacacgttctctaaaatggtgagtttataaaagctcacagaaatcattttcagcattttatttttcagaagcactattgaaatttaattgntaaaatactatttttttaaaaagcactttgttggcctccctagnatctctctctttctttcttagttcaaaagtncatcantggaaaataaagcccnttggagaaagggccttacttaaa

SEQ ID NO: 30624 - DNA, 532 bp, Homo sapiens
  misc_feature (1)...(532): n = a,t,c or g
ggtgtnncttgagacntttgactgcnnnnnnnnnnnnnnnnnnnnnnnnnnnnnnnnnnnnnnnnnnnnnnnnnnnnnnggcacgagacaaattcctgatgaatattatgaattgaatgagtgaatgtttgaatatagggtaattttatgttatccactggatttcatgttactatgatgttgagtaattacaagagaaatacgactagaactctgaagttttttttttaatctactagttatacataagacttctcctgatagtcctgtgtttgttgtttattaggtgtccaatgaggaacttgggttttatgaacactaagtccctaccaatcccaacagtatgtctgaatctctgagttcccataagaagaaagattcttctcaaaataaatcactaataagggaaatttggtgactgattgaagctaaggaagataacctcatttctacttntgaaaggaggaaaatccctttctgccaaagatccaagcttcanacctgccaananncntttangcccnnggnaaac

SEQ ID NO: 30625 - DNA, 534 bp, Homo sapiens
  misc_feature (1)...(534): n = a,t,c or g
ggtgtnnnnattgaanattgnnnacngcttgacnnnnnnnnnnnnnnnnnnnnnnnnnnnnnnnnnnnnnnnnnnnnnnnnnnnnnnnnnnggcacgagcctaatcctcattagttaatgacatcaaatgagaatgcatgcaatttaggaaacgatagtagagagtacaaaaggggatttcagtaagttttcagacaacctagaaagttcagcctcctttcagtgtgatcaggaaagactgaactatgaacaggattccagattcatctaaagttaaggtcgaaatttctaaaagtggggctgtggatctcttagaggcttgtaaatccctacattgaattgtctgtacacaataaatagatctggtatatatgtgcaatgctttaaattcatattgatgttattgtgaagaataaaatataaattcacatatgtttacaaacaaattttaattttttcattttgcaaaagcagtacatgctaattgncaaaaactatggactggcanaggaanacntaagttcccttaaattt

SEQ ID NO: 30626 - DNA, 542 bp, Homo sapiens
  misc_feature (1)...(542): n = a,t,c or g
ggtgtnncnttggnantggatacagctatgacnnnnnnnnnnnnnnnnnnnnnnnnnnnnnnnnnnnnnnnnnnnnnnnnnnnnnnnnnnggcacgagggctaagaaactctacagtatcattctctctgcaccgattccagagccaaaaaccaaggatgacctagagcagctcacgactgagattaagaaaagggccaacaacgtccggaacaaactgaagagcatggagaagcatattgaagaagatgaggtcaggtcatcggcagaccttcggattcggaaatcccagcactctgtcctttctcggaagtttgtggaggtgatgaccaaatacaatgaagctcaagtggacttccgagaacgcagcaaagggcgaatccagcggcagctcgaaattactggctaaaagacaaccgatgaggagctggaggagatgttggagagtggcaacccgggcatcttcacttctgggatcattgactcacagattccaagccagnccttnagggaaattgggggccnncccngggncntttgggg

SEQ ID NO: 30627 - DNA, 547 bp, Homo sapiens
  misc_feature (1)...(547): n = a,t,c or g
gagtgtnnnntttganatttgaanaccgnnnnnnnnnnnnnnnnnnnnnnnnnnnnnnnnnnnnnnnnnnnnnnnnnnnnnnnnnnnnnnnnnnggcacgagcatatatatgtcataaatgtatatgcatacataaatatatacacgtacacatatacatttaaagttaagatgtcttatgagtttatactaactactcaaattcagaggtaccagttcttattaaccttattgaacattttatatctggatctccttttaatcatggcaaaatttctagtctcagtgacctcaacataatcacccatttgatttattctacaatacaaatgcaatctccaaatgataatatgactactgaaaacaggttctcttgtttgtttttgttattaggatataacctactaagggatgtacactcaaattactgggcatagtgttctgtatgctaatcccaccaagtaaatacacagttagattcatttatttctaggggctaattngtattggaaaatatttggatttaattttanantttntgaaaaat

SEQ ID NO: 30628 - DNA, 539 bp, Homo sapiens
  misc_feature (1)...(539): n = a,t,c or g
gtgnntnnnnnttngnnattnnnnnnnnnnnnnnnnnnnnnnnnnnnnnnnnnnnnnnnnnnnnnnnnnnnnnnnnnnnnnnnnnnnnnnnnnnggcacgnnnnnnnnnnnnnnnnnnnnnnnnnnnnnnnnnnnnnnnnnnnnnnnnnnnnnnnnnnnnnnnnnnnnnnnnnnnnnnnnnnnnnnnnnnnnnnnnnnnnnnnnnnnnnnnnnnnnnnnnnnnnnnnnnnnnnnnnnnnnnnnnnnnnnnnnnnnnnnnnnnnnnnnnnnnnnnnnnnnnnnnnnnnnnnnnnnnnnnnnnnnnnnnnnnnnnnnnnnnnnnnnnnnnnnnnnnnnnnnnnnnnnnnnnnnnnnnnnnnnnnnnnnnnnnnnnnnnnnnnnnnnnnnnnnnnnnnnnnnnnnnnnnnnnnnnnnnnnnnnnnnnnnnnnnnnnnnnnttctatctctatgtatttgactattctgggtacctcatgtaagtggcattgtacaatatttgngcgtttatccttgaccccnggagtnnaccccantttggg

SEQ ID NO: 30629 - DNA, 411 bp, Homo sapiens
  misc_feature (1)...(411): n = a,t,c or g
cacctttgacatgcnnnnnnnnnnnnnnnnnnnnnnnnnnnnnnnnnnnnnnnnnnnnnnnnnnnnnnnnggcacgaggtggttcaaaaatcctcactccctccaggcactacccattagcttatctaatttcttccaccttcaaaatacatctcaaatgtgtccacttgcatgatctttactagaagcttgttgttcggcccacaatgctctctcctggaggtctttaacagcctcgacctggtcctggtaacattcttcccccagtacatcccatatcagttccctcacgacaatcagagtgatcatttaaaagtagaaattagatcatatcacccttgtgcttcaaaccccttgtttttccttctggacttacaataaggtccaaatttcatgactcagctctttcac

SEQ ID NO: 30630 - DNA, 552 bp, Homo sapiens
  misc_feature (1)...(552): n = a,t,c or g
gngtgnatnanntattganntntggnaaacnctnnnnnnnnnnnnnnnnnnnnnnnnnnnnnnnnnnnnnnnnnnnnnnnnnnnnnnnnnnnnnnnnnggcacgaggtcttgtgcataaatgtttcagaagttcttaaaatgtttgatcaaaatttcatttttttaaaaagacatttttgaatcatttgttaaaactgaaaaatttaaaggatgtgtaatatccttgggaagattgcctaacttctccaattctcatctttttcatctacaaaatgagtataattagtagatgaaaaataagtcttcaataaatgttaactgcatctgtataattcttatattatttgcattttgatacaagctattagaaggcttcctttaaagctctgtgactcagaggtcttgtggtttctcgctgcagacaattctcagctatccttttcctcaactcagtggaggatttcttttgagggttcaaacccccaacttggccttgtaatcaactgagcacaggctgacctgggtctccatcacttcaaggtaatccacca

SEQ ID NO: 30631 - DNA, 514 bp, Homo sapiens
  misc_feature (1)...(514): n = a,t,c or g
gnnnnngnnnnttttgaattcctnncanacngnaanaccctnnnnnnnnnnnnnnnnnnnnnnnnnnnnnnnnnnnnnnnnnnnnnnnnnnnnnnnnnnnnnnnnnnggcacgagaaaaattaaaaggttttagtgaatgccaggccactacccgccccatggatgccaaatcagcagaagaatctgcatttgtagaaagcagcctgggtgcctccattcagcagctggccttggagaaaatcctctggcgaacagcagcccaacatccttcccttgtgattttccagtgctccccgttcactgggtactcagttagcactggctggcggggcagctgttgggctgtactgtaccggggcagagcagtgtccccggctgctctgtcaaggcctccaaagttcccagtgtctgcaggcaacagacagtggcagacctgttctctgcacacaaacccgcttctgtgaggccctggcagaccangtctcattctggctgcctaatcaaaggccaatt

SEQ ID NO: 30632 - DNA, 482 bp, Homo sapiens
  misc_feature (1)...(482): n = a,t,c or g
tnnntnnnnnatttganaccgnattgatgacacgaatttaatacgactcnnnnnnnnnnnnnnnnnnnnnnnnnnnnnnnnnnggcacgagttgtaatagttttgagacaccatgaactgttcccatataagatggtaaacttcatcgataaatgttgngtaatttctgactgnnnnnnnnnnnnnnnnnnnnnnnnnnnnnnnnnnnnnnnnnnnnnnnnnnnnnnnnnnnnnnnnnnnnnnnnnnnnnnnnnnnnnnnnnnnnnnnnnnnnnnnnnnnnnnnnnnnnnnnnnnnnnnnnnnnnnnnnnnnnnnnnnnnnnnnnnnnnnnnnnnnnnnnnnnnnnnnnnnnnnnnnnnnnnnnnnnnnnnnnnnnnnnnnnnnnnnnnnnnnnnnnnnnnnnnnnnnnnnnnnnnnnnnnnnnnnnnnnnnnnnnnnnnnnnnnnnnnnnnnnnnnnnnacatgagtgataagacagcaaa

SEQ ID NO: 30633 - DNA, 536 bp, Homo sapiens
  misc_feature (1)...(536): n = a,t,c or g
nnnnnnnnnnattgnnaancgctatgacnnnnnnnnnnnnnnnnnnnnnnnnnnnnnnnnnnnnnnnnnnnnnnnnnnnnnnnnnnggcacgagtaacagtatttcctcacagttttggaacccaaaactagaaggccatttgtgttgccaaaactaccaaaattctaattttattacctccaagtgatggaattatttgaattcaaaggtttagagacaggaattgaaaatatgttttattaaacctaaacttttcctgtcagctttagaagaggttttttacatgttgatttttctgttgctatggttactctccttgtcatcctgacagtgagttgaaagccattgacagtattaatctctgtggctgagcttaggctatttttagatatgccgtacttcacacataattgcacgtgggtgagcaacctacgctagtctgatctgtgagcagctgggctgagctgccagctgtttacagggaatacatgagctgctcatccttctgggctctaatgcccataccctnctggtc

SEQ ID NO: 30634 - DNA, 485 bp, Homo sapiens
  misc_feature (1)...(485): n = a,t,c or g
atttnnnnnnnnnnnnnnnnnnnnnnnnnnnnnnnnnnnnnnnnnnnnnnnnnnnnnnnnnnnnnnnnnnnnnnnnnggcacgagataaacattaggcattcaacttaatctgagttctatggatagacttagaaaggtctacaaatcaagtaaggaaaaaaaaagcttagattcccctttggcgtcttcctatttgttttaaatttgtctgaatacaaagaaagttatttttattgtcaatttatgacttaatagactactaatagatacagaggctgagaaggagcatacaattttgatatcatgttatctgtctgttattaggaatttaacatatgctgcccttaaaataatgggcatctacctttgtttacatcaagcatagcttaagttggaaaatatcaaagtaaagaaggttctacaaaggcgggtaggattatggtggtccaaagcagttaacgttgacttcaggcatttctaagtt

SEQ ID NO: 30635 - DNA, 489 bp, Homo sapiens
  misc_feature (1)...(489): n = a,t,c or g
ttgaaattngaaatccctatgacnnnnnnnnnnnnnnnnnnnnnnnnnnnnnnnnnnnnnnnnnnnnnnnnnnnnnnnnnnggcacgagatcatatgctttttgtatattcccacaattgataaaatatttcgtacatttttcatattcaaaaagcaaactttcaaacgtatgctaaatttaagggattacaacagaacattccaaaaagaaaaaaagtatttgctaaaatgattgtggttactatttttggacccgtgatttgtgatttaagtattttgaaaagcagagtatcttcttggctgtgtaaggttggagttggtttagagtatatttgtgtatctgtgttagtactttgtgctttttaaaatgctcaataagcaatttttagaaaattcgttttttggaggcaggaagattaaagtggaaacaattataatcttgatctctggtactatatattattgctttttgttggtcctctctattt

SEQ ID NO: 30636 - DNA, 488 bp, Homo sapiens
  misc_feature (1)...(488): n = a,t,c or g
tttnnnnnnnnnnnnnnnnnnnnnnnnnnnnnnnnnnnnnnnnnnnnnnnnnnnnnnnnnnnnnnnnnnnnnnnnnggcacgaggatggtgaaagacctaatgttctagaaaacctagacaactcaaaggaaaagactgttggatcagaagcagcaaaaactgaagatacagttctctgcagcagtgatacagatgaggagtgtttaatcattgatacagaatgtaaaaataatagtgatggaaagacagctgttgtgggttctaacttaagttccagaccagctagtccaaattcttcctcaggacaggcttctgtaggaaaccagactaatactgcttgtagtcctgaagagtcatgtgttttaaaaaaacctatcaaacgagtatataaaaaatttgatccagttggagagattttaaaaatgcaggatgagctcttaaagccaatttccagaaaagtaccagaattgcccttaatgaatttaga

SEQ ID NO: 30637 - DNA, 482 bp, Homo sapiens
  misc_feature (1)...(482): n = a,t,c or g
atttggaaanccctatgactgattacgaatttaatacnnnnnnnnnnnnnnnnnnnnnnnnnnnnnnnnnnnnnnnnnggcacgagaacagtcattaataatcaccatggtgaattttaacctgctgctgtatccctactgtcctttcactgggaccagagagatatccttgatgtaggggctgaaaacacgcacgcgagagagaaagtctgtgatgtttccccacaatacacagcaggacactcgatgagaaccctcggcaggtgacacgctgacttcactgtcccacatctgcaccccgagcaggggtgagactttgcaggcaacaaaccatgcagtctgcccgcagctgaggctcacgggcagcacagagcagaatgcacacagagagcgtttgttcctcccccttctcccccacatccgtcgtgaggtcaagtcacgtggggttactggcaaaccccatgttgcaagaatatgggtat

SEQ ID NO: 30638 - DNA, 525 bp, Homo sapiens
  misc_feature (1)...(525): n = a,t,c or g
tnttngannccattgganaccgntatgacnnnnnnnnnnnnnnnnnnnnnnnnnnnnnnnnnnnnnnnnnnnnnnnnnnnnnnnnnnggcacgagaagaaaaagaaaaaagttgtgagagtttttaatagatgaatactaagtcaactaacagctaagaaattctaaatatcttttaaagtttattaacagatttcaacttaaaatgtcttttggggtgatattaaaattcagagcttgaataccattaggcattggcaaagataatgaattgatggttgtcaccagtaggatgctttatttgagttctgagtttaaacaaataattgcctagaaaatttggtcaccatcttgctgtgtgcagagtaaggatggaaagaaacctcgtggtgacacagacttcctgcagagataagccctacccatggcctttccttcctggctctccaaaccagctgcaaaaggaagcatgtgaaggggcaggccctgtcaggcggagtttctgcanccgagtgtanccaggcct

SEQ ID NO: 30639 - DNA, 541 bp, Homo sapiens
  misc_feature (1)...(541): n = a,t,c or g
ngtnnnnnnnctntganacctttatgacnnnnnnnnnnnnnnnnnnnnnnnnnnnnnnnnnnnnnnnnnnnnnnnnnnnnnnnnnnggcacgagtagccaaatgctgtggtccttgaaacgcagcctgcactgagccagcccactagacagtgtctctggaagtttactaaggcaaaagtctggctaggcatcaaatgcactataaaccctggtttgttgattctatggattcttataattcccactgaattatcatttccagtgtaggacctagaaatatatatatatatttttaacaatgttctctcgttggtgtgtttgcccaccagcttcatactgtttctgttgtgtctttggccctcagaaggcatccaaacccatatttcagatgtcctgccggctgcttcctggcacatggccccagccatctccccacataatgacacttactccctcacctcctacccagtccctaaacctgctattctatttctctgactttcttttctcagtgaataccaccagcagtcattcagtttt

SEQ ID NO: 30640 - DNA, 546 bp, Homo sapiens
  misc_feature (1)...(546): n = a,t,c or g
tnnnnnnnntttganantttnnnnnnnnnnnnnnnnnnnnnnnnnnnnnnnnnnnnnnnnnnnnnnnnnnnnnnnnnnnnnnnnnggcacgagggcccatcctaatgggtgtgagatgatcaagatttaaatttgtaatcttgaccttgacatgatttatacctagtaagataaacatcatagttaaaagcnnnnnnnnnnnnnnnnnnnnnnnnnnnnnnnnnnnnnnnnnntaanagggagngagagaggananncgagnganactgngcatgtatnntgngnatatttgcnctaatgacncntgacaatatnnnngganntttttgagnnngagagattcagtgacacatagtgncacacacccanggagngganacagaaattttntnctttgncatngacntggnnnnctntggggacgcatgtagnntctnngagtctcactctctttctagtgngnattaacagatatanacncggaananaagtgnnnctcgnatgtatcaacacncttaattttaanntgcngggtggnaaanataa

SEQ ID NO: 30641 - DNA, 427 bp, Homo sapiens
  misc_feature (1)...(427): n = a,t,c or g
nnatttgaacnccttgacnnnnnnnnnnnnnnnnnnnnnnnnnnnnnnnnnnnnnnnnnnnnnnnnnnnnnnnnnnggcacgannnnnnnnnnnnnnnnnnnnnnnnnnnnnnnnnnnnnnnnnnnnnnnnnnnnnnnnnnnnnnnnnnnnnnnnnnnnnnnnnnnnnnnnnnnnnnnnnnnnnnnnnnnnnnnnnnnnnnnnnnnnnnnnnnnnnnatggtttttaatgataatacccagggtgggcaaggatataatgaaacaggtacttttaagccttgttcaaaccccagtgggagtgtacattagagcaacctcttgaaaagcagtgtggcagtaggcatcaggagttgtaaaaagttaatatccttgacccattgataccacttctagtaatctacccttaagaaatgatcagatacatcg

SEQ ID NO: 30642 - DNA, 424 bp, Homo sapiens
  misc_feature (1)...(424): n = a,t,c or g
nangnaacccttgacatgatnacgaatattgnnnnnnnnnnnnnnnnnnnnnnnnnnnnnnnnnnnnnnnnnnggcacgagtccctccctccctccctccctgctcccttctgacttgtgggagaacacatttaatcacacagggacacaaaaattacaacataaagaagcgtccctttgaaaaatagctcacatgatacttcccactaccctgcctttctgctgacacctaccaacctccaggccactcctcactccctaaagactccctaaagatgttagctgctggttctccatcttcctctctcagtcatcactctcggtgattcaacacttataaagactatctaacattttggatttgacagttccttgatctccttttagatgnaaaaatgcttccccactcctgatgtttctttcc

SEQ ID NO: 30643 - DNA, 422 bp, Homo sapiens
  misc_feature (1)...(422): n = a,t,c or g
tgaaaccccttgacnnnnnnnnnnnnnnnnnnnnnnnnnnnnnnnnnnnnnnnnnnnnnnnnnnnnnnnnnnggcacgagaaaaaagcggcaggatcacaaattcacacatagttaatgtgcccctccaacagtcaattatgttctatgactaacctgaggatctttatagaatctgagtaatggaaatgcctgggtttttccatttaacaatatattgggctcttacagttacaacagtcttctttcgggttaaatatttcttctcttgaagggtccactccttattaaagataagattgaactgaatgtttacttaaacgttcagtcttttggagtttctttactcttctcaaaatggtggttggatatataagaacttgctgtgtcctggtagtgttgaggggagaaggtgacaactta

SEQ ID NO: 30644 - DNA, 420 bp, Homo sapiens
  misc_feature (1)...(420): n = a,t,c or g
aaccccttgactgattacgaatnttttacgactcnnnnnnnnnnnnnnnnnnnnnnnnnnnnnnnnnnggcacgagggtttttcataaagatttgtcatcagagataatagagcctgataaaatacagaatcccaaacgaggaacccttaattcagtacttaacgcatttaatttctcagagcctctctaatagttaagtcattataattatgctgaccttccagcagtattgtatgacttaccagttgtgaatgcttcaagtccatttctttacctggaaggccaaatactgagagatgttaaagttacctggttttcactgtaattgccaagccattgggactggcagaaaattagagcatactgcttccaagagtgtttgagtttgacctgcctaagggtaacacctcattcatcta

SEQ ID NO: 30645 - DNA, 435 bp, Homo sapiens
  misc_feature (1)...(435): n = a,t,c or g
attttgaanccccttnnttnnnntnntnnnanactgaaancccttnnnnnnnnnnnnnnnnnnnnnnnnnnnnnnnnnnnnnnnnnnnnnnnnnnnnnnnnnnnaattcggcacgagagttatctgtggttgatattgctgcctcccacgggtcccagtgnnnnnnnnnnnnnnnnnnnnnnnnnnnnnnnnnnnnnnnaannnnnnnnntgtctntatctntanngaactaacggttntattgcanaatctgagttanncacagannactgacagtntnatggnggncacatanggnatanatcagantggnctcaaanngcacnctttagggaagggagcgcncttgaaanacagngnacttcanaatactcagagggganagtgtnagnnntccccacagatgggaaatanctcangcannngcacagggat

SEQ ID NO: 30646 - DNA, 439 bp, Homo sapiens
  misc_feature (1)...(439): n = a,t,c or g
atttgaanccctttnnntngnntncnnnnatntgaaaccctttgacnnnnnnnnnnnnnnnnnnnnnnnnnnnnnnnnnnnnnnnnnnnnnnnnnnnnnnnnnnggcacgaggactgcataggactcggcnnnnnnnnnnnnnnnnnnnnnnnnnnnnnnnnnnnnnnnnnnnnnnnnnnnnnnnnnnnnnnnnnnnnnnnnnnnnnnnnnnnnnnnnnnnnnnnnnnnnnnnnnnnnnnnnnnnnnnnnnnnnnnnnnnnnnnnnnnnnnnnnnnnnnnnnnnnnnnnnnnnnnnnnnnnnnnnnnnnnnnnnnnnnnnnnnnnnnnnnnnnnnnaaaggccttaaccataggtaaaatattacnnaagtggaatanntncaaggggggtaaggtntaggatntgcccagagaagtatacggttgataaagagcaaaa

SEQ ID NO: 30647 - DNA, 429 bp, Homo sapiens
  misc_feature (1)...(429): n = a,t,c or g
atttgaanccctntgacnnnnnnnnnnnnnnnnnnnnnnnnnnnnnnnnnnnnnnnnnnnnnnnnnnnnnnnnnnggcacgagcatccccaaactggacttctctagtcaggctgacctgcgcaacgagatcaagacactgttgaaagctggccacatagcatggacttcttctggaaaagggtcatggaaatgggcctgccccagattctcagatgagggaacacatgaatcacaaattagtttcaccatagaaggacccctcacttcctttggactgtccaataagatcaatagcaaacacctaagagtaaaccaaaacttggtttatgaatctggctccctcaacttttctaaacttgaaattcaatcacaagtcgattcccagcatgtgggccacagtgttctaactgctaaaggcatggcactg

SEQ ID NO: 30648 - DNA, 417 bp, Homo sapiens
  misc_feature (1)...(417): n = a,t,c or g
ttnnnnaaatgaanccttnnnnnnnnnnnnnnnnnnnnnnnnnnnnnnnnnnnnnnnnnnnnnnnnnnnnnnnnnnnnnnnggcacnnnnnnnnnnnnnnnnnnnnnnnnnnnnnnaaaatatatatatatatatcccctgtgaatcaagcactctataggcatttgnnnnnanaatttttncnggnaccctnaaaanganangntntncntaantannncccttctngnaannaaaanncnggnggtncctnnnggtaaancanttanccccngggntaanncggtnaatggtaaaccagaattgagcccccaggttggctgagantccaaagcttttgtgnganaacctctnttttnctctntttctttttccncnggnatgtgtacagacacntngcnnagagaccttatattc

SEQ ID NO: 30649 - DNA, 440 bp, Homo sapiens
  misc_feature (1)...(440): n = a,t,c or g
atttgaaaanccttctntcntattctnnnaaagtagaatcccttnnnnnnnnnnnnnnnnnnnnnnnnnnnnnnnnnnnnnnnnnnnnnnnnnnnnnnnnnnnnnnnggcacgaggagatgcatatttcttacagggattttaggacatcactggaaacagacatgtaagcttgaccctcctttccttggtgccttcctggccctattttgtctgggtctgaaaattgatttcatcctggtatctgcacctttacacccaactgtaaactatgaccannnnnnnnnnnnnnnnnnnnnnnnnnnnnnnnnnnnnnnnnnnntccannnntcgtgggagggacccagtanngaggtaattgaatcaagggggcnggcttttccatgctgttctcctganagtgaataannctcacgaganntgatggtttttaaaaaaggg

SEQ ID NO: 30650 - DNA, 451 bp, Homo sapiens
  misc_feature (1)...(451): n = a,t,c or g
taccngtnnnnnnnnnnnnnnnnnnnnnnnnnnnnnnnnnnnnnnnnnnnnnnnnnnnnnnnnnnnnnnnnnggcacgaggcaggaagttatgttcgtgatgatgcagtccccaatttaatccagttaataactaatagtgtggagatgcatgcctatactgtccagcgcctgtacaaagcaattcttggtgattattctcaacaacctttggtacaagtggctgcatggtgtataggtgaatatggtgatcttcttgtatctggccagtgtgaagaggaagagcctattcaggtaacagaggatgaagtgttggatattttagaaagtgtcctaatctctaatatgtccacctctgtgacacgaggttatgccctcactgccattatgaagctttccactcgattcacttgtactgtaaaccgaattaagaaagtggtttccatctacgg

SEQ ID NO: 30651 - DNA, 458 bp, Homo sapiens
  misc_feature (1)...(458): n = a,t,c or g
aaaatcngnnnnnnnnnnnnnnnnnnnnnnnnnnnnnnnnnnnnnnnnnnnnnnnnnnnnnnnnnnnnnnnnnnggcacgagggcaggcggaaaagagaacagaagagaatccagaagtgttcagacagaactagggacaacagaggggcctccatggtggcatgggtcagcagagcatggagcaggcagaggaagcctatctgtggggctgggtacatttctctgagactcacggaatgtaagtgttgaggtttctgcaaagagggcgcaggccctgcagtgacggttcagatattgataacccatcccccttggcaggtgggggcttaggcatccatattggattcagaaaagaaaaagaatgatgcttcttgcaacaaaaacaaaagtgattatgtcacgagaggagaggctggagggccatgggagttcccagctggctcactcatccgtccag

SEQ ID NO: 30652 - DNA, 457 bp, Homo sapiens
  misc_feature (1)...(457): n = a,t,c or g
atttcgatanccgtnnnnnnnnnnnnnnnnnnnnnnnnnnnnnnnnnnnnnnnnnnnnnnnnnnnnnnnnnnnnnnnnggcacgagtctttttcatttattctacaaatacttaccgagcatttactctgctagacacaagagattaagcaatgaacaagacaggcaggatccatacaaggtgtaattataggtgaagatgaacttttgatgttcccaaataaatggtcagagtttgatgtcttggtggaaaactttgtggatattcaggaagctgaatcaatttcagataccactctttaagtgaacctatgctgtttatggctcatggtaaaatagtgaaaattgggataaatttaagctaaagtgtctctccctgtgaagagtttacagttttacgaatccagataaaaccattatatttgaagtgtctctactaagtgctatttatgataaaa

SEQ ID NO: 30653 - DNA, 555 bp, Homo sapiens
  misc_feature (1)...(555): n = a,t,c or g
ttnnnttntnnnnatttngaaacccttnnnnnnnnnnnnnnnnnnnnnnnnnnnnnnnnnnnnnnnnnnnnnnnnnnnnnnnnnnnnnnnggcacgaggtacctaagtaaattttctttaagtcagaagcccattaaaataattacaagcattgaacttctttagtattatattaatataaaaacatttttgtatgttttattgtaatcataaatactgctgtataagggaataaaactctgcacctaatccccataacttccagtatcattttccaattaattatcaagtctgttttgggaaacactttgaggacatttatgatgcagcannnnnnnactaaaggcttggttggtagatattcaggaaatgttcactgnataaataagtaaatacattattgaaaagcaagatctgtataaatgtgaaatttttatttgtattagtaataanacattagtagtttaaacaatttcactgtttcagttatttcctggaatgaaatattcctctcactgccttagaaatacattagctangatagttgtgtaacat

SEQ ID NO: 30654 - DNA, 476 bp, Homo sapiens
  misc_feature (1)...(476): n = a,t,c or g
ttggnnnntttgnanannnnnnnnnnnnnnnnnnnnnnnnnnnnnnnnnnnnnnnnnnnnnnnnnnnnnnnnnnnnnnnnnnnnnggcacgaggaaagcagggaggagcaggggtaggaactgagggtgcttagggtctggccatgccactgacgagctgtgtgaccttggccaggtcacctcccctctacaacaacagagggtcctctttccccctctacaacaacagagggtctgactggatcagagtgtacccaagggcaggatgtgtgcagctgacagtgcccagcacatggacacagtatgaagtaacattgaatcatatcctgtgaatgttttcaagcctttcaactcctttccaaaacttgcttaacagcatggatctggagcagaactgcttcctagaccagctccacggcttgtgagctgagtgaccctgatcctcacatatttctgtacctncattttctcatctg

SEQ ID NO: 30655 - DNA, 462 bp, Homo sapiens
  misc_feature (1)...(462): n = a,t,c or g
accttggagancctatgacnnnnnnnnnnnnnnnnnnnnnnnnnnnnnnnnnnnnnnnnnnnnnnnnnnnnnnnnnnggcacgaggtaaataagaccaaattatagtagaaggagagtaaataagctattatcttttagaagtggtaaagagcactgattaaatatatattagaacttggctagccaattttattgaacaatttctgttcaacaaaatgttgtttaaagtacagtttagaaaatgatggtaggttcatttcttgaattatctnnnnnncncgcttaaancattncgncnatgtaanatngngngnngcntgcnnngacaatacnttcctnncnnccttctnnacctacctctatctggcttntatttcgaccgngatgatggggctctngaaggccngagccactttttncgngattggctntgnanncnnngannctacnagccgnctcct

SEQ ID NO: 30656 - DNA, 469 bp, Homo sapiens
  misc_feature (1)...(469): n = a,t,c or g
ctttgnaaancnnnnnnnnnnnnnnnnnnnnnnnnnnnnnnnnnnnnnnnnnnnnnnnnnnnnnnnnnnnnnnnnnnnggcacgaggagagcagggaggaggtagagaggagaaagagagcagcccgggagcaagttctacagccggtcagtgctgagttgttggagctggacatccgggaggtgtatcagcctggctcagttctggactttcctcgacgtcctccttggagctatgagatgtccaaggagcaactaatgagccaagaggaacggagcttccaagactatcttgggaagattcatggggcttactcctctgagaaactcagctactttgagcacaatctggagacatggaggcagctgtggcgggtgttagagatgtctgacatcgtcctgcttatcactgatatccgacatccagttgtgaatttcccgccagcactttatgagtatgtgactggaga

SEQ ID NO: 30657 - DNA, 468 bp, Homo sapiens
  misc_feature (1)...(468): n = a,t,c or g
nnnnnnnnnnnnnnnnnnnnnnnnnnnnnnnnnnnnnnnnnnnnnnnnnnnnnnnnnnnnnnnnnnnnnggcacgagggaaagtgtctgcagtactaagaagctttttggggccatctgtccctaacaggagccacctgagacctgccctgggcttccaagcaagacaagctgtggctaatgggtggctgagcagtgctgggcgatcagagccatgtgtgtgggagggtgtctaggccacttgttatgggtaaggctcggcggtctggtttgaggctgctattccaggccagtgtcctgctgctggctatgcccagaggtgccatggctcaaggctcggctagatcagggacagtctccagaggatgcaccttggcactccgatgaggctatgatcacatctccagaagctaatcctggggnnnnnnnnnnnnnnnnnnnnnnnnnnnnnnnnnnnnnnnnnnnnnnn

SEQ ID NO: 30658 - DNA, 472 bp, Homo sapiens
  misc_feature (1)...(472): n = a,t,c or g
gaaacntnnnnnnnnnnnnnnnnnnnnnnnnnnnnnnnnnnnnnnnnnnnnnnnnnnnnnnnnnnnnnnnnnnggcacgagccaggctgaggtgcagggnnnnnnnnnnnnnnnnnnnnnnnnnnnnnnnnnnnnnnnnnnnnnnnnnnnnnnnnnnnnnnnnnnnnnnnnnnnnnnnnnnnnnnnnnnnnnnnnnnnnnnnnnntggaagggaatgttttaaaaacttatatttgtgcctgaactttgcacctaaaactacagccataactccagtacactcttggacctgagtcggcgcctcaccatctccctccattacctctgctagtggccttgtggtggtacagccagcttagcttagctgggcctgggggcagcagtcacccagggataggtccctcaaatcaatcaggccaggtcaggcctgggtgaaggaggccctgctgcactttggtggctgtgccatttt

SEQ ID NO: 30659 - DNA, 474 bp, Homo sapiens
  misc_feature (1)...(474): n = a,t,c or g
ancttggagancnnnnnnnnnnnnnnnnnnnnnnnnnnnnnnnnnnnnnnnnnnnnnnnnnnnnnnnnnnnnnnnnnnnggcacgaggtacttatgtaggaaattttaagctttgcttcagtgtttatctgctctttttaaaaatttttttctatattctccatagccaaccaagtatttatttgcacaataccaaaaggatatttccaaaaagtaaacattgtcnnnnnnnnnnnnnnnnnnnnnnnnnnnnnnnnnnnnnnnnnnnnnnacacaggaagtagagttaccataagcctcctgcctccctttccatcagcatcttgcacgagagtggtgcatttgttactaatgatgagccaacatccatgcatcattatcacccaaagcctgtagttgacattagggttcactcgcagtagggtgtgctctgtgagttttgacaaatgcatgatgacatgtatccgcccttac

SEQ ID NO: 30660 - DNA, 470 bp, Homo sapiens
  misc_feature (1)...(470): n = a,t,c or g
cctntatgacangattacgaatttaatatnnnnnnnnnnnnnnnnnnnnnnnnnnnnnnnnnnnnnnnnnggcacgagctgttttccacatacatgtgaatgactgctttggtttccaaaagagttttcatagcactttgtaaggggtttctctctctctattccaggagaggaaattgttctccataaaagagctacattgaggcctattgggtcttttaaagcattttcatttaaatctgtaaatgtgcaatttagaactgcaagcctcagctgagctcttgttgcttttagcagtctttgcagttgctgacttggctttctgttttcacagcagctattcccattgctctgtgaggctgntcatncatcgctgncccctttccttctcccacacntcctctaggcanctctgnctcaagnctgntntctggnctcaaacaccctaatttancnntatctgntntacc

SEQ ID NO: 30661 - DNA, 460 bp, Homo sapiens
  misc_feature (1)...(460): n = a,t,c or g
ttgnnttcgatannnnnnnnnnnnnnnnnnnnnnnnnnnnnnnnnnnnnnnnnnnnnnnnnnnnnnnnnnnnnnnnnnnnnnggcacgagagaaccattatagggctnnnnnnnnnnnnnnnnnnnnnnnnnnnnnnnnnnnnnnnnnnnnnnnnnnnnnnnnnnnnnnnnnnnnnnnnnnnnnnnnnnnnnnnnnnnnnnnnnnnnnnnnnnnnnnnnnnnnnnnnnnnnnnnnnnnnnnnnnnnnnnnnnnnnnnnnnnnnnnnnnnnnnnnnnnnnnnnnnnnnnnnnnnnnnnnnnnnnnnnnnnnnnnnnnnnnnnnnnnnnnnnnnnnnnnnnnnnnnnnnnnnnnnnnnnnnnnnnnnnnnnnnnnnnnnnnnagatcagaacataacaattatnacaatttgaatctgacattgcaaatcagctttaccacttncaaggtatagaaaatcca

SEQ ID NO: 30662 - DNA, 272 bp, Homo sapiens
  misc_feature (1)...(272): n = a,t,c or g
cgannnnnnnnnnnnnnnnnnnnnnnnnnnnnnnnnnnnnnnnnnnnnnnnnnnnnnnnnnnnnnnnnnnnnnnnggcacgagaattattagcattttgacagaaatttgtaaatgctgtggacaatcgtaatttttcctgttgatgattaaggttgtttggcacagtttcggctttcatagtcgtttctatggtcctgcactatttttcaaagtgagaactgtatttcaagtgacccttttttttttccaagngacatttttttttttttt

SEQ ID NO: 30663 - DNA, 453 bp, Homo sapiens
  misc_feature (1)...(453): n = a,t,c or g
natnnnnnnnnnnnnnnnnnnnnnnnnnnnnnnnnnnnnnnnnnnnnnnnnnnnnnnnnnnnnnnnnnnnnnggcacgagaaccaggcacatgagagggatcacagtgtttctctttagctcctttgaggactttgaagacccctgctctaatgcaattctaacttcttgattgtaacaaaatttaggaacactatgagtttgccctgaaaggagactctccaagtggggaggcacagatgatcaaggggctctgtctgcatcctttagcttcatattcatcttagttcttgcacatgttagatccactctcatcctcatgacatactcctggtaaatcataggccctgaatttctcattacagagctgatcggttgtaatttcctgctactaaaagccaagtaattacaccccaaactttaagttcaaggaangatggagattangcttggt

SEQ ID NO: 30664 - DNA, 456 bp, Homo sapiens
  misc_feature (1)...(456): n = a,t,c or g
aattcggcacgagatttttaaaagcctttagagagcaacttttgagctctgaaactggtttcaggtaggctcaagactatactttaggactattttcaggttatcagagtttctttgcattcaatgccagatatttcctgagtatcttggcctagccagaccatcctaccactcctaaaatttatactacttctcctataaatctcccctataaagattatttnnnnnnnnnnnnnnnnnnnnnnnnnnnnnnnnnnnnnnnnnnnnnnnnnnnnnnnnnnnnnnnnnnnnnnnnnnnnnnnnnnnnnnnnnnnnnnnnnnnnnnnnnnnnnnnnnnnnnnnnnnnnnnnnnnnnnnnnnnnnnnnnnnnnnnnnnnnnnnnnnnnnnnnnnnnnnnnnnnnnnnnnnnnnnnnnnnnnnnnnnnnnnnnnnnnnnnnnnnnnnnnnnnnnnnacc

SEQ ID NO: 30665 - DNA, 460 bp, Homo sapiens
aattcgcacgagctcccgtctctccctcttgccacatctggaatgagacataatccaaagatgaccaacctgtgggcttaccaacaacctgtggcttgatttgcaaagtttaactcagtcagttttaagtactatgcatgttgtctagattgaaattccgacttagccacttgctagttgtgtaaccttaagcaggttacccaaagttcactatgcctcagtttccttctctgtaatattagatcctatataatgtggttttgagaattaaaaatagttaagtccttagaacagtatctggctcatactcaaagcttcataaatggtagccattattattattctggtaggaatttggaattaagaaactgaataactaaaagagttactagtagaactaaaggtagagtgtcatgagatagaacagtgggttttattcctttttggggcattgtttcct

SEQ ID NO: 30666 - DNA, 456 bp, Homo sapiens
  misc_feature (1)...(456): n = a,t,c or g
aattcggcacgagnnnnnnnnnnnnnnnnnnnnnnnnnnnnnnnnnnnnnnnnnnnnnnnnnnnnnnnnnnnnnnnnnnnnnnnnnnnnnnnnnnnnnnnnnnnnnnnnnnnnnnnnnnnnnnnnnnnnnnnnnnnnnnnnnnnnnnnnnnnnnnnnnnnnnnnnnnnnnnnnnnnnnnnnnnnnnnnnnnnnnnnnnnnnnnnnnnnnnnnnnnnnnnnnnnnnnnnnnnnnnnnnnnnnnnnnnnnnnnnnnnnnnnnnnnnnnnnnnnnnnnnnnnnnnnnnnnnnnttatccatcctgctcagagcttaaacattataagcaaatatctactatattattctttgattaaatattgggttcatctatgtaagtttttttcatgnatcttcatgagtgaaatttttctggaatttgatgtcaagagctatcccatctactttattataaaatg

SEQ ID NO: 30667 - DNA, 535 bp, Homo sapiens
  misc_feature (1)...(535): n = a,t,c or g
gnnnnnnnnnatttgaanaccgttatgttgnnnnnnnnnnnnnnnnnnnnnnnnnnnnnnnnnnnnnnnnnnnnnnnnnnnnnnnnnnggcacgagatgaaaagcacagaagaacttacgctcggcgtcccactccaaatgatgacactttggatgaaggagtaggacttgtgcattcaaacatagcaactgagcatattccaagccctgccaagaaagtaccaagactccctgccacagcagcagaacctgaagcagctgtcattagtaatggggaacattaagatactctgtgaggtgcaagacttcagggtggggtgggcatggggtgggggtatgggaacagttggaggaatgggatatctggggataattttaaaggattacatgttatgtaaatttttatgtgactgacatggagcctggatgactatcgtgtacttgggaaagtctctttgctctatttgctgacatgcttcctgttgtggctgccaatgccnaatgtactnnaatgatggtnanggcttttntaaac

SEQ ID NO: 30668 - DNA, 518 bp, Homo sapiens
  misc_feature (1)...(518): n = a,t,c or g
annacccgctattttgnnnnnnnnnnnnnnnnnnnnnnnnnnnnnnnnnnnnnnnnnnnnnnnnnnnnnnnnnnggcacgagtctttattggatgtgagggccaaaagggactgtaactcctgtctcaggaatggggatagatgggaggttcttgaagccccaggcgaagctggtacctctggctacagcttgctctctgagacctggggcttcactcggatcacgccctcctgggcacaggtcacagctaggactccatcctgacgccacagccgcccatggaccagcccccgagagccacctgtgggtgaggtgaagggtgatgatggcctgcttcagaacagccaaatacactttttttttttccctaagtcaaatgcccactaantgnccnggnngncctnanccncntggattcangggancttccnnctttaacctcntgannnnctcgnattactggngnacgtcaccnngcccncctcnaaggggnccttttnttaanggnngggccacc

SEQ ID NO: 30669 - DNA, 513 bp, Homo sapiens
  misc_feature (1)...(513): n = a,t,c or g
atttgaanaccngnnnnnnnnnnnnnnnnnnnnnnnnnnnnnnnnnnnnnnnnnnnnnnnnnnnnnnnnnnnnnnnnnnggcacgagggctggttcatccttgaatctatttcagattgagttgagagaaactttcagctttgtagttcatactctatcctggataaaatgttatttaaagcagatcagttacttataaagttagatagacatatttaatttatcctacttttgtgattttttaaaaatgataagtgaaatattgtttcaatagataaaattttaaaaaaaactgccttttttgtaggtggggggtgtgtgggaagattattctcacactgctgcttttccagattagttctaaaattacactgcatttgcatttacatttctttggaattctataaaaatgtattatttaggtcattttcttagattgaatttggaggaattcatcctgtgttaaaagctgagattctttgctgtagtcttgaaaacagtttttctaatact

SEQ ID NO: 30670 - DNA, 512 bp, Homo sapiens
  misc_feature (1)...(512): n = a,t,c or g
acccgnttntctgatnnnnnnnnnnnnnnnnnnnnnnnnnnnnnnnnnnnnnnnnnnnnnnnnnnnnnggcacgagggctccccctctcttctcctggtttcatccatcctctggagtcaagttattaggttannnnnnnnnnnnnnnnnnnnnnnnnnnnnncacaattaaatagcttggttgctggagctcctttttttctcttagggactgctgtggctacccaatgtgaagccacagacctgttaaggctaaagagcaggtgaacagtagttcagccagtgaattagcatttcaaggtccagtgctccaaagggcattgcccaagtgagcagctaagtagaagcaggaatttactcatactgtaatgtctgtgtactatttctgtgaaaatgacttttgaattgtctgaaggctaaacatttggtgctaaactttaaacttatctattttgntgnaattgctctagaatgnacttttcctgnctcaatattaaagagatcaaatggaa

SEQ ID NO: 30671 - DNA, 502 bp, Homo sapiens
  misc_feature (1)...(502): n = a,t,c or g
accnnnnnnnnnnnnnnnnnnnnnnnnnnnnnnnnnnnnnnnnnnnnnnnnnnnnnnnnnnnnnnnnnnnggcacgagatattttagagcactataattatagactacagtgtcatgttgattttataacacattcttagggtttgtgtaggtgtttaagatgtataaactaaatttcttataagaccttgaggttaagctagcaaggtagagttgtttaaattcaggaggaaaacgacttgttcttaaaagtctttttttcatgtaacttccccatgtttcatttctagagataaacagtaaaatactcacaacctgagtatacagcccaatgannnnnnnnnnnnnnnnnnnnnnnnnnnnnnnnnnnnnnnnnnnnnnnnnnnnnnnnnnnnnnnnnnnnnnnnnnnnnnnnnnnnnnnnnnnnnnnnnnnnnnnnnnnnnnnnnnnnnnnnnnnnnnnnnnnnnnnnnnnnnnnnnnnnnnnnnnnnnnnnnnnnnnn

SEQ ID NO: 30672 - DNA, 537 bp, Homo sapiens
  misc_feature (1)...(537): n = a,t,c or g
gnnnnnnnnnnntttgganncccnnnnattgaanacccgnnnnnnnnnnnnnnnnnnnnnnnnnnnnnnnnnnnnnnnnnnnnnnnnnnnnnnnnnnnnnnnnnnggcacgagggaaaaatgatgaatggccttcgcaatcttgggatcaatggggaagatatgagcaaatttttaaaattaaattcacacatttgggaatatacttatgtattagatattcgacattcttctataatgtggattaatgacttagaaaatgatgatttgtatattacatggcctacaagttgccagaaacttctgaagccagtatttcctggaagtgtaccttccataaggcgcaattttcataatttggttctgtttattgatccggcccaagaatataccttggattttataaaacttgctgatgttttctattctcacgaagttcctcttagaattggttttgtgttcattcttaatacagatgatgaagttgatggagcaaatgatgctggagttgctctctggcgagctttcaactatattg

SEQ ID NO: 30673 - DNA, 505 bp, Homo sapiens
  misc_feature (1)...(505): n = a,t,c or g
accngcttntnnnnnnnnnnnnnnnnnnnnnnnnnnnnnnnnnnnnnnnnnnnnnnnnnnnnnnnnnnnnggcacgagtaaagcacctggtgtactggcagaagagtgagaggatttaacttggcagcctttacagcagcagccagggcttgagtacttatctctgggccagggactgtattggatgttttacatgacggtctcatccccatgtttttggatgagtaaattgaaccttagaaaggtaaagacactggctcaaggtcacacagagatcggggtggggttcacagggaggcctgtccatctcagagcaaggcttcgtcctccaactgccatctgcttcctggggaggaaaagagcagaggacccctgcgccaagccatgacctagaattagaatgagtcttgagggggcggagacaagaccttcccaggctctcccagctctgcttctcagaccccctcatggcccacccctnttaaccccttcaccaangggagct

SEQ ID NO: 30674 - DNA, 513 bp, Homo sapiens
  misc_feature (1)...(513): n = a,t,c or g
atttgaanaccgnttttcnnnnnnnnnnnnnnnnnnnnnnnnnnnnnnnnnnnnnnnnnnnnnnnnnnnnnnnnnnggcacgagcccaagtatgttttactgcctgtgaaaagtccaaaaggacaatctttatataaaaatggactgtgttgacagcctcttccctaccttgggcccttgataaatgtttattggctgaaaatcggatgaatactgaattttaatggatctcaggtcttgtctttttttcccccttttatgctccatggaggttaatgggctagttggtgccattattcatcatttgaccctctggaattgtaactaggataagtaacttatagttcagtgctaaccaatatggcttagaccatgagtgtgggcattaaggagagaacagtgagttagaccagtcgggtgagttgctaaaggaactggggcttgaacagaagcttanagcatggtgggagtttgagaganagtgtgtaagaagccttnagcangggagggcaa

SEQ ID NO: 30675 - DNA, 438 bp, Homo sapiens
  misc_feature (1)...(438): n = a,t,c or g
ttgnantttgaatacnnnnnnnnnnnnnnnnnnnnnnnnnnnnnnnnnnnnnnnnnnnnnnnnnnnnnnnnnnnnnnnnnnnnnggcacgnnnnnnnnnnnnnnnnnnnnnnnnnnnnnnnnnnnnnnnnnnnnnnnnnnnnnnnnnnnnnnnnnnnnnnnnnnnnnnnnnnnnnnnnnnnnnnnnnnnnnnnnnnnnnnnnnnnnnnnnnnnttagattaaatcttaaaagactcttttgtgctctaaaattatataatgggatggcagcnnnnnnnnnnnnnnnnnnnnnnnnnnnnnnnnnnnnnnnnnnnnnnnnnnnnnnnnnnnnnnnnnnnnnnnnntatccacttgtcacaatggctaaaataaacaatagtggcaataccaagtcctgtgaaggatgtggagaaatggatcacttatacactgctggtg

SEQ ID NO: 30676 - DNA, 505 bp, Homo sapiens
  misc_feature (1)...(505): n = a,t,c or g
accctttgaacaccgnnnnnnnnnnnnnnnnnnnnnnnnnnnnnnnnnnnnnnnnnnnnnnnnnnnnnnnnnnnnnnnnnnggcacgagcttggtgtgggttccctttatttacagcttccaagccttttatttagtcagtcatccaaatgaagtgtcttggccaatggcttctctaattattgttctgaaactttgtggttatgtaatcttccgaggtgcaaattctcagaaaaatgcattccggaaaaatcccagtgatccaaagcttgcacatttaaaaaccattcatacttcaacgggaaaaaatcttctagtttctggatggtggggctttgttcgccaccccaattacttgggtgatctcatcatggccttggcgtggtccctcccatgtggttgtaaccacattctgccttatttctacataatttatttcaccatgttgcttgtccaccgagaagctcgtgacgagtaccactgtaagaagaaatacggcgtggctt

SEQ ID NO: 30677 - DNA, 440 bp, Homo sapiens
  misc_feature (1)...(440): n = a,t,c or g
tttggatacctnnnnnnnnnnnnnnnnnnnnnnnnnnnnnnnnnnnnnnnnnnnnnnnnnnnnnnnnnnnnnnnnnnggcacgaggtgtatttcctagtgaattacttgcttatgactattgcctgttctttttttccttagtgatttatttttatatatttttagtgttagactgttaatatatgttgcaaatgtgtttctcagtttgccatttatcttggaatcttcatggcagtgtattttcttgtggtgtttttgggtattttgttgctgtccaatatttttgccttcttataaaagtaatcacacttttcaatctttgctgtatgtttttgaactttgtggtcatgcttagaaggattttacccatctcaagtttacataaactttcacttgtattttctcctggtactttcatatgtggttcatatttaaaaac

SEQ ID NO: 30678 - DNA, 466 bp, Homo sapiens
  misc_feature (1)...(466): n = a,t,c or g
gnagtgtctccnttnnaaaccctnnnnnnnnnnnnnnnnnnnnnnnnnnnnnnnnnnnnnnnnnnnnnnnnnnnnnnnnnnnnnnnnnggcacgagcggcacgagtagagaaaaaaaaaacaagaaaaagaaaaagtaaaatgaataatgcagaccctccaattgttcaagcagtcctaatgttctacacaggaaaccactatcttctaaaatattttatggaatcatgaaaaaatatttctgctgggtgggaaggcttccgtgtgatttctcttgaagaatagtcttcaatcccattttgaaatctcaattcctccaaattccaaagctgaaatttcacacctttcatgtttgcaagttttaatgagaattatatgtatacttaggtatcaactgcttctagtgttggatgagcttaggtggaaagcttcattaatgagcaatagacaacctcctgaatctactt

SEQ ID NO: 30679 - DNA, 463 bp, Homo sapiens
  misc_feature (1)...(463): n = a,t,c or g
gnnagtgnnnnnattgnaaacnctattannnnnnnnnnnnnnnnnnnnnnnnnnnnnnnnnnnnnnnnnnnnnnnnnnnnnnnnnnnggcacgaggagactgcatagggctcggcgtggtcttgggcaagcaatttaacacatctaagcgttggtttattcaccaaaaatgaagaatcttgattagatgacctcttcatttctatggcttctccaagctcaagacctctctgacaacagaagcaacatttatgatttcaaactcttccacgtttctagttttcacatctttcttttaggacttattggtcacagccatgatttatatgaaatcaagtgtttggtcaacagcacgactcctcagaatgagactgtgactatgggaatcctagaacctactttataatgatccttttaacaaataggtttcaaacaacacattgtggcaaaagacaggcttgccc

SEQ ID NO: 30680 - DNA, 423 bp, Homo sapiens
  misc_feature (1)...(423): n = a,t,c or g
tntntannaattcggccagagattccagtcatttattaattcattaatgtttactgagtgtctacaatgtgcatgtactatttttggacagtgaccaaaagagattaacatctcagatgtcatggatcttgtattttagcatggagaggcagacaaatattacataggttaaaggtggcgtgcaagcactaagcaggtaaaggataaggcagaggtttactcagcaaaagttaacatttgaccaaacagttgagttcaagaaaacaagccatgcaggtaggtatgtgaaggaagagcattccaggcagaagtattagcaagtgccaaggcctcagaagtgctaacaactctagtaggagagttgaaaggnnnnnnnnnnnnnnnnnnnnnnnnnnnnnncttctcaaaagaagacatttatgc

SEQ ID NO: 30681 - DNA, 531 bp, Homo sapiens
  misc_feature (1)...(531): n = a,t,c or g
aanccctnnnnnnnnnnnnnnnnnnnnnnnnnnnnnnnnnnnnnnnnnnnnnnnnnnnnnnnnnnnnnnnggcacgaggatggaacatctgagaccgggagaggtgaagtaacttgcatagacccacatagctgaactcattgggaatacactggattccaacccaggccatctccctcaggagtccgtgctcttggtcaccatgcagtaggtacagctactatcgtatggagtctgtgaaataaaagcaaaagggctctcacaatgaaaggagttaaaaaccacgaactttggcaatttcttctttaatacaaaatatggcccacagaggatgacgatctgcccaaggttatagagcaagttcagttgtataaaagaaactagaactttctcccagtgaggatgccacagggaaggggtctaggaccttcggatcctttgcaggagcatgcatgcaagccatacaccactctaggattcaccagaccgtgtgccaccaggggcgaaatgccagctccgtgccagcgcccg

SEQ ID NO: 30682 - DNA, 535 bp, Homo sapiens
  misc_feature (1)...(535): n = a,t,c or g
nnnnnnnnnnnnnnnnnnnnnnnnnnnnnnnnnnnnnnnnnnnnnnnnnnnnnnnnnnnnnnnnnnnnnggcacgaggcccttctcacccagcagcagggactgggctatgacaaggctgtaatcataataataacagtgataatggtggtaataatacgacagtgatgatgtaacgatggtgataataataagcagaatcatcatcgtcagaaaagctaacatttggtgagcacgcaccctgcaccaggtgctttatttatgttcattcattccctcctcccaacaaccctgtgaggtagttgctgttattgacctcattttagagatcaggaaactaggagggggtcaaataacccgacactcatccagctggtacctgggtgagctggagtctgagctgaacccaggtggcccgactctagaaccttagtcactgcagtgacaccatccacatataaagggagacccccacccccactccctgccagcagattcacttaggcaaggaccagtgggcactgagaggctaagaa

SEQ ID NO: 30683 - DNA, 503 bp, Homo sapiens
  misc_feature (1)...(503): n = a,t,c or g
tngacttcngctacnacatgattacgaatttaatacnnnnnnnnnnnnnnnnnnnnnnnnnnnnnnnnnnnnnnnnnggcacgagatgagcttcataccctgtcacgatcatcctggagggaagacatgctcttagtaaaggctgcaagctgggtcacagtactgtccaagttttcctgaagttgctgaacttccttgcctttcttgttcaaagtaacctgaatctctccaattgtctcttccaagtggactttttctctgcgcaaagcatccagtttctcttgcatattcttcttctctttcaggtgcttctcttctgcctgttccagtcttcgctcaagatcttcatccttttgtttcatctggcttttaactgattctttatttgactgaagttcctttttcaacttgagattgccagctatgacccttgctgnttcactttgagngcatctagcaggactttgaagctagctaaanttgcttgngcctttttgccgggg

SEQ ID NO: 30684 - DNA, 518 bp, Homo sapiens
  misc_feature (1)...(518): n = a,t,c or g
ttgnntttgannacnnnnnnnnnnnnnnnnnnnnnnnnnnnnnnnnnnnnnnnnnnnnnnnnnnnnnnnnnnnnnnnnnnnnnggcacgagaactgaggctcaaagaaatgaaagaacatggccaagcctgtgtactatgtcagcagaagagggatttgaatgccagaggcaacgctatttcagttcatcttacaacgccttagaagtagaaggaaagaaaggttcatgggcaaagtctggccctgctatggactccacggtaatagcaatatttctactttgatgttcccattaaaatcttatcctctagctgagggggcctggcagagtggcaaatgtcaccctcgagcaggcacgtaagtcaagtgataaatcacattcagagtttgagttactttccctgcttagggattgtgagtgggtctccctagttcaaattcatcagttggctccattgctactcagtgctaacaggaaattgnactgatttanctggtaattaagaacttcttcagcc

SEQ ID NO: 30685 - DNA, 511 bp, Homo sapiens
  misc_feature (1)...(511): n = a,t,c or g
ttggnnntcnnnnnnnnnnnnnnnnnnnnnnnnnnnnnnnnnnnnnnnnnnnnnnnnnnnnnnnnnnnnnnnnnnnnggcacgagataaaaagttagttacttgtatataaaaggttttttgtcttatgtggttttttaagcaataaaaaccaatttattcaagacaaaagtatgatgcagagagattccagccatgttttagataacatattgtatcagggcctattgaaactagaaatatatgcccaacctaaagacatttagagtcatagtacttcaaaacaccacaggccaaacaataagtatgagactcccagtatcctgtttttcttaaagcagtgagagctactgaagatttttgaggggataggtatctgatagagttggtttacaatttctgtgaatgagtctttgtgactgctttatggtaagcttctttaaggtttctcattatttctaacattatttctaacattcaagctaagtgctccttggcntggannatgttca

SEQ ID NO: 30686 - DNA, 525 bp, Homo sapiens
  misc_feature (1)...(525): n = a,t,c or g
gcntnnntccccccttgacnccgttatnacnnnnnnnnnnnnnnnnnnnnnnnnnnnnnnnnnnnnnnnnnnnnnnnnnnnnnnnnnnggcacgagtatatgcatttgtaacaatagcaaaagagcatctctaatttaggaaaacttgagcataggcctctaacactcccctaccccctcaccatcaatagcaatataggaaagtctacaagggtctttgaaactagagatatttgttgcccaaattccaagaatatcctgaaatttctgctaaactaaatctcttgttaatcaactgattagcactctctgatgagtgttaatggttttagtggagggaataaagcagaatctaacgtaacactatagatgaaacccatctgcttcaaacacctggaaaccttagataaactataacacacatcctttccctgcacagctgagctcccaagagccacaaattaggagtaagctaaaacccaaagtggagagtctgtgagttgacccgcagaagcccggtttttg

SEQ ID NO: 30687 - DNA, 507 bp, Homo sapiens
  misc_feature (1)...(507): n = a,t,c or g
ntcnnnnacagcttgacnnnnnnnnnnnnnnnnnnnnnnnnnnnnnnnnnnnnnnnnnnnnnnnnnnnnnnnnnnggcacgagagnnnnnnnnnnnnnnnnnnnnnnnnnnnnnnnnnnnnnnnnnnnnnnnnnnnnnnnnnnnnnngctagcacttagnnnnnnnnnnnnnnnnnnnnnnnnnnnnnnnnnnnnnnnnnnnnnnnnnnnnnnnnnnnnnnnnnnnnnntgggattttctagatacaggatcatgtcatctgcagacaaagatagtttgatttccgtcttcctatttgaatannnnnnnnnnnnnnnnnnnnnnnnnnnnnnnnnnnnnnnnnnnnnnnnnnnnnnnnnnnnnnnnnnnnnnnnnnnacagccttgtcttttacaggttttcaagggaagtgctttcagcttttgcccattcaatgtgatgctgctgagggtttgncataggtggcttttattattttgcagtatggtcatttaatacctagttaat

SEQ ID NO: 30688 - DNA, 434 bp, Homo sapiens
  misc_feature (1)...(434): n = a,t,c or g
nntttgaanacccgnnnnnnnnnnnnnnnnnnnnnnnnnnnnnnnnnnnnnnnnnnnnnnnnnnnnnnnnnnnnnnnnnnggcacgagagcaggaccacacgtgtgtatttatattgagtgccctcactcatgataaggtgacttcatggagacccagaaactcaccctaaggggtgttcacctttgaggtgggcatccagatgctgaggggaagtggggtccatcctctgaggtccaggggcctactttgtgagctcagttgtgttcacctgtggttcagtgtacctcggcccctaagccaagtgatcgttcagtgacttgcagcaatgtgggaagtgaggggacccctgccacaccccccaccaccccctgtagagtcactgaccttcatccttcaccctggtcctccatggtgcagcagcatctcatgggc

SEQ ID NO: 30689 - DNA, 424 bp, Homo sapiens
  misc_feature (1)...(424): n = a,t,c or g
gctnnnnnnnnnnnnnnnnnnnnnnnnnnnnnnnnnnnnnnnnnnnnnnnnnnnnnnnnnnnnnnnggcacgagacctctgcgtttgtaacatcttcagtattcaaggcttggatgtaggagagaagccagtttaaatggtcctcacttgtttagcacctacttatcaccccgggagcccttagagttaataaggagcccagtgcaccggtgatcagctactttatttccagaagtgggatgtgggggccctgctgctgcagtgggggtttgagggcagctgttcacctgggtgcatgtcctggatctcatgttgggggcggcagtgctcccctggaaggggatgagccagggaggagtccgcaagggaggatgggccagggagggagggctctgaagcacacccttgctccctgggcagggtc

SEQ ID NO: 30690 - DNA, 426 bp, Homo sapiens
  misc_feature (1)...(426): n = a,t,c or g
tttgaanncctnctatgttgnnnnnnnnnnnnnnnnnnnnnnnnnnnnnnnnnnnnnnnnnnnnnnnnnnnnnnnnnggcacgagnnnnnnnnnnnnnnnnnnnnnnnnnnnnnnnnnnnnnnnnnnnnnnnnnnnnnnnnnnnnnnnnnnnnnnngcagaaaacatgcaaggtgagactgagttgggatgagtgtgacacttgcctcaggtgcaaannnnnnnnnnnnnnnnnnnnnnnnnnnnnnnnnnnnnnnnnnnnnnnnnnnnnnnnnnnnnnnnnnnnnnnnnnnnnnnnnnnnnnnnnnnnnnnnnnnnnnnnnnnnnnnnnnnnnnnnnnnnnnnnnnnnnnnnnnnnnnnnnnnnnnnnnnnnnnnnnnnnnnnnnnnnnnnnnnngngtgtgtgtgntgagtgtgtnngngttgc

SEQ ID NO: 30691 - DNA, 423 bp, Homo sapiens
  misc_feature (1)...(423): n = a,t,c or g
ttganncctcnncttgaanacngcttgacnnnnnnnnnnnnnnnnnnnnnnnnnnnnnnnnnnnnnnnnnnnnnnnnnnnnnnnnnnggcacgaggagggcccatgaatggatgagtcttttcttgggttaatgaattactgggttatcatgggaatgggactggtagctttatagaaacataaagagagacctgcgctagcacagtctgcccccttgccatgtgatgtcctacgttgtctcaggattctagagtgttgtcacggcaagaaggctttcaccagttttgctccctcaaccttggacttcccagcctccaactataagagataaatttcctttcttataaattgctgagttacaagtattccgttataggcgacaggaaacagactaagacatatgctaacatgttaattatttt

SEQ ID NO: 30692 - DNA, 456 bp, Homo sapiens
  misc_feature (1)...(456): n = a,t,c or g
ttganntntgataccntatgacnnnnnnnnnnnnnnnnnnnnnnnnnnnnnnnnnnnnnnnnnnnnnnnnnnnnnnnnnnggcacgagccacaaatgggcaattcttagtctccatgcatgaattagtattcagaacagaagatttgggctgtctttttgcaatttcaggattgaaagggaccagtaagattgctcagcatctgtccagtaatacttggaaactagcttatcccttcagtaaagtcctctctgggattcttgtccattttcttccacatcttacccatgagtgtggacaaaaatagtaccaggatgtgattgttgtaattcatgtgttctggttactttctcttcttaacaccagctgtaccgccgactctcagaaattctnggcttgaatngatgaaaaccttggncttaaccgcttcttaggaaaatngaaagtgtttnacctc

SEQ ID NO: 30693 - DNA, 455 bp, Homo sapiens
  misc_feature (1)...(455): n = a,t,c or g
tttgatntttgaaaaccntnnnnnnnnnnnnnnnnnnnnnnnnnnnnnnnnnnnnnnnnnnnnnnnnnnnnnnnnnnnnnnnnnggcacgagcagttacctcctgattaattccctgcttcttgtgttgctttccacagatcactgcctgcatagcaaacagaatgatttcctaaaaaaaaaaaattgagactgtattgttcccttgcttaaagccctccaacagcttcccattgcaataaaaataaatgtcaccttcttatttggcctataaggcctgacgtggtttggctcctgcctctgtaaactcatcatctaccccttgtccccaggttctcatgctccagccacagtggctaccttcctgtcccgcgaatgtacccagtatatactacctcaaacttttgctctggaacattcgttctcatttttgcatggctaaccctttctgaaata

SEQ ID NO: 30694 - DNA, 443 bp, Homo sapiens
  misc_feature (1)...(443): n = a,t,c or g
ntttganacctttnnnnnnnnnnnnnnnnnnnnnnnnnnnnnnnnnnnnnnnnnnnnnnnnnnnnnnnnnnnnnnnggcacgaggcaacaggtaatttttagtataagtatgtcccatgcaatatttggaatacatgtatgctgaaaattacttctcatatttttaatttgctacatttggcaaccataccccctagtttcctgatatacattggccatatgcaaggacctttcaacgttctctatagttttcctaaaagaaatctgagctctaatgtcagccttgcccctggtaatacagtactgctgattagagctgaggttcattcagaactttttttggactgaaatacatatcatgaaattcgtatcatgaactctttaggggggagttgcatttgtatacacaactctcccctaaactccacctctttttctcctcc

SEQ ID NO: 30695 - DNA, 448 bp, Homo sapiens
  misc_feature (1)...(448): n = a,t,c or g
annatttganaaccnttgacnnnnnnnnnnnnnnnnnnnnnnnnnnnnnnnnnnnnnnnnnnnnnnnnnnnnnnnnnnggcacgagaagaactctcacaactcagtactaaaaagacaacccaatttttnnnnnnnnnnnnnnnnnnnnnnnnnnnnnnnnnnnnnnnnnnnnnccagtcaataagcatatgaatatatgctccaagtttttagggaaatttaagttaaaaccacaatgagataccactgcctaccttctaggttctgatcaaaaagataggcaataggcgtgagccaccatgcccagccaatgcatcttttatccattcacttaaccactgtatagtattctattacatggatatactgcaatttatttattcattccttctagtcaaagacatttagatgattctgattttgccaaacaatgccnaaattcacatt

SEQ ID NO: 30696 - DNA, 547 bp, Homo sapiens
  misc_feature (1)...(547): n = a,t,c or g
gnnnnnnnnntnttgganncccnttgaanaccgtnnnnnnnnnnnnnnnnnnnnnnnnnnnnnnnnnnnnnnnnnnnnnnnnnnnnnnnnnnnnnnnnnggcacgaggactagatgaaattacttatgatcctgacttcctgacacaataattttaagtgttttggtgtgtatctttatagtcttgcataggggttggcaactttctgtaaaggcagcttcttaactctgttgtagcatgaaagcagccataaacaatatgtaaacaaatgagcgtgcttgtgttccagtgaagctttatttatggacactgaaatttgaacttaaggtaactttcacatattgcaaaaaattcttttactcatttttttccccaaacattgaaaaatgcaaaaaccattctttgtgtgcaggccacacaaaaacagttgacaggccagatttggctgtgtagccagtttgcaggcccctggcttgtgcatttgttttatggttatagtcatatcttacattgaattttattacctaccttttctactttatatatg

SEQ ID NO: 30697 - DNA, 558 bp, Homo sapiens
  misc_feature (1)...(558): n = a,t,c or g
gnnnnnnnnnnntnnnnnnnnnnnttgganaccgtttnnnnnnnnnnnnnnnnnnnnnnnnnnnnnnnnnnnnnnnnnnnnnnnnnnnnnnnnnnnnnnnggcacgagaaaaaattaaaaagcattttatagactgcatgtttgtgtcccccctccctccgcannnnnnnnnnnnnnnnnnnnnnnnnnnnnnnnnnnnnnnnnnnnnnnnnnnnnnnnnnnnnnnnnnnnnnnnnaataataagggtgaagccctgcatgggattagtgcctttacaacaagagaccctagacagcttgcttccactctttctttgctcttcaccatgtgaggacacagcaagaaaacagacaactacaaatcaggaagagggcctaatttgtgccaaccatgctggcactcttctctannnnnnnnnnnnnnnnnnnnnnnnnnnnnnnnnnnnnnnnnnnnnnnnnnnnnnnnnnnnnnnnnnnnngttatagttgcccatattaagacagcaggatgcaaaattgtggccagtatgattgctttgacatgaaacaaantttaag

SEQ ID NO: 30698 - DNA, 534 bp, Homo sapiens
  misc_feature (1)...(534): n = a,t,c or g
tttggaancccntttgaanacccttnnnnnnnnnnnnnnnnnnnnnnnnnnnnnnnnnnnnnnnnnnnnnnnnnnnnnnnnnnnnnnnnnggcacgagcggcacgaggggtggatggattgtgttcctgagacgcaaaaacggacgcgagaacttctaccaaaactggaaggcatatgctgctggatttggggaccgcagagaagaattctggcttgggctggacaacctgaacaaaatcacagcccaggggcagtacgagctccgggtggacctgcgggaccatggggagacagcctttgctgtctatgacaagttcagcgtgggagatgccaagactcgctacaagctgaaggtggaggggtacagtgggacagcaggtgactccatggcctaccacaatggcagatccttctccacctttgacaaggacacagattcagccatcaccaactgtgctctgtcctacaaaggggctttctggtacaggaactgtcaccgtgtcaacctgatggggagatatggggacaatacc

SEQ ID NO: 30699 - DNA, 543 bp, Homo sapiens
  misc_feature (1)...(543): n = a,t,c or g
gtnnntnnnntnatttgaanacccttttgaaaaccntttgacnnnnnnnnnnnnnnnnnnnnnnnnnnnnnnnnnnnnnnnnnnnnnnnnnnnnnnnnnnggcacgagtaccctggtactaactttttttttctttctttctttctttttacacagagtctcactctatcgcccagggaggcctggtactaactcctgatagtcacaccctccccacaaccttaactagctcctggcaactgttgatttgttcttcatcactacagtttcatcattttgagactattatatgcatgcaatctttctcagtgctttattaaggctggcttgacttcgtttagtcttaacaatgtatgggccagagatttcacaagcaacatgttctttaagaatcataactactttaaggtagctactattattttatccagccttatagatgaaaaaaaacatatctttagaaaattttaattttagtaagtttcccagagtcaaaangttaataatgccaaaccagaatgtgaggtcaggnagtgagacccc

SEQ ID NO: 30700 - DNA, 490 bp, Homo sapiens
  misc_feature (1)...(490): n = a,t,c or g
antntnnnnnnnnnnnnnnnnnnnnnnnnnnnnnnnnnnnnnnnnnnnnnnnnnnnnnnnnnnnnnnnnnnnnnggcacgaggagaggaacctgcagtccctacttgggtagagccaggcgccccttggctaagacgtcgaggagcgtggtagcgacgggtgatcttcgctgcggacttggttcggagggacgtccgcttctggtggacagattgagcaaagaacctttgagcggtcaagggaaagacaagccgactcttcagatccctgtggacacactgcctgctcttccatatcatggccctccacccccgcagagtccggctaaagccctggctggtggcccaggtggatagtggcctctaccctgggctcatctggctacacagggactctaaacgcttccagattccctggaaacatgccacccggcatagccctcaacaagaagaggaaaataccatttttaaggcctgggctgtaaagacag

SEQ ID NO: 30701 - DNA, 490 bp, Homo sapiens
  misc_feature (1)...(490): n = a,t,c or g
ttgaatacccgtnnnnnnnnnnnnnnnnnnnnnnnnnnnnnnnnnnnnnnnnnnnnnnnnnnnnnnnnnnnnnnnnggcacgagtcaactttgggtccaaaggccctcagtggatgtaaaataggtacatgaggccttgaactgaacatttttttcacttcaccataacctggattttcccagtttaggagcatctgtttgtcttgataacgtttggaacaaagtgaaaaaaactggactttgaagagaacttcaggtgaattacacatttaagtcagattttccatgtctttgtcccatgttcagtaattcaagctgttaggagccctcaactttgtacatatatttccttcctatctctgcctcttcatacctggtacttaccgcggaatttgaaatctttctgtggctgtaagcaagaaaggcggnaaaaataccngaagttaaaggggattgnatggttcagatttggttgatgaatgagatggtt

SEQ ID NO: 30702 - DNA, 491 bp, Homo sapiens
  misc_feature (1)...(491): n = a,t,c or g
gnatttcngnnnnnnnnnnnnnnnnnnnnnnnnnnnnnnnnnnnnnnnnnnnnnnnnnnnnnnnnnnnnnnnnnnggcacgagcctgaatattgctagccccttcctaccctctttataattgtataatctgagtttttgccagacagtaaaattatggtctccatttttccatttccataacagcatttgttaatagataattgcaaaactggtagcaatttaaccaaactagtcaaaaggatcccttaactgcactgctatggaactggggtctgaagcacaaagataaacattatttaatgtaaaaccaaagtgacctggaagcaagattatcttaatgcctcttttgcatccatacgcatacagcataatgctcagaaaatttaagtctgacaaaaatcaacataaacatgccagtatgagtgtctcaattgtagctagggcggccaacactcttcaaagttctacattgngtatcagtctcagatc

SEQ ID NO: 30703 - DNA, 482 bp, Homo sapiens
  misc_feature (1)...(482): n = a,t,c or g
ggngnanttgnaaccnnnnnnnnnnnnnnnnnnnnnnnnnnnnnnnnnnnnnnnnnnnnnnnnnnnnnnnnnnnnnnnnnnnggcacgagaaatacagccaatgctcctggttcactttctgatttttcgagattacctgattccttggaaaactagtaacacaaatgtgggcatagagaaaataattttccttcctttcggatttagataggaaacaggaacagattgtcccaaaaggtatctactgtcctgatgtagcacttgctgtgaatctctaagccttttttcttgtaatttctggaaagttcctggcttccaggaattatagctggaatccctcagtacctgcatgtttcaggcacacagttaaatgggattaaaggtgcagttatataattaaacagaacttctcctgagttgngntttaccctggnctttctgnctgnnaacnngnntnnnnangannacntntnnnnnttct

SEQ ID NO: 30704 - DNA, 492 bp, Homo sapiens
  misc_feature (1)...(492): n = a,t,c or g
gnaattgnaaaatttggaaccnctatgacnnnnnnnnnnnnnnnnnnnnnnnnnnnnnnnnnnnnnnnnnnnnnnnnnnnnnnnnnnggcacgnnnnnnnnnnnnnnnnnnnnnnnnnnnnnnnnnnnnnnnnnnnnnnnnnnnnnnnnnnnnnnnnnnnntgatgaaatctttcgaatgaaaagatttcttggtctccacttcttgaatcacattgtcaggaagttctccttcctgtctagcttcaatccctcctttttttagctgaagagcatttcccgttgtttagccatatttttttaaaaatagagagatgaggggcttggttttcagggaaagttccnattctgnnggaacagagacccntntntnntgctggcttnnngntggggacttgtgaccnnctnnttttggctnantnnnggngnnngacnnngtntnnnggnnnnnttnntgntnngngncgatggttntnnatgcntnngtnnttga

SEQ ID NO: 30705 - DNA, 507 bp, Homo sapiens
  misc_feature (1)...(507): n = a,t,c or g
gcgnnnnttgnnacctctnnnnnnnnnnnnnnnnnnnnnnnnnnnnnnnnnnnnnnnnnnnnnnnnnnnnnnnnnnnnnnnggcacgagagagacaggatctagaaaatctaaaaggctgatttgtcaagtttttaaaaagcaagaaagcatatgttttattatttatcaattattcttactttagagatgaatgggacaagaatgtaagatttagctctttgctaactatcttaagggcagcatattctgtattctatgtcatttattgatacaagatgtacatagttgagatattgtagatttggtcaagaaaccttttttttctttgaaaataaaattttaattgcattctcacccgcatatagggccatctcatctccataagcctgagttgtggagagaggcaaagtttttatcaaggagaaaattctgatctgctcaaatcctangcaagtgctttgntgaaatcttagatttctgnggtagaaatattttttaactttaa

SEQ ID NO: 30706 - DNA, 448 bp, Homo sapiens
  misc_feature (1)...(448): n = a,t,c or g
gngnnnttgnnacctttgacangattacgaatttaataccgactcnnnnnnnnnnnnnnnnnnnnnnnnnnnnnnnnnnggcacgaggcaaaaattataaaccttgcagatactcttcgggtggttggttagctgatacgagttctaatgagatgactattaaattgattgtagattgattgctcttgcttttctgcttcttggtattttatctgcacagatctactctaatcttaatgtagtttatcccaggcaatcacatgataatctgggttaaatgcattttgtctgtataatggaaaggattatattgctttggggagattttattttggtgatattcatcctaaatggtgttctttggtctttccttgctaaaacttcttctgaanctctgnntctttgcttgtctanncgctgngnaggntganggggaagntnnanacct

SEQ ID NO: 30707 - DNA, 511 bp, Homo sapiens
  misc_feature (1)...(511): n = a,t,c or g
gtgtgnnntttgnaaanttnnnnnnnnnnnnnnnnnnnnnnnnnnnnnnnnnnnnnnnnnnnnnnnnnnnnnnnnnnnnnnnnnnnnnnnnnnggcacgaggtggaatctggccaggccctgcttaggcccccatcctggggtcaggaaatttggaggataaggcccttcagccccaaggacatcctggctgccatacctgctcctgacttctcagggctggcagtcatcgactgggaggcatggcgcccacgctgggccttcaactgggacaccaaggacatttaccggcagcgctcacgggcactggtacaggcacagcaccctgattggccagctcctcaggtggaggcagtagcccaggaccagttccagggagctgcacgggcctggatggcaggcaccctccagctggggcggcactgcgtcctcgcggcctctggggcttctatggcttcctgactgctacaactatgactttctaagccccanctacaccggccagtgccatt

SEQ ID NO: 30708 - DNA, 505 bp, Homo sapiens
  misc_feature (1)...(505): n = a,t,c or g
gcgtgnnnttggananttganaccnctatgacatgattacgaatttaatacnnnnnnnnnnnnnnnnnnnnnnnnnnnnnnnnnnnnnnnnnggcacgagatcagatccctgactaccaagatgctatgattctaattcttatgtgagcagatggagggagacagggattctgagaatcctaggcagtatgtactttaaggaactttctctgtggctttgaaactggttatataattagctccaggagattgaggtcctgaataatattttttcataggtaagtattattttgctagaatatatccagcaaattagaaggatggggaaaggtagaggagttcctagcttgaatttatatatagataagtaaataaactgcagcagtctgtcaataaagggggtaattcttgcatctgtaaaattggctactttgcagagagcccatctacttgggcttctgcctctcccatcccaaatgcccaaggtcattctcctttttttcca

SEQ ID NO: 30709 - DNA, 471 bp, Homo sapiens
  misc_feature (1)...(471): n = a,t,c or g
gannnnttgaaacctttnnnnnnnnnnnnnnnnnnnnnnnnnnnnnnnnnnnnnnnnnnnnnnnnnnnnnnnnnnnnnnnggcacgagctggtggtataaaaagactgtaacctactcttgtatcaagcacagttttggctaatcacaggcagccaactattcaaatggtgttcaagtaaggcaaaagctgggctgtaaccaatccagctgtttgtgtacctcacttccaccttctgtacgttgtacatcatttttctttttctgtccataaatgttatcccaatcatgtggcagccctggagttgctctgaacctattctggctcttggggctgcctgattcgagaatcgttctttgctcagttaaactctattaaatttaatttgtataaagttttttaacaggtttaaaaatgttcatgatctaactacttaaaaaaaaacacaacaaactaaaactacttcttcata

SEQ ID NO: 30710 - DNA, 467 bp, Homo sapiens
  misc_feature (1)...(467): n = a,t,c or g
agannnttgannctttgaaacccttgacnnnnnnnnnnnnnnnnnnnnnnnnnnnnnnnnnnnnnnnnnnnnnnnnnnnnnnnnnnggcacgaggtgcctccgagcatcacatccaaggtctgggaggaagaaaaatggacaaaaggcttttctttaaattcaggaagtacnnnnnnnnnnnnnnnnnnnnnnnnnnnnnnnnnnnnnnnnnnnnnnnnnnnnnnnnnnnnnnnnnnnnnnnnnnnnnnnnnnnnnnnnnnnnnnnnnnnnnnnnnnnnnnnnnnnnnnnnnnntatttaaaaaattagtcccaacagcctttgggacctgcccttcctacacctgtcttcctttcctaagggggattcgtatctgacataggcccctccatgcacnancanngncngnattacntcctnngctnactnctntnnnctanagcttnnaangnnancnccntttgtat

SEQ ID NO: 30711 - DNA, 472 bp, Homo sapiens
  misc_feature (1)...(472): n = a,t,c or g
gagnnnttgagnctttgaaaccnnnnnnnnnnnnnnnnnnnnnnnnnnnnnnnnnnnnnnnnnnnnnnnnnnnnnnnnnnnnnnnnnnggcacgagcggaggtgtttttaacatacagttcggtggcattaagtacattcccattgtgcaaccatcactaccctccatcttcagaactcnnnnnnnnnnnnnnnnnnnnnnnnnnnnnnnnnnnnnnnnnnnnnnnnnnnnnnnnntccccgagcccctgacacctaccattctatgctctgtctctacgaatttgactgctctaagtacttcttgtaaatgcagtcacgcaatatttatcctttgtggatggcttatttcactaggcgtcatgttcttaagagtctttcatattgtagcatgtgtcagaanttctntctcttttatggcaanattccattgtctgtgaatgnnnntancatgcttttccanccgnccgtcc

SEQ ID NO: 30712 - DNA, 468 bp, Homo sapiens
  misc_feature (1)...(468): n = a,t,c or g
gatgnntttgannctttgnanaccgctatgacnnnnnnnnnnnnnnnnnnnnnnnnnnnnnnnnnnnnnnnnnnnnnnnnnnnnnnnnnnggcacgagaaaatgacaaaaacaagtaaatgaagaacatgggttagcagcagaataggaaagaggctgggcctaagaatgacggtgggatactggaatgtgtgcggcatatttactttccccaaagggcttccattcctgttatctcaggtgtctccacagaaacccatgagataggcagctaatgagtgagaaaacaggtaagtggcctgctgagtcatcagggtgacagnttctgtntgggtagactaccgntaatgtgtntttcctcnnctcttancnaggantggttnnnngnntttnnnnnnncnnntntgnnttnnntnggnnnnntnntngggtgtgnngtngntnnnnnnnnntntnnntctnnnncttc

SEQ ID NO: 30713 - DNA, 479 bp, Homo sapiens
  misc_feature (1)...(479): n = a,t,c or g
gntgnnnttnnnnnctttgaanaccnctatgacnnnnnnnnnnnnnnnnnnnnnnnnnnnnnnnnnnnnnnnnnnnnnnnnnnnnnnnnnnggcacgaggtgggggtcttttaccctttataagtttctgtatatatagtttgtttttttttctaaaaagtaaccatttaccaattttgaaattaaagattttttaaggaaataaattatgagaacataatatatttaaatttttcactatattagaacacaactttgttgacaacagatttctacacaaacaaatcaaatatatgcaagcacaatttttacaggaatcttggctaggcataaaatttcttaagtgaccagaaatgaccaccaatcctggacaccttaatgacagaatagggcagaaactcagaaatggcagtgaccgttagcagatttgaatggaattgtcaaatgtgagaaatgatttttagttactgatgttagtc

SEQ ID NO: 30714 - DNA, 447 bp, Homo sapiens
  misc_feature (1)...(447): n = a,t,c or g
anancgntnnnnnnnnnnnnnnnnnnnnnnnnnnnnnnnnnnnnnnnnnnnnnnnnnnnnnnnnnnnnnnnggcacgagtccctcccatgcttcctcctgatcccagtcttgaggatgccctgagcctgtagccctggtgtgtaaaaaggacgaggggttacaaccttctctggaatatgctagctaaataaaacgttaaataaatacattaattgatgtagagagagagaaaaaaagaggattagtgaagatttggattttcaggtgactgtgagatagctgaggttaactcgtgtaaatgtgcaataggcagagggaaaatacaatgcaacaactcaaggaaaagactgagagttgatgtgcgcatttgagacttgttagtattttgatacttgttgtanccaagggaaggcatatgatttccaagaatagtgcattgggataaa

SEQ ID NO: 30715 - DNA, 457 bp, Homo sapiens
  misc_feature (1)...(457): n = a,t,c or g
ttcccccctnttgaacaccnttnnnnnnnnnnnnnnnnnnnnnnnnnnnnnnnnnnnnnnnnnnnnnnnnnnnnnnnnnnnnnnnggcacgagcaaagaagagaaagacaaggatgaccaggaatcgcaaagccccagtccacctaaacccactgtgttcatctctggggtcatcgcccggggtgacaaagatttccccccggcggctgcgcaggtggctcaccagaagccgcatgcctccatggacaagcatccttccccaagaacccagcacatccagcagccacgcaagtgagcctggagtccaccagcctgccccatggnnnnnnctctgntgcacttggtatntccctgacagagagaaccanntntttnncccnaatcctactctgctgngaaatctaaggcaaaacnaagtgctctgtcctttgccttacattacatatttnnnacttga

SEQ ID NO: 30716 - DNA, 430 bp, Homo sapiens
  misc_feature (1)...(430): n = a,t,c or g
aanctttgaaanncnnnnnnnnnnnnnnnnnnnnnnnnnnnnnnnnnnnnnnnnnnnnnnnnnnnnnnnnnnnnnnnnnnggcacgagtaactgcacaggtaaaagttaggagaccagaaaaggcttgatctgtttggaccgcaggaaataccagtgagatgcatttatgaagcccctcatgtttggccaggctctgtgtagggaccatgctgaaaactgaccatgagttggtcaagaaaggatcatttctgtcactgtatagatgagggaagtaaaacagagagggcaagtaaactgccaaaggacacacagcaggtaggagatagagcaggtctgtgtcttgctctaggggccaggactggtcaggaaggaggaagcggtccttttgaggagggcgaggcaacggaccctgcgccaccaggactggtg

SEQ ID NO: 30717 - DNA, 422 bp, Homo sapiens
  misc_feature (1)...(422): n = a,t,c or g
nanctatgacatgattacgaatttaatacnnnnnnnnnnnnnnnnnnnnnnnnnnnnnnnnnnnnnnnnnggcacgagtgaatagactgggaaccaaaaagattatttaaggttcagtgttggccatcttctgtgtgtcaccatctccctgctgttccctgccctgggaggctgctctgggggtactaccttaaagggcttccctgtcctctgacttctggtggggttcagccaaatgaggagtcctagccagacatcagagggaagaaggcaagtgacactgggatattcgttccccctgagcctgacattgttgtgaggcagccctctccatacaacccctctgcctcccaattctctcattttttcaggcctagacatggtaatgactcccaacccatgttaccagcccatcataacac

SEQ ID NO: 30718 - DNA, 436 bp, Homo sapiens
  misc_feature (1)...(436): n = a,t,c or g
tttggnnnnnnnnnnnnnnnnnnnnnnnnnnnnnnnnnnnnnnnnnnnnnnnnnnnnnnnnnnnnnnnnnnnnnnnggcacgaggcagtttgacaaagcctaaggttcattccaaacagattgctttttaattttttcctacacacttctgggaagtggcttattgaaacaactcatagattgtcacaaaataataattattggtaaattgtcttcccagcagcccacaaactaagagaatgtgactgacttaaaagctatgcccaacactgcaaataacctcatgcacaggtctgatcaacagcattgccttttcatttggaaattcttacccagaccctcaaagcaaaagtaatcagacaaattaatttaattctttcgttagtgtacacaccaagaaccgtttcataactgagaagctaggcctgtcaactta

SEQ ID NO: 30719 - DNA, 430 bp, Homo sapiens
  misc_feature (1)...(430): n = a,t,c or g
tttgaaanncnnnnnnnnnnnnnnnnnnnnnnnnnnnnnnnnnnnnnnnnnnnnnnnnnnnnnnnnnnnnnnnnnnggcacgaggcttattgccagatcaaggtcttctgtgacaaaggagcagaaagaaaaatccgagatgaagagcggaagcagaacaggaagaaagggaaaggccaggcctcccaaactcaatgcaacagctcctctgatgggaagttggctgccatacctttacagaagaagagtgacatcacctacttcaaaaccatgcctgatctccactcacagccagttctcttcatacctgatgttcactttgcaaacctgcagaggaccggacaggtgtattacaacacggatgatgaacgagaaggtggcagtgtccttgttaaacggatgttccggcccatggaagaggagtttggtc

SEQ ID NO: 30720 - DNA, 419 bp, Homo sapiens
  misc_feature (1)...(419): n = a,t,c or g
naccttgacnnnnnnnnnnnnnnnnnnnnnnnnnnnnnnnnnnnnnnnnnnnnnnnnnnnnnnnnnnggcacgagaaaaggaaaagtggcccaagctggaatatttgttgctggtagaatgagcacacattacctggagaagtacaagtagagcctggtcttctgaagactagtcaccttgagatttaggtctgtggcacacacaagtcttcagtatttgaattctagatagataagaaagcaaaatagacacacactttatttctgtcatttggtcagattcaggtttaaataattaatttggttcagtatcttaagcccttaactttggggttacagtactgtctagcaaggtcacctggctgtggagaaagccctgggcatatagttagttagaaaacttgagttttanccctggc

SEQ ID NO: 30721 - DNA, 425 bp, Homo sapiens
  misc_feature (1)...(425): n = a,t,c or g
anncccttnnnntttgannaccnnnnnnnnnnnnnnnnnnnnnnnnnnnnnnnnnnnnnnnnnnnnnnnnnnnnnnnnnnnnnnnnnnnnggcacgagnnnnnnnnnnnnnnnnnnnnnnnnnnnnnnnnnnnnnnnnnnnnnnnnnnnnnnnnnnnnnnnnnnnnnnnnnnnnnnnnnnnnnnnnnnnnnnnnnnnnnnnnnnnnnnnnnnnnnnnnnnnnnnnnnnnnnnnnnnnnnnnnnnnnnnnnnnnnnnnnnnnnnnnnnnnnnnnnnnnnnnnnnnnnnnnnnnnnnnnnnnnnnnnnnnnnnnnnnnnnnnnnnnnnnnnnnnnnnnnnnnnnnnnnnnnnnnnnngtcttctctctttaagatgaatttctcaaatctgaatttctagatgagtaatgccattcttccatcatct

SEQ ID NO: 30722 - DNA, 424 bp, Homo sapiens
  misc_feature (1)...(424): n = a,t,c or g
ccttnnnntttgaannacnnnnnnnnnnnnnnnnnnnnnnnnnnnnnnnnnnnnnnnnnnnnnnnnnnnnnnnnnnnnnnnnnnnnnggcacgagcggcacgagactttttatgatgtagtttgacacctggagtaagttttgttctattccagaatgatggactgtaagtgtaaattgatacttcctttgttaagaacaatttgccagtatatattaacatttcaaatgtagcaatcnnnnnnnnnnnnnnnnnnnnnnnnnnnnnnnnnnnnnnnnnnnnnnnnnnnnnnnnnnnnnnnnnnnnnnnnnnnnnnnnnnnnnnnnnnnnnnnnnnnnnnntttctcttgaataaggtttcagnnnnnnnnnnnnnnnnnnnnnnnnnnnnnnnnnnnnnagttctcatgagacctggttgtta

SEQ ID NO: 30723 - DNA, 407 bp, Homo sapiens
  misc_feature (1)...(407): n = a,t,c or g
nnnnnnnnnnnnnnnnnnnnnnnnnnnnnnnnnnnnnnnnnnnnnnnnnnnnnnnnnnnnnnnnnnnnggcacgagcctttaaaaaaaaagactatatatagagagagacacacacacacagacacatacacatatacagacagtcttagacacttaagatcgttcaacttatgacttttcaactttataatggtgtgagagccatatgtattcagcaaaaaccatacttcaaattttgcattttgattgaaaattctttatactaacttccttgtaaaataggcctgtgttaggtgattttgctcagctgtgggctaaggtcagtgtcctgagcacacggaaggtaggcgaggctgagctgtgatggaggccangnggattcaggtgcatttccgatgtggacttc

SEQ ID NO: 30724 - DNA, 494 bp, Homo sapiens
  misc_feature (1)...(494): n = a,t,c or g
gaggccaagaattcggcacgaggatcatgactgagtatttcaatctgtttagagatttactaagttttagtttcttgtgtttcttattaatagggagaccaaataattcagcatccaatctggagaactaatgaggacaggagaagttattaataggtaatctggaacataaggcatactctggatgggtagccacctgcttttcaaagatcttgcctctttaatgggtactgagagcagaagggtaacaacagcctttggagattgaactcctgaattctgttcagttgtctggggctagggaactctgacacagatattgtagcactgagtatttctaacaagctgtggggggcctgtcccctagtggatgttagagttcccagagggagaagtcaagaccactgcagcaccgacggccccgggcttatganantcnnggggggggcccccaagcngtttcttnncctttcnttcctntttcccttntctcc

SEQ ID NO: 30725 - DNA, 490 bp, Homo sapiens
  misc_feature (1)...(490): n = a,t,c or g
gaggccaagaattcggcacgagcttctatttttacatttcttttaagaatatttttctatacttcatgatggggtaaattataatagtttctgcagtctttgtttattaattccaacatctgagtcatctcagattggcatctattcattatctttttttttgagagttgatcacatttttctggctctttttgtactgagtaattttggattgtatcctggatttttggatattgtatttggagattctgggtcatattaaaatcctctgtagaatgttgatttttgttggtttctcttagcaatcagtcaacgtgattagattagcttgactacaaatcgaagtgtgaacttaaccatatataagtagttccagggtcacttcagtttcaaagcctttgctgngctgntttgagtctgctgnacatgncccctcaagggggagccccncaacgngccggggttanncccanattagggattaatttct

SEQ ID NO: 30726 - DNA, 503 bp, Homo sapiens
  misc_feature (1)...(503): n = a,t,c or g
ttggccctcgaggccaagaattcggcacgagggctcggcgtgggagggatggtggagacgaaggggctcttttacttgcaccccatcgggtgtggtctgagatctcgtttactgaaaggtaagtcagctggtcccacagttgatgagacttcttgatctttgaggatcaagaagttgttaaagtcactataagtgacatctgaggggcaattaggacaatttaaaacatggactatatactggaggatattactgaattaacattttcgtaggagtaacatggtggtaaggccatgcaggagaatggcctcatccctatgagacacccgtggaagaatttagggcagaaatgtcacatgggcttaacttccggtatgagaggtgagggcagcaatgctaacagagagggcaggggcaggataccccagtgtttgcanngnnctctttttccagggatntaaaattttcaaataaaangttanccaaaaaggntggggcggggg

SEQ ID NO: 30727 - DNA, 503 bp, Homo sapiens
  misc_feature (1)...(503): n = a,t,c or g
gaggccaagaattcggcacgagaggagataatattacttttaactcaccctaaccagaaacatactagaaagggagttctggggactttagttcaagtcaagttgatatcacaaagctaccccatagatacaaacaaagaggttcctaaattttgaacttctgactctagaaaatgaagagagatatggttgaaagaatttgcttagtaattttaaggtaaggttctttttgtgaaacttgaaagtagtcttgggacaaagaaaatgaaatttgtacattttcactgcagaaagtaaattatcaatgtcttcagaaagtgactgctaaaggaaaacagatattttagaatagatcctcttttaaagntattgnatgntttttccactctcagaagcatacaacttggtgattcaagntttttccnggntaactgngtttanttttggnccccncaaanncgggctctttttaacnngaangttattaagngaaaaaagattaa

SEQ ID NO: 30728 - DNA, 492 bp, Homo sapiens
  misc_feature (1)...(492): n = a,t,c or g
gaggccaagaattcggcacgagttttattatgttcatgaaacacttaaaaattgatcatgtaggaaagcttaccttatttgtggccgtaacctgataaaagtatggatataaaatactgaaaaacacaatttttgtaccttctccccatccccttgagcaagaaaagcaaaatggaggaaagtgtttacaaagtcccattttgtaaagcataattaatatgtatatgagtgtatgtatataggactatgtgaacacagagaaaaatacagagaaatacatactaggcttgtagggtaagtgctaaagtgaaggaggggtggtggttagtgatggagccaaagaaagaaaagactgcatttcanaaaaggcaaggtctcatttatgtagnagtgttacntgttgagtctgaatattggaatatgaaaacntttcatattgnaattnccngnaccactcangaatttaaatcctgncctaccggnagcattgca

SEQ ID NO: 30729 - DNA, 499 bp, Homo sapiens
  misc_feature (1)...(499): n = a,t,c or g
cgaggccaagaattcggcacgagggccgaggcgnnnnnnnnnnnnnnnnnnnnnnnnnnnnnnnnnnnnnnnnnnnnnnnnnnnnnnnnnnnnnnnnnnnnnnnnnnnnnnnnnnnnnnnnnnnnnnnnnnnnnnnnnnnnnnnnnnnnnnnnnnnnnnnnnnnnnnnnnnnnnnnnnnnnnnnnnnnnnnnnnnnnnnnnnnnnnnnnnnnnnnnnnnnnnnnnnnnnnnnnnnttcagtggacacgttaaacagattaaatgcagctgaagagagaattagtgaaatggaagataaatctagaaaattattcacagtgcaacacagaaaaatggaaaagtagaaaatataagggaaagttganagacgtggaggttacagaggagagttntancaaaagataattaaganaatggggccaaaagncattacctgangagttngagcccnagctttttccanaatcaangaacttaccntttttagattanggaaccc

SEQ ID NO: 30730 - DNA, 468 bp, Homo sapiens
ttggccctcgaggccaagaattcggcacgagcttgactccagtcttatctccagcttccctctgctgaaggccctgaaaaccagaatcagcaacctgcccacagtgaagaagtttctacagcctggcagcccaaggaagcctcccatggatgagaaatctttagaagaagcaaggaagattttcaggttttaataacgcagtcatggaggccaagaacttgcaataccaatgttctaaagttttgcaacaataaagtactttacctaagtgttgattgtgcctgttgtgaagctaatgaactctttcaaattatatgctaattaaataatacaactcctattcgctgacttagttaaaattgatttgttttcattaggatctgatgtgaattcagatttccaatcttctcctagccaaccattttcctggaattaaaaattcagttaaaaagggaaaaaaaaaaaaaa

SEQ ID NO: 30731 - DNA, 448 bp, Homo sapiens
  misc_feature (1)...(448): n = a,t,c or g
anancctnnnnnnnnnnnnnnnnnnnnnnnnnnnnnnnnnnnnnnnnnnnnnnnnnnnnnnnnnnnnnnnnnnggcacgagttgcatctgaaaatcttattgcaagcaagtctgcccagttttatcattttttctgccatattccttctgagagcagctagtttggaaaagtatggtccatgccaggcagagtgagctcagaagaggaagggaaatatgtagtggtttaagagcatgaagaggaaaagactactctggtagcttttctatctgtatgtttgttttggcttttagtcttgaaaagactcaaattctctttcccatcctttatttctaaattcaaagggaagcagtttgacatattagaagccctgtctttggagtcaggaagacctgagtttgaaactgtgtgttgtgaccttagacaaactacttaatctttctgaga

SEQ ID NO: 30732 - DNA, 446 bp, Homo sapiens
  misc_feature (1)...(446): n = a,t,c or g
ctttgaanaccnnnnnnnnnnnnnnnnnnnnnnnnnnnnnnnnnnnnnnnnnnnnnnnnnnnnnnnnnnnnnnnnnnnggcacgagcaggatttatttatattttaatttatttcaggggccatgctaatcatctttgtattgttccaattttagtgtatgtgctgctgaagcaagcactgggtaaggtttaaactgtctagttctgtgtgctggggtttggcattggagaaggctctgtgatgcatagaccttaaattagagttaggtatattattaatccaaagtgatcctgaatgctttctatcatttttttcttgtcctattgcactggctaaactgacttttagtactacacagaatagaagcaacaataacaatcatccttgtcttgttcctaactttagtggactatttacaatattttactgagttagatgccttagg

SEQ ID NO: 30733 - DNA, 444 bp, Homo sapiens
  misc_feature (1)...(444): n = a,t,c or g
anatttgaanaccnnnnnnnnnnnnnnnnnnnnnnnnnnnnnnnnnnnnnnnnnnnnnnnnnnnnnnnnnnnnnnnnnnnggcacgagtgggaggaaggacttactaaaacagcacagagtttgtgtgtgtcacagacatactttactacacagtcatataagcacatgtgtgcacatagaccagccactgcagcttagtgttttcaaagctggtctcttctccccttacaagtcagtttctcctctcaccttttctacccttacttattcatggtcccattctgcacccagtcactctagctctcctttcatctgcatttcctatcagcttccaagactggcaggtctttgcttttaacagtctcttgatttcccgcccttttctttattctctcatctcatgccaatatatttctgtaagagtttctccaggctcaaccagc

SEQ ID NO: 30734 - DNA, 448 bp, Homo sapiens
  misc_feature (1)...(448): n = a,t,c or g
ntttnnnnnnnnnnnnnnnnnnnnnnnnnnnnnnnnnnnnnnnnnnnnnnnnnnnnnnnnnnnnnnnnnnnnnnnnnnnggcacgagatannnnnnnnnnnnnnnnnnnnnnnnnnnnnnnnnnnnnnnnnnnnnnnnnnnnnnnnnnnnnnnnnnnnnnnnnnnnnnnnnnnnnnnnnnnnnnnnnnnnnnnnnnnnnnnnnnnnngctatgccccctgcccccacactggtccatggaaaaactgtcttccatgaaacccatccctgatgcccaaaatgttggggactgctggtgtatagggtactgtagtaggcaccagatactacctgagctagctcttatctaaagcagaaaactcttggccaataaatcaactcttagtatttggctcttgttgtgaacataaataaacatttggtgcttcagagataacccctttagtaaa

SEQ ID NO: 30735 - DNA, 443 bp, Homo sapiens
  misc_feature (1)...(443): n = a,t,c or g
ntttgaaatccngaatcccttangacnantcnnnnnnnnnnnnnnnnnnnnnnnnnnnnnnnnnnnnnnnnnnnnnnggcacgagctggttttgtcaggtcatgtttgctctccggaggttaacaagaaggcccctgaggatttcttcccaagtgtcttattccctgagctctcttatttcccatctaagggaaaaatgggtggactatttggtgtcagattattgtgaactcatactaaaggaagtatggaactcttgctggcaaatgatggtacaggttgcagcacagcagctagggaagttactgtgtactcctgagagacagacttcttgcagcccattcagtggagtgtaaaggagcttgcagtaaaacctctgaccgcctcaggtggcttagggtgaccaacttgncttgggtggcttgcttgggacttgatcagtt

SEQ ID NO: 30736 - DNA, 433 bp, Homo sapiens
  misc_feature (1)...(433): n = a,t,c or g
annnnnnnnnnnnnnnnnnnnnnnnnnnnnnnnnnnnnnnnnnnnnnnnnnnnnnnnnnnnnnnnnnnnnnggcacgaggccatttatcacattcatgggttctgtggctcaagaatttggacagagcacagtgaacatggagattcgagaggccggtgcttgtctcaaggtggcaccgaccctgaggtgaaatttggccctggggctgcggtagggtcaggccgaccttgtcccctgctgagaccccatgtttgcttagctccccagcacccaccctgagagtcgcccagtgagtcgcatgcccccggctcaggctgccttctgggcaccggacttgagcgtcagtccccagcctcgcagccctaggtgccagtcatgtgctgattatctccagctttgatccctccccacactccaaataccactcacatt

SEQ ID NO: 30737 - DNA, 438 bp, Homo sapiens
  misc_feature (1)...(438): n = a,t,c or g
anaccnnnnnnnnnnnnnnnnnnnnnnnnnnnnnnnnnnnnnnnnnnnnnnnnnnnnnnnnnnnnnnnnnnnggcacgaggttccgcctaaaattgaagctcttccatctgatatcagcattgatgaaggcaaagttctaacagtagcctgtgctttcacgggtgagcctaccccagaagtaacatggtcctgtggtggaagaaaaatccacagtcaagaacaggggaggttccacattgaaaacacagatgacctgacaaccctgatcatcatggacgtacagaaacaagatggtggactttataccctgagtttagggaatgaatttggatctgactctgccactgtgaatatacatattcgatccatttaagagggcctgtgcccttatactctacactcattcttaacttttcgcaaacgtttcacacggacta

SEQ ID NO: 30738 - DNA, 389 bp, Homo sapiens
  misc_feature (1)...(389): n = a,t,c or g
ntttgganntttgnnnancnnnnnnnnnnnnnnnnnnnnnnnnnnnnnnnnnnnnnnnnnnnnnnnnnnnnnnnnnnnnnnnnnnnnggcacgagcatgatgtcacaaaatcatacacgagcaaaaatctatttaaagtatgagatagattgatggatttaaatgtaacagagtatgaaaactgcaactatatgatgtcagattccatatcacaggtaacctttaagaaaccgttacttgtcctgttcggtgaagtataaaagaaaaatannnnnnnnnnnnnnnnnnnnnnnnnnnnnnnnnnnnnnnnnnnnnnnnnnnnnnnnnnnnnnnnnnnnnnnnnnnnnnnnnnnnnnnnnnnnnnnnnnnnnnnngcnnagattaccagg

SEQ ID NO: 30739 - DNA, 439 bp, Homo sapiens
  misc_feature (1)...(439): n = a,t,c or g
atttggantaccgntatgacatgattacgaatttaatacnnnnnnnnnnnnnnnnnnnnnnnnnnnnnnnnnnnnnnnnnggcacgaggtatttatttatatattttagcccttgtaagagaggagcagtggaagggaactgaaggagcatgatatagagaaaagagcctgggttttggtgtgtcgcatttgttctgttactagctgggagaccttgggcaaatttacctctctgatcagcagtttaattttttcatctgtaaaaatgggaagaatacctactttgcagaattgtcgtgacgattaaatgagagtgtgtgtgagtacctagcacatcgtaagagagagctcagtaagttatagtagctgttattgtttaaacttcaggaattagctaggttttgctagaactttcatctgtgcttgtaagatctttttg

SEQ ID NO: 30740 - DNA, 407 bp, Homo sapiens
  misc_feature (1)...(407): n = a,t,c or g
gganantnnnnnnnnnnnnnnnnnnnnnnnnnnnnnnnnnnnnnnnnnnnnnnnnnnnnnnnnnnnnnnnnnnnggcacgaggtctggggaacaccttcacccatcagatctgtcagcctttcccactcaaaatctccccaactctcttccttcacaaacctctttgcctccttggacttcctacatctgatagctatactgtctttccagtattcaaaaccacagaataatatctgagtggatcttactctccttgtttagtctgttcctaaggccttgaggattcctcctgcctctgtccaccctctttctttccatnanagnctctccagncangccatnattatttattccctgnannaantccnnnnnnntntntanctnnnngcctnnnnnnnnnnnatag

SEQ ID NO: 30741 - DNA, 373 bp, Homo sapiens
  misc_feature (1)...(373): n = a,t,c or g
ttgganatcnnnnnnnnnnnnnnnnnnnnnnnnnnnnnnnnnnnnnnnnnnnnnnnnnnnnnnnnnnnnnnnnnnnggcacgagccgactctaacactagagccagtgaacatcatggagctctatcttggtgccaaggaatccaagagcttcaccttctaccggcgggacatggggctcacctccagcttcgagtcggctgcctacccgggctggttcctgtgcacggtgcctgaagccgatcagcctgtcagactcacccagcttcccgagaatggtggctggaatgcccccatcacagacttctacttccagcagtgtgactagggcaacgtgccccccagaactccctgggcagagccagctcggntga

SEQ ID NO: 30742 - DNA, 463 bp, Homo sapiens
  misc_feature (1)...(463): n = a,t,c or g
gngntgnnttnnnnnatctgaacccnttnnnnnnnnnnnnnnnnnnnnnnnnnnnnnnnnnnnnnnnnnnnnnnnnnnnnnnnnnnnnnnnggcacgagctgtggcagagtaaaagatcccactacccctgaatatcaatatacccttaatagttcattgaagaatttttctgtattaaaatggtcctttaaaaatgcagctaatcctgaatcaatgggagcacactttggctaatgcctctgtaggcatgcattgacagatgatggagacctagaagggcagcactgatttgggatctgcgggagtggtggcaccatttggcagggataagaagatggtagggatcctgaaagaaaagacagacatctgccttgaaggagagtataagataacttgtcttctatcacaatcttgctgaagttattcctggtcattctactgagaatcttcgtatttgcctca

SEQ ID NO: 30743 - DNA, 465 bp, Homo sapiens
  misc_feature (1)...(465): n = a,t,c or g
gnngtgnttnnnnatctgaaccctttgactgacnnnnnnnnnnnnnnnnnnnnnnnnnnnnnnnnnnnnnnnnnnnnnnnnnnnnnnggcacgagaatgaatctttaaaaaagtaagactctctgaggctgtgcaagagaaagtgtatgtgtgtttgtgtgtgtgtgtgtatgagacaaagtttggcactgcacttgagagtgtatgaatgtgagagtgtgagggagagaataagagaatttgtgagggagtatgagaaagacaaagactgtgaagaagaaaggaggtacagagaagagaaattgttttgtctctaattaaactgataattcccacagggcaggaagccttgctttgtggtcccagcacagaaactggggcgaaggcttcaaagctgtgtcagtgccaggctgggtgcacagcacctaatatctcaggacccattggttctagaacagccccgag

SEQ ID NO: 30744 - DNA, 431 bp, Homo sapiens
  misc_feature (1)...(431): n = a,t,c or g
ttggangcccnccctttgannccttnnnnnnnnnnnnnnnnnnnnnnnnnnnnnnnnnnnnnnnnnnnnnnnnnnnnnnnnnnnnnnnnnnggcacgagagtaagtgctatggaaaaaagaaaaaagtggcatagcattaaataaagaggtcagagtaggtctcatgggaaaggtaacattttaccaaagacttgaaggaagtgagggagtaattcagattccctggggaagagcatcccagtcagagggaagagctgcagaggaaagagctgctacaaaacctttgggcagaagaatacctggcatgtgtggggaatagcaaggagtggctgaagtggagtgagcaacagaagactgaagtcgtagaggtaacgtgggaagcttggattatgtatgacantggaagcttcctacttaaggctttnactct

SEQ ID NO: 30745 - DNA, 453 bp, Homo sapiens
  misc_feature (1)...(453): n = a,t,c or g
cttnnnnnnnnnnnnnnnnnnnnnnnnnnnnnnnnnnnnnnnnnnnnnnnnnnnnnnnnnnnnnnnnnnggcacgagggcagtcaaaacaaagggtaaggactatgactacctgagagagggatatttaaaagttgagatgcggccaggnnnnnnnnnnnnnnnnnnnnnnnnnnnnnncacacttgtcccctgatatggtggtcttgaagccaagatcaaaactctgatagctaaagagttggaaggagtgctgtaagcagagggaactatgtatgcaaagaccttgtatgggagcagcaaggcaaaatgcaggactaaagtcccaaatgtctgaagcagcaggggtcaatgggcacttggatcaaggggccagtccatgcaggcccttgctggccgtgtttgncttcatcctaagagcactgtgaaaccntcaaaaggntttaagccaggg

SEQ ID NO: 30746 - DNA, 483 bp, Homo sapiens
  misc_feature (1)...(483): n = a,t,c or g
gnnnntnnnnntnnnnnnntttgnanntcgttaccncttgacnnnnnnnnnnnnnnnnnnnnnnnnnnnnnnnnnnnnnnnnnnnnnnnnnnnnnnnnnnggcacgnnnnnnnnnnnnnnnnnnnnnnnnnnnnnnnnnnnnnnnngctccatctaaaaaaaaacaaaagagagagagagaatgatgaatcttcatagatgatnnnnnnnnnnnnnnnnnnnnnnnnnnnnnnnnnnnnnnnnnnnntaaaaagaatagaagagaatcaatgaatttgaaggttctaaagaaaggtttacccaatctgtaaaacagagaaataaagactggaaaaaatcagaactttagatacctctgagactatttatctatccatatataggaattaaagtctgaggagaggacaggaaaggaggacagagagagaaagaatgagacactnagtcaatatgaagaaataatggccacaaactttncaaatt

SEQ ID NO: 30747 - DNA, 445 bp, Homo sapiens
  misc_feature (1)...(445): n = a,t,c or g
cctctnnnnnnnnnnnnnnnnnnnnnnnnnnnnnnnnnnnnnnnnnnnnnnnnnnnnnnnnnnnnnnggcacgagatttttaataaggttgaactacaaagcacacatttgcaccaagaatttaaattaatgcatagatgtctgtgaaattctgcatgaagttagtgccaaaaaaacctttccattgcagatcatgctttatttcttaatattctgctgaaggattatagaaatcagaaaaattctaggaccctgaagcttaacttgcttattttattccttttacgtaaatgaagtggtatatggccattcttaacattaataatgaaggtgttggaaactgagtctcaagacctaagaatcaagctcaggctaaatttcaccaactcacacataaggatatgagtgggagcnctaatgaattttctctgctgnaantgccatc

SEQ ID NO: 30748 - DNA, 454 bp, Homo sapiens
  misc_feature (1)...(454): n = a,t,c or g
ggnnntttganacccctnnnnnnnnnnnnnnnnnnnnnnnnnnnnnnnnnnnnnnnnnnnnnnnnnnnnnnnnnnnnnnnggcacgagaaataacatttgtattagattaataggatatgtcagaccaagagagagagagcaacagtgcnnnnnnnnnnnnnnnnnnnnnnnnnnnnnnnnnnnnnnnnnnnnnnnnnnnnnnnnnnntcggatttggaatgctcaagccatataagagcgagtgatgacctggttggaaaggctgagagaggaaaaaggtaattctataggtgtatacagaggggctgcatgtataaaggccatagaatctctctgtctctgacaagtgtatattatatacatggagagccagagaaagacactaagactcatattaaagaattggttcacataattgtggggactggcaagtcacaaatctgcagggatggg

SEQ ID NO: 30749 - DNA, 450 bp, Homo sapiens
  misc_feature (1)...(450): n = a,t,c or g
antttganacncnnnnnnnnnnnnnnnnnnnnnnnnnnnnnnnnnnnnnnnnnnnnnnnnnnnnnnnnnnnnnnnnnnggcacgagcatctctcttggattcaggttcgtgaaggaactgtgttagactatatacatctctcttggattcaggttcgtgaaggaactgtgttagactatatacatccctcctggattcaggttcgtgaaggaactgtgttagactatatacatccctcctggattcaggttcgtgaaggaactgtgttagactatatacatccctcctggattcaggttcgtgaaggaactgtgttagactgtatacatctctcttggattcaggttcgtgaaggaactgtgttagactgtatacatccctcttggattcaggttcgtgaaggaactgtgttagactgtatacatccctcttggattcaggttcgtgaaa

SEQ ID NO: 30750 - DNA, 453 bp, Homo sapiens
  misc_feature (1)...(453): n = a,t,c or g
cccnnnnnnnnnnnnnnnnnnnnnnnnnnnnnnnnnnnnnnnnnnnnnnnnnnnnnnnnnnnnnnnnnnggcacgaggactcacaatgctctctcctcccgagaactcattatacagccaggatacatgatgcagtttaaaattgtggtgggttgtgaagccacttcttgtggtgaccttcattccgtaatgctggaatacactaaggatgcaagatcggattcctggcagctcgtacagacccagtgccttccttcctcttctaacagcattggctggtcccctttccagttccatgaagccaccatctacaactctgtcaacagctcaagctggaaaagaatcaccatccagctgcctgaccatgtctcctctagtgcaacacagttccgctggatccanaagggagaagaaactgagaaacaaagctgggcaattgaccacgtgtncatt

SEQ ID NO: 30751 - DNA, 455 bp, Homo sapiens
  misc_feature (1)...(455): n = a,t,c or g
ntttnatnnnnnnnnnnnnnnnnnnnnnnnnnnnnnnnnnnnnnnnnnnnnnnnnnnnnnnnnnnnnnnnnnnnnnnnggcacgagaaccaacaaaaggcaacagtaaaaggtaatatagaactatgaaatgcctgtttcatgtagcacccaatcatatatgtactacatttcaaaaagtcactggcttataaaaatattttttagcatctcatacaagtctcttcataatctgttatacagctcaccttacttgcacgattgctgagccaaagcagatcgaaagtcattttggtaagaggctagatgctgaccttgtattctgaaaatctgatgattctactgttgttgatgtgattccaagtaagcctgtgtgaacttctgggctattctcagggaagtgnntatgacacattgttgaaggtatcatcagggcngttgatccaagaanactct

SEQ ID NO: 30752 - DNA, 455 bp, Homo sapiens
  misc_feature (1)...(455): n = a,t,c or g
ttganaccnnnnnnnnnnnnnnnnnnnnnnnnnnnnnnnnnnnnnnnnnnnnnnnnnnnnnnnnnnnnnnnnnnnggcacgagggaacagctgaataattcaggatcctctcccaacctcgaggccagcacatgagcaaccttatctccctcaggccatggtacataacagccacaggttccagggataaggagggcttgggaggcggaggccgttattttttctaccgcagcaactatcttgattctgtattgactcactcatttattatctgtctccaccacgaggatgtaagactcacgagagccaagaccttgtccatcttgctctccactgtctctgtagcaccagaaggannnnnnnnnnnnnnnnnnnnnnnnnnnnnnnnnnnnnnnnnnnnnnnnnnnnggagtaaatttgcaatacaaacaaagtgggaaaggccaaggagggaa

SEQ ID NO: 30753 - DNA, 456 bp, Homo sapiens
  misc_feature (1)...(456): n = a,t,c or g
tttgaaaaccntnnnnnnnnnnnnnnnnnnnnnnnnnnnnnnnnnnnnnnnnnnnnnnnnnnnnnnnnnnnnnnnnnggcacgagtgcttctcaacctttgggctgctttgggtcgtgcttgacatggcacattcctggtgagttagctgttctttgggggttttctactgttggtgtggtgattagggtagtcaggacaggatgagtataggcatagagaacccaagtggatgatggtggagtgtgattcttctgaaagggtcttcatgagaaccactgatctagaagattctgggagaatctcacgtattctttcaggcccaggagtaagccagtgttacctgctctgtggagctctcctttgtccctccagggaggacaaattctggctggagcctgaccttactgcttgtccatctctcccagggtggtaggccactttangtaggaccctg

SEQ ID NO: 30754 - DNA, 438 bp, Homo sapiens
  misc_feature (1)...(438): n = a,t,c or g
gagngnnnnnnttgnnttngntannnnnnnnnnnnnnnnnnnnnnnnnnnnnnnnnnnnnnnnnnnnnnnnnnnnnnnnnnnnnnnnnnnnnggcacgagcacaggcccaccttcccgacatgtgtcctctgcacagacctcagtctccaggagccccatggaacacagatgcccctgggggctaccccttctggcccagtgcttctcaaatgattttgccccccagcagggtaaccagctcttagtctttcagcactaaaaccaggacagtcccagtcatttctctggtgtgactgggggtgtcttatggctggctggtcctgctggtagacaagagcctgcttctccttttggcgcacttctgttgcccagatgtggcttttacaaaagcaagatccattttctactggaatcattgaagacttcatcatgaatct

SEQ ID NO: 30755 - DNA, 427 bp, Homo sapiens
  misc_feature (1)...(427): n = a,t,c or g
ctttgantnnnnnnnnnnnnnnnnnnnnnnnnnnnnnnnnnnnnnnnnnnnnnnnnnnnnnnnnnnnnnnnnnnnnnnnggcacgagccggtaccgggtcggccaggtggtcagggtgggagaaaccaaaaagggagaggggtgcgggagtactgagaggaaggggctgcaaaggcctggctcaggccggcgtggaggaggtgcgggcgctgactcaggcaggatttctgctcccgccgcctaagaatgccgtcccatctcgtgctgcagtgtccttgggagggacagaagcgcgaacaagctggaaaggggaacgctcggggcgtcggggaagcgggaccagggtcgtggtatagagcttgcgttgccgctgacctcttgccgaaaggcgaaacagcactcctggcccggacagctccctggttgg

SEQ ID NO: 30756 - DNA, 423 bp, Homo sapiens
  misc_feature (1)...(423): n = a,t,c or g
naacttnnnnnnnnnnnnnnnnnnnnnnnnnnnnnnnnnnnnnnnnnnnnnnnnnnnnnnnnnnnnnnnnnnggcacgaggagattctgtactttgagctgatgctgtaatgggatgatgggggatcctggaaggtggtgagtatatttggcatgtgggaggggggaaatcactgagagccagcggtggcctgtggagccagccaccaaggcagcctgatgattctcgtcccctggtgctcgttcctgtgtgtcatctccttcctcactggataggaccaacagacctaggtcataaaagacaatgnnnnnnnnnnnnnnnnnnnnnnnnnnnnnnnnnnnnnnnnnnnnnnnnnnnnnnnnnnnnnnnnnnnnnnnnnnnnnnnnnnnnnnnnnnnnnnnnnnnnnnnnnnnnnnnnnnnnn

SEQ ID NO: 30757 - DNA, 426 bp, Homo sapiens
  misc_feature (1)...(426): n = a,t,c or g
anaacttnnnnnnnnnnnnnnnnnnnnnnnnnnnnnnnnnnnnnnnnnnnnnnnnnnnnnnnnnnnnnnnnnnggcacgagtgcccgcctccgccaagggccccctgggtgtgtaatgtccagtccccctgtgtcagagtggtcagtgctgacccctggggctcttgggcagaaagatgaggagacagaggtccagggtgggttacatagcacatccagggctgagcaagaaataattcagaggtcctaccctctgtctagggacccccctcccaagcctggccttggccttggcacaaagtcctccttgataggagatcccactcactcctggaggctgcccctgaggcttggcccagctctaggagcagtccccagggtcagggagcccctggtgtggaaagaggccccaaggtagtaaaccct

SEQ ID NO: 30758 - DNA, 426 bp, Homo sapiens
  misc_feature (1)...(426): n = a,t,c or g
ggnnnnnnnttgcttgataccgnttgacnnnnnnnnnnnnnnnnnnnnnnnnnnnnnnnnnnnnnnnnnnnnnnnnnnnnnnnnnnggcacgagcttgggtctcagtgctagggtattgagtcaggcagctggagggttgtggcccgaggctgcagtcagaggtatacttcccatagtgcttcacacagctcccctgcttctaaaggataaggtactgtagccttggtcccggggaccacctgcctggggcagtggacatcctaactaaacaggcttctggcagtagctttggttcctatcccatcgaaattccccaaagccctgggccactgccattgggttagtcaagatgaaggaggaggactggctgcctccattttgccttgtttgttagtttgcctgggtctgtctgaggaaggaggggg

SEQ ID NO: 30759 - DNA, 435 bp, Homo sapiens
  misc_feature (1)...(435): n = a,t,c or g
gngngnnnnnntttgnnttcgntancnttatgacatgaattacgaatttaatacgactcgcttntagnnnnnnnnnnnnnnnnnnnnnnnnnnnnnggcacgagcataggnnnnnnnnnnnnnnnnnnnnnnnnnnnnnnnnnnnnnnnnnnnnnnnnnnnnnnnnnnnnnnnnnnnnnnnnnnnnnnnnnnnnnnnnnnnnnnnnnnnnnnnnnnnnnnnnnnnnnnnnnnnnnnnnagagtgagaccctgtctaaaaatcatcattatcatcatcatcatcataatcatcatcatcatcctgcagggtattttaaaatgaaataacacacccaaggtctcatggctacttagaggtagaaggagaactcaatgccaggaagacctgatccaaccagaggctactactgcccttctttcaacagctcagggatc

SEQ ID NO: 30760 - DNA, 430 bp, Homo sapiens
  misc_feature (1)...(430): n = a,t,c or g
gngngnnnnnntttgnnttcgannnnnnnnnnnnnnnnnnnnnnnnnnnnnnnnnnnnnnnnnnnnnnnnnnnnnnnnnnnnnnnnnnnnnnnnggcacgagcccctctccctccccgctccctgccttcccctcaatgcagattccctggcccacctgagcaccatttttccatccacaggatgtgctctctctgacctctcagatgcattttccctgcacttggagaatacttcttccccactctcagcagggaaagctctgatccctccttttggtctcagcctagaagttttattttcttgaagtcttcttggaacccccaaactaggtagtcctgttaactacagtcatcgcatcccatactgattcaacaacgtgaatgtaattgctttttaaataaatttgctgtctcctgcactagaactct

SEQ ID NO: 30761 - DNA, 430 bp, Homo sapiens
  misc_feature (1)...(430): n = a,t,c or g
ggtgtnnnnnnttnnnnnnnnnnnnnnnnnnnnnnnnnnnnnnnnnnnnnnnnnnnnnnnnnnnnnnnnnnnnnnnnnnnnnnnnnnggcacgagggaaaccaggagaatgatgtctcaccaatattggtaaagagactggaattataaaaaggaaccaaatagaagttctggaattgagaagtacacaaataaaaaattcattggaagggttccagagcagacttaaaaaggaagaagacaaaaatcagcaaacttcaagataggtcaattgagattacccattctgaggtgcagaaagaaaacaaacaacaacaacaaaaagctaactgagcctaagacacctgcaggacaccatcaagtgtaccaacatacacctaataagaatcaagagaagagtgaatgtagaagaaatttttaaagaaacaatg

SEQ ID NO: 30762 - DNA, 425 bp, Homo sapiens
  misc_feature (1)...(425): n = a,t,c or g
ggagnnnnnntttganatttgannnnnnnnnnnnnnnnnnnnnnnnnnnnnnnnnnnnnnnnnnnnnnnnnnnnnnnnnnnnnnnnnnnnnnnnggcacgaggttttaacatctcctgggactccccttctccctttgtgtggtctttatccccaatgaggtttgagccccagattacaggcaggaattaaggcattggactcaggcagctcagaactgcatgacctgcaggatcaagatgtataaagtaaccaagtgtgtgtgtgtgtgtgcatgtgcatgtgaatgtgaggggggccgaccccttcagcaagcccccccattcattgtcctgaggaggagtggctgggtgggtggcagccggcacgcaggtgtgatggaggggctgctgagggctgggatgctgggggaggggtggggcctgg

SEQ ID NO: 30763 - DNA, 467 bp, Homo sapiens
  misc_feature (1)...(467): n = a,t,c or g
antttgatnnnnnnnnnnnnnnnnnnnnnnnnnnnnnnnnnnnnnnnnnnnnnnnnnnnnnnnnnnnnnnnnnnnnattcggcacgagcgcccaccaagcaggtcttcacctcatacactgaggcctccagtgagtccgggcttcacacgccggcatctcaggccaccaccctccacgtccccagccaggaccctgccggcatccagcacctgcagccggcccaccggctcagcgccagccccacagtgtcctccagcagcctggtgctgtaccagagctcagactccagcaatggccagagccacctgctgccatccaaccacagcgtcatcgagaccttcatctccacccagatggcctcttcctcccagtaaccacggcacctgggccctggggcctgtactgcctgcttggggggtgatgagggcagcagccagccctgctggaggacctgagcctgcgagca

SEQ ID NO: 30764 - DNA, 461 bp, Homo sapiens
  misc_feature (1)...(461): n = a,t,c or g
accnnnnnnnnnnnnnnnnnnnnnnnnnnnnnnnnnnnnnnnnnnnnnnnnnnnnnnnnnnnnnnnnnnnggcacgagctcataactgtgcacctgaggagggatgagaagctactgctatctgctgctctgggaaatgagatggtttggccatgcaccacctcagatctccaaactgatgtccctgtgaacacctgcactatgagaaggtttcccaacaagagtgtatcatgatggcattccacgagattttataaccagagtctagcagtgataaaatgtacaatttacgctctgaatagaaacatgacaccaaagaaagggcattgccatgacatctcaaagcaacaggtaattgaagcggctgagtggataccacgttgtgaggtcagccactgggtcacttgtagtcaatgcaaagcttgcacaaaccaacgtcagcctagtttcactcagtttga

SEQ ID NO: 30765 - DNA, 421 bp, Homo sapiens
  misc_feature (1)...(421): n = a,t,c or g
anacnnnnnnnnnnnnnnnnnnnnnnnnnnnnnnnnnnnnnnnnnnnnnnnnnnnnnnnnnnnnnnnnnnnggcacgagctgggggagcacatagtcctctttgcattgtagaaaaggtcatgggtataggaaatatgatttagaattttctgtgaagtttattattcagccataaatagtacataggcatctatcttcatcttcaccttgttatggatcagaaggaaatgtgatatatagtacttggaaatttgggggctttactactatgtagctcaaggttagaacttactcaacattactcatttttaacctttgattggtttgttcctttcttacagatgaatcaactatgttcagtgaaagatactatcctgaatgnnnnnntggggggntttgcnnnnnnnnnnnnncnntact

SEQ ID NO: 30766 - DNA, 460 bp, Homo sapiens
  misc_feature (1)...(460): n = a,t,c or g
acnnnnnnnnnnnnnnnnnnnnnnnnnnnnnnnnnnnnnnnnnnnnnnnnnnnnnnnnnnnnnnnnnnnggcacgagcaccaaggagatggcttgaggtttcacactcacccagtagctaaacatgacaggaactgtggaaagggcttgcactgttactcctagacatggacacaaagaagggcaaagctggtgagaagaataggctgggcactccttcctttcccaaggccaagcggcagcaagcctccaccctaaactcctcctgctctccctccctgcgtccctctcagtcctctccctggaccccccctcagcccccagccccagattctagggaagtaagtaaagattggacacaaatgagatcattcaaggaaaactaactgaccccatttccaaagagttatttctgccctccttcctgtgaaattttatttaagcaagactttttcaggctt

SEQ ID NO: 30767 - DNA, 438 bp, Homo sapiens
  misc_feature (1)...(438): n = a,t,c or g
gnnnnnnnnnnntttggannaccagctatnacatgatcacgaatttaatacnnnnnnnnnnnnnnnnnnnnnnnnnnnnnnnnnnnnnnnnnggcacgagtaaaataatgttcatagcattattaataataaaatctaataatacattttggacttatattacccttttatctcctaagttttcaaaaggaaaaagtatgtctttattctgtttttcccaaaacaaacaaacaaaaaaaccatgctcttgatatttgcatctggatatccaaaaatggcatccaaatgagcagtttgaagtatttttctaacgcagttgaggatactgaaatgcaaatggtgtaattcaagccaaaaaatgaccctctgccttgtgctgggctcaatgatttccatgctgctactgccaaaatcacaattgcaggctacaagttagag

SEQ ID NO: 30768 - DNA, 442 bp, Homo sapiens
  misc_feature (1)...(442): n = a,t,c or g
gnnnnnngnnnttgaaacacctnnnnnnnnnnnnnnnnnnnnnnnnnnnnnnnnnnnnnnnnnnnnnnnnnnnnnnnnnnnnnnnggcacgagagaagaccttttctctttgagcctggaacattaaaaaaaattatattatttggtcatcaatactatgtatctcccccacccctgctggctggtctttaattttggccttctatgcaaaattgcagagaacatttagtcagaacaacttcgcaagtttgatattggtgtttcgatgatctccttgttatttaggaagattagggccactttgaggtaaacctcaattacaagcggtgggattagtgctatccgctaattacgggttcctgttgcgctcctaccacttcacagaccctggctcanagcttgggaagctgtgaaggtggtgataacacttcaaattgacttt

SEQ ID NO: 30769 - DNA, 423 bp, Homo sapiens
  misc_feature (1)...(423): n = a,t,c or g
cacnnnnnnnnnnnnnnnnnnnnnnnnnnnnnnnnnnnnnnnnnnnnnnnnnnnnnnnnnnnnnnnnnnggcacgagcaaaactctgtctcaaaaaacaagcaaacaaaaaacacatttagcaagagaaatgagaacagcacggaatactccaagtagagggaatagtatactcaggagtttggaaagtgagacagaacacagtatattttaagatttcagannnnnnnnnnnnnnnnnnnnnnnnnnnnnnnnnnnnnnnnnnnnnnnnnnnnnnnnnnnnnnnnnnnnnnnnnnnnnnnnnnnnnnnnnnnnnnnnnnnnnnnnnnnnnnnnnnnnnnnnnnnnnnnnnnnnncannanaantttnaaaaannnnaatttttttnggggggggggtttnttaaaannngttttnccngggt

SEQ ID NO: 30770 - DNA, 430 bp, Homo sapiens
  misc_feature (1)...(430): n = a,t,c or g
tggnnnnnnnnnnnnnnnnnnnnnnnnnnnnnnnnnnnnnnnnnnnnnnnnnnnnnnnnnnnnnnnnnnnnnnnggcacgagcaggagggatacctcacacaaatgaagattagggtgggagtgtgtaacgtgtatccaggagggaagggtcactcttgctccagggaatggtgtacaaggtaacaggcctggaaaattggtttggggctaagtgttagggagccttgaatattggtctgaggaatataaacttaatcccttgggaaatagggcaatacactaaagattatagagtggaatagtaattcaaaacagataaataaaagccttcctcctcctttaattcctgggggccgcttttttgcctggaccttcccgtttccagaccaaaaactttctgaggtcctgcgtttgaggattactttcagc

SEQ ID NO: 30771 - DNA, 447 bp, Homo sapiens
  misc_feature (1)...(447): n = a,t,c or g
gnnnngnnnntttgaaanccttngaatttganacacctnnnnnnnnnnnnnnnnnnnnnnnnnnnnnnnnnnnnnnnnnnnnnnnnnnnnnnnnnnnnnnnggcacgagccaccatggtgctgtctcctgccgacaagaccaacgtcaaggccgcctggggtaaggtcggcgcgcacgctggcgagtatggtgcggaggccctggagaggatgttcctgtccttccccaccaccaagacctacttcccgcacttcgacctgagccacggctctgcccaggttaagggccacggcaagaaggtggccgacgcgctgaccaacgccgtggcgcacgtggacgacatgcccaacgcgctgtccgccctgagcgacctgcacgcgcacaagcttcgggtggacccggtcaacttcaagctcctaagccactgcctgctggtgaccctggcc

SEQ ID NO: 30772 - DNA, 463 bp, Homo sapiens
  misc_feature (1)...(463): n = a,t,c or g
aatttgatancnnnnnnnnnnnnnnnnnnnnnnnnnnnnnnnnnnnnnnnnnnnnnnnnnnnnnnnnnnnnnnnnnnnnggcacgagaagagcatcaagagcagtttgctcttcagtaagagcaaaatgttttaaaattgttgataaacagagccccaaatttagaatgtttacttcttgtttacctcagtcttttaaaatatctattgctgcatgttctgtaatgtatgtattgtagtaatgtatgtatattataaataattatgcatatattggagtatgggcttatattaatcaatgccaagacaaacagaaatgactcagaaaagaggaacttcaatccagggaattgattacaaaagtgttggaaagtctggttgagcaaatagaaggtggcaatattatttagtaacaaattccttcagaaagcaagggaaagttttgttatccagagcctataagt

SEQ ID NO: 30773 - DNA, 467 bp, Homo sapiens
  misc_feature (1)...(467): n = a,t,c or g
ttnnnnnntttganancnnnnnnnnnnnnnnnnnnnnnnnnnnnnnnnnnnnnnnnnnnnnnnnnnnnnnnnnnnnnnnnnnnnggcacgaggagccctgtctcctgacttctctcttggaaggctggggctggctcttcttagggctgggaggaatgtctcatcttaatagggccggtggcctcaagggcagttgtagctctcttggagctctgggacctggtaccgatagtgtgtgagcagagggtgtcccaggcaggtattcagtcctggtggccccttatattctcttcaatgtagttccaacattggtgggagtagccttgccattaaggaatgtataatttccccgggggcgccaggatcgtgagatgagtaatgttggtggagtgagacagtgctatgaagagctaggcctggctgggaacggggtggagagcagtgggggaggcacctaagttgttctt

SEQ ID NO: 30774 - DNA, 464 bp, Homo sapiens
  misc_feature (1)...(464): n = a,t,c or g
tttganatctgnnnnnnnnnnnnnnnnnnnnnnnnnnnnnnnnnnnnnnnnnnnnnnnnnnnnnnnnnnnnnnnnnggcacgagggaaggtgcgggaagaaccttcaggaagaggaattcgctgtggccacattgcactgtggcagggaggctgggaggtcctcccgctgtgtggaggaggctgcccctcctggacaaggagctttacccagcagatccagtgagagctgctccaaaaaggctgcctctttggtaaggattaggatgagtgggaaaggtcttctctttctgacaatactgataggtcaggtgcccaggctcacctgtggtggaacagccgaaaatgccagtgaagacatttccataaagcatcttacagatgctgcctcacacgggctaagaaagaggaagtgctgaaggcctggggacctaatggtgacagaattgagaggcagatgggggtg

SEQ ID NO: 30775 - DNA, 457 bp, Homo sapiens
  misc_feature (1)...(457): n = a,t,c or g
tttggaaanccgnnnnnnnnnnnnnnnnnnnnnnnnnnnnnnnnnnnnnnnnnnnnnnnnnnnnnnnnnnnnnnnnnnggcacgagggataataaagataaaggggtatacagacttggattctgtttctatatatgtgaagcgttagagagaggtggtaaattgtttctctcccgtgggttgtgcacatctctgatattatggtaatccccatatcttctccttttgcagggtggggtgtcttggatagtatggttactgaatgtagaatctactaactcctcnnnnnnnnnnnnnnnnnnnnnnnnnnnnnnnnnnnnnnnnnnnnnnnnnnnnnnnnnnnnnnnnnnnnnnnnnnnnnnnnnnnnnnnnnnnnnnnnnnnnnnnnnnnnnnnnnnnnnnnnnnnnnnnnnnnnnnnagctaattagaaaagtttttctttgttgagatggggtc

SEQ ID NO: 30776 - DNA, 460 bp, Homo sapiens
  misc_feature (1)...(460): n = a,t,c or g
tttganaatcntatgacatgattacgaatttaatacnnnnnnnnnnnnnnnnnnnnnnnnnnnnnnnnnnnnnnnnnggcacgagttttttccttaagttctaattgaatgtgagttccagaaaaaaaataagtgaatgtttcagcccgttcacacgtaaaggatgtggctgcctgcgtggcgggctgtggggccctgagcaggtgtgtccccagccctggcagggggcctgtcctgcctgcagcctggctctctaccagccgtggcatcagccacctcatacaaccctagaaggaaaaagtgcaaggaaaataggattttaggaaagtaaaatggcggtcccatcttcagcaggaggaagtcacaggaagtgcctggagttgcagggtttgcctcgatttgaatcatagcaaagccttccccaagtgcgcantgactgcctggnctgtgggaggcaatc

SEQ ID NO: 30777 - DNA, 453 bp, Homo sapiens
  misc_feature (1)...(453): n = a,t,c or g
tnnnnnnnnnnnnnnnnnnnnnnnnnnnnnnnnnnnnnnnnnnnnnnnnnnnnnnnnnnnnnnnnnnnnnnnnnnggcacgagaaaaattgtaagtcagaccatcataaattggggactgtctatattacagatgaggtctagtaagcctccttgtttgggatgctacgcctctgtaatgtgctcattgccatcaatgggactaggccagagacagatacagagtaaattaatggaaagagcatgcatggggtnnnnnnnnnnnnnnnnnnnnnnnnnnnnnnnnnnnnnnnnnnnnnnnnnnnnnnnnnnnnnnnnnnnnnnnnnnnnnnnnnnnnnnnnnnnnnnnnnnnnnnnnnnnnnnnnnnnnnnnnnnnnnnnnnnnnnnnnnnnnnnnnnnnnnnnnnnnnnnnnnnnnnnnnnnnnnnnnnnnnnnnnnnnnnnnnnnnnnnnn

SEQ ID NO: 30778 - DNA, 459 bp, Homo sapiens
  misc_feature (1)...(459): n = a,t,c or g
tgnaaatntnnnnnnnnnnnnnnnnnnnnnnnnnnnnnnnnnnnnnnnnnnnnnnnnnnnnnnnnnnnnnnnnnnggcacgaggagacaactgggaccatttgaacaattttacagagattagctgcttatactgagctgtgttgctcaacctgacttactccaaagcctgaaaggatgtagttcaggtgtgtttggcagctgaatgaggccacagtgtttagtgttgggttagcccgtgattctccaccaggctacgtgtcagaatcacctgtggaacgtcttaatcgattcctatttccaaggtccctcgttaaaccagttaaatcagaatctcaggagtagggtctaggcattacatttttgaagctctctggaggggtctcaaaagaggcacaaagaatgagtggtgagaggggagagctccttcttgctttctacaagctccaagtttgctttt

SEQ ID NO: 30779 - DNA, 461 bp, Homo sapiens
  misc_feature (1)...(461): n = a,t,c or g
anatttgaananccgnnnnnnnnnnnnnnnnnnnnnnnnnnnnnnnnnnnnnnnnnnnnnnnnnnnnnnnnnnnnnnnnnnggcacgagcaaccgtttaaaattacagtgtgaaaatttgaatattaaccttaaaaatgtgtgaaagagtctatagtttctccaggtctctttctggggttatgcaaacaaagatgtgaagaactgtgggcaaaggctatcatgggggcagaagtaatgaggaggacagtaagcatttatttattttttcccctacttaaaattcctggaaagatgaactgattggatatttttaagtcatagcaacattttaacagaaaagaatacttgccaaactttaatatgacatccaaaatacactctttctaagatcacttttacaggccctctcctcatccctgagcctttcttcatgccattcctgacatctagatgtcttct

SEQ ID NO: 30780 - DNA, 457 bp, Homo sapiens
  misc_feature (1)...(457): n = a,t,c or g
aaancnnnnnnnnnnnnnnnnnnnnnnnnnnnnnnnnnnnnnnnnnnnnnnnnnnnnnnnnnnnnnnnnnnnggcacgagtgaatccattcttttaagatcaagcatatgtaatgccaaagtcccactttatatttccactcctcagtgcctttcccctcccctgaactcactacttttatcattttggtgtgacttcccagaactttccctgttcgtgaatctctgtttatataagtcttctataaaaccaagatatgtcctcaatataagtcttccctttggagattttattattcacggagaagcccacctagcagctgagctctgcagatccctgccccttctcagggcttggtgcccttttcctccactgcttctgtggcccctgcccacacctacaccgtgaacctcactgcctgtctctgngntttgaggactcttntaccctcagttcc

SEQ ID NO: 30781 - DNA, 462 bp, Homo sapiens
  misc_feature (1)...(462): n = a,t,c or g
ttganatccnnnnnnnnnnnnnnnnnnnnnnnnnnnnnnnnnnnnnnnnnnnnnnnnnnnnnnnnnnnnnnnnnnggcacgaggaaggcatcaaggataacacagaatgaagttttattttaaatgacagaggtaggccctaaatttttttacacatttttacacatttttttctataccattttaagataatagatttcttatatttctttgctaattttcataataactttcttttttagctacaaggctttggccgaccaagtgtgtaccatgctgctattgtcatcttccttgaattctttgcgtggggcctgttgacaactccaatgttgactgtaagtattgctgaactgggtttgtgttttgtaagagaaagagataagttcttaggcacgtatcactgtgtatgtctagataccgtgtttgggagtagctcttgataagtgatttaaaacagct

SEQ ID NO: 30782 - DNA, 459 bp, Homo sapiens
  misc_feature (1)...(459): n = a,t,c or g
ttgaaanccttgacnnnnnnnnnnnnnnnnnnnnnnnnnnnnnnnnnnnnnnnnnnnnnnnnnnnnnnnnnnggcacgagagctgttcaacctttgtgagatgctgccccagagctagcctaacatcccttcctctgccctctatgggtaaagcagaagcaccaaattcaagctgggaggaaaacaaacttcctctttcaaaggcgaaagtgacaaagaatttgcaggccgtttaaatccaccacattgtccagtcaggagcacccattttctcattgaccttctgctaagtgaagaggtagaaggaattttcacaatggcttttagaaaagtaaaacaatacaggaagggattttgctgtcatttaaaacatggtctgctccagatggaggatttggtgatttttattttcttctttactaaacatttctgcatttcatgaagtttttcagtgcatca

SEQ ID NO: 30783 - DNA, 459 bp, Homo sapiens
  misc_feature (1)...(459): n = a,t,c or g
atttgaatanccgnnnnnnnnnnnnnnnnnnnnnnnnnnnnnnnnnnnnnnnnnnnnnnnnnnnnnnnnnnnnnnnnnnggcacgagttctaggaagattctttgtgtacttcatcctccaacagtagacagaatggtttgtgtttgcccagggtgcccaggtaagaaacagggtctccaagtatctttcaaaacatgaggcccagagcctcaccaccttgggggcagggtccatggcttctcaatgggcttggtttggcttatatcaccatttccccctcccctctctcattcatggtacaccttagcatattaaactgttggaaaagttaggttttttgtcctagaaactggcagagtagtgtggggcagctctgcaccgggtgaaatgctgttattcagagctctactaagtctcactgccttcctcaagtttgcccctgttaaaatgcaccacca

SEQ ID NO: 30784 - DNA, 465 bp, Homo sapiens
  misc_feature (1)...(465): n = a,t,c or g
ntttgganatttggatanccgnnnnnnnnnnnnnnnnnnnnnnnnnnnnnnnnnnnnnnnnnnnnnnnnnnnnnnnnnnnnnnnnnnggcacgagtaatcatgaaagtgatagcccatcatattcacaggctctacttctgctgaaggggagaggactacacaggttgtgtacaccaggggttcagaatcctaggacatctcagaattctgcttcatacaagtaatatgtttgaatttgaggatttgagaaggtcactagactcagcctttgtgaaagcaacgtttctcctgctggcattgtagaagtctgttccatgtttttctgggctccatgtgtttcacttaagtctaaggaatggacctggcctggatcatgtctgttcctggagactttactgaggctaagtgggctttagcttccttagaggagttcaagtctggggtggcccctaagcagttcactc

SEQ ID NO: 30785 - DNA, 461 bp, Homo sapiens
  misc_feature (1)...(461): n = a,t,c or g
tttgnaaatcnnnnnnnnnnnnnnnnnnnnnnnnnnnnnnnnnnnnnnnnnnnnnnnnnnnnnnnnnnnnnnnnnnggcacgaggaggctctagttaagtcagctagtaaccagcctgtgtgcagtattcctactagatagaggtcttatgcccggctgtcagtccgttggttcagttaactgtggccaggaatactaggcatataacttaaaatcagataacttttatacaagaaaagccaatggccaccttcctgagaataggataaggagacaggggtagaaccttagattctaaggaacctaattaagaatcannnnnnnnnnnnnnnnnnnnnnnnnnnnnnnnnnnnnnnnnnnnnnnnnnnnntgtagnnnnnnnnnnnnnnnnnnnnnnnnnnnnnnnnnnnnnnnnnnnnnnnnnnnnnnnnnnnnnnnnnnnnnnnnnnnnnnnnnnnncg

SEQ ID NO: 30786 - DNA, 457 bp, Homo sapiens
  misc_feature (1)...(457): n = a,t,c or g
atttgganancnnnnnnnnnnnnnnnnnnnnnnnnnnnnnnnnnnnnnnnnnnnnnnnnnnnnnnnnnnnnnnnnnnnggcacgaggaacaaaagaaagctaaagatagggcgtgcaaagaataaaaacagcctggctcacaaagaacaagttactggtttgtttccaaagctttcggaccctgccctgttattccccttccaggagataaccacctccaaggccagcagacgtctgcaggccctttcgccaggctctctggcctcctagtgctggcttgtccactgtctaggttgtcttgtaggacccatgccaccaggaatcctctccagactacttgaccaccctgcagtcagatctctgttctgccctcttctctacccagggctcttggctgtggtggcggagggagggatgcctgtttccctaggtctcccaggtgattggcacctatgtg

SEQ ID NO: 30787 - DNA, 474 bp, Homo sapiens
  misc_feature (1)...(474): n = a,t,c or g
gnngnnnnntnnnnntttgnnnntttgnanancnnnnnnnnnnnnnnnnnnnnnnnnnnnnnnnnnnnnnnnnnnnnnnnnnnnnnnnnnnnnnnnnnnnggcacgagatttatttctagacttagataacttttattggccacatttttgcttgaatttagcaacctgaatgacaaatgtaaggtatgatttggccttcattgtgtcatataaatgcctctaaaaattgtcaacttttaaagttctaatatgataaataggtgtcagagaaacacaaaatacagagtttgagttgaatcgtagaccttatttggtagtaatttatctttggatgtgagtccaagtcctgcagagtagtgaattttattctggtttatggtatgaacttgatgtatcgtgttcctgtagcaggagtctgagaggcaaagaatatgtgtacagcattcacacttaagctttcaaaaccctgctcg

SEQ ID NO: 30788 - DNA, 514 bp, Homo sapiens
  misc_feature (1)...(514): n = a,t,c or g
ccctcgaggccaagaattcggcacgagaaaaaaaaaaaattctgctctggtttgtttttagagatgcattgaatactgggttttttgacaatttgcatgttggagctgtaaatctaaaagaatcctacagtgtaatttttgcttccgtaaccctgtctgttcctatggacttggttcttacccactcccagagagtagataggaggttgggattgggaacagtataacccagataggcattgcattgaggcttagtaatacgtagttctgtctaatgggagagcctgggtttctggttccactaccaatatcctaagtagccttaaggaatttacataatccatttctttctacattccttaactcttctagcagaggacagggatattaagaatgtgattttaaagataaattaaaaatttgccnnnnnnnnnnnnnnnnnnnnnnnnnnnnnnnnnnnnnnnnnnnnnnnnnnnnnnnnnnnnnnnnnnnnnnnnatgangagttttgttaa

SEQ ID NO: 30789 - DNA, 508 bp, Homo sapiens
  misc_feature (1)...(508): n = a,t,c or g
ccnagaattcggcacgagaacaaagatactaaagtggaaacacttcctagaatgttatttgaaaaaatgaaggaatgagtccccatcctgctacctccttaagaagataaaaatgttgctcctttacttaagggtacatatttttatttttagttaaaaatatttggagcgcttgttgcattctaggtattgttctatgtagggaggatgcagtagcaaaacaagacaaaggagatcctgctttcctggagtttccatcctagtgtgtatgggtaaacatgtattatagatgaaaaataaacatgaatcatatcagggttataaagcaggtttggtgagggtaaagagtgtcagctggatgaaggaaaggtgttctgttttatatctagcatcagggaaggtgctgctgctaaggttatgttcnagcagagacctgaggaagttgccanananaactggactgggggtggagggactttngnncaaggggnaccttnncnntnccccc

SEQ ID NO: 30790 - DNA, 511 bp, Homo sapiens
  misc_feature (1)...(511): n = a,t,c or g
cctcgaggccaagaattcggcacgagctcattactcccacccttgtcactacgatggcatagcctcaggggttactttaggaannnnnnnnnnnnnnnnnnnnnnnnnnnnnnnnnnnnnnnnnnnnnnnnnnnnnnnnnnnnnnnnnnnnnnnnnnnnnnnnnnnnnnnnnnnnnnnnnnnnnnnnnnnnnnnnnnnnnnnnnnnnnnnnnnnnnnnnnnnnnnnnnnnnnnnnnnnnnnnnnnnnnnnnnnnnnnnnnnnnnnnnnnnnnnnnnnnnnnnnnnnnnnnnnnnnnnnnnnnnnnnnnnnnnnnnnnnnnnnnnnnnnnnnnnnnnnnnnnnnnnnnnnnnnnnnnnnnnnnnnnnnnngtagcatcttttaatgcttgctgattattttagcaggaacagcacactaagtacagtctagtctcaattatgntttcctttcctataaactgagtgagtataccagttcctgggggtaaatcatcttaaaatgggtgaattt

SEQ ID NO: 30791 - DNA, 428 bp, Homo sapiens
  misc_feature (1)...(428): n = a,t,c or g
annncanctatgttggaantcnnnnnnnnnnnnnnnnnnnnnnnnnnnnnnnnnnnnnnnnnnnnnnnnnnnnnnnnnnnnnnnnnnnnnggcacgagacctgacctttacacattggaactcctcaggttcaaccttagatcctcttctcccaccctagctgcttaaatcatctcaaccacccatattgccttgcctctatgctgagagctttcagatttatacgacagcccagaatttcctccaatctcctgagccatgtaagtacctgctttgcacaagcacctcatactaaggttgtttagaacatcactgcctttcctaatgtgtttgagatttttgcattttcccttccagatccactctctacccaggaggctgacatagttgactacatccactggnttccttggcttntancttttgcc

SEQ ID NO: 30792 - DNA, 443 bp, Homo sapiens
  misc_feature (1)...(443): n = a,t,c or g
gnnntttgnanaccgctnnnnnnnnnnnnnnnnnnnnnnnnnnnnnnnnnnnnnnnnnnnnnnnnnnnnnnnnnnnnnnnggcacgagcggcacgagtggaagcgcatccgggagatcatggccatgaacgggaaccggcctatcccacacatagacccatcgcgccctatgaccccccaacagcgacgcctgcagcagcgacgcctacaacaccgcctgcggcttcgggcacagatgcggctgcggcgcctcaacgccaccaccaccctaggcccccacactgtgcctcccacgctgccccctgcccctgccaccaccctgagcactaccatagagccctggggcctcataccgccaaccaccgctggctgnnnnnngtcggagactgagacctacacagaggtggtgacagagtttgggaccgaggtggagcccgagtttg

SEQ ID NO: 30793 - DNA, 474 bp, Homo sapiens
  misc_feature (1)...(474): n = a,t,c or g
gnnnnnnggnnnnnngtnnnnttggnccnccnnatacnctttgnnnnnnnnnnnnnnnnnnnnnnnnnnnnnnnnnnnnnnnnnnnnnnnnnnnnnnnnnnnnnnggcacgaggccttctaccaggaagaacgatgccttcttcgtagtttcaggttttgggaaaatgagttccccagaatgctgggagcagagttgtgattcactcttgcccattccctgctgatgccaagccttgctcaggaacttaagaacctggttgtggtcgcgttctctacatgaagacacatgggttgctgtcagtgcttcctgaatggtgcttcaaaccctgattatgaaaatgcagtaagaattgagctgtacagatctggcatgtcacttccttgggcttgtgtcatcagcagttgtgaagtccccattggggacttggtagcatggaaagccacacaaagatgtgctgcatctggttttgctg

SEQ ID NO: 30794 - DNA, 447 bp, Homo sapiens
  misc_feature (1)...(447): n = a,t,c or g
tgnanancncttnnnnnnnnnnnnnnnnnnnnnnnnnnnnnnnnnnnnnnnnnnnnnnnnnnnnnnnnnnnnnnnggcacgagggctcggcgtgggannnnnnnnnnnnnnnnnnnnnnnnnnnnnnnnnnnnnnnnnnnnnnnnnnnnnnnnnnnnnnnnnnnnnnnnnnnnnnnnnnnnnnnnnnnnnnnnnnnnnnnnnnnnnnnnnnnnnnnnnnnnnnnnnnnnnnnnnnnnnnnnnnnnnnnnnnnnnncacaagtttattgaatacctactgtcctaggcattatacacagccactacctgattaaacagtataagatatttttgagtacttgcttcaccagaaatgttttgtaattgacatcattttttacttaaaaatgcttgtgaagttggttcctatgaaaggagaacatcaggactcccttaatgtgacttaaaa

SEQ ID NO: 30795 - DNA, 442 bp, Homo sapiens
  misc_feature (1)...(442): n = a,t,c or g
ttgaaacccttnnnnnnnnnnnnnnnnnnnnnnnnnnnnnnnnnnnnnnnnnnnnnnnnnnnnnnnnnnnnnnnggcacgagaatatgtaatatatatgtagaattctttcagcaatgtaattaaaatttgtgtgggtttctttatgtatatatacctaaaattacgtttttacagaggaaaaataatacccaggcatgcatccaattggcactgtgaataagaagagagcagaaacagatctataaaatcttcaaatgttgcaaatatcagatggatttaaaacnnnnnntgttaaatttaaagaattggagacaaacttgaagaacaaaagactcttatacagtgacttnnnnnnnnnnnnnnnnnnnnnnnnnnnnnnnnnnnnnnnnnnnnnnnnnnnnnnnnnnnnnnnnnnnnnnnnnctagagctnatgaccacc

SEQ ID NO: 30796 - DNA, 438 bp, Homo sapiens
  misc_feature (1)...(438): n = a,t,c or g
anccntttgaannnnnnnnnnnnnnnnnnnnnnnnnnnnnnnnnnnnnnnnnnnnnnnnnnnnnnnnnnnnnnnnnnnnnnnnggcacgagcagggggaatgcaagtttggcactagctgtaagagatcccatgatttctctaattctgagaatctggaaaaattggagaagttgggtatgagctcagacctggtgagcaggctgcctaccatttatagaaatgcacatgacatcaagaataagagctctgcccccagcagagtgcctcctctttttgtcccacaggggacttctgaaagaaaagacagttcaggttctgtgtccccaaacactcttagccaggaggagggtgatcagatctgtttgtaccatatccggaaaagttgtagctttcaagataagtgccatagagttcatttccatttgccgtatcgatg

SEQ ID NO: 30797 - DNA, 431 bp, Homo sapiens
  misc_feature (1)...(431): n = a,t,c or g
anaccnnnnnnnnnnnnnnnnnnnnnnnnnnnnnnnnnnnnnnnnnnnnnnnnnnnnnnnnnnnnnnnnnnnggcacgagatcgccattctcagtgactactcccaacctgcattccctaatttatagtgccagttgccctagccagaaaattaggagtcagtctcaattcctcctttcttgttgtacttgtcatatctatttgacttgtgagttctctagattttacctctaccttgacttcttatattttgtctctctgccctatatcatattgtcagcatttttctctgtggtttcaggggacttgttattgggctccctggctatagttcaactctcctccaatctgtccattcagctgccaagatactttcgctaactaccaattctaatcattttctttctcctgctcagaattcttccatttct

SEQ ID NO: 30798 - DNA, 421 bp, Homo sapiens
  misc_feature (1)...(421): n = a,t,c or g
anaccctnnnnnnnnnnnnnnnnnnnnnnnnnnnnnnnnnnnnnnnnnnnnnnnnnnnnnnnnnnnnnnnggcacgaggaattgatccgggagttgaagagggctgcaaggtgggaagtgaagtcagtgcctcagttgctggtaaggtgtagctgttctgtcccagtccccgtagctctgcaccgagcataagaggtctagggtcacgcaggggccatggctgaggcacttgggcttggttctggcaggcggagcggacggggctgagagcggggccctacgggcgtaagccaggttaccctacgcgagtggcgtaaagcgggtttgtaaatgccgcctgccggcttgggcccgaacgcctccaggaagtctcctctaggtggcngcgggaggggaatgctaagatgnncccatgngcccc

SEQ ID NO: 30799 - DNA, 428 bp, Homo sapiens
  misc_feature (1)...(428): n = a,t,c or g
ttgnnaccctnnnnnnnnnnnnnnnnnnnnnnnnnnnnnnnnnnnnnnnnnnnnnnnnnnnnnnnnnnnnnnnggcacgagggtggacagagtggacagggtggagagggtggatagggacccactgactcacagcaaggggtgatttctcaatttgctggggtggcggggctggaatccagctctccttttcacttttgtttggaaacgtgagttggtttttcaaaaatttttatgtctcaaactatcaaattctgttaaaaacatcaaggctcatcacagaaaagcatgacatacaatcattactgttgttctttttttagtgtaagcatgaaggaaagggaggccattggtaaaaccacctgacactaataaaatggaaacttaaaatcaatggcaaatgancgtgattaattattaacattctt

SEQ ID NO: 30800 - DNA, 424 bp, Homo sapiens
  misc_feature (1)...(424): n = a,t,c or g
ttgacngannacttggnnnnnnnnnnnnnnnnnnnnnnnnnnnnnnnnnnnnnnnnnnnnnnnnnnnnnnnnnnnnnnnnnnnnnnnnggcacgagagtctttagactgagctttttttgccttagcatccatgttcagtttaacgcaggtctgaacactcctggagttggcctgatcctgaattcagtgctagttgccatttagctcagtgcttagctcctttgttcataataaataaatatttttctgtacctattttttaaccaaaagtgaaaaagtgtaatccaaataagccatgtgtcaagaaaaataatgcttcaaaaataatgcttttttttgttttgttttggaagtacacaatatgttaaatatttaatatacaaatagcatctgtggttaaagaacacattcagtgaacttcac

SEQ ID NO: 30801 - DNA, 405 bp, Homo sapiens
  misc_feature (1)...(405): n = a,t,c or g
nnnnnnnnnnnnnnnnnnnnnnnnnnnnnnnnnnnnnnnnnnnnnnnnnnnnnnnnnnnnnnnnnnnnggcacgagggctttttctctagttggtgagacagatggaaaccccttcagttccactacagatatttttgaaatacctgttatgtgccaggcactttctgaactcgaggtaccgcagtgaaccagacaggtgttatctatgccctcctggggcttctaagccttcagagaagatagacactgtacaggtgagttaagtgctccaaagagtatggctcctggtgtgtaagggttcaaatatctgttgatagaaaggataaaggccatgtcatctttattctttctcacagggcccagcatggggcctaacacagttagacttaggtaaatggattcaa

SEQ ID NO: 30802 - DNA, 426 bp, Homo sapiens
  misc_feature (1)...(426): n = a,t,c or g
ttganaccctnnnnnnnnnnnnnnnnnnnnnnnnnnnnnnnnnnnnnnnnnnnnnnnnnnnnnnnnnnnnnnnggcacgaggaaattagagaaacnnnnnnnnnnnnnnnnnnnnnnnnnnnnnnnnnnnnnnnnnnnnnnnnnnnnnnnnnnnnnnnnnnnnnnnnnnnnnnnnnnnnnnnnnnnnnnnnnnnnnnnnnnnnnnnnnnnnnnnnnnnnnnnnnnnnnnnnnnnnnnnnnnnnnnnnnnnnnnnnnnnngtgcnnnnnnnnnnnnnnnnnnnnnnnnnnnnnnnnnnnnnnnnnnnnnnnnnnnnnnnnnnnnnnnnnnnnnnnnnnnnnnnnnnnnnnnnnnnnnnnnnnnnntgggttggttggtttgtttttgtttttggtnttgtaaaaacngggtcttactgngntgccaa

SEQ ID NO: 30803 - DNA, 506 bp, Homo sapiens
  misc_feature (1)...(506): n = a,t,c or g
ccctcgaggccaagaattcggcacgagnnnnnnnnnnnnnnnnnnnnnnnnnnnnnnnnnnnnnnnnnnnnnnnnnnnnnnnnnnnnnnnnnnnnnnnnnnnnnnnnnnnnnnnnnnnnnnnnnnnnnnnnnnnnnnnnnnnnnnnnnnnnnnnnnnnnnnnnnnnnnnnnnnnnnnnnnnnnnnnnnnnnnnnnnnnnnnnnnnnnnnnnnnnnnnntctcccctcttgccccagcaccctgcatttccctctgtgctgcaggcggtgttcaccgggtgctgtgaggacctctgacagtgctgggtggcacagtggcttgagagtaaaatcctaacaggccaggagccctgggtctgagtcactttcctctctgcacctcagttttcccacctgcaacctgggaagacactgcttgacacggcacacganggagcttcaaacggctgtttcatcctacacgtcggttcactcctntgcaanaaaagccatgccggcactggcaac

SEQ ID NO: 30804 - DNA, 505 bp, Homo sapiens
  misc_feature (1)...(505): n = a,t,c or g
gccaagaattcggcacgagcggcacgagacaaaaccagacaatgggctagatttggtctgtgtgccttagttgccatcccatattacagaaggctctgtatacatgacttatttggaagtgatctgttttctctccaaacccatttatagtaatttcaccagtcttggatcaatcttggtttccactgataccatgaaacctacttggagcagacattgcacagttttctgtggtaaaaactaaaggtttatttgctaagctgtcatcttatgcttagtattttttttttacagtggggaattgctgagattacattttgttattcattagatactttgggttaacttgacactgncttctttttttcgcttttaattgctatcatcatgcttttgaaacaagaacacattagtcctcaagtattacataagcttgcttgntacgcctggnggttaaaggctatctttggcctcaggtcacaaanggggcaaagggttcctttgt

SEQ ID NO: 30805 - DNA, 508 bp, Homo sapiens
  misc_feature (1)...(508): n = a,t,c or g
gccaagaattcggcacgaggccacaggtacggtacactgtgtttcttttcccttaatgtgcatttgaatcacctgaggattttgctaaaatgcagattcttatgcaatcaatgggtctggacagggtctgagattctgcagttccaacaaactctcaggtgatactcatgatgctaatatgggaactgggatacgtgagataattttagatggtttcctcctaatttgtaatacaatgtgtctcaacagggggaatgaggacagggggagaaaagaaggtgtggatgaaatgtacagatttcatatgccccctgggtgattccagtattcttgtctcacctgcctctgtcatcttaagaaccaccgatttgatatttcaaccttttattctttttaatttttctttccttactcttttctccactttacccttgcattgctgctgtagactgaaaaactgnattcatgcttactcttcattancaagaccaaagcntcaatttggatt

SEQ ID NO: 30806 - DNA, 511 bp, Homo sapiens
  misc_feature (1)...(511): n = a,t,c or g
ccctcgaggccaagaattcggcacgagattttggttgcttttatccccctgctagggagcccccaaatactttactctcttttaactacttaagggatgaacaaaacaagcagtaaattattttattatttgccaggcaagaggacacacacatgttcattggtaatgctacttagagattgaagtttgtaccctggataggggaaatgaagtttgcagcctggatagaggaaatgagtccataaggccacaaatgattggttttaactagtcccatttgtcatggggcagtgaagagccttcacttagggcccttaagggcctagcataccaaggatgctcaaagatcacagttttatatcagctttggctggtgggctgttcagaattcacagccagttacagtgaaactcagcaccaagcttagctcctggggaagtgctgctacaaagtggatgtctttggcaggacacaggaggaaccgtggatctctnancnccttgtattttct

SEQ ID NO: 30807 - DNA, 456 bp, Homo sapiens
  misc_feature (1)...(456): n = a,t,c or g
nnnnnnnnnnnnnnnnnnnnnnnnnnnnnnnnnnnnnnnnnnnnnnnnnnnnnnnnnnnnnnnnnnnnnnnggcnnnnnnnnnnnnnnnnnnnnnnnnnnnnnnnnnnnnnnnnnnnnnnnnnnnnnnnnnnnnnnnnnnnnnnnnnnnnnnnnnnnnnnnnnnnnnnnnnnnnnnnnnnnnnnnnnnnnnnnnnnnnnnnnnnnnnnnnacgcaactatccaggtgtgatggtaatcctagcaactcgggnnnnnnnnnnnnnnnnnnnnnnnnnnnnnnnnnnnnnnnnnnnnnnnnnnnnnnnnnnnnnnnnnnnnnnnnnnnnnnnnnnnnnnnnnnnnnnnnnnnnnnnnnnnnncgaaaacaatgataaaagagatttaacatcactgaaagttgtaaggaagtaaaccctaaacctccacccctccattaaagcaatgattataagact

SEQ ID NO: 30808 - DNA, 458 bp, Homo sapiens
  misc_feature (1)...(458): n = a,t,c or g
atccnnnnnnnnnnnnnnnnnnnnnnnnnnnnnnnnnnnnnnnnnnnnnnnnnnnnnnnnnnnnnnnnnnnggcacgagaataaaataaggcaatgagtatgtatgttaagtatccagacagtaattgagagagatgttaattatttcagtttatgattcctggatgtttattatcctttacaaggctacaaccaaactgtttagctgtagaccataaggtttttcaggggataagaaggcacttgtgaggctgtcctctggtgatatcaggatccttgccatcttcagtctgtcttgatgaataatggttaaaaggcaattaatattctagggaacttgatgcttgaaaaaatgcaataaatggatggtaatcccttccagaaccaaatttatagtgtctagagttttgtctgtccttttgccaagtctccctatttctagaatgaagatgaaatgt

SEQ ID NO: 30809 - DNA, 457 bp, Homo sapiens
  misc_feature (1)...(457): n = a,t,c or g
natccnnnnnnnnnnnnnnnnnnnnnnnnnnnnnnnnnnnnnnnnnnnnnnnnnnnnnnnnnnnnnnnnnnnggcacgagatatgaaaaatgttgggttccaagggcagaggatgcgggcagaggatgccagctgtgtcggcagcacagatggaaacttccagatggatgggggaaagtcagccccttgtcccgctggggtattttcccaatgctaatgtaacaaatgagggtaagtctcaggcaatgcagagattttgcccccattctgaaaacggtctcatgtccgcggccccacctggctgcgagccccaggttctgagctcagccttccttcgtcggcacttgggggtgggttccttgaagcagccgcccttgcaggtgcaggggtggctttggctgggagagtttccagtagcttcatggatcaagcgggctctcagggcctttggagccca

SEQ ID NO: 30810 - DNA, 459 bp, Homo sapiens
  misc_feature (1)...(459): n = a,t,c or g
atccgctnnnnnnnnnnnnnnnnnnnnnnnnnnnnnnnnnnnnnnnnnnnnnnnnnnnnnnnnnnnnnnggcacgaggaacctgatcaatatagggtgattgaaataatgggagagggtgagttggcctagggagagtgttcacattacagtaagagtaagaaagagcctaagactgaatcttgaggaactccagcatttcaggaagccaggcagagagaaatgaacccatagggaagacaggtaaaagcgtactgtaaggaaaatcaggagaggcaggtgacattggaggcaaggctcatgatggaatggtagcagtagatggggaaaagtagacgaatgtgaggcagatttagatggcagaataaacaggtcttggtaattgattagatgagggggctgagggagggagaattattaaggataactcttaaggttttgattcagaggtggtgccatt

SEQ ID NO: 30811 - DNA, 467 bp, Homo sapiens
  misc_feature (1)...(467): n = a,t,c or g
aanacccgntatnacatgattacgaatttaatacnnnnnnnnnnnnnnnnnnnnnnnnnnnnnnnnnnnnnnnnnggcacgagtaaaccgtatacatgaagacattgctgagagagctaaaaccttgccgtgcttctgtgtgtgctctttgtttatgaacagaatcaaagccagctgctaccacacgctcttctggaggaggaggtggtggcggtggaaaacgaggtggcaagaaagatgattctcactggtggtccaggtttcagaaggtttgatgctatacattgtgtgaattttgaggttatgatggtggcccagagaaggttgggaggcattagtgtagtgttggagggatttgtgtctcacagagcatagatcgtattgtggaatttcattcttcacagaagctgtctccctctctgcccagggtgacattccatgggacgacaaggatttcaggatgttct

SEQ ID NO: 30812 - DNA, 459 bp, Homo sapiens
  misc_feature (1)...(459): n = a,t,c or g
annnnnnnnnnnnnnnnnnnnnnnnnnnnnnnnnnnnnnnnnnnnnnnnnnnnnnnnnnnnnnnnnnnnnnnnggcacgaggcttaaaatgacaggcatttatttctcagcgttctggagaccagaattctgaaatcattatcagtcagccaagatcacggtgtcagagggccacaccacctctggaagatctaggggagaatctgctccttgcctcttctagcttctggtggctgatggcattccttgttttatggctacatcattaatctctccctctatggtcacgttatggccttccttctccacttctgtctgcagttagatctttgtcttnnnnnnnnnnnnnnnnnnnnnnnnnnnnnnnnnnnnnnnnnnnnnnnnnnnaaccatcctcnnnnnnnnnnnnnnnnnnnnnnnnnnnnnnnnnnnnnnnnnnnncacagggaggccctgact

SEQ ID NO: 30813 - DNA, 462 bp, Homo sapiens
  misc_feature (1)...(462): n = a,t,c or g
cnnnnnnnnnnnnnnnnnnnnnnnnnnnnnnnnnnnnnnnnnnnnnnnnnnnnnnnnnnnnnnnnnnnnggcacgagcaagtaaatgttgaaggaatttgacattaccagatcagccctacaagatatggtaaaaggagttctaaatcttcaaacaaaaagttgatatgcaccagaatagaacctcttgaaagcatgcaacttacaggacnnnnnnnnnnnnnnnnnnnnnnnnnnnnnnnnnnnnnnnnnnnnnnnnnnnnnnnnnnnnnnnnnnnnnnnnnnnnnnnnnnnnnnnnnnnnnnnnnnnnnnnnnnnnnnnnnnnnnnnnnnnnnnnnnnnnnnnnnnnnnnnnnnnnnnnnnnnnnnnnnnnnnnnnnnnnnnnnnnnnnnnnnnnnnnnnnnnnnnnnnnnnnnnnnnnnnnnnnnnnnnnnnnnnnnnnnnnnnnnnnnnnnnnnnnnn

SEQ ID NO: 30814 - DNA, 464 bp, Homo sapiens
  misc_feature (1)...(464): n = a,t,c or g
atccnnnnnnnnnnnnnnnnnnnnnnnnnnnnnnnnnnnnnnnnnnnnnnnnnnnnnnnnnnnnnnnnnnnggcacgagcatcaagaggcggactctgctctggaagagctcggcacccacggtgaggcccccggggctgccctgtggggggaactgaaaagaaggcagagaccaaggtgagaattcctctaaactcagcacgtcacttcggcaaagagtgtcctgccacgacccgcggagggccgaggtttgcaggccgacctccccttgcagttaggatcctctgcttggaaggctgtgcagtgtttgcattctaagggctgcggagacagctggagatctgctcagcccaccagccgcctcatccttgctccccgctacagtgttgccacttgaagagcttccttcagtggttcctcagagtgtgggggaaagtctcattccacagggtcacactcagctc

SEQ ID NO: 30815 - DNA, 464 bp, Homo sapiens
  misc_feature (1)...(464): n = a,t,c or g
ntttgatancnnnnnnnnnnnnnnnnnnnnnnnnnnnnnnnnnnnnnnnnnnnnnnnnnnnnnnnnnnnnnnnnnnnggcacgagcggcattgcccaggtttgggagataaatgccagggcggagtctggttgggggctcccagagttcacatctgatagtctgtgtgggcacgcagatggagcctgtctcctgccttcctttccatggtttgccaggggtttggcatcttgactgcggaagctgtggagtctgtgtgctcagagccttttctggtgaagatatcatcagagcatgtgacctctgtttcctccccctgaaggccaccgctgggcctctggatcttagacatgagacggtcaagagattgaagtagtagccagggcccaggtgtccagagagggtggcctgggatggggagggcccttgctccccaacagcagtgctgggggagccaagagaagg

SEQ ID NO: 30816 - DNA, 463 bp, Homo sapiens
  misc_feature (1)...(463): n = a,t,c or g
ntttgaataccntnnnnnnnnnnnnnnnnnnnnnnnnnnnnnnnnnnnnnnnnnnnnnnnnnnnnnnnnnnnnnnnnnggcacgagatcatttcctaaaatctccagtcccaagtattacatcgtaatttccctccccgacnnnnnnnnnnnnnnnnnnnnnnnnnnnnnnnnnnnnnnnnnnnnnnnnnnnnnnnnnnnnnnnnnnnnnnnnnnnnnnnnnnnnnnnnnnnnnnnnnnnnnnnnnnnnnnnnnnnnnnnnnnnnnnnnnnnnnnnnnnnnnnnnnnnnnnnnnnnnnnnnnnnnnnnnnnnnnnnnnnnnnnnnnnnnnnnnnnnnnnnnnnnnnnnnnnnnnnnnnnnnnnnnnnnnnnnnnnnnnnnnnnnnnnnnnnnnnnnnnnnnnnnnnnnnnnnnnnnnnnnnnnnnnnnnnnnnnnnnnnntggccctcccaaattttaacatc

SEQ ID NO: 30817 - DNA, 463 bp, Homo sapiens
  misc_feature (1)...(463): n = a,t,c or g
nnnnnnnnnnnnnnnnnnnnnnnnnnnnnnnnnnnnnnnnnnnnnnnnnnnnnnnnnnnnnnnnnnnnnnnggcacgaggaagccatatgactttatccaagacaagaacaggcatcactatgcaggaatggtgtcccttatggatgaagcagtaggaaatgtcactgcagctttaaaaagcagtgggctctggaacaacacggtgttcatcttttctacagataacggagggcagactttggcagggggtaataactggccccttcgaggaagaaaatggagcctgtgggaaggaggcgtccgaggggtgggctttgtggcaagccccttgctgaagcagaagggcgtgaagaaccgggagctcatccacatctctgactggctgccaacactcgtgaagctggccaggggacacaccaatggcacaaagcctctggatggcttcgacgtgtggaaaaccat

SEQ ID NO: 30818 - DNA, 468 bp, Homo sapiens
  misc_feature (1)...(468): n = a,t,c or g
antttcgntacngntatgacatgattacgaatttaatacnnnnnnnnnnnnnnnnnnnnnnnnnnnnnnnnnnnnnnnnnggcacgagtttttttttgcatcaaacaaaatattttaaaatgataaggtgtactgctggatacgcttatttatatagatggatatgcttattcacacactgctgtgagaacagaaaatgacagacttccggaaagccacttggcaaaggccttaaaattgtatatnnnnnnnnnnnnnnnnnnnnnnnnnnnnnnnnnnnnnnnnnnnnnnnnnnnnnnnnnnnnnnnnnnnnnnnnnnnnnnnnnnnnnnnnnnnnnnnnnnnnnnnnnnnnnnnnnnnnnnnnnnnnnnnnnnnnnnnnnnnnnnnnnnnnnnnnnnnnnnnnnnnnnnnnnnnnnnnnnnnnnnnnnnnnnnnnnnnnnnnnnnnnnnnnnnnnnnnnnnnnntg

SEQ ID NO: 30819 - DNA, 464 bp, Homo sapiens
  misc_feature (1)...(464): n = a,t,c or g
anttccataccgntatgacnnnnnnnnnnnnnnnnnnnnnnnnnnnnnnnnnnnnnnnnnnnnnnnnnnnnnnnnnnggcacgaggattgtgtatgagttgctaggtatgattggtccagtgaatttttttctggggagaaggtcttagcttttattagcttttcaagaggtgagtgactcacaacagctcaagaatctcaggtgggaagtcagagttagaaccctgagtaccgggcacttcccatctggaggagtgtgttgagtgtgcaggaatggggaagactagctcctacatgctgtcctgagaggagcaggtcaagcagcaggagctatttttgctgagaacagaagtataagagtaaaaatccagctatgtgaagattttcatgtagaatacaaattctttttatttcttttttgttttttttgctttgttttattttgagacacagtctggctatgt

SEQ ID NO: 30820 - DNA, 467 bp, Homo sapiens
  misc_feature (1)...(467): n = a,t,c or g
ttgganatccgnnnnnnnnnnnnnnnnnnnnnnnnnnnnnnnnnnnnnnnnnnnnnnnnnnnnnnnnnnnnnnnnnnggcacgagttttttttacctattactatgcttatgtacatttatatatataatccaaattctacagttactaattatatagagaaacaaaatatatttgtctgattaatccctttgacccatggctaaaaaaattgagagttaaaatagacttttgagcccatccttcctaatctcccttctaattaggtcgatctctttaaaaatgtgtacataagagtgtgtgtgtgtgtgtgtggaaatgaattacatctcaactgtgactcatgatgnggcatctcgcacatcatggtgatatatccaggntgcaggttttctgaaagtgcatcagctgaaatcatgacataaaagcaatctctaacaaaagtcacagtaagtctgtctctatttc

SEQ ID NO: 30821 - DNA, 457 bp, Homo sapiens
  misc_feature (1)...(457): n = a,t,c or g
annnnnnnnnnnnnnnnnnnnnnnnnnnnnnnnnnnnnnnnnnnnnnnnnnnnnnnnnnnnnnnnnnnnnnnnggcacgaggaaaaagaatatataataaggatttttaacattatcaagataaaagaatgagcaaattgaaaacaacaaatatannnnnnnnnnnnnnnnnnnnnnnnnnnnnnnnnnnnnattctattagcaaatctaatagaatagagcatagaatagtgttgcaggaatagctaggactcaattctattagtaaatctggcnnnnnnnnnnnnnnnnnnnnnnnnnnnnnnnnnnnnnnnnnnnnnnnnnnnnnnnnnnnnnnnnnnnnnnnnnnnnnnnnnnnnnnnnnnnnnnnnnnnnnnnnnnnnnnnnnnnnnnnnnnnnnnnnnnnnnnnnnnnnnnnnnnnnnnnnnnnnnnnnnnnnnnnnnnnnnnnnnnnnnn

SEQ ID NO: 30822 - DNA, 448 bp, Homo sapiens
  misc_feature (1)...(448): n = a,t,c or g
ttganancgnnnnnnnnnnnnnnnnnnnnnnnnnnnnnnnnnnnnnnnnnnnnnnnnnnnnnnnnnnnnnnnnnnggcacgaggccaacttacaaagaaaaacagaaccactagagagccaaacagaagccaaactctagtgagaaaattgcttgnnnnnnnnnnnnnnnnnnnnnnnnnnnnnnnnnnnnnnnnnnnnnnnnnnnnnnnnnnnnnnnnnnnnnnnnnnnnnnnnnnnnnnnnnnnnnnnnnnnnnnnnnnnnnnnnnnnnnnnnnnnnnnnnnnnnnnnnnnnnnnnnnnnnnnnnnnnnnnnnnnnnnnnnnnnnnnnnnnnnnnnnnnnnnnnnnnnnnnnnnnnnnnnnnnnnnnnnnnnnnnnnnnnnnnnnnnnnnnnnnnnnnnnnnnnnnnnnnnnnnnnnnnnnnnnnnnnnnnnnnnnnnnnnnnnnn

SEQ ID NO: 30823 - DNA, 461 bp, Homo sapiens
  misc_feature (1)...(461): n = a,t,c or g
anannnnnnnnnnnnnnnnnnnnnnnnnnnnnnnnnnnnnnnnnnnnnnnnnnnnnnnnnnnnnnnnnnnnnnnggcacgagcttctgcccagcagctggggctgtcgtgctaatgctttctggcatttgagtcctttagaatgaggtccaagtatgtgggcacctggcacccggccgctcctcccttggggcacaatggggtcttctcccttccgtgagctgaggggctgggagggtgcccactggggctgtagcctgggctggggcatggggcacaagggcctgtgtgcccagctcatttgggccgtggcctggctctgagggtgtgggccggctgcttggagcgtgatcctttcatctgccctttttgcgagtgggagataagatggccaggctgcggttactcctgaacctgtgctctctgctttgcaagtcctgtcctcaccagacttctcacagg

SEQ ID NO: 30824 - DNA, 453 bp, Homo sapiens
  misc_feature (1)...(453): n = a,t,c or g
nnnnnnnnnnnnnnnnnnnnnnnnnnnnnnnnnnnnnnnnnnnnnnnnnnnnnnnnnnnnnnnnnnnnnnggcacgagccacaaataacgtcagtggcagattatgtctgaaagtgtttgctggcgagtggaaatctttcctgaccccatattgctgtcatgaaagaagagcctaatcccataaaatattcttgacagcctcgtgtcagttaccacacagctgtgatttcttatctgggctacagcctgtgtgacatttgttgtcacttcatggcttcaggtttctccattcagaagctcaggtcatagtaggaggttgagcttcatccccggttgaaacctggttcgcgtatgactgaatcctcttacgtcctcactgttgtgtgaaaaaactcatagggagaccttgatttcctcatctgtttaatggggaccatatgtctctggcaaaat

SEQ ID NO: 30825 - DNA, 455 bp, Homo sapiens
  misc_feature (1)...(455): n = a,t,c or g
anancgnnnnnnnnnnnnnnnnnnnnnnnnnnnnnnnnnnnnnnnnnnnnnnnnnnnnnnnnnnnnnnnnnnggcacgagcagaactgtatgagaataaatttgagctgtattaatttaaacaatttttaagtgggctgtttctttcttcctgataatatttcaaagtttctgaaagtctatgattttagagaacaaggtttctcagcaaataagaaaatagtaatctctcaaagaaggagactgtcatgacgttttagagctgtgctgtgcccgggagagatggtctttcctgttgactttatagctgtctttagtcccacccggtgttatctgagcaatttttattctctctcttagctcagttttactttgtcagccacctttttgtgaataaaaatagcaagtaaacaaggtggatgtgactttgaaccagagatctctggatctgcagct

SEQ ID NO: 30826 - DNA, 455 bp, Homo sapiens
  misc_feature (1)...(455): n = a,t,c or g
anancgntatgacatgattacgaatttaatacnnnnnnnnnnnnnnnnnnnnnnnnnnnnnnnnnnnnnnnnnggcacgaggtattgttgagctgtgattaagattactggatagcttaagtattttctctttttgtccacatacccagtaacttgggtcaaaattattaatccattagagtgtatgcagtaactttttttcttttgtagtgttgtgacctttaatgatggagcatttcatagatgtgctaaatgaaggttaataacggtgaaaatttattatattgattagctacttatatattaacacttaaggtttaattttatttaaattttatttttcttaggctgtctgtaaaatcttctcatttaaaatttagcttctgtggataactgtttactcattgccccatatgaatatttaataggcacttcaacaagtccaaaacaacttc

SEQ ID NO: 30827 - DNA, 461 bp, Homo sapiens
  misc_feature (1)...(461): n = a,t,c or g
anatccgnnnnnnnnnnnnnnnnnnnnnnnnnnnnnnnnnnnnnnnnnnnnnnnnnnnnnnnnnnnnnnnnnnggcacgagcaatcttaatcttaggaatgcagaatgccatggttacacttgagaccacatttaaagtaatacttctttgatcaggcaatgatatactgtcttaatcctagggatacaagttgatgacttcttacctaaaataaatgggagcacagaaaaaggtagtgtaaaaaacttaaatatatatatactttttatgatatcattttagtatttaagcaggataaggagttcagggttttaagtgtttggaatgaaaagcatgctctcacagatcattgaaccccatcatttaaaaatcaagctttcctttattttgtaagagttgatgctgtgatcaattcttagatatcccttgttatatggaaatttcaattactcaaatcaga

SEQ ID NO: 30828 - DNA, 459 bp, Homo sapiens
  misc_feature (1)...(459): n = a,t,c or g
ttnnnnnnnnnnnnnnnnnnnnnnnnnnnnnnnnnnnnnnnnnnnnnnnnnnnnnnnnnnnnnnnnnnnnnnnnnnggcacgagcggcacgaggagagctacaccatgcctgagtgcagtgacatttctaagctggaatatcttttgtggctcagtgaattaattacattcctatccatagtttttcctgaaccaaagtgtattatctcgtacatgttatgactcttggcagctctaaagaagcctgtgtaatctaaacaggaaatctctgagcccttccaagagacagtattacctccccacatctccatgagggagtgtatttcttctctacttgaacagtaaatcatacagcatattacatgagctagagaatttaaacaaataaaacaggaactgtgaaatggtgctggtggtttcaaacactttttaatgctttacagtaaaatagtagataac

SEQ ID NO: 30829 - DNA, 455 bp, Homo sapiens
  misc_feature (1)...(455): n = a,t,c or g
anannnnnnnnnnnnnnnnnnnnnnnnnnnnnnnnnnnnnnnnnnnnnnnnnnnnnnnnnnnnnnnnnnnnnggcacgagcattaagtacttccttctgtgatcatttcggatagtttggaggcttatctgatcactgcatcagtgatttttactttcatatcctaaaataccagaggggtgtgccgtgcattttcatccataagagtggctcgctgctatccgcgatcctcagagaggagacggggtacttgctggcattctgacaaagccttcccaggtgcatctgacatcaggtccctttccccacacgaatcactggtctaataatgatcctcctaggggaactctggatctgaacttttaagtgcattccttctagttatgagaagctatagttctttggctaccacatgtcctttaaccagattcaccagttgtttttatctaccccta

SEQ ID NO: 30830 - DNA, 509 bp, Homo sapiens
  misc_feature (1)...(509): n = a,t,c or g
gccctcgaggccaagaattcggcacgagcnnnnnnnnnnnnnnnnnnnnnnnnnnnnnnnnnnnnnnnnnnnnnnnnnnnnnnnnnnnnnnnnnnnnnnnnnnnnnnnnnnnnnnnnnnnnnnnnnnnnnnnnnnnnnnnnnnnnnnnnnnnnnnnnnnnnnnnnnnnnnnnnnnnnnnnnnnnggtcagtctaacaggaatatataacaattataaacatatatatatagctaataacagagtacccaaatacatgaagcaaagtcatgtgctcctaagtgggctttccaaacagagaaccaagagttttgtttagtttcacatttgtactgagtaaggattattggtcacctgaatattattgaattaaaaacatcgattggcaaatttaataccactagcaaatatccatgtgtaaaatcaaaaggttttcgtttaggagaaatcaactttcattttttcctttatattcaaagaaantcntaataanttctaaaaggnatatctc

SEQ ID NO: 30831 - DNA, 509 bp, Homo sapiens
  misc_feature (1)...(509): n = a,t,c or g
gccctcgaggccaagaattcggcacgagaacaacaattacaataatagtagcagtagtagtaatagtagcattagctaacatttattgactacttgccagacactatatttttttccatttaatcctgaccataaccctatgggatggagaccgtgattatccccaggaaaccaaagcccagcaatttgtgcgctgtcaaacaacagtgtatatgtacatatatacactggagatgtccactttcctttcctaataaaaccttcaggaaaactccatgagccctacctttcctctccacctgaatacttgggtccatttgtaagttacctctcagagcctcgtgagttggggatctgtggagagcatcatctgatatttatggcattgtgtggatacatttgtatgtgtcttgttccccagattaaaaaataaatccccagtggcaggcacctttaagttctttctagctctccagtggngactcaaacatgnctcctgaatggctggg

SEQ ID NO: 30832 - DNA, 508 bp, Homo sapiens
  misc_feature (1)...(508): n = a,t,c or g
ccctcgaggccaagaattcggcacgaggtcttcaagaaactccacagaaatgcagaggtttcttggcagccaaatcttggtaagctttagttgttactaaagagtcagactggaggaagaggatgcagtttacctgattctggaggtagaaaattccaggagggtgtggggctcaagggttgtccccctaaaggtttgcagaaaaatcactaccatgaggcagattaacaggagaaaaagcgtacacatttatgtcacatgtatacacgggaaacttcagaatgaagccccaagcccagatgaggtacagaagcttcctgaggttgcaaaaagaatgtggactcagagcatggccccaaacaggttatggtggtaaattaggatttagtggaaagacagattgtgagaaggaaaaggaagacgcctgggtggcaaaggtgaccttagtatgtanaccaagcctctcagnagtaccctcaanagagtaaatnngnttnttttagcttta

SEQ ID NO: 30833 - DNA, 504 bp, Homo sapiens
  misc_feature (1)...(504): n = a,t,c or g
ggccaagaattcggcacgaggattaaatggatccagcacttagcaagtggtctgtatggagccaggcaagtgtgtggatgtgctcaggtatttatttggtcatcttgtacctttttcaaatataaatcatattacttctacagtagaacgtcagatcaggaatttcagtatgattagacagaacacaaaccagtaactgttagctttaacccttggttagaaaatattcagctccaggtgctcacggggccacttccaagcgcaggctcctggcctctgttcctggccgtatgtcctccgcaggcaaggatctcggtgcaggtgggtggaggccggctaccgagagcaggcttctgtcccaggcagagcagaggggccaggggagccatgggcccgatctggatgggctgtctgcgccatctcagcagcagagcctgtgctgcatccctgngaccttaaaaactggcctgngggcaagnaaatcccttgccctggtgatgccaa

SEQ ID NO: 30834 - DNA, 505 bp, Homo sapiens
  misc_feature (1)...(505): n = a,t,c or g
gccaagaattcggcacgagcgttgtcagtgttcctttctaattgacgtttacattgtttacattaaagaacagtgctgaattttgaaaccgattcagtaaattttctctggaaagtacatgggcattaccttgtttttctaaatcttttgacatctgagcttgtatctaattatgagcagtcagaagtttttctaagctaaactgcatgattagttgttatttttgtgcctcatcttaaaccctagattgatagttttttgtttataagtatgaacagtaaaatagtaagaagctaaagttttctgtggtgtgaacaccacttctaaactacattttgatgtcaaatttttagaggcagtagattaaataaaagtagatggatacagtattatagatctgatcatcacattaggctataaacctgagagaacagctgctgcctagtttcaagcnaataaaggnaccatgggcattattggagcttaaaaagatttancnatcccc

SEQ ID NO: 30835 - DNA, 454 bp, Homo sapiens
  misc_feature (1)...(454): n = a,t,c or g
nnnnnnnnnnnnnnnnnnnnnnnnnnnnnnnnnnnnnnnnnnnnnnnnnnnnnnnnnnnnnnnnnnnnnnnnggcacgagaacatacagtcctctatgtcccactgaaaactcagggccagagccatgctttgcctcggcttgctcaactcaaactaaactgctctttgttattaatatgctgcatacaatgtgttgtttcctttagggggaaaaggcactttaattacatcatattaagacaacatttcnnnnnnnnnnnnnnnnnnnnnnnnnnnnnnnnnnnnnnnnnnnnnnnnnnnnnnnnnnnnnnnnnnnnnnnnnnnnnnnnnnnnnnnnnnnnnnnnnnnnnnnnnnnnnnnnnnnnnnnnnnnnnnnnnnnnnnnnnnnnnnnnnnnnnnnnnnnnnnnnnnnnnnnnnnnnnnnnnnnnnnnnnnnnnnnnnnnnnnnnnnnn

SEQ ID NO: 30836 - DNA, 449 bp, Homo sapiens
  misc_feature (1)...(449): n = a,t,c or g
anannnnnnnnnnnnnnnnnnnnnnnnnnnnnnnnnnnnnnnnnnnnnnnnnnnnnnnnnnnnnnnnnnnnnnggcacgaggacatagcctgtgtttttggctactactagtaattaaacctggatctgtttcacccgaagcaagagcactagtgggcctggaagagtgaatgcagagccgtgtggctctgggctcactgtgcgaaaacccagagccctccttccagcaagggagctttgctgcaccagcactcatgacacccagggctttagccagttagagtcacattgtgcaactgacatgcccattctcccaggccagagtgactgctggatgtatcacttctctactgctatgagagaaaccacctcaacgcctagagacttaaaatgacgacaatcgattatcgctcttgattctgaatgttggtttctccactggttcacct

SEQ ID NO: 30837 - DNA, 447 bp, Homo sapiens
  misc_feature (1)...(447): n = a,t,c or g
nnnnnnnnnnnnnnnnnnnnnnnnnnnnnnnnnnnnnnnnnnnnnnnnnnnnnnnnnnnnnnnnnnnnnnnnggcacgagggacaaggcccttcagttcctgaaggagcagagagtccatcttgagaacatggggtcccatgacatcgtggatggaaaccaccggctgacccttggcctcatctggaccatcatcctgcgcttccaggtaagggtctctgcccagggttgctcagaacttaggccgacctctcaggtatgagcattgttatagagctggcctccctgtatcagagggatcgggaagaccaggttgaaagcatgtctcagagtcatgtgtgtcatatccagccctcagaattgaatgctgcctcgtaggcacgtggaagctactacatcctcctgcaattgtactagccctggtaatcttagctttcctgtcagacac

SEQ ID NO: 30838 - DNA, 146 bp, Homo sapiens
  misc_feature (1)...(146): n = a,t,c or g
anancnnnnnnnnnnnnnnnnnnnnnnnnnnnnnnnnnnnnnnnnnnnnnnnnnnnnnnnnnnnnnnnnnnnnggcacgagcatgtttcgtttgtactatgactcctatttatgttttgtttttgttgctgatttttttttttttt

SEQ ID NO: 30839 - DNA, 426 bp, Homo sapiens
  misc_feature (1)...(426): n = a,t,c or g
ttgttnnnnnnnnnnnnnnnnnnnnnnnnnnnnnnnnnnnnnnnnnnnnnnnnnnnnnnnnnnnnnnnnnnnnnnnggcacgagctaaagttgtgttttagtccattcttgcacttaggnnnnnnnnnnnnnnnnnnnnnnnnnnnnnnnnnnnnnnnnnnnnnnnnnnnnnnnnnnnnnnnnnnnnnnnnnnnnnnnnnnagtggcttctgcttctggagaggccttagaaaacttacaataatggtggaaggcaaagagggagtaggcatgtcttacagggctggagcaggagggagagaagtgnnnnnnnnnnnnnnnnnnnnnnnnnnnnnnnnnnnnnnnnnnnnnnnnnnnnnnnnnnnnnnnnnnnnnnnnnnnnnnnnnnnnnnnnnnnnnaaaccactcccatgatccaatcacctc

SEQ ID NO: 30840 - DNA, 425 bp, Homo sapiens
  misc_feature (1)...(425): n = a,t,c or g
ttttgccnannnnnnnnnnnnnnnnnnnnnnnnnnnnnnnnnnnnnnnnnnnnnnnnnnnnnnnnnnnnnnnnnnnnnnggcacgaggtccttcagtttcacatcagacatgaatctaggtgctagaggtacagcagtaaatcagaaaaggcactaagatgaaaataaaagagtaaagcattgaactactacagactacatcatcagggaaggccttgtgggcagttatatttaggctgagtcaaacctaaatgacaaggagctagccatttaagatatgatggataagtcttcttganatttggnncnnnnanctnacngnaganctacagctagcnnagccttnacncagaggtaagnggantgtnacncttgcanngcgtgaancttnncnaanangctactgcnttnttnacntnatctta

SEQ ID NO: 30841 - DNA, 451 bp, Homo sapiens
  misc_feature (1)...(451): n = a,t,c or g
gnnnnnnnnntnntnnnnnnnntttgttnaccgtncnnnnnnnnnnnnnnnnnnnnnnnnnnnnnnnnnnnnnnnnnnnnnnnnnnnnnnnnnnnnnnnggcacgaggagagctagccgcaggttatgagactaaagaaagaaacaggagggtcatgatgacagtcttcctatggtaagtgatagggagctattgaaatgtccaaagcagaaatgtgatcacttgtagatcactttagcagcaatggggaagatgaaatcgaaggagagaagagcaaggacatcagttaacagttgtgatggtagttcaggagaaaaacagtggatcagagaactattcagaggtaaaggtagcaagatttagtgattaaatatgataggagagggagaatgggaaatctagaagaatctccagcttggaggtatgagtgactgggaaatatttataactt

SEQ ID NO: 30842 - DNA, 434 bp, Homo sapiens
  misc_feature (1)...(434): n = a,t,c or g
tgaattagcngttcnnnnnnnnnnnnnnnnnnnnnnnnnnnnnnnnnnnnnnnnnnnnnnnnnnnnnnnnnnnnnnggcacgaggtgaacttgaatgttttagaaatccagttgtagactggctattgctattttgttcataccagaacttttataagttagcatataaaaccatggagcaagctagaacactatatatggcgtctgaagaatgttatgtttttgcccaaagaactcttttctaatagaatatttccaaataagtaaaacattgaaaacaactcctcagtgaagacagaaatggtaaaaaggacacttttgttacaagtttaaagatatgaaatagtaactgtaaaatatatataaatataagccaatacttgttttatttaaaaataaatgttgaaaatatttaaggtagatggtattactga

SEQ ID NO: 30843 - DNA, 440 bp, Homo sapiens
  misc_feature (1)...(440): n = a,t,c or g
tnnnnntnnnttgtctgaanaccgtnnnnnnnnnnnnnnnnnnnnnnnnnnnnnnnnnnnnnnnnnnnnnnnnnnnnnnnnnnnnnnnnnggcacgagcctcttcttgctgtatcctcacatagcaagagcagagagaaaaagcgagcgctcatgtgtctttttataaggacactaatcctgttcatgagggcactacccttatgannnnnnnnnnnnnnnnnnnnnnnnnnnnnnnnngtatcatattgcaggttaggatgtcaacacatgactctggggtgatacaaataggccattgcagcatatacaattaaaatgtaaatatgaagaaaaaaggaagtttttgtttttttgtgggggagatgggggttaaggaanaagatagaatttcangactangcatggnanctnatgcctatatnnctgcctttgggaggc

SEQ ID NO: 30844 - DNA, 442 bp, Homo sapiens
  misc_feature (1)...(442): n = a,t,c or g
tgnnntnnnnttgtttgacnaccgnnnnnnnnnnnnnnnnnnnnnnnnnnnnnnnnnnnnnnnnnnnnnnnnnnnnnnnnnnnnnnnnnnggcacgagcacatatttacttagaaatgacttcaaaacagagccaaagagattgtcagcattttcccattctgcatttaatcctcatggttaacattataatagtcaacacttccatcacacaataattctcagaggtagagacatgggggtttggagtaggagagagaggaggggaagtaaagcacccctcgtaggaagccatattagaatttcagattgtggactggacagtttgaaagaaagaaaaacaaatttgaattctacacattctgatactttatgaaaggattatgcttatttccttcctatctgccactgtaaagttcactgttttagcagttctctagttc

SEQ ID NO: 30845 - DNA, 426 bp, Homo sapiens
  misc_feature (1)...(426): n = a,t,c or g
ttgattacngnttgacnnnnnnnnnnnnnnnnnnnnnnnnnnnnnnnnnnnnnnnnnnnnnnnnnnnnnnnnnnggcacgaggatcaatacaatcttggagtcaaaaggcaaatcatttggacaatctgcaaaatggagagaatacaataactactacagtaaagtctgtttctgcttccttacacatagatataattatgttatttagtcattatgaggggcacattcttatctccaaaactagcattcttaaactgagaattatagatggggttcaagaatccctaagtcccctgaaattatataaggcattctgtataaatgcaaatgtgcatttttctgacgagtgccatagatataaagccatttggtcttaattctgaccaataaaaaaataagtcaggaggatgcaattgttgaaagct

SEQ ID NO: 30846 - DNA, 428 bp, Homo sapiens
  misc_feature (1)...(428): n = a,t,c or g
tgattaccgtnnnnnnnnnnnnnnnnnnnnnnnnnnnnnnnnnnnnnnnnnnnnnnnnnnnnnnnnnnnnnnnnnggcacgaggctcttttcgctgatttttaaatttactttgctactttaatgattaattggcaatgatcaatgcacaaccttttactctcatgtgttattttcaattttccccttgtgtttattgtagcaagaactccctaccttccttccttattatctatttgtaatttggaagccccagtataccttagaattgatccaggatggcctcatttatgtatggcttgagagttttttaacagaaaaaacattgattctctaaaaaataagagtttttatcatagtttctcaatattttcctatctacaaggacaaaattttttttcagaagcaaaacaactaagtgtactaact

SEQ ID NO: 30847 - DNA, 419 bp, Homo sapiens
  misc_feature (1)...(419): n = a,t,c or g
agctnnnnnnnnnnnnnnnnnnnnnnnnnnnnnnnnnnnnnnnnnnnnnnnnnnnnnnnnnnnnnnnggcacgagattcnnnnnnnnnnnnnnnnnnnnnnnnnnnnnnnnnnnnnnnnnnnnnnnnnnnnnnnnnnnnnnnnnnnnnnnnnnnnnnnnnnnnnnnnnnnnnnnnnnnnnnnnnncctatactgatctattgagagtgcacacgtgggcccctccactgagtgccaaaacaatgcagagtgccctcccacacaaacccatgcaagcacacccaacacacatgtaaggcaagtgtgcacatagtcactaacacccacacatgtgcatggctgcaccctgtttcaatcttgctctgagaatccctcccaccccagctcacttccctcacctgttcactgtcctcagaggcc

SEQ ID NO: 30848 - DNA, 425 bp, Homo sapiens
  misc_feature (1)...(425): n = a,t,c or g
tgnttnnnnnnnnnnnnnnnnnnnnnnnnnnnnnnnnnnnnnnnnnnnnnnnnnnnnnnnnnnnnnnnnnnnnnnggcacgagcgtaataaaaaatgaagatcattacataatgataaaatttctaatttagcaagaagatcaaacaattttaaacttgcatagttttaataaaacaaacataaacatatacaagccacatatgacaaatctacaaaaagcagttgacaaaattaccatcactgtgtgaacatgcggtacatctctctcaattattgctgtgtgcagactgaaattagtgaaattagagaagatttaagcaacataatcaacaagcttgatttaatggcaatatatataaaaccttgcatctgaatattagagactatacattcttaaagcatacctggaatatttataaaaatg

SEQ ID NO: 30849 - DNA, 438 bp, Homo sapiens
  misc_feature (1)...(438): n = a,t,c or g
nnnnnnnnnntttgtttgncnacccgtnnnnnnnnnnnnnnnnnnnnnnnnnnnnnnnnnnnnnnnnnnnnnnnnnnnnnnnnnnnnnnnnnggcacgagaacatcttcaaaagtttgtttctttccccattctcttgtcccaaatcttctaggtaccaggacattattcactctattcatctagcacggaagccaaatttgggtctaaaatcttgtgatggcaaccaggagcttttaaacttccttcgtagtgatctcattgaagttgcaacaaggttacaaaaaggaggacttggatatgtggaagaaacatcagaatttgaagcccgggtaggaatataagaaaatcccccttagattactcatggcaactcaatctgaagttcttccctggtgctgttcttgacttcccaacatgaccctcctggaaatcagag

SEQ ID NO: 30850 - DNA, 435 bp, Homo sapiens
  misc_feature (1)...(435): n = a,t,c or g
nnnnnnnnnnttngtttgacnaccngnnnnnnnnnnnnnnnnnnnnnnnnnnnnnnnnnnnnnnnnnnnnnnnnnnnnnnnnnnnnnnnnnnggcacgagtggacaaattcgagcaccagtttgagactctggacgtccagacgcagcaaatggaagacacgatgagcagcacgacgacgctcaccactccccagaaccaagtggatatgctgctccaggaaatggcagatgaggcgggcctcgacctcaacatggagctgccgcagggccagaccggctccgtgggcacgagcgtggcttcggcggagcaggatgaactgtctcagagactggcccgccttcgggatcaagtgtgacggcagaacccgctctgaggtttcctggccatagccaccctttgaaatgctctctgtgtgttagagagatactatacc

SEQ ID NO: 30851 - DNA, 413 bp, Homo sapiens
  misc_feature (1)...(413): n = a,t,c or g
gctnnnnnnnnnnnnnnnnnnnnnnnnnnnnnnnnnnnnnnnnnnnnnnnnnnnnnnnnnnnnnnnggcacgagtataagtgtgaaaaattatattctgaactgttccctgagatgaagaccaaaaaaaggaaacatctaggatggttaaatagctcaaactagtcaagagttcactaggatcaggctctgaggaactcaatgtcctcatgacctgatttacctcaggccatcccaaaaattatgaaagtcatccagcaaccaagagaccaatgagaaaaaaacttcataaactctccaagagggaaactgaacatacaattttacttcggaaacaacccaactagggtcatcatcattaatgtgaaatttttactaacactgtcactccctttcatttattaaatctattaa

SEQ ID NO: 30852 - DNA, 428 bp, Homo sapiens
  misc_feature (1)...(428): n = a,t,c or g
tnnntttgtttgacnaccngnnnnnnnnnnnnnnnnnnnnnnnnnnnnnnnnnnnnnnnnnnnnnnnnnnnnnnnnnnnnnnnnnnggcacgagtcggcgtggaagttattacctttttatatcatgggattgttatcactttataaagagcaaaccaaagttctcaaatatcaaccttagtgccgttttcctgattttcttggagaaacacaatgttatgtaaaggtaagttggtcaccttcgcatgaccatggcaatgtcacagcaggtggcacagctggatgctgtcagccccaagcctgtctgtgtcctggtcctgtggccgtcaggggccccgctgggccatccactccaggggcaccatgcacacgtgctcgccacggggccacatggcagcctatgtccactgaaccctcctgccacacat

SEQ ID NO: 30853 - DNA, 346 bp, Homo sapiens
  misc_feature (1)...(346): n = a,t,c or g
tgnnntnnntttgtttgacnaccgnnnnnnnnnnnnnnnnnnnnnnnnnnnnnnnnnnnnnnnnnnnnnnnnnnnnnnnnnnnnnnnnnnggcacgagatcggaatggggaaaaagtgcactgcatgctgtatgcaaaatttaattcagnnnnnnnnnnnnnnnnnnnnnnnnnnnnnttccagcccgcgacagtgcaagactccgtctcaaaaaacaaaaagaaagaaagaagggatactctttttttaaaaaatagatgaaggaacacttcccatctcatctcttgagtccatcataactctcatacctaagccagataaggattctgtgtttgggggangggg

SEQ ID NO: 30854 - DNA, 417 bp, Homo sapiens
  misc_feature (1)...(417): n = a,t,c or g
cccaccnnnnnnnnnnnnnnnnnnnnnnnnnnnnnnnnnnnnnnnnnnnnnnnnnnnnnnnnnnnnnnnnnnnnggcacgaggaagaaataagaaagagatattagaatcaatgtctcttttggttttcagtttaattttatacttattcttctttggcattgtgtgtgcttaaaataaagctaaagttaaaggagtcttaccaaagatccttgaagtcctgagaagtgtctttggggcccctggaaacctctggtactaggttaaaaagttagctggnnnnnnnnnnnnnnnnnnnnnnnnnnnnnnnnnnnnnnnnnnnnnnnnnnnnnnnnnnnnnnnnnnnnnnnnnnnnnnnnnnnnnnnnnnnnnnnnnnnnnnnnnnnnnnnnnnnnnnnnnnnnnnnnnnnnnnnnnnn

SEQ ID NO: 30855 - DNA, 416 bp, Homo sapiens
  misc_feature (1)...(416): n = a,t,c or g
nnnnnnnnnnnnnnnnnnnnnnnnnnnnnnnnnnnnnnnnnnnnnnnnnnnnnnnnnnnnnnnnnnnnnggcacgagnnnnnnnnnnnnnnnnnnnnnnnnnnnnnnnnnnnnnnnnnnnnnnnnnnnnnnnnnnnnnnnnnnnnnnnnnnnnnnnnnnnnnnnnnnnnnnnnnnnnnnnnnnnnnnnnnnnnnnnnnnnnnnnnnnnnnnnnnnnnnnnnnnnnnnnnnnnnnnnnnnnnnnnnnnnnnnnnnnnnnnnnnnnnnnnnnnnnnnnnnnnnnnnnnnnnnnnnnnnnnnnnnnnnnnnnnnnnnnnnncccaacaatgtcttttgtgtgagctttaggtgaataaatgtagtatttgtccatcattaaaagttcaagtacataattgtgtttttacttccccacag

SEQ ID NO: 30856 - DNA, 415 bp, Homo sapiens
  misc_feature (1)...(415): n = a,t,c or g
nnnnnnnnnnnnnnnnnnnnnnnnnnnnnnnnnnnnnnnnnnnnnnnnnnnnnnnnnnnnnnnnnnnnnnnggcacgagcaacatcataagctactattacccatctcagagaagaggagaaaagaatgttctttcttcctcacaaaaccttggcattatgagaattagtcaaccatatagtaattgttttgagagctggtaataattttgacagataacagagttatttgaaggctttttcagtgcctgttaaccctgcttgattactaatgaccttaaaatgatcctctaaatgtagatgaggcttagcagatcacttttcattataatgacttttattaaaaataataattaacatgagaatggtgttccacagtgctctttacatatgtaattaatagtgctgtagttgct

SEQ ID NO: 30857 - DNA, 473 bp, Homo sapiens
  misc_feature (1)...(473): n = a,t,c or g
gnnnnnnnnntttgnanaccgctatgncnnnnnnnnnnnnnnnnnnnnnnnnnnnnnnnnnnnnnnnnnnnnnnnnnnnnnnnnnnggcacgagctgggattggattactgaaggctggattgctatgaggtaagactcaatggtggtagatgaagtcttgatagttcctgacgtaggacagcagtttgttaggattttcacttttagttgaaagtggatgtgcattaacttgtacaacatttctacactggagggagcagagcaaatagtaactgtaaaaactgtgaagttaagtggctattgctaagtgtcactgaaaggctaaagagaaaatgacagggccagggtgtttcatcaccagttcaaagccaagtgttgcctctttggaaacatttatttcctttagatagagaactgatgatactaaagaccagcttcaattctgctcttctcacctggagattttcgaggg

SEQ ID NO: 30858 - DNA, 457 bp, Homo sapiens
  misc_feature (1)...(457): n = a,t,c or g
aaaccctatgacnnnnnnnnnnnnnnnnnnnnnnnnnnnnnnnnnnnnnnnnnnnnnnnnnnnnnnnnnnggcacgagaaagcatcacactaaacacctttggctgcttacaagtgctttctgtttttccaaagagcaaagcctgaggcaaactgaaaagaagatattctatttgccctgctttttgtctccagtgaactgtgaaaacagagccattattttagcagctggacaattccacccagtactctgttggaaaacacattgagagccactattttagaaaaaaaaaaaattctcctcaaagggtcctggattcttctttttccttctcctttattacttccatcttccatttcaggcacacaataccctaaggctctttctaacacttcctttgtaaaaaaaaattattattattcaataaatgtcttcacaatgagatgtacattaatat

SEQ ID NO: 30859 - DNA, 452 bp, Homo sapiens
  misc_feature (1)...(452): n = a,t,c or g
cccttgncnnnnnnnnnnnnnnnnnnnnnnnnnnnnnnnnnnnnnnnnnnnnnnnnnnnnnnnnnnggcacgagaactggcttaaacaagtaagggatttatagacgtatataactaaaaagtacagagacagagcaagcttcaggcagggtttgatctagggactcaaatgatatcatccaggctcttctctaggtctccaagatgcctttcatggtacagactccctctgctgtgtctgcgtggcaccaagccctctcctctcagtccttaaacggctgtgggaccttcgaagctcacgtcaaagttcactgtctattcccagctgaatggaatagacagtgtctactctggcagctatcacaggaaagggagaaacagtttctttcccagaagctgcagcaagcatctccttgcctatcactggcccagtggggtcatgggcctattct

SEQ ID NO: 30860 - DNA, 458 bp, Homo sapiens
  misc_feature (1)...(458): n = a,t,c or g
anccnnnntttgggnnnnnnnnnnnnnnnnnnnnnnnnnnnnnnnnnnnnnnnnnnnnnnnnnnnnnnnnnnnnnnnnnnnnnnnggcacgagcttaactgtaattatacaatgattaaatctttcaatggtatgctacaatagattatgttttattatttttaattgacnnnnnnnnnnnnnnnnnnnnnnnnnnnnnnnnnnnnnnnnnnnnnnnnnnnnnnnnnnnnnnnnnnnnnnnnnnnnnnnnnnnnnnnnnnnnnnnnnnnnnnnnnnnnnnnnnnnnnnnnnnnnnnnnnnnnnnnnnnnnnnnnnnnnnnnnnnnnnnnnnnnnnnnnnnnnnnnnnnnnnnnnnnnnnnnnngttaattatagtcatgctatagtgctgtagaacattagaactcattctttctatctagctttgttcttgtatccgttagccaacctgtggcagcc

SEQ ID NO: 30861 - DNA, 433 bp, Homo sapiens
  misc_feature (1)...(433): n = a,t,c or g
ttggananncnnnnnnnnnnnnnnnnnnnnnnnnnnnnnnnnnnnnnnnnnnnnnnnnnnnnnnnnnnnnnnnnnnnggcacgagtttgtttgtaatatacagaaaaaaagcttgggtacagcaggtttaggaatggataagagaagaggaattagagagtgattatgtacaattcttttaatgagttttnnnnnnnnnnnnnnnnnnnnnnnnnnnnnnnnnnnnnnnnnnnnnnnnnnnnnnnnnnnnnnnnnnnnnnnnnnnnnnnncaaagaaattagannnnnnnnnnnnnnnnnnnnnnnnnnnnnnnnnnnnnnnnnnnnnnnnnnnnnnnnnnnnnnnnnnnnnnnnnnnnnnnnnnnnnnnnnnnnnnnnnnnnnnnnnnnnnnnnnnnnnnnnnnnnnnnnnnnnnnnnnnnnnnnnnnnnnn

SEQ ID NO: 30862 - DNA, 453 bp, Homo sapiens
  misc_feature (1)...(453): n = a,t,c or g
ntttggannancnnnnnnnnnnnnnnnnnnnnnnnnnnnnnnnnnnnnnnnnnnnnnnnnnnnnnnnnnnnnnnnnnnnnggcacgagcttcttttgtggccctatattagagaaagtcagggtggagataagggtggccatgtccattatgatttaaattcagtactttcttaattttggaagatcttgcctagagtttattggtgccttttgtgatgaatctgaccattaagcattctattttctcctgccctaagtttacaatttttaaaaattagttgctaacctttaatgaactggaggtttcacctgcctccccccaaaatccttatctctgacttcttttgaagatctgggaaaatgaactctttctcctgagggtaacctcagaacagagtggcagctgctgcctatagacacagagtggcattccccaggtgaccagtcctcac

SEQ ID NO: 30863 - DNA, 452 bp, Homo sapiens
  misc_feature (1)...(452): n = a,t,c or g
annnnnnnnnnnnnnnnnnnnnnnnnnnnnnnnnnnnnnnnnnnnnnnnnnnnnnnnnnnnnnnnnnnnnnnnggcacgagcggtcccacacagcaggctccctctgtattggcgtggaccccaacaggaactgggacgctggctttgggttgtccggagccagcagtaacccctgctcggagacttaccacggcaagtttgccaattccgaagtggaggtcaagtccattgtagactttgtgaaggaccatgggaacatcaaggccttcatctccatccacagctactcccagctcctcatgtatccctatggctacaaaacagaaccagtccctgaccaggatgagctggatcagctttccaaggctgctgtgacagccctggcctctctctacgggaccaagttcaactatggcagcatcatcaaggcaatttatcaagccagtggaag

SEQ ID NO: 30864 - DNA, 435 bp, Homo sapiens
  misc_feature (1)...(435): n = a,t,c or g
anantttgannnnnnnnnnnnnnnnnnnnnnnnnnnnnnnnnnnnnnnnnnnnnnnnnnnnnnnnnnnnnnnnnnnnnnnnggcacgagnnnnnnnnnnnnnnnnnnnnnnnnnnnnnnnnnnnnnnnnnnnnnnnnnnnnnnnnnnnnnnnnnnnngtgttggtgttctgccacatgtttggggctttgctctttcactctttgggtccacacttnnnnnnnnnnnnnnnnnnnnnnnnnnnnnnnnnnnnnnnnnnnnnnnnnnnnnnnnnnnnnnnnnnnnnnnnnnnnnnnnnnnnnnnnnnnnnnnnnnnnnnnnnnnnnnnnnnnnnnnnnnnnnnnnnnnnnnnnnnnnnnnnnnnnnnnnnnnnnnnnnnnnnnnnnnnnnnnnnnnnnnnnnnnnnnnnnnnnnnnnnnnnnnnnnnnnnnnnnnn

SEQ ID NO: 30865 - DNA, 438 bp, Homo sapiens
  misc_feature (1)...(438): n = a,t,c or g
ntttgaaacnttnnnnnnnnnnnnnnnnnnnnnnnnnnnnnnnnnnnnnnnnnnnnnnnnnnnnnnnnnnnnnnnnnggcacgaggctggttaaatgattcacagtttgtttcccgtgatctttagcaagaagccagcacatggtaggcacccagtacagttttctggaacacatgaataaatagtcaattcatttatttaacaaatctgtattgagagtctactttgcaccaggcactattctagatgtttgtgctgtgttagtgaatgaaacagacagaaatctgtgcttcacttagaaataaggaatatagatacatgtagatatattgaaacatgaagttctccgtgttttttgttgttgtcatcctagtctcctgtaggatttaaatgagggtagatacggatctttttattgttactttattagatttttaa

SEQ ID NO: 30866 - DNA, 443 bp, Homo sapiens
  misc_feature (1)...(443): n = a,t,c or g
tttgnaaaccttnnnnnnnnnnnnnnnnnnnnnnnnnnnnnnnnnnnnnnnnnnnnnnnnnnnnnnnnnnnnnnnnggcacgagcggcacgagagtttttaaaaaaatcttctcacaaagattacaacaaggtctgttgattttgcaagtgtgaattctacaaacttttgagaaatacctcatcctaatataaacagacttccagacattagaataaggaatgacataccagttaattccttgagacgggtataaactttaaaacaaaaccagacattatgagaaagaaaaataatatatatttatatatgttgtcatatataatttttaagttagcactaatctcactcatgaacttaggtatcaaaatcaaaatcataagcaaaatgttaacagactgaatccagcagcacatttctttaaaaagagatataccttgcccg

SEQ ID NO: 30867 - DNA, 436 bp, Homo sapiens
  misc_feature (1)...(436): n = a,t,c or g
ttggaaactnttangaccgnnnnnnnnnnnnnnnnnnnnnnnnnnnnnnnnnnnnnnnnnnnnnnnnnnnnnnnnggcacgaggaaacagtttggaaatgagggaagggtagatgttttattttgtaggtttgtattttgtttggatatcgttatgtgtatatattagttgcatatattatgtctacaggacatatatatgggcctttgttttttgttttattttcttatttgtttttaagtccataataaaagtttaacaattctgttattatagagtagaagtaaatgtctgtatagctttttctgtgttggtaacagaactaatgtcaagaaaaagccgcagacatctaacaatgttggctgtcccggttttacattttactgttttgacacttatttacctaaactgaatataacgtttcccttgtgtctac

SEQ ID NO: 30868 - DNA, 439 bp, Homo sapiens
  misc_feature (1)...(439): n = a,t,c or g
tttgaaaacctttnnnnnnnnnnnnnnnnnnnnnnnnnnnnnnnnnnnnnnnnnnnnnnnnnnnnnnnnnnnnnnnggcacgannnnnnnnnnnnnnnnnnnnnnnnnnnnnnnnnnnnnnnnnnnnnnnnnnnnnnnnnnnnnnnnnnnnnnnnnnnnnnnnnnnnnnnnnnnnnnnnnnnnnnnnnnnnnnnnnnnnnnnnnnnnnnnnnnnnnnnnnnnnnnnnnnnnnnnnnnnnnnnnnnnnnnnnnnnnnnnnnnnnnnnnnnnnnnnnnagagcccatgcctctatcttaatgagcctttgttctagctactctgttctatataggctacacttgcaaatcaaattcctctgtcaatgaccttcaatgctatctctaagaaattcctccaggagtctgtctgtcccatgctagaagcctcagaactgtgcct

SEQ ID NO: 30869 - DNA, 438 bp, Homo sapiens
  misc_feature (1)...(438): n = a,t,c or g
tttgaancntnnnnnnnnnnnnnnnnnnnnnnnnnnnnnnnnnnnnnnnnnnnnnnnnnnnnnnnnnnnnnnnnnggcacgagccatgagcttcaataccctggattagacaatggtgtcttagatattatgccaaaaacacaagcaacaaaagaaaaaaataaattggacttcatcaaaatttaaaacttttgtgcttcacagatacaatcaagaaaacgaagnnnnnnnnnnnnnnnnnnnnnnnnnnnnnnnnnnnnnnnnnnnnnnnnnnnnnnnnnnnnnnnnnnnnnnnnnnnnnnnnnnnnnnnnnnnnnnnnnnnnnnnnnnnnnnnnnnnnnnnnnnnnnnnnnnnnnnnnnnnnnnnnnnnnnnnnnnnnnnnnnnnnnnnnnnnnnnnnnnnnnnnnnnnnnnnnnnnnnnnnnnnnnnnnnnnnnn

SEQ ID NO: 30870 - DNA, 459 bp, Homo sapiens
  misc_feature (1)...(459): n = a,t,c or g
gnnnnnngnnnnnntnnnntttgannntntgaaaaccntatgacnnnnnnnnnnnnnnnnnnnnnnnnnnnnnnnnnnnnnnnnnnnnnnnnnnnnnnnnnnggcacgaggaatgttagatagaagaaacctgaatttcagaaaaatttgggatatggtgatttgaagattaaaacaaccaagcatggtgttaatttaatcatctatgtatgaaataacgagtactgtgacccacacacttagctcaaccaccatgcaaataaactaggaaatgcatcagggaactgtagttcataagaccattctatccaaagtgttcaacttcttataattcatatagtcaacttactccatgttttttatttcttctgtgcatcagcaatagctgtgatgacaacatttcttagatgtaaggaaaaccatgcatgctagattatgaaacaattttattctgcatga

SEQ ID NO: 30871 - DNA, 439 bp, Homo sapiens
  misc_feature (1)...(439): n = a,t,c or g
tttgaaaancctttatgacatgattacgaatttaatannnnnnnnnnnnnnnnnnnnnnnnnnnnnnnnnnnnnnnnnnggcacgagcaggagtccccaaactatactttgaaaactgctggcagcatcatagcttacttatttnnnnnnnnnnnnnnnnnnnnnnnnnnnnnnnnnnnnnnnnnnnnnnnnnnnnnnnnnnnnnnnnnnnnnnnnnnnnnnnnnnnnnnnnnnnnnnnnnnnnnnnnnnnnnnnnnnnnnnnnnnnnnnnnnnnnnnnnnnnnnnnnnnnnnnntgctggctaattttggannnnnnnnnnnnnnnnnnnnnnnnnnnnnnnnnnnnnnnnnnnnnnnnnnnnnnnnnnnnnnnnnnnnnnnnnnnnnnnnnnnnnnnnnnnnnnnnnnnnnnnnagctcactgttaaatgctagact

SEQ ID NO: 30872 - DNA, 457 bp, Homo sapiens
  misc_feature (1)...(457): n = a,t,c or g
gnnnnnngnnnnnntnnnntttgaanntntganaaccnttgacnnnnnnnnnnnnnnnnnnnnnnnnnnnnnnnnnnnnnnnnnnnnnnnnnnnnnnnnnnggcacgagggcaagagaaagaaataaagggcatctaaataggaacatannnnnnnnnnnnnnnnnnnnnnnnnnnnnnnnnnnnnnnnnnnnnnnnnnnnnnnnnactcggctgcactcagcatcggagccaggagctagtggccgccgccacgtcccaccagacctgcatccaagcaagtgaagatgttaaagagatcttgccagagccagaaatggaaagtacagacctctgaaaatatctattgaaaatgggcaacttatgattggatcatatatagtcagccttcagattcctgggataacgattatgattcctttgttttacccctgttggaggacaaacaactgtgctat

SEQ ID NO: 30873 - DNA, 437 bp, Homo sapiens
  misc_feature (1)...(437): n = a,t,c or g
tttgaaaccnttnnnnnnnnnnnnnnnnnnnnnnnnnnnnnnnnnnnnnnnnnnnnnnnnnnnnnnnnnnnnnnnnnggcacgagagagcacgcctatcaatatggaggaacagccaacagccgccaagagtttgaacacttaaaaggagattttggtgccaaatctcagttttccattcgtctgagaactcgttcctcccatggcatgatcttctatgtctcagatcaagaagagaatgacttcatgactctatttttggcccatggccgcttggtttacatgtttaatgttggtcacaaaaaactgaagattagaagccaggagaaatacaatgatggcctgtggcatgatgtgatatttattcgagaaaggagcagtggccgactggtaattgatggtctccgagtcctaaaaagaaagtcttcctcctactgg

SEQ ID NO: 30874 - DNA, 436 bp, Homo sapiens
  misc_feature (1)...(436): n = a,t,c or g
tttgaaaancctnnnnnnnnnnnnnnnnnnnnnnnnnnnnnnnnnnnnnnnnnnnnnnnnnnnnnnnnnnnnnnnnnggcacgagggatatgctaattaccctgatctgatcactatacattatgtgtatagaaacatcactatgtttttcatgaatatgtacagttattatttgtcaattaaaaaatatgaatttctaaaaacaaaaacaaaacaacgtttatttttaaagtaaaagataaaccgtttttttaaatccagcccaggcattgggctggatttggcccataggcagtagtttgtggatcccttttctagatgatggaggggagtgtttcttcacaaagacacctggtgcatcataaatagatacgtaaagggatttggctcagtgagtgtccgtggtttttataccatggtctctgtttatgtttga

SEQ ID NO: 30875 - DNA, 427 bp, Homo sapiens
  misc_feature (1)...(427): n = a,t,c or g
tttgaaacnttatgancnnnnnnnnnnnnnnnnnnnnnnnnnnnnnnnnnnnnnnnnnnnnnnnnnnnnnnnnnggcacgannnnnnnnnnnnnnnnnnnnnnnnnnnnnnnnnnnnnnnnnnnnnnnnnnnnnnnnnnnnnnnnnnnnnnnnnnnnnnnnnnnnnnnnnnnnnnnnnnnnnnnnnnnnnnnnnnnnnnnnnnnnnnnnnnnnnnnnnnnnnnnnnnnnnnnnnnnnnnnnnnnnnnnnnnnnnntttttaatccttttggtcagtggctcatggtaaaaaatatgtctccacctttggtataagtgttagtgtaagtttcagcctaagctattaaaactatatatatatatatatatatacacaccctacacactggtatatataaacataaaaataatatagtatagtttctgta

SEQ ID NO: 30876 - DNA, 461 bp, Homo sapiens
  misc_feature (1)...(461): n = a,t,c or g
tggaaacccctnnnnnnnnnnnnnnnnnnnnnnnnnnnnnnnnnnnnnnnnnnnnnnnnnnnnnnnnnnnnnnnggcacgagactttattgtcttcattattgtcaaggaatttggtaggaaaagaaggatatttgttcaaagatactttaggctttccacttctaattggaatttctactttctatttagaagttaaaatctgtaagtagaaacacacacaaaaaattgctttggtagaccctacagaatcaaaagacatacgttttaggtttacctttagagaaacagcagttttgccagtacaggaaaaagttataatactggaattttccctgtgatgatgaattgccagtctgagaggaagtggttggggaatggtggcccaccagcctgaaagcccccaagaacaaccattaataagcactctttggttgaacacccatcattatggggactgag

SEQ ID NO: 30877 - DNA, 436 bp, Homo sapiens
  misc_feature (1)...(436): n = a,t,c or g
ttggannacnnnnnnnnnnnnnnnnnnnnnnnnnnnnnnnnnnnnnnnnnnnnnnnnnnnnnnnnnnnnnnnnnnnnnggcacgagagcttaagaaagggctgtgtcacatttggctacctacaaaggtaatgagatccctgtcactgggggtatgcaagcagagttccatggatattgttgcagtctgcaaagggggtcctgccctgagagagttggaccagataaccttccaggacccctaccagccccaagtttctgactctccccttgggtactgcagtgagaaaagcactctgaatggtgaggggctgtggcctgggttgcacatccaagggccttgtatctctccctccagttccttccattctcacctccttgcgggaggagaaggatggtaaaggagtagatgaattactaggacaaaagtcatagcg

SEQ ID NO: 30878 - DNA, 150 bp, Homo sapiens
  misc_feature (1)...(150): n = a,t,c or g
nnnnnnnnnnnnnnnnnnnnnnnnnnnnnnnnnnnnnnnnnnnnnnnnnnnnnnnnnnnnnnnnnnnnnnnnggcacgagatccattatattggggacattgaaaccctgtgtacaaatatgctggatgttttcagtttttttttttttt

SEQ ID NO: 30879 - DNA, 431 bp, Homo sapiens
  misc_feature (1)...(431): n = a,t,c or g
cccttggannacanctatgacnnnnnnnnnnnnnnnnnnnnnnnnnnnnnnnnnnnnnnnnnnnnnnnnnnnnnnnnnnggcacgaggctcggcgtggtggcttcacaggttctattgttatactttgtataaccaacaaatatattgtgggaaatattttatatgtgtcaaataatagattttaaatgttaaacatgtttcaaaaataacaaaggagaaaaagtgtggtgtcagctctggctctgccatttctaattgggttaagtcatctgaatgctctgtgcctcagtttcctcatctgtgatgtggagacagggaaagtacctagtttgtgggttagcagtaagtagtaaatgccatcaagccctcagagcagtttcttgcccagtaagagtttgcatccttgtcattgtcaccatcatcatcatcg

SEQ ID NO: 30880 - DNA, 434 bp, Homo sapiens
  misc_feature (1)...(434): n = a,t,c or g
annacnnnnnnnnnnnnnnnnnnnnnnnnnnnnnnnnnnnnnnnnnnnnnnnnnnnnnnnnnnnnnnnnnnnnnggcacgaggaataaagcaccatttgatgatgatcttccttcaaggctcagagcccccactttcctctttaacaataaaagcctttggctgttcagcttccttcttaccccaaagcagagatcccggctgaagatcacattccagagctttctgtgcccactgccccttggcctcccctgcaagggtcctcagtgtaattgcaggctcaggtttgacttccttgggaaatgtctttaaaatcagagaaatctaagcggagttcggaatcattctgaaaattgtcgccgaccccaacccccagcctatcttcatgccctgcatgggggaacccatggtacatttgaaggccccaggctgggc

SEQ ID NO: 30881 - DNA, 437 bp, Homo sapiens
  misc_feature (1)...(437): n = a,t,c or g
annaccctttgaacaccatctntgacnnnnnnnnnnnnnnnnnnnnnnnnnnnnnnnnnnnnnnnnnnnnnnnnnnnnnnnnnnggcacgagagatgacaggccctgcagggccttcaattctcacgtcctccccagtcccctttgctccgggacagtctcctcgtcatttttatgtttcgtgacattcacattttggaagcgtaggggcagctattttgtaaaatgtttttcagcttgggatttcggcatgtttcctcgtgattggattccagtgatgccgctgggcttggcggccaccgcagtatttcgttgctgctgatgctgcccggaagctctcagtgaaggtgatgctggcgggtgtttccactgtgaagttacattgtttcctgcataattagcaggtatctggtagggagataatctgggactgtgcag

SEQ ID NO: 30882 - DNA, 420 bp, Homo sapiens
  misc_feature (1)...(420): n = a,t,c or g
ttgannaccgctnttcatgacacgaatttaatacgactcnnnnnnnnnnnnnnnnnnnnnnnnnnnnnnnnnnggcacgagaatctgcaccaacatgttttattctgttctgtacctcaagctttgatgctgctttgttttcttgttttgggagaagggcaggggtgggggtggaggcaagcgagtccaatactacaactttagaaatctctgctctagggtgaacactctctttgagacttctaaattaaagtcaagtcttttggatttttgtttctttgtactgcctaactttagaaagacctggaagcggtaacatgaaaacatttttagagagaattaccaggcatttttggtagaatgagtgtttaatggaacagtccagagaactcatcaaagatgtttattaaaacgcgcaga

SEQ ID NO: 30883 - DNA, 429 bp, Homo sapiens
  misc_feature (1)...(429): n = a,t,c or g
ggcccacccgccctttgatgacnnnnnnnnnnnnnnnnnnnnnnnnnnnnnnnnnnnnnnnnnnnnnnnnnnnnnnnnnnnnnnnnnnnnnggcacgagatgatgttaggggtatgatattctttaactagttgtatcaatcaggctttctgggttcaagtgatagaaacccaacctaagttactttatgcttacaagaggagaattaattggctcatggaagtgggaagtatagaaggtatatctggctttcagcaggatccaggaactccaaagatatcactaggatactgtctgtgtccaagacccatagctcaaccctcctctctgtgccttcattcccagaaagctactccccatgttgtatcagagatggatacaagaagctccaagcttacatggagctagcaatctcagtaaaaggagtat

SEQ ID NO: 30884 - DNA, 434 bp, Homo sapiens
  misc_feature (1)...(434): n = a,t,c or g
gnnnnnnnnntttgannccttgaanacancttgacnnnnnnnnnnnnnnnnnnnnnnnnnnnnnnnnnnnnnnnnnnnnnnnnnnnnnnnnnnggcacgagacaaaaccaaacctctttctgtttagttgcctgggggaagaaggctgctttatgtttatttttcaagactttaaaaatattttttggttgtattgcactaggaaatctctcccacctctcccttttctctttctttccctatacaaaataaaaggcccaccatagagactaggcggccgaaagactaggagggctgaggaaaagaaataggtctctggaggtggaactaaaactgtgcagctgcctcttcctggcggtggatgctgctttgggagggccagggaggctgcagggggacagtgttgggattgtcaaggaaaaaggggtaggaag

SEQ ID NO: 30885 - DNA, 425 bp, Homo sapiens
  misc_feature (1)...(425): n = a,t,c or g
ttgaanacattnnnnnnnnnnnnnnnnnnnnnnnnnnnnnnnnnnnnnnnnnnnnnnnnnnnnnnnnnnnnnnnnnnggcacgagcagaaatcaatctctaatggtttccctattgacagaagatcaagtgaggaccctgtgaaggcctttcatggtatctgttgtcatttaggaggctcagaagttcaggggcctttgtctgcaggctggtgtgttcttctgggccccaggccctcaggctttgaggctgtaagcgagcacttgcctgggggtaactatccagctcagtgggtaggtttttccaaggcatggatggttgacagcttggcagagcatctcatccagaccatctcactttttccatttgtatagaattctctgttaaaacaaaggtgttgtctaatgttaagagggagtggtgtta

SEQ ID NO: 30886 - DNA, 419 bp, Homo sapiens
  misc_feature (1)...(419): n = a,t,c or g
acnttnnnnnnnnnnnnnnnnnnnnnnnnnnnnnnnnnnnnnnnnnnnnnnnnnnnnnnnnnnnnnnnnnggcacgagattggttgaaacagtggtgtaagaaactctcttcagccatagtcacacttggaacaggataaacatcttcacagaacagaagcaacaggaacgtagaaccatggatcaaggcgaacgcaatggcaacaaccttccgcgctcctattaggaaaccagtggtgcagctggaaaatcagggctctcggtgtccacatgaggtgggcgtggagtcagagagtgttgattcagccctgccatctgcctggagcctccaggcctgggcgaacatgtggaccacacacgttgtgtctggcttcttccactgacatcgtgtttgtgaggttcacccacactgnaacacg

SEQ ID NO: 30887 - DNA, 438 bp, Homo sapiens
  misc_feature (1)...(438): n = a,t,c or g
gnnnnngnnnnnnnnnttgnnnncttgannacanctatgacnnnnnnnnnnnnnnnnnnnnnnnnnnnnnnnnnnnnnnnnnnnnnnnnnnnnnnnnnnggcacgagcaaggacgacgggagagcttgcccggaatagaggaggtaaccgccgtgtcgggcgtccctgaaatggagggaccagagagaggcccggaggccggaggaagcccttggcccagcgctggggttttcggaaacggagagacggacgggatccggggaagggcaacagtctctttttactcaccctggcggaggttttgatggtggatgaggtcgccagcaaagggagaacctaggagattctctgggtcttcggcaggttggggaaaggtcttactctgagaannnnnnnnnnnnnnnnnnnnnnnnnnnnnnnnnnnnnnnnnnnnnnnnn

SEQ ID NO: 30888 - DNA, 427 bp, Homo sapiens
  misc_feature (1)...(427): n = a,t,c or g
acntttgatgaccanntatgacatgattacgaatttaatacnnnnnnnnnnnnnnnnnnnnnnnnnnnnnnnnnnnnnnnnnggcacgagaccatgacaaaccctgcaaccaacctcgtggcacatgcagaggggatatggacccggaaggggagggcgagagatgagcgggacccactgagggatttatcagagcaggaacctcctcggatttccatttaaacaatccttcccagggcagtcatttaagatgcctttcaccaaacaacacatgcctcctcacacatacccactacacgtgcaaacaatctctttccgaaccaaaaccacaccgatgattcagcccctgccaggtgagagcagcatctgggtcacaaacaaactgaggccgtgaagactccaccccgactccctctatttaaaaatt

SEQ ID NO: 30889 - DNA, 413 bp, Homo sapiens
  misc_feature (1)...(413): n = a,t,c or g
ntttggatacnnnnnnnnnnnnnnnnnnnnnnnnnnnnnnnnnnnnnnnnnnnnnnnnnnnnnnnnnnnnnnnnnnnnnggcacgaggaaaaccttaacttctttttatcttaagtgtaaatggtgccgggtgtggttacagatggctcatgcnnnnnnnnnnnnnnnnnnnnnnnnnnnnnnnnnnnnnnnnnnnnnnnnnnnnnnnnnnnnnnnnnnnnnnnnnnnnnnnnnnnnnnnnnnnnnnnnnnnnnnnnnnnnnnnnnnnnnnnnnnnnnnnnnnnnnnnnnnnnnnnnnnnnnnnnnnnnnnnnnnnnnnnnnnnnnnnnnnnnnnnnnnnnnnnnnnnnnnnnnnnnnnnnnnnnnnnnnnnnnnnnnnnnnnnnnnnnnnnnnnnnntacgtaaatggcaat

SEQ ID NO: 30890 - DNA, 261 bp, Homo sapiens
  misc_feature (1)...(261): n = a,t,c or g
ttgaccaccgttnnnnnnnnnnnnnnnnnnnnnnnnnnnnnnnnnnnnnnnnnnnnnnnnnnnnnnnnnnnnnnnggcacgagcaggcaggttattaatggagagccaaggttgacttccttgctacaaagaaaagccacagagagattaatctaaataattttatgcagagttttaatgaaaactgtttaacttttaaaaatttccctgtacttaatattatctggacctaaattatttgatcaactttttttttttttt

SEQ ID NO: 30891 - DNA, 423 bp, Homo sapiens
  misc_feature (1)...(423): n = a,t,c or g
ttggncnaccgtnnnnnnnnnnnnnnnnnnnnnnnnnnnnnnnnnnnnnnnnnnnnnnnnnnnnnnnnnnnnnnnnnggcacgagggaaaatgtcaagcatatataagcacacatatgtgcatacgtgtgtatatacagagatatctctgctttgttgttagtttagcttagcttatattatggttattgtttttattgttctacccccttcatcttaacagctacatagcattccattgtgtatggatgtgtaaataaagacaaggtgatttggacatccctcaatgcagggtactgcctaaaagcagaagtttgccctcctaatccagatatttcctttttaccacctacaagtgggagcaaaatctgttttaaaatgcagccaataaggagaatcctcagtttccattaattagagatag

SEQ ID NO: 30892 - DNA, 424 bp, Homo sapiens
  misc_feature (1)...(424): n = a,t,c or g
ttgaacnaccgtnnnnnnnnnnnnnnnnnnnnnnnnnnnnnnnnnnnnnnnnnnnnnnnnnnnnnnnnnnnnnnnnnggcacgagcagaaaaattatttccgccttgtttttgttttgtgggttccccccccactcattctgtattcttactaatgtctggaacaagaattggtttggtctcactgagttctcccagactccttctatctccccaagtaatgataacatctgctagaaatggcatagtaagaaaacaaagcagctatttgtaagtcctttagagtgtttctccaaaggtggtgaatctaaaactcatctaagaagtttgtcaaaactcagatttcnnnnnnnnnnnnnnnnnnnnnnnnnnnnnnnnnnnnnnnnnnnnnnnnnnnnnnnnnnnnnnnnnnnnnnnnnnnnnnn

SEQ ID NO: 30893 - DNA, 439 bp, Homo sapiens
  misc_feature (1)...(439): n = a,t,c or g
antncnnnnnnnnnnnnnnnnnnnnnnnnnnnnnnnnnnnnnnnnnnnnnnnnnnnnnnnnnnnnnnnnnnnnnggcacgaggtcagccattccaaacatcttccatgccactccagaaccaagtatgcaacctaaagggcgtgagttcttcatttttgatttctaaaaatagatttcttccttcaatgtcaaaattcagaaaaaatatcttttagatctacggtcatctttacactatagtaaaatgacaacttaagtgttttagagttcaaatgagttgatagttacattcacaaaattggacagaaatgtggtcttttgctcagaatgtccactagcaattgtggagtgggtcaatctcaacccaagcgctctgagagaaaaggcatcatctgtaggtataatatacctgtcagctgatttcataaggcagcttta

SEQ ID NO: 30894 - DNA, 433 bp, Homo sapiens
  misc_feature (1)...(433): n = a,t,c or g
tnnnnnnnnnnnnnnnnnnnnnnnnnnnnnnnnnnnnnnnnnnnnnnnnnnnnnnnnnnnnnnnnnnnnnnnggcacgaggttaagatgaaacagggaggtgaggggcttaacacatttccctgttcccataagctttcaggagatcttggtagttttcatctcggtcttcattaccatcatcactgcttcagactcctgtccatgtggggccctgtggtcttgcgatcacctccataaatgttcctttgttcccgcctaacacaataccagccacaaaataattctcaacacatattcattagtggatgcaggggcgaaatgaaactcagggggttgggaaactcacctgaaggatcttctccctctccccactttcaggctctcctttcacacgcatgcattaattcgttcattcttggaatctacccacc

SEQ ID NO: 30895 - DNA, 440 bp, Homo sapiens
  misc_feature (1)...(440): n = a,t,c or g
ttcgattaccntnnnnnnnnnnnnnnnnnnnnnnnnnnnnnnnnnnnnnnnnnnnnnnnnnnnnnnnnnnnnnnnnnnggcacgagagcattctttcagagaccaacagcacgatttaggcctgtgctaacaaacccagctgctgccacagagagaaaacaaaaaattcacagccttctttcttctcctggatcctctaccaaatggtccataccaacaactgaatgaactgaatgacagccatttagagccaacatggcctcaatggaccttgtcatcagtttttccacatatctgttttgggatacacatatcatgagatcattagattagggtataaggctgctaataaaccaattctgtggctagcttttaccacctaaccacatgcaaaaattttaaaaatatcacagaagttacaaactgttagcatagagggc

SEQ ID NO: 30896 - DNA, 369 bp, Homo sapiens
  misc_feature (1)...(369): n = a,t,c or g
ncctttgannnnnnnnnnnnnnnnnnnnnnnnnnnnnnnnnnnnnnnnnnnnnnnnnnnnnnnnnnnnnnnnnnnnnnnnggcacgagaaaggaaacagatttagggggaatgggctggcatttatgtgtgaatacttcctagagtaggtaggttgttgtatagctggtatttgcagaaggtaaagtacccaggcaggaggtgtagaacaaagtgagctttgcaggactgtgggaaagctggcaaagacaaaagcaagcagcttccctggaccagaaggccaggagtggagcaactcttggttctggatggtgccttgcctattatgagagtgttttggaatgggatttcaaaacacacatgaagttac

SEQ ID NO: 30897 - DNA, 400 bp, Homo sapiens
  misc_feature (1)...(400): n = a,t,c or g
nanctgnnnnnnnnnnnnnnnnnnnnnnnnnnnnnnnnnnnnnnnnnnnnnnnnnnnnnnnnnnnnnnnnnnggcacgagttggaattttgatagggattacattaaatctatagattgctttaggtagtatggatgttttaacaatactaatgttcaatgaacattccaaaaatgaaatcaagagaaccatcccacttaaaatagctacaagaaaaaatacttagggataaatttgaccaagggggaagaaagacctggacactgaaaactatacaacattaatagaagaaattgaagacgacacaaataaatggaaagatatcccatgttcatggactggtgtataatttttgtattcaaagaatggaatattgtctattgtgatttttttttttttt

SEQ ID NO: 30898 - DNA, 455 bp, Homo sapiens
  misc_feature (1)...(455): n = a,t,c or g
atttggaatanccgttatgacatgattacgaatttaatacnnnnnnnnnnnnnnnnnnnnnnnnnnnnnnnnnnnnnnnnnggcacgaggagagccatgagcttcataccctgttgaattctctgtataatacttatcatgatctgatatttttcttctttgtgtattgcctgtctctccaccaccctaccaggtagaatgtaagatccatgagaacaggagccctaactcactgctgtgttctcagagaagtaagatatgtaagaaatattttcaaaacaattatttgtaacttgaatgcaaaacaaatgagtgaataaatcatatacactgtcaagtccacccacccaacctgtgacttctggcaggactgaggacactgtccacacggagccctcccacctggtggtagcggggtgattgccaaggctcaggctgaaatttggatcactcat

SEQ ID NO: 30899 - DNA, 449 bp, Homo sapiens
  misc_feature (1)...(449): n = a,t,c or g
actnnnnnnnnnnnnnnnnnnnnnnnnnnnnnnnnnnnnnnnnnnnnnnnnnnnnnnnnnnnnnnnnnnnggcacgaggcatttcagacaccctatacatctatacatttaaagtgttctccttctatctgtgcagggatgggaaagggcatatttctgaaagcacagatgggaagacgggatttgttccgtgtccaggtgattatggtacctctatgcgcctggccggcactggggacagaggccatgaaaatgaatacagcacagcctttgcctccaagaaacttaagacctagtagaaatggcaggctttaaaacaggttgttgggatctgatttggtgagtgcaatgacagagatactcacagcacaaaatggggaatgagggcgggcattgggacacacatagccttaaggggcccaaaggcttttagaactgtattccctatt

SEQ ID NO: 30900 - DNA, 451 bp, Homo sapiens
  misc_feature (1)...(451): n = a,t,c or g
anacttggnnnnnnnnnnnnnnnnnnnnnnnnnnnnnnnnnnnnnnnnnnnnnnnnnnnnnnnnnnnnnnnnnggcacgagtggaaggcataaaaaagatgaaatactttttccaaattttatttaataacagtacaaagccttttgggtccagtcaaatattgctagttttagtgcaggcaaagtgattgctttcattctctccttcctctctcctaatggaagtccatatcgttgattcagattttcttagtgtttacctactgnnnnnnnnnnnnnnnnnnnnnnnnnnnnnnnnnnnnnnnnnnnnnnnnnnnnnnnnnnnnnnnnnnnnnnnnnnnnnnnnnnnnnnnnnnnnnnnnnnnnnnnnnnnnnnnnnnnnnnnnnnnnnnnnnnnnnnnnnnnnnnnnnnnnnnnnnnnnnnnnnnnnnnnnnnnnnnnnnnnnnnnnn

SEQ ID NO: 30901 - DNA, 462 bp, Homo sapiens
  misc_feature (1)...(462): n = a,t,c or g
tnnnnnttttgaaatttgataccgttatgacnnnnnnnnnnnnnnnnnnnnnnnnnnnnnnnnnnnnnnnnnnnnnnnnnnnnnnnnnnggcacgagnnnnnnnnnnnnnnnnnnnnnnnnnnnnnnnnnnnnnnnnnnnnnnnnnnnnnnnnnnnnnnnnnnnnnnnnnnnnnnnnnnnnnnnnnnnnnnnnnnnnnnnnnnnnnnnnnnnnnnnnnnnnnnnnnnnnnnnnnnnnnnnnnnnnnnnnnncctgtgaggttgtaggttctttcccctttttcctttcctttttttttccccctttttcctttttcctttcctttttctctcactctgtcacccaacctggatgggagnnnnnnnnnnnnnnnnnnnnnnnnnnnnnnnnnnnnnnnnnnnnnnnnnnnnnnnnnnnnnnnnnnnnnnnnnnnnnnnnnnnnnnnnnnnnnnnnnnnnnnnn

SEQ ID NO: 30902 - DNA, 459 bp, Homo sapiens
  misc_feature (1)...(459): n = a,t,c or g
ananctttgananccgtnnnnnnnnnnnnnnnnnnnnnnnnnnnnnnnnnnnnnnnnnnnnnnnnnnnnnnnnnnnnnnnnnggcacgagtgaggagagaaatccctcagcatcctagtcccattggacagtggccagtcacccttggagccgtggcagtggaaagggctgagcaggaggatgaggaataattgcaggtggcttcattgacggtggcagcagagagaataccttatctgtgaaaggcagctgggccttgcagttaattgttctgttgttttcctcttggtatttttccagcacatcaacataggacctttgcccttggctttctcattgacgctgaggctgaagccgggaggtgagctggggatgggggattgggaaggggcctcattccaggtggtttcacgtgaattcttggtgctgaactatctgtgcaggttcctccagggctgg

SEQ ID NO: 30903 - DNA, 460 bp, Homo sapiens
  misc_feature (1)...(460): n = a,t,c or g
tggaaaccttnnnnnnnnnnnnnnnnnnnnnnnnnnnnnnnnnnnnnnnnnnnnnnnnnnnnnnnnnnnnnnnnnggcacgagaaggaaataagctaccaaatatggaggatataaaggggcactgataagcagtagtgtaaataagttcttatttaactaagagatgctctaaaaaaaaggtctgaagagaacaaagaaacccatcaaaaaaaatattagattataaaaatcagactattctcttacctcaacaagacaaagcatagatgcatgctgcgtgtgtgacagaagatggctctctggagaattttagtggccatcaggaaaatgctgccaatcctcccctctccacccattgcttcctactgctctgacccagcaagagtgggatctgggtggacatttcagttgaaccaaaacagagcgagtatctgccctaaaagaggtactccattcag

SEQ ID NO: 30904 - DNA, 481 bp, Homo sapiens
  misc_feature (1)...(481): n = a,t,c or g
gnnnnnnnnnnnnnnnnttgnnnnnctttggannnnnnnnnnnnnnnnnnnnnnnnnnnnnnnnnnnnnnnnnnnnnnnnnnnnnnnnnnnnnnnnnnnnnnnnggcacgagtttttttttagacggcatnnnnnnnnnnnnnnnnnnnnnnnnnnnnnnnnnnnnnnnnnnnnnnnnnnnnnnnnnnnnnnnnnnnnnnnnnnnnnnnnnnnnnnnnnnnnnnnnnnnnnnnnnnnnnnnnnnnnnnnnnnnnnnnnnnnnnnnnnnnnnnnnnnnnnnnnnnnnnnnnnnnnnnnnnnnnnnnnnnnnnnnnnnnnnnnnnnnnnnnnnnnnnnnnnnnnnnnnnnnnnnnnnnnnnnnnnnnnnnnnnnnnnnnnnnnnnnnnnnnnnnnnnnnnaattacttgcatgaaaaaaacacatagtgcttactttgtgccaggcactattctaagtacttcacagttattcgtataatctt

SEQ ID NO: 30905 - DNA, 464 bp, Homo sapiens
  misc_feature (1)...(464): n = a,t,c or g
ttgnanacctttgaanaccgtnnnnnnnnnnnnnnnnnnnnnnnnnnnnnnnnnnnnnnnnnnnnnnnnnnnnnnnnnnnnnnnnnggcacgaggtaaataagaaaattaaagaagttaagtaagtttgaattggtaatatcactgggaatttatgatatattttctttaataaaacaaaacaccagctctgtcctgagaaggcctagaaatagcaaattacctttttgcagtgagcactggcattctgaggtatttagaattttttctcaaaggaaccaggttccttgcaaaaataactggttcttggttaaagataggggaatattttataaagcaaagaagttttctgagatcactggagttttgttgaaaagactcagagccaacttgaactagctcctagctcccattgggtaaaaatagggtattttgagtatcagaaaaggttataaagacttctgc

SEQ ID NO: 30906 - DNA, 458 bp, Homo sapiens
  misc_feature (1)...(458): n = a,t,c or g
anctttnnnnnnnnnnnnnnnnnnnnnnnnnnnnnnnnnnnnnnnnnnnnnnnnnnnnnnnnnnnnnnnnnnnnnnnnnnggcacgagcagaaccctagagcagaatgcagctgtcttgggaagaggctggaagagacctggaaggttgaggacagtttctggaaggtttctctctagagttttggttcttacgacacaagtatggaacatggatggctactactgatgcaccaacataactcttgtgttctaatctgtggcaaatggtaggaacttactatgtatgagttgattggcagattggctttccagtctggtatattctttgctcggtggccagtacaaattgcattatcccattaagctcaccatcagcatttgccctttgtagagtctgcgcacccactggattgggcagaagtcatgttgactgagtagtcatgggtccccatgcagt

SEQ ID NO: 30907 - DNA, 444 bp, Homo sapiens
  misc_feature (1)...(444): n = a,t,c or g
cnnnnnnnnnnnnnnnnnnnnnnnnnnnnnnnnnnnnnnnnnnnnnnnnnnnnnnnnnnnnnnnnnnnnggcacgagaaaggccatggttaagctttttttcccnnnnnnnnnnnnnnnnnnnnnnnnnnnnnnnnnnnnnnnnnnnnnnnnnnnnnnnnnnnnnnnnnnnnnnnnnnccatctctnnnnnnnnnnnnnnnnnnnnnnnnnnnnnnnnnnnnnnnnnnnnnnnnnnnnnnnnnnnnnnnnnnnnnnnnnnnnnnnnnnnnnnnnnnnnnnnnnnnnnnnnnnnnnnnnnnnnnnnnnnnnnnnnnnnnnnnnnnnnnnnnnnnnnnnnnnnnnnnnnnccccaaaaaagaaaaagtaagggccaaatccagttgcacattgcactctgttagaagtatctgctgtgggtttgcccatgttgtactaaacttgct

SEQ ID NO: 30908 - DNA, 454 bp, Homo sapiens
  misc_feature (1)...(454): n = a,t,c or g
acngtnnnnnnnnnnnnnnnnnnnnnnnnnnnnnnnnnnnnnnnnnnnnnnnnnnnnnnnnnnnnnnnnnggcacgagactggagcaagacctgagacgttctggtgaagcaggtatcagtaataccagccgtttaagtagaggctccataagttctacctcagaggttcattcaccaccaaacgtaggactaagacgtagtggacaaattgaaggtgtacggcaaatgcacagcaacgcaccaagaagtgaaatagccacagagcgggatctggtagcttggagtcgaagggtggtagtacccgagctatcagctggtgtagccagtaggcaagaagaatggagaactgcaaagggagaagaagaaataaagacttacagatcagaagagaaaagaaaacacttaactgttccaaaagagaataaaatacccactgtctcaaagaatcatgct

SEQ ID NO: 30909 - DNA, 466 bp, Homo sapiens
  misc_feature (1)...(466): n = a,t,c or g
tnnnnttgggnanctttggataccctnnnnnnnnnnnnnnnnnnnnnnnnnnnnnnnnnnnnnnnnnnnnnnnnnnnnnnnnnnnnnnnnnggcacgagcagagaatgtgaatatggcatagtttataagatctgtgacctaataatcatacttctaagaaatgcgagggaataattttatagtcttgaagtgggaaaatgacccagaagccataaaggagatatattttactacttaaaactaaaaaacaaacagccaacaacaacaaaaaaaccccacaatatttatctaatatgtctaagaaattcagacatagtgaattttttttttttnnnnnnnaatggagtctngntnnnnnnnnnnnnnnnnnnnnnnnnnnnnnnnnnnnnnnnnnnnnnnnnnnnnnnnnnnnnnnnnnnnnnnnnnnnnnnnnnnnnnnnnnnnnnnnnnnnnnnnnnnnnnnnn

SEQ ID NO: 30910 - DNA, 460 bp, Homo sapiens
  misc_feature (1)...(460): n = a,t,c or g
tttgaataccttnnnnnnnnnnnnnnnnnnnnnnnnnnnnnnnnnnnnnnnnnnnnnnnnnnnnnnnnnnnnnnnnnggcacgagcaaaagtttggattgttgtagttgaggctcatatgcacagagaatagtctttaccctcctatttttgaaagaatcagctttcccttccacatccatctctctgcctccagcaacaagttaggcagcttgtgaaatacctacaacatagccagtaacacagaataggagagaatacaggtttggggctcttacaagcttagtgggctggagatttcccaagcttccgagtccaaatcagctggctggggtggtgggtgatgcgtgtaggacacctcctgtgatcccagatgcatagccctccttcgggctgagctatttattcttctggacatgagtccttctcccctttcagatggccaaagcttagtgcagaag

SEQ ID NO: 30911 - DNA, 458 bp, Homo sapiens
  misc_feature (1)...(458): n = a,t,c or g
ananctttggaanaccgntatgacatgattacgaatttaatatnnnnnnnnnnnnnnnnnnnnnnnnnnnnnnnnnnnnnnnnnggcacgagttaactagttagaacacgtttagctgcatttagcagaaagtgctaacttaagcggctgaaatggaagggaacttggtcttacctttttgggaagctgttttccagaagccacccagtttgttgtctcgtggcctaaaattgggtcacatgtctatttttgaatcaattgttggtaaagggaatagaattattgaagaaccagaatttatccctgtannnnnncgtcattcttggtttgtgtttatgctcatagttcacaaaggccaatggacctcccacttcccttccctgttaatagagnctggcttaaaagacactcagtagctatctcctangggaaggcctagctgcactctntgttcactt

SEQ ID NO: 30912 - DNA, 444 bp, Homo sapiens
  misc_feature (1)...(444): n = a,t,c or g
nnnnnnnnnnnnnnnnnnnnnnnnnnnnnnnnnnnnnnnnnnnnnnnnnnnnnnnnnnnnnnnnnnnnnggcacgaggatcaagtcaggaaaagcttccaaataagaaagtcaccattcagatgaaaagcaccatcagccccacagagaaaccactgggggtgacaacgccctcaacccgccaacacatgcaggccgtgggtttggtctcatctcttaagtgcccctacgtggggtacgaggagcctgctgggtcctagtcccagctctattcaagggcccagggaacccataggccctggtagtctagtggcccattgcacagcctggtagcctgaggcccaggcgtgctgggacctgaccctttcccccttgctcctgttcacagtgcaggatttggactgctacacgaccgttgctcagctgtgcccgtttgaaaagccag

SEQ ID NO: 30913 - DNA, 458 bp, Homo sapiens
  misc_feature (1)...(458): n = a,t,c or g
ttnnnnnnctttgannnnnnnnnnnnnnnnnnnnnnnnnnnnnnnnnnnnnnnnnnnnnnnnnnnnnnnnnnnnnnnnnnnnnnnnggcacgagcagaacacgtcttgcagggccacacaaaactgtgtcatccagggaccaggcagcagaaagagagggggaactgggcctatgcctttatgaaaaagagtggtgggagagtaactgggtgagggcatccactaatgggcaggaagtgaaaacacatatgttggaatttgtnnnnnnnnnnnnnnnnnnnnnnnnnnnnnnnnnnnnnnnnnnnnnnnnnnnnnnnnnnnnnnnnnnnnnnnnnnnnnnnnnnnnnnnnnnnnnnnnnntcnnnnnnaaaaaanggggnagngntnagnccaaaaantngnttgggnccntnnttnccccancnnggnggncntaaattgccaaaggccccgnaaac

SEQ ID NO: 30914 - DNA, 449 bp, Homo sapiens
  misc_feature (1)...(449): n = a,t,c or g
accgtnnnnnnnnnnnnnnnnnnnnnnnnnnnnnnnnnnnnnnnnnnnnnnnnnnnnnnnnnnnnnnnnnggcacgagttttttttgttgttttaagaggaaaatgtatttaaaagaaattacaatagtaatagttgctaacattcattgagcattcactatgagttaggcactattttaagtactttacatggataatttcatttaatttttacaacagcttcattaaatacattaatatctgctgttttacaggtaaggaaactgtaaatagtatagataacttttaaatagtattcccaaaattattcctaaaattactcgaggcctgtgttgattactcatgactgaaacattattacagtcttcctctttggtacaacaaagtggagaatttgccccagctttgatgaatttcttttttctcgctagcagcaagttttaagttg

SEQ ID NO: 30915 - DNA, 444 bp, Homo sapiens
  misc_feature (1)...(444): n = a,t,c or g
cnnnnnnnnnnnnnnnnnnnnnnnnnnnnnnnnnnnnnnnnnnnnnnnnnnnnnnnnnnnnnnnnnnnnggcacgagcctctgtcaattccatggaacagccggcacttcaaggaagcagtagattatcacctggtacagactccagctctaacttggggggtgtcaaattggagggtaaaaagtctcccctgtcttccattcttttcagtgctttagattctgacacaaggataacagctttactgcggcgacaggctgacattgagagccgtgcccgcagattacaaaagcgcttacaggttgtgcaagccaagcaggttgagaggcatatacaacatcagctgggtggatttttggagaagactttgagcaaactgccaaacttggaatccttgagaccacggagccagttgatgctgactcgaaaggctgaagctgcctt

SEQ ID NO: 30916 - DNA, 439 bp, Homo sapiens
  misc_feature (1)...(439): n = a,t,c or g
ttnnnnnnnnnnnnnnnnnnnnnnnnnnnnnnnnnnnnnnnnnnnnnnnnnnnnnnnnnnnnnnnnnnnnnnnnnggcacgagctctcgcagacccaggagtaaagggattgggcaaggcacgcagaggtagccggttccgtcaggaagtgcttccggagaaggcagtacctccatggggtgnnnnnnnnnnnnnnnnnnnnnnnnnnnnnnnnnnnnnnnnnnnnnnnnngctnacantgcnccactatgctccanggngnncgactgannatgactccatctcaaaaaataaaatatnaagatctcccacagatggggtccctattncggtgggggctctcctgacttgangggctgccttgtttttanagctgatgccttctncanactgngnancctntnctataccanatgtnantgccccnncccannnacat

SEQ ID NO: 30917 - DNA, 457 bp, Homo sapiens
  misc_feature (1)...(457): n = a,t,c or g
accttgnngacngctatgacnnnnnnnnnnnnnnnnnnnnnnnnnnnnnnnnnnnnnnnnnnnnnnnnnnnnnnnnnnggcacgaggcgtgggggggtggggggcaccctaccaaagcaggtgagtgccctcaggagactgctctctgctctccaacctatgaggacatagtgagaaactggctgcctgcaagccaggagggagcccccccccccagccccggcagacagcaaagctgctggcacatggatcttggacatcaagtttccaaaacactgagaagggaatgtctgtggttttaggccacccagtccgtggtgttttgttatggcagcccaaactgaccagtacatctactattcattcattcaccaaatttttattgagtgcccaataatgaaagcatttttccttctttaaaaattgnatttcttctgtgaacttgngtagggaagta

SEQ ID NO: 30918 - DNA, 463 bp, Homo sapiens
  misc_feature (1)...(463): n = a,t,c or g
ggananctttgananccgnnnnnnnnnnnnnnnnnnnnnnnnnnnnnnnnnnnnnnnnnnnnnnnnnnnnnnnnnnnnnnnnnnggcacgaggaactcaggattttccaaatctctcagagctcaatgtgtcataaactctacttcgttttatacccaattacattgctgaaccactcttgtgagcataatgagtgaggagctcttgctctttgtaatcaatgccccctcttggtatagggacattctggctctggttgaatacagggattcctgtatgtgacatgcagggcttccctgcagggaaacactgtttccttctgaacataatatctaaccttgtagagtccagggcaacagaaaagcannnnnnnagaaatctctctggtttctttgcagtaccatgtaatttcagggcctgtacctcccagcaggtaggtcattacattgatatagaggttggg

SEQ ID NO: 30919 - DNA, 450 bp, Homo sapiens
  misc_feature (1)...(450): n = a,t,c or g
atttggannnnnnnnnnnnnnnnnnnnnnnnnnnnnnnnnnnnnnnnnnnnnnnnnnnnnnnnnnnnnnnnnnnnnnnnggcacgagttccaccaaaattactcttgctgagtttttctccagacctctggtaccatttagtggaaagcaaagtgatcatgcgttttcaggacaagtcaggactctgcactcttatcctgatcttctctgtcatagcttttggaagtcattcagcttactcctgcctcttcacctccatggctcaaattctttacctagaatataggtggacactatctgcctctcagagaatacatctcaagttgaaggctctttaaagtttatgaaatattttcccctactttatgactgcctcctagtatcatgatagttctggatttggggacatatggggtgagtctatgtgagcgttctctcatttggggtgca

SEQ ID NO: 30920 - DNA, 444 bp, Homo sapiens
  misc_feature (1)...(444): n = a,t,c or g
atcnnnnnnnnnnnnnnnnnnnnnnnnnnnnnnnnnnnnnnnnnnnnnnnnnnnnnnnnnnnnnnnnnnnggcacgagcttaaccaaaataatatttcctagccattcaggggaactgtgagttttctgttgtccttcctttcttcctaccttctccctttcccttgttggagcttgtttgcttgctttgtggctgttaggatattaatcaggcaatcttgtattacccagcaatatttaattttaacgtagcattgttcatatttaaattaatcactggtgaacttacatgttcattacaggtagcctcagagaatatgcttttttaaaaaatatttttttaattgtagtaaaacatacataacaaaattttactcttttaacctatgtatgtatgtgtgtaagtaggtgggtaggtagagatggagtcttgctgtgcaccca

SEQ ID NO: 30921 - DNA, 445 bp, Homo sapiens
  misc_feature (1)...(445): n = a,t,c or g
atncgnnnnnnnnnnnnnnnnnnnnnnnnnnnnnnnnnnnnnnnnnnnnnnnnnnnnnnnnnnnnnnnnnnggcacgagggaagaattaattccatggggaaggggttcaactgttagtgacctttcagtagataactactttaaaaatgagaatacttcaaattttaaatggtgggaagatttacaacctgaccctcaacattcacttatctccctcttctaccacactacgtcctggaacttcattacaagcgccgaaaaatgggtnnnnnnnnnnnnnnnnnnnnnnnnnnnnnnnnnnnnnnnnnnnnnnnnnnnnnnnnnnnnnnnnnnnnnnnnnnnnnnnnnnnnnnnnnnnnnnnnnnnnnnnnnnnnnnnnnnnnnnnnnnnnnnnnnnnnnnnnnnnnnnnnnnnnnnnnnnnnnnnnnnnnnnnnnnnnnnnnt

SEQ ID NO: 30922 - DNA, 418 bp, Homo sapiens
  misc_feature (1)...(418): n = a,t,c or g
ttnnnnnnnnnnnnnnnnnnnnnnnnnnnnnnnnnnnnnnnnnnnnnnnnnnnnnnnnnnnnnnnnnnggcacgaggaagattaactgcccagaggcataaaaaatggggtggtgggggcggtgatggaaaagtgctatgccttcactgtacctttgtcaaaacttgttgaactgtatacttcaaatgggtgtgtgttttattgaaggtaaatttgaccccaataacatttatttttaaaaattaagagcaaacagaaaaagcttagactaggaatctttaatttgaactataattctgtctactgtttccactgaggtggtctttcagcaaatgactcagtagttttaagcctcagtttcttcagctgtaaagtgggaataacaacaggcaccccatggtgttgcctatgaaatgca

SEQ ID NO: 30923 - DNA, 420 bp, Homo sapiens
  misc_feature (1)...(420): n = a,t,c or g
ganaccctctatgacatgattacgaatttaatacnnnnnnnnnnnnnnnnnnnnnnnnnnnnnnnnnnnnnnnnnggcacgagcggcacgagattagttattacgactgctattatacaaatgtaattgcttggggtttacttagaatttgtatatagtaatacttgaatggctttcaaagaatgcttgattttattctggttttgctcttaattggaaagtaagttcaccgtgccttaggtctgaggtattagtacattaatagtgtgattattcctactttgtctttgttttatactggtgacttttttttttgaaaagcatttattaaagaataaatataaattgaaaaggggaaatggccaaaattntaggactttanaaaattgaatgcncttttctacatttttctaacatctg

SEQ ID NO: 30924 - DNA, 457 bp, Homo sapiens
  misc_feature (1)...(457): n = a,t,c or g
nnnnnnnnnnnnnnnnnnnnnnnnnnnnnnnnnnnnnnnnnnnnnnnnnnnnnnnnnnnnnnnnnnnnggcacgagagcgggtccagattgcagaaggctatagaagccaagctggcagatagaagaatcgctattagtgtgggaggacagagtaaattatagcaggttctggactagaaatacaaccatctgccccagacagagaggaacaccctacttcagctaaataccaggagctattgtaggagcctctaggttcaacagggcacaggtctctgacctgtggcgcggggagacagcagaagaaatcagaagacactcatcacaggaaccttgtttaaaaactattcagctgagttcgggttgtgttgttaaaatctctagcgcgcaaaaagaggttatcccccttcaagcagttctccatgttaggggcagaggcagtgataactggtaaag

SEQ ID NO: 30925 - DNA, 456 bp, Homo sapiens
  misc_feature (1)...(456): n = a,t,c or g
nnnnnnnnnnnnnnnnnnnnnnnnnnnnnnnnnnnnnnnnnnnnnnnnnnnnnnnnnnnnnnnnnnnnnggcacgaggctgatggcagcaaaacccaggacctattccgcagggtgcgctccatcctgaataaactgacaccccagatgttccagcagctgatgaagcaagtgacgcagctggccatcgacaccgaggaacgcctcaaaggggtcattgacctcatttttgagaaggccatttcagagcccaacttctctgtggcctatgccaacatgtgccgctgcctcatggcgctgaaagtgcccactacggaaaagccaacagtgactgtgaacttccgaaagctgttgttgaatcgatgtcagaaggagtttgagaaagacaaagatgatgatgaggtttttgagaagaagcaaaaagagatggatgaagctgctacggcagaggaacgag

SEQ ID NO: 30926 - DNA, 458 bp, Homo sapiens
  misc_feature (1)...(458): n = a,t,c or g
ccnnnnnnnnnnnnnnnnnnnnnnnnnnnnnnnnnnnnnnnnnnnnnnnnnnnnnnnnnnnnnnnnnnnggcacgagcaatgtaatttataagatagactgataccaacagctaataaatnnnnnnnnnnnnnnnnnnnnnnnnnnnnnnnnnnnnnnnnnnnnnnnnnnnnnnnnnnnnntctgaaaatatgannnnnnnnnnnnnnnnnnnnnnnnnnnnnnnnnnnnnnnnnnnnnnnnnnnnnnnnnnnnnnnnnnnnnnnnnnnnnnnnnnnnnnntacagacacttttttattgacctcatctaggcagccnnnnnnnnnnnnnnnnnnnnnnnnnnnnnnnnnnnnnnnnnnnnnnnnnnnnnnnnnnnnnnnnnnnnnnnnnnnnnnnnnnnnnnnnnnnnnnnnnnnnnnnnnnnnnnnnnnnnnnnntcggcctctgagcatctggga

SEQ ID NO: 30927 - DNA, 451 bp, Homo sapiens
  misc_feature (1)...(451): n = a,t,c or g
nnnnnnnnnnnnnnnnnnnnnnnnnnnnnnnnnnnnnnnnnnnnnnnnnnnnnnnnnnnnnnggcacgagggagttaatagtctattaaggaagagaggcagtaaacaaggatttcagtatgtaattataatctgtaatatgctataaaagaaattaatagaatgggaatagagggtaacaaaggactttatttagattaagtggctaagcaaggttaccttttttatgttagattctcgagaaaaagggctcgacatttaagcaaaaacctaacagagccagccatacaaagattgggtatgagaatgttctgaagtgagattgttactatgctttctataccgagcaaagccatctagcagtagatctagaactgatcatactagaaacctctttaacactgttgattttcagattttacttcagcctttatctgattagtattaacac

SEQ ID NO: 30928 - DNA, 456 bp, Homo sapiens
  misc_feature (1)...(456): n = a,t,c or g
ctnnnnnnnnnnnnnnnnnnnnnnnnnnnnnnnnnnnnnnnnnnnnnnnnnnnnnnnnnnnnnnnnnggcacgagagactgagccaggctccactaaaggaagagatatgatgttcagtaacttagagcagagttatgcaactggagaataggaatctgctattgtgcctgtaggtacatttagtatcaggcaactaacaggtaattcatagtgcctataataaagatattcatataacaaaaagtgtgaaggtaggctatttcaggttaggtgcaatagcttaaccatggtatcaaaggctagccccctgccctccttctagtccccctccctcacccccaccccactttcttagctcactcttttttcccatttctcactcccatttccttccctcacaatattgggcttaatgcactgtggttcttagagtttagatgtcaacagtagaaaga

SEQ ID NO: 30929 - DNA, 455 bp, Homo sapiens
  misc_feature (1)...(455): n = a,t,c or g
ntnnnnnnnnnnnnnnnnnnnnnnnnnnnnnnnnnnnnnnnnnnnnnnnnnnnnnnnnnnnnnnnnnggcacgagaatgaaaactaaattaaaaatttcaagaattcacagatacccaaaaatacattcatagatctctgttagagacttactgtgttacatttttggtgtaatgcttgttaggacctggagctcacctccccagtcctaatctgtcctgagcctccatgttggttgctggttggcagatttctttctcttcctgttgagcagcctcctagaggttgctgttgcagggaggtggatgttcatgtgcactgtggtgaacccagcgttcatttcttcttgctgtgctttccccaggccttgcttgtcattgcccagcacaagtggcctattgtctgtaggaacacattggagatgtgtgcaggccccagacagaccctttgtgccct

SEQ ID NO: 30930 - DNA, 460 bp, Homo sapiens
  misc_feature (1)...(460): n = a,t,c or g
naacctnnnnnnnnnnnnnnnnnnnnnnnnnnnnnnnnnnnnnnnnnnnnnnnnnnnnnnnnnnnnnnnnnnggcacgaggaaccatgaaatatttcagctgaaagggacctggaggccatcaagcccaactccctgtttactgataaggaagctggtcccagagggagcaggtcgtttgtcaggaccatagtccataggcaaggaaacccagaactcaagagtggctgtttacttctggttacctgttcagccagggccccagccacccatccccacctccagtggctttcttcgtgtgctggacttgcagatgtttttgccctactgcaatttttgtttgtttgtttgtttcttggttggtttttcaagtttgcccttgcttgttttaatgtattatggatggcttatgtgagtaacctatattgtctcattggactaagtgctacattgtagacaag

SEQ ID NO: 30931 - DNA, 468 bp, Homo sapiens
  misc_feature (1)...(468): n = a,t,c or g
ttgnnnnnnttggaanaccgnnnnnnnnnnnnnnnnnnnnnnnnnnnnnnnnnnnnnnnnnnnnnnnnnnnnnnnnnnnnnnnnnnggcacgagcgtttgctcagggtttttgagaaatcccaatactgtaaagatagacttacctgattctttcccagccatcctcctgagagtgcctcggcacgtggctgagactggcaggatctgagcacaccccactcccacaccccacaaaggtgtccacggccgagatactcactgtatcccacggttgtgtttagactgaagtaggagcaaagctttaagatgaaaaaataggaattttacctgttaattgcaatggtggccatgtagttggagaggccctcaagtgtccacacatcagactctcctgtcacgtgtggcgtgttcttcacctcaaagcccgggagcgttggggaggtggtcaggtgactgcacggagctga

SEQ ID NO: 30932 - DNA, 452 bp, Homo sapiens
  misc_feature (1)...(452): n = a,t,c or g
ccnnnnnnnnnnnnnnnnnnnnnnnnnnnnnnnnnnnnnnnnnnnnnnnnnnnnnnnnnnnnnnnnnnnnggcacgagcagaaaggttagacattagagaagagtgttaatattaccaggatctcacttacaccctgactgaacagctcgagggcttggctgagccacttgttcatctctagggatccttgtccatcagcccctttcccagggacatgttgcaccctggaggctgctgcgaggtgctggcacctctcctgaaggaaggccacctgatatcctagccagtgacagaggcctgcaccaactctgataccacagtgcccagagactgaggaaactggggaaatgaaaagggttggtttctacctttacaaaatgaccacttctgtttctttaacttagaaaattatacaggaatcagagtaggtttctatctgtgcctgacagtt

SEQ ID NO: 30933 - DNA, 457 bp, Homo sapiens
  misc_feature (1)...(457): n = a,t,c or g
acctnnnnnnnnnnnnnnnnnnnnnnnnnnnnnnnnnnnnnnnnnnnnnnnnnnnnnnnnnnnnnnnnggcacgagcaggttctgaaaaaaggtgttgtggatgaacaagcaaattctgcagctttaaaggagcaactgaaaatgaaggatcagtcattgagaaaactacaacaggaaatggacagtttgacatttcgaaatctgcagcttgccaagagggtagaactacttcaagatgaactagctctaagtgaaccacgaggcaagaaaaacaagaaaagtggagaatcttcttctcagttgagtcaagagcagaagagtgtctttgatgaagatctgcaaaagaagatagaagagaatgaacggttgcatatacaattttttgaagctgatgagcagcacaagcatgtggaagcagagctgaggagtcgactggccactctggagacagaagca

SEQ ID NO: 30934 - DNA, 456 bp, Homo sapiens
  misc_feature (1)...(456): n = a,t,c or g
nnaccntnnnnnnnnnnnnnnnnnnnnnnnnnnnnnnnnnnnnnnnnnnnnnnnnnnnnnnnnnnnnnnnnnggcacgaggatgacttacagtatatgagaggctgtccataggtcatnnnnnnnnnnnnnnnnnnnnnnnnnnnnnnnnnnnnnnnnnnnnnnnnnnnnnnnnnncataggatgtcctggaaccagtcccccactggtactgagggacagctatacttaaagactaatatatatgctctgttttcctttacagtacttgactctacacatttcctatagctttgaagacttgtcttccttgaagcagactaaaagggggacagatgggaggatgggaagaaccacacttccataatcttagaattattccttccttgctatgctgacaaagtgagaaaacaaatataaatnatcttanagcccagcatttaagaccaagttggtg

SEQ ID NO: 30935 - DNA, 459 bp, Homo sapiens
  misc_feature (1)...(459): n = a,t,c or g
ccnnnnnnnnnnnnnnnnnnnnnnnnnnnnnnnnnnnnnnnnnnnnnnnnnnnnnnnnnnnnnnnnnnggcacgagggaacgtctcttggggtgtcggaattcaaaacggacctggaggatgttgatctccaagaacatgccctggcggcggctgcagggcatttccttcgggatgtattcggctgaagagctcaagaaattaagtgttaaatccattacgaaccctcgatacctggacagcctggggaacccatcggcaaacggcctgtacgatttagctttgggccctgcagattccaaagaggtgtgctccacctgcgtgcaggacttcagcaactgttctgggcacctgggccacattgagctcccactcacagtgtataaccctctcctcttcgataagctgtacctgctgcttcggggctcttgtttaaactgccacatgctgacttgtcccc

SEQ ID NO: 30936 - DNA, 443 bp, Homo sapiens
  misc_feature (1)...(443): n = a,t,c or g
nnnnnnnnnnnnnnnnnnnnnnnnnnnnnnnnnnnnnnnnnnnnnnnnnnnnnnnnnnnnnnnnnnnnnnnnggcacgagggtctggaaggcaccaagtacagtaatgtgatgaaactccttcggatggccctcagtggacagcaggtgaggcagggacacgggttggattgttccctggagcccctcattgatcctttgaacttacatttcctggcaggcactgagctcaatattgagtatacaaaggtgaatgaaacatgatcactcccctcatttagtcaatcaacagacactattgagtacctactatgtgcaagcattgtgttaggtacagtgaatacagtatagaattaaacacacatacataatctctgcctccatggggtttgcagtttattggggataacagacctagcaacagcttacttaatatgggaaaat

SEQ ID NO: 30937 - DNA, 439 bp, Homo sapiens
  misc_feature (1)...(439): n = a,t,c or g
nacnnnnnnnnnnnnnnnnnnnnnnnnnnnnnnnnnnnnnnnnnnnnnnnnnnnnnnnnnnnnnnnnnnnnnggcacgaggggaaaaaagtagttgtgcagttatttgtcagtgaaatgtcctagccgctgttggcattcacttgtgcatctggctgcatccagctgggggcctctaaactgaagtaactaattacttgcctaagcccagaggagctacgataaacttcatcaaataaacagagcaatgaagcccagaggagctacaataaacttcataaaataaacagagcaatgatacatgtagcagtttatcacctttggtgcctttcttcaggttaagtggtgattctgtttttagtatagactaggcagagagaagaggcacagacaggacatggagtttggactgtttctgttttctttttctgctctgttct

SEQ ID NO: 30938 - DNA, 434 bp, Homo sapiens
  misc_feature (1)...(434): n = a,t,c or g
nnnnnnnnnnnnnnnnnnnnnnnnnnnnnnnnnnnnnnnnnnnnnnnnnnnnnnnnnnnnnnnnnnnggcacgagggagtgaagctagaaacagaaaacccatgcagggcctcggattcccacaaatgtgacaagaggtatagggagtgagtcgcagcgctttgctcgtgaccctgggatcagagcacccatcaggcttccattactgtgggctccctaagaagaccatggagagcttggggactcccccaggaaggccgtgaagctggggattccccctaggaaagccatgaggaagctggggactccccaagaaggccatgaggaagccagaaattggaggtggtaggaagtggtactgatcaatgatggccagcaggactcatctcctgcctaactggacaggaagcctggcacccacttctgtcttcccc

SEQ ID NO: 30939 - DNA, 413 bp, Homo sapiens
  misc_feature (1)...(413): n = a,t,c or g
caccatnnnnnnnnnnnnnnnnnnnnnnnnnnnnnnnnnnnnnnnnnnnnnnnnnnnnnnnnnnnnnnnnnnggcacgagctnnnnnnnnnnnnnnnnnnnnnnnnnnnnnnnnnnnnnnnnnnnnnnnnnnnnnnnnnnnnnnnnnnnnnnnnnnnnnnnnnnnnnnnnnnnnnnnnnnnnnnnnnnnnnnnnnnncctcccaacacttggtctttctggtaaccagcccccatcctgatgctatctggaggccccaccctaagttaccttgctagcataaactcaggtgttatcaaaaggnnnnnnnnnnnnnnnnnnnnnnnnnnnnnnnnnnnnnnnnnnnnnnnnnnnnnnnnnnnnnnnnnnnnnnnnnnnnnnnnnnnnnnnnnnnnnnnnnnnnnnnnnnggggg

SEQ ID NO: 30940 - DNA, 417 bp, Homo sapiens
  misc_feature (1)...(417): n = a,t,c or g
caccntnnnnnnnnnnnnnnnnnnnnnnnnnnnnnnnnnnnnnnnnnnnnnnnnnnnnnnnnnnnnnnnnnnggcacgagaacaacgcagcaacaataaaacctctaacatgaaattaaatgtaagaacaacttagggaaaattttcttcaatatacatgataagcaaatagttaatatgctagatataaaaagagctcatacaagtcaatcagaaaaagtgatcattactagaaaacatggagcaaaagtcagatcacaagagagaataaccaatacattaagcctgtgaaaaactagtattactggtacttagaaaaatacccactaatacaaaaacgtacatttgtgataaagaacggcaaatatcaaaatggctaataacacctagtattatcaatgaaaaccttggaaatgg

SEQ ID NO: 30941 - DNA, 411 bp, Homo sapiens
  misc_feature (1)...(411): n = a,t,c or g
ccccntngacnactnnnnnnnnnnnnnnnnnnnnnnnnnnnnnnnnnnnnnnnnnnnnnnnnnnnnnnnnnnnnnnnnnnnggcacgagaaaaaacaataggatgtttgattataggccctgtaaactgagttaagttttgtgtcttatgtcaacatgcatacattttaaaagcttttattttctgggatttctgtgaggttattggattttgaatttcaggtctagaccatgatggcttgttttttctacatagtttgacaagaatgtcagtgaaaagaaatgtggatttatataaaatgaaaagctgattgtaggattaggagataaggtgctatgacggagtgagagcctagttagccatgcagaagaaagctttgcccaagacttttgctttgnggcactttatcca

SEQ ID NO: 30942 - DNA, 405 bp, Homo sapiens
  misc_feature (1)...(405): n = a,t,c or g
nacnnnnnnnnnnnnnnnnnnnnnnnnnnnnnnnnnnnnnnnnnnnnnnnnnnnnnnnnnnnnnnnnnnnnnggcacgagnnnnnnnnnnnnnnnnnnnnnnnnnnnnnnnnnnnnnnnnnnnnnnnnnnnnnnnnnnnnnnnnnnnnnnnnnnnnnnnnnnnnnnnnnnnnnnnnnnnnnnnnnnnnnnnnnnnnnnnnnntgattttgcaggttgttctaaagtgcggagtttctccttttaggcttcagtgctgagggcggcctgctgtccgtccctgcggcagactgggccctgtcccaccttcccgtcactcctcgatgtcacatcagagtgctctctcctgggtgggaacccgcgcacggaggaaacactttaccagagtaaacgagattataacttgt

SEQ ID NO: 30943 - DNA, 424 bp, Homo sapiens
  misc_feature (1)...(424): n = a,t,c or g
tcccnttgcccccnatgaacaccttnnnnnnnnnnnnnnnnnnnnnnnnnnnnnnnnnnnnnnnnnnnnnnnnnnnnnnnnnnnnnnnnnnggcacgagcttccatttcagtctgaatcaaaaccaccatcctcactgtggccaacacagcccaaaagattggcatctccatttcttcccagactttcctctcactaccttcctggttgctccttcggctccagccacgctgcctccttgctgttaggcacactccaagcccgggcctacctcagggccatccatctccctcctctgcctagccactcttgcccctgattttcttgcccacatgttacccctcagtgaggcctcagcttcttctccagaggngnagggccccagcactgcctgatatctttccccacttgacttgcatctctgg

SEQ ID NO: 30944 - DNA, 410 bp, Homo sapiens
  misc_feature (1)...(410): n = a,t,c or g
accntnnnnnnnnnnnnnnnnnnnnnnnnnnnnnnnnnnnnnnnnnnnnnnnnnnnnnnnnnnnnnnnnnnggcacgaggtgggtatttttctttgatgttgtaccaggactcagtaagtaaattttaaaagattagttgcaatgtataatctgaaactctatcagtgaactttgatactttgttacatcttctcagacttgcacactttgttacatcaaaatgttacatttggaatgaatatttaccccatgcatggttttgtaacatcctttgttcctcatttggaaaataatagttcccggaattatgcagatcttccaaatgttaacatttcattatgcaatatgaaagaattggaatcattaacatcaccaacaagctcatcagagangttttcaagtattgaga

SEQ ID NO: 30945 - DNA, 421 bp, Homo sapiens
  misc_feature (1)...(421): n = a,t,c or g
ttgncccccntngannnnnnnnnnnnnnnnnnnnnnnnnnnnnnnnnnnnnnnnnnnnnnnnnnnnnnnnnnnnnnnnnnnnnnnnggcacgagaatgagtgaatgaatgggaaattgatgttgagatgccgtttttaaagagtaagtaccttatcacacatagctaaagagaccaactgacacatccaccgtactagtgggaaatcttagatctataagtttagaaacatttctatcttccaagttaccacaggagacagtgttactgattgtttcatgattataaacaggacccccatcttcccacctcctatgggaattttcttattgttcttccagtttccactaaccagtctcctcactgcccttctagcctcagatcatcccccaatcccaaagcccaggccatatatgttagcg

SEQ ID NO: 30946 - DNA, 412 bp, Homo sapiens
  misc_feature (1)...(412): n = a,t,c or g
cnnnnnnnnnnnnnnnnnnnnnnnnnnnnnnnnnnnnnnnnnnnnnnnnnnnnnnnnnnnnnnnnnnnnnnggcacgaggatagagaataagaactctcattatttgaggagagtggggatgagtcagggtattgggcatggattagggcaggaggaacggaagggatgtctagatctttctgaaggcacattcttttgacttccatgtttgttgctgtgagctggccaagtttatccttttttttgcaagaaataaacagaaaccatggagacccgtgtgaccagttactacctgtagtttttttccatacttaagtccagtaagtatctgaatttctgtgttgaaagagagtatgaaacctcatctccttttcatatgcatttggnagttgccttntggctgcnaagaac

SEQ ID NO: 30947 - DNA, 412 bp, Homo sapiens
  misc_feature (1)...(412): n = a,t,c or g
caccatnnnnnnnnnnnnnnnnnnnnnnnnnnnnnnnnnnnnnnnnnnnnnnnnnnnnnnnnnnnnnnnnnnggcacgaggcctgtcgctcctcagggacctgaattctgtgtttggggtatttaatttcagaggtttccctactcctgttttttctgtggctctaaactgggctagtacaggtacagatgtcttagcagattcctgttctatttggacacaaaaatgtttgccatgtaatgaactggaagttttgtttatttcaaaaaatacttagagaactgtgctggctgctggggatatagtagcgagcagagggtaacaatctccgcctttctgcagtgtgcagtctagtggcctgacagacatgagacaactggtgatagtgaagtaaggtgaatctttattatga

SEQ ID NO: 30948 - DNA, 414 bp, Homo sapiens
  misc_feature (1)...(414): n = a,t,c or g
acnttnnnnnnnnnnnnnnnnnnnnnnnnnnnnnnnnnnnnnnnnnnnnnnnnnnnnnnnnnnnnnnnnnnggcacgagcggcacgagcggcacgagcctggagggcttgttaaaacacagactcctggccccagcccacagttcctgattcagcaggtctgaggtggggcctgagacattgcatttctagcaagctcccagatgctgcacttgtggctcagggaccacaagtgaatggaagtactaggtaaggtggaagaaaagctctttggaactaaagagatcaaggaccaggccaggcccggaggcttacgcatgtgggaccatgccaggttgccagcaattagagactaagagggcagtgtgacccccacacatctcactggggccgggcgcanatggcttatgcctgg

SEQ ID NO: 30949 - DNA, 442 bp, Homo sapiens
  misc_feature (1)...(442): n = a,t,c or g
nnnnnnnnnnnnnnnnnnnnnnnnnnnnnnnnnnnnnnnnnnnnnnnnnnnnnnnnnnnnnnnnnnnnnnnnggcacgagctgcgacctgctcgcagtcttgtcttcccttggttctcccctgggggctcaggattacgaggcctgaagctcctagaggctaaatgccagggggatggagtgagctacgaggaaaccactattccccgacccagcgcctaccacaatctgtttggattaccactgattagtcgtcgagatgctgaggtggtactgacgagtcgtgagcttgacagcctggccttgaaccagtccacggggctgcctacccttactctaccccgaggaacgacctgcttaccccctgccttactcccttacctggaacagttccggcggattgtattctggttgggggatgaccttcggtcctgggaagccgc

SEQ ID NO: 30950 - DNA, 438 bp, Homo sapiens
  misc_feature (1)...(438): n = a,t,c or g
nancngnnnnnnnnnnnnnnnnnnnnnnnnnnnnnnnnnnnnnnnnnnnnnnnnnnnnnnnnnnnnnnnnnnggcacgagctggtattatggcccctgtgggaagaggatgaagcaatttccagaagtgatcaaggtaatgtagctttttttaaaggactgctttcttgggctcagtggactcctttccactgcccaagactccgttcttgggctcagtgacaacaggctggcattgtctgctctgggcctgttctgcttatgcctttgctggccaaagacatggtaggatccaactttattaatgttactttacttcttcctcttagtacctgagccgcaacgtggtacacagtgtccgccgagagcacttcagcttcagtccccgtatgcctgttggagatttctttgaagaaagagacacgccagaggtgcagac

SEQ ID NO: 30951 - DNA, 411 bp, Homo sapiens
  misc_feature (1)...(411): n = a,t,c or g
nnnnnnnnnnnnnnnnnnnnnnnnnnnnnnnnnnnnnnnnnnnnnnnnnnnnnnnnnnnnnnnnnnggcacgaggacacatttaatgaacacaattttattttttttctgtaactgtgcttgttgaatgtcaatcatatttaaagggaatgactttgaagtaaaaccttttttcttgctactgaaaaaaatggagttgttttgggtggtaaagtgttaaggaatagggacagctggtcacacaaggaactcttgaaggccacatgtgaaaacctgtcacttgcacagaggccagtcccactaaggtgaccagagtgggctccaagcacaaactgccattggctatagatgggacnnnnnnnnnnnnnnnnnnnnnnnnnnnnnnnnnnnnnnnnnnnnnnnnnnnnnntga

SEQ ID NO: 30952 - DNA, 412 bp, Homo sapiens
  misc_feature (1)...(412): n = a,t,c or g
nacnnnnnnnnnnnnnnnnnnnnnnnnnnnnnnnnnnnnnnnnnnnnnnnnnnnnnnnnnnnnnnnnnnnnnggcacgagatgattcgtgttttcattggtgtcaaaatacaaaagccaaagttctggctatgaattgttaacttggaagaaatactaactgccaccacttattaagtgcctactgtgtgccaggctctgaactaggtgcttcatatacattatcctaaattatctcaacatatgaggtaggtgttttaatttttattttatagaacttggtgtgtttgactgttaagctatggggctagagagagggtttgatcccaggtccctctgtgcttttgctgctgagccacacaacctctcatttcaaaaacactttcaaaatgctaacatattctaattcactc

SEQ ID NO: 30953 - DNA, 418 bp, Homo sapiens
  misc_feature (1)...(418): n = a,t,c or g
ttnccccnttgnnnnnnnnnnnnnnnnnnnnnnnnnnnnnnnnnnnnnnnnnnnnnnnnnnnnnnnnnnnnnnnnnnnnnnnnnggcacgagcggcacgagagagtgaatacgaaaaaagaaaacagcaacaaaaagacactaccataccaggactggcgaggatggggcaatactgtaagtgaaaaaaacagatgaaagtattatttacctactagatgaagatatgaatgatttttttcccctcctggttatgaaagtaagacaagccataaatgttattaatgtaggaaaccaacaagaataagtatttccacttttggctggtctttctctgtatttgtgtggtagacaacaaacagcctaagaattgaaattcatagttcagaaaaatattagctgttataggagcctgaatt

SEQ ID NO: 30954 - DNA, 410 bp, Homo sapiens
  misc_feature (1)...(410): n = a,t,c or g
nactnnnnnnnnnnnnnnnnnnnnnnnnnnnnnnnnnnnnnnnnnnnnnnnnnnnnnnnnnnnnnnnnnnnggcacgagcaaagaacacaacacgttgatttggaagactgcgtggtacctatctgtcaagacctagatatgttcaaatatttaatagtaaggttttaagaagtttaaacttagaaaagttttagtccaaatattcattatacagatgagaagaaaagcttgagatggtaaactaccccctgatggcaaagctgaagtgtgaacccacatttctgatccctgttccattctgttttcttctatgccatggtgatctctttaaataaactagaagaaagattcatggtgcttacgaaagccttcattctacttgaggacccttaagataattttggcaatt

SEQ ID NO: 30955 - DNA, 409 bp, Homo sapiens
  misc_feature (1)...(409): n = a,t,c or g
actnnnnnnnnnnnnnnnnnnnnnnnnnnnnnnnnnnnnnnnnnnnnnnnnnnnnnnnnnnnnnnnnnnnggcacgagggtttctgtcagaagccataaattagctgtatctctttctccaacagtgcggctgaaacttagagtttataaacatagcataatgagttgtgatgcagccggtcattggataaataattcattaccaatggaaaaggtgaaagtatatggaaattggtgattgtgtaactggctgaacactgcacccaaaagtgtgatgggcaataagttcatttcaactgagagagcattcactagtacccttggacccagtatttggactctttgcagttgcatccttatttgcacgatagagttaaccatcaaaactaaatgaaacaattcaagtaaa

SEQ ID NO: 30956 - DNA, 406 bp, Homo sapiens
  misc_feature (1)...(406): n = a,t,c or g
nnnnnnnnnnnnnnnnnnnnnnnnnnnnnnnnnnnnnnnnnnnnnnnnnnnnnnnnnnnnnnnnnnnggcacgagggaagaattaattatgtcacagtatgggaatacgaaaaacatgtgaacacctcctctcaacaatgaacctaggtttatttcattttaaccttcctactcaagatgcttttcacaataaaccctaaaggtaaactctgtcctcccatccagagctagtaagaacagtaaagcaaaggagagcatctccctttgaactaataggattttcaccaaatgaaaaaaaaaatcagccagtgcccaacccctagagtagcagatgactntcataccaggaagtacattcattcaagcacccagcccagtcccagctatacataaatggatcttttaa

SEQ ID NO: 30957 - DNA, 411 bp, Homo sapiens
  misc_feature (1)...(411): n = a,t,c or g
nacnnnnnnnnnnnnnnnnnnnnnnnnnnnnnnnnnnnnnnnnnnnnnnnnnnnnnnnnnnnnnnnnnnnnnggcacgagtgtttggatataaatgttcctctctctcttctaattttaagcccctgctgctttgttgcagtgaaatgatggagccttaattataggccctggccccctgaggtagaagcctgggttgagtaaggcccacttagccctctcccagtctctacccattaccacggaaggaagccagagaccatggactctgaccctcttctcagacaacaataggaattgtcttgcagggactctctgctggttgttccacggcactcagcaagttgctggcctcaatacatgttaaatagccatgataaagctaatgtctctaggccttanaaactagcct

SEQ ID NO: 30958 - DNA, 351 bp, Homo sapiens
  misc_feature (1)...(351): n = a,t,c or g
tttgnnnaacnnnnnnnnnnnnnnnnnnnnnnnnnnnnnnnnnnnnnnnnnnnnnnnnnnnnnnnnnnnnnnnnnnnnnggcacgagggttatacagatacaatattagatgtacggtctcagcgggtaaggtcattacttggactatctaattcagaaccaaatggatcagtagaaacaaagaatttagaacagatcctgaatggaggtgaatctcctaagcaaaagggacaagaaataaaaaggtatgatttatacttaacatagtttatataatggatattatggatattgttattgttaatctctttagctccttgttactgccattaagaactttttttttttttt

SEQ ID NO: 30959 - DNA, 406 bp, Homo sapiens
  misc_feature (1)...(406): n = a,t,c or g
tacnnnnnnnnnnnnnnnnnnnnnnnnnnnnnnnnnnnnnnnnnnnnnnnnnnnnnnnnnnnnnnnnnnnnnnggcacgagatcgtggcttccaacacactcggtttccctccctcctttctgatcactctttctcagaatcattgctgcttttcctcttcttgccaccctctgttgtctggagacccatgacttattccttggtcctcttctctgtttcattcccaaccaacttagtgtctttacatactagctatatgccagcaactctcaaatacttatcttcagcccagacctctctcctaaactccaggtttatatatcaaactgtcaagccacatgtcctctcagataggtaatagacatgtaagtcttgacatgtccaaatgaactcctgctcttcctt

SEQ ID NO: 30960 - DNA, 409 bp, Homo sapiens
  misc_feature (1)...(409): n = a,t,c or g
ttgnnnacnnnnnnnnnnnnnnnnnnnnnnnnnnnnnnnnnnnnnnnnnnnnnnnnnnnnnnnnnnnnnnnnnnnnnggcacgagttttatcaatctctctatcttgcctctcataaactcctttattatttctactctcttcttcatgtttgtaccaacttttataactgctgattatacagttttatacaaattctctgctcaaaatttttagacggaaccaatctgattgatttaagaaatttctccattgagtaatgctcttccatatttgaccaatacagtcaattatctacatttagactcctctttgtctggatatgcctttgttaaaccagtgggcaccctgccacaaagagcagcccaacactgcacattttctgaataaataggaagtatagtttcagg

SEQ ID NO: 30961 - DNA, 409 bp, Homo sapiens
  misc_feature (1)...(409): n = a,t,c or g
nacnnnnnnnnnnnnnnnnnnnnnnnnnnnnnnnnnnnnnnnnnnnnnnnnnnnnnnnnnnnnnnnnnnnnnggcacgagcggcacgaggagaagttaagcaactttgtgagttgttggcctagatgggtctatatcccaggccccacttctctttctactgtgtgtttgttgatcaccacagcctgaggcaaaactgagaagatttttaaacttttaactgaaactcgctagacagctttttggaaatatttcctttttagatgaggcctatccctaagtagttgttattagaatatatgaaaacaggattctggagtcttttctttgcctcatattaagcaaattaaaaggaaaacctcacatagctctctgtaccttacttttcccaacccagccttgnatgtgac

SEQ ID NO: 30962 - DNA, 405 bp, Homo sapiens
  misc_feature (1)...(405): n = a,t,c or g
nnnnnnnnnnnnnnnnnnnnnnnnnnnnnnnnnnnnnnnnnnnnnnnnnnnnnnnnnnnnnnnnnnnggcacgaggaagtgggagttgggtcgtgatgtgacagtcaaaggacttagccggaaagggtacagttaatgcatgacagacaaggggactctcatctgaaaatttgtgtgtctttgtttcttctcaggttctccttactatgacaatgtccgccccctctcttaccctgattcggatgctgtgctgatttgctttgacatcagtataccagagaccctggacagtgtcctcaaaaagaggaaaggagaaatccaggaattttgtccaaataccaaaatgctcttggtcggctgcaagtctgatctgcggacagatgttagtacattagtactagctct

SEQ ID NO: 30963 - DNA, 405 bp, Homo sapiens
  misc_feature (1)...(405): n = a,t,c or g
antnnnnnnnnnnnnnnnnnnnnnnnnnnnnnnnnnnnnnnnnnnnnnnnnnnnnnnnnnnnnnnnnnnnggcacgannnnnnnnnnnnnnnnnnnnnnnnnnnnnnnnnnnnnnnnnnnnnnnnnnnnnnnnnnnnnnnnactgctgtatagccagtcctcctcagaatcccgtatttcattcacagaggtgcagttccctagtgagggaaactggtcataaagcaagtgctccctgctccggggctgactggcccatagggaggactccaggccacggtctgaggaggtggccatgcctccgctcatctgcagtggccagagttagaggagcaggcctggtgtgcagaagcaccttgtcagcaacagcctttgtaaatgtccggctctggcttttgnttcagg

SEQ ID NO: 30964 - DNA, 410 bp, Homo sapiens
  misc_feature (1)...(410): n = a,t,c or g
actnnnnnnnnnnnnnnnnnnnnnnnnnnnnnnnnnnnnnnnnnnnnnnnnnnnnnnnnnnnnnnnnnnggcacgagcagagaaagtgggaagagtgagaaagaaggaggtgaggccagaggatttggaaggctaccagagagaagcagccgaggcctgattgtggaaatgatgcttagacttgctttcagcaggagtgatgaagccagaatgagggaggcccagacgcccgggagaggtacaggggataggtgccatgtggtttgcaccaccgcagcaggctttgggtcccaaagacgcgaatggaaatagaagaaaatgcagttttaaatagaaaagaaaaaaaaaaccgagaaaatgttatgtgtgcttgtgtaaaatttattattcataattaaaatcccnaatgg

SEQ ID NO: 30965 - DNA, 405 bp, Homo sapiens
  misc_feature (1)...(405): n = a,t,c or g
tttgantacnnnnnnnnnnnnnnnnnnnnnnnnnnnnnnnnnnnnnnnnnnnnnnnnnnnnnnnnnnnnnnnnnnnnnggcacgagagtttagagcattcccatgtaattcccacccaacttccccattnnnnnnnnnnnnnnnnnnnnnnnnnnnnnnnnnnnnnnnnnnnnnnnnnnnnnnnnnnnnnnnactaaagtctgtgcttgattcagattcttggtttttatctaacgtctgctttctactgtggcatcctatcaggatagcacattatatttagttatgttcccttaggctcctcttatctgtagcgttnnnnnnnnnnnnnnnnnnnnnnnnnnnnnnnnnnnnnnnnnnnnnnnnnnnnnnnnnnnnnnnnnnnnngcttctcctattggcatt

SEQ ID NO: 30966 - DNA, 411 bp, Homo sapiens
  misc_feature (1)...(411): n = a,t,c or g
nactnnnnnnnnnnnnnnnnnnnnnnnnnnnnnnnnnnnnnnnnnnnnnnnnnnnnnnnnnnnnnnnnnnnnggcacgagcgagaaagagggcaaaatacgtggcatgtcagatggtgataatgctatggagtaaaatagagcaggagagtagagctctgtcagggcaggggtgcagtcctaagcagggagttccgtcggaggtgatgtttgtacagagacctgaacagggaggttgagcctgatgagtgccctaaagcctttattttctaatattggtaatttcaatgccacgttagcttgggtggctctgcaggttcctgcctgggctcctccccactccccagaacccttatttcactgcattgagggcttgcttgctgggaggtcctcagccccaggcaggggaggc

SEQ ID NO: 30967 - DNA, 412 bp, Homo sapiens
  misc_feature (1)...(412): n = a,t,c or g
nactnnnnnnnnnnnnnnnnnnnnnnnnnnnnnnnnnnnnnnnnnnnnnnnnnnnnnnnnnnnnnnnnnnnnggcacgagggccaggccgctaaaggctgcctccttgatccagctctatgggaggcggcacccaagactgctgggagctggcaatggggcttcttgcaaactgccccagaggggcccttagccctaccccttccccatagggtggctatgaatgtaattggggaacaccataagagccagatgtcagaagccctgctgcttcctgtccctctctctcctcgaaattttgggaagaactaggcaggactgaggtgagggggagggaagacctagacatggccaggaagcctctgtcaactgcatttggtgctcggacaagtgaatttcgcagaggggatctc

SEQ ID NO: 30968 - DNA, 432 bp, Homo sapiens
  misc_feature (1)...(432): n = a,t,c or g
acnnnnnnnnnnnnnnnnnnnnnnnnnnnnnnnnnnnnnnnnnnnnnnnnnnnnnnnnnnnnnnnnnnnnnggcacgagaaataacgcagtaagatttgctttccaatgccttaagagtttgcatttgtgtactttgagtcagttgggctaagagggaaatagcagtttgttcttcgtactctgatagatgggatgatgggctccatgggtaagggaggttaggacaagccactgaatacagttgggggaaatgtctgcaagtccatattattttttgtctgatttgcaagacctgtttcttggagatttgatcataaccctgagaaatattggcagactagtctgtcagggagtaatattctacccaaactcacacannnnnnntttgaatgctgctgagagtccaaagtcaatagggttgccaggatgac

SEQ ID NO: 30969 - DNA, 431 bp, Homo sapiens
  misc_feature (1)...(431): n = a,t,c or g
nnnnnnnnnnnnnnnnnnnnnnnnnnnnnnnnnnnnnnnnnnnnnnnnnnnnnnnnnnnnnnnnnnnnnnnnggcacgaggctgtttacccctttcccttcctccatttgtttagccccctctccacccaactctagatctctatggaatttaggctccacattcgactgcccattcgtagctcataatccatttttataacaccttgctatctatatttacacctttaaagaacacgggaatttaagagggaagagtaactaggcttttgctaaacttgggctaataaaaccctctgtagagagatccttaatataggcatggggacaacaaggagtatcccaagggactcgccgctagggtgtcttttaagctattggagcaaattcaaatttggcttaaagaaaaagaaactcattttgtattgcaac

SEQ ID NO: 30970 - DNA, 432 bp, Homo sapiens
  misc_feature (1)...(432): n = a,t,c or g
atttgnnnacagcttgacnnnnnnnnnnnnnnnnnnnnnnnnnnnnnnnnnnnnnnnnnnnnnnnnnnnnnnnnnnggcacgaggagtaataacaaatttctggaaaactcaaacatcgagcatannnnnnnnnnnnnnnnnnnnnnnnnnnnnnnnnnnnnnnnnnnnnnnnnnnnnnnnnnnnnnnnnnnnnnnnnnnnnnnnnnntgaaaccttccctggagctggaagagctgcttcagagaagactgccaccggacgcttggctggagttttcagtttttctccacatgggcctctcccagggctgctgagtgtccttgaactgtggcagtcagcttccccacagtgagtcgtgagagagggagacagccaaacagaagccctggagtctttcatgatctcatctcagacatgatgggccatctcct

SEQ ID NO: 30971 - DNA, 427 bp, Homo sapiens
  misc_feature (1)...(427): n = a,t,c or g
nnnnnnnnnnnnnnnnnnnnnnnnnnnnnnnnnnnnnnnnnnnnnnnnnnnnnnnnnnnnnnnnnnnnnnnggcacgagccaataacaatccaattaccgtgcagacggtctacgtgcagcaccccatcacctttttggaccgccctatccaaatgtgttgtccttcctgcaacaagatgatcgtgagtcagctgtcctataacgccggtgctctgacctggctgtcctgcgggagcctgtgcctgctnnnnnnnataacgggctngtggttnattcccttttngngggannnccnngnagaacgggancnntnnnngtcccaactgcaaagctntcctgggcacctacaagcgttngtaggactcagccanacgtgnagggagccggtgccgcaggaagtcctttcacctctcatccagcttcacc

SEQ ID NO: 30972 - DNA, 429 bp, Homo sapiens
  misc_feature (1)...(429): n = a,t,c or g
antttgannnnnnnnnnnnnnnnnnnnnnnnnnnnnnnnnnnnnnnnnnnnnnnnnnnnnnnnnnnnnnnnnnnnnnnnggcacgagcattgggggactctgctgtgaccaagccccttctgctcccgtctccttatttctggaaccagcttctctgtgctcgcatttttagaaagaggaatagggacagaggcgagcatttgtccatgctatgtgaactgattaggggaaaaaagctctttctcttctattaaacacagcttttatatcagatgatgatttatcgaagtggagactatttctgttttgatcattggtgttccaattgtagtcacactgtgaaaaggagatatggttcaatggtggaccgcatataccatgctggtcctgtaagatgataggaccgcattntttacgttacttttctat

SEQ ID NO: 30973 - DNA, 425 bp, Homo sapiens
  misc_feature (1)...(425): n = a,t,c or g
ttgacntgattacgaatttaatacnnnnnnnnnnnnnnnnnnnnnnnnnnnnnnnnnnnnnnnnnggcacgagctggtattagcctttcagctgccccctccttcacagacagagccacaggagctgcccgctcctgcctttcctcttttgtaagccatgctcctcagactccgtaaaaaaagagtcattacttggagaaaagttttgagttagcataagaactgcacacatctgaaaccacaaatcacgaatttgagactacagagagcctcccttgcaggcatttgcaattgcagtttgaagaccagccatctggatgttgtcttaaagtgtgagtctccattgtggctccgtctgtgaaggaaaaagtaaagtccctggaagaatttagagagtgggagtaggggtttagaaggcagttaca

SEQ ID NO: 30974 - DNA, 434 bp, Homo sapiens
  misc_feature (1)...(434): n = a,t,c or g
ctttgatnnnnnnnnnnnnnnnnnnnnnnnnnnnnnnnnnnnnnnnnnnnnnnnnnnnnnnnnnnnnnnnnnnnnnnnggcacgaggcttcaaaccctgnnnnnnnnnnnnnnnnnnnnnnnnnnnnnnnnnnnnnnnnnnnnnnnnnacttcctgttcaataatggtgctggggtaactggctacccatatgcagaatattaaaattgaacaactacatttnnnnnnnnnnnnnnnnnnnnnnnnnnnnnnnnnnnnnnnnnnnnnnnnnnnnnnnnnnnnnnnnnnnnnnnnnnnnnnnnnnnnnnnnnnnnnnnnnnnnnnncagccctggtaagacttcatgaagaaaatttcaaaagcagttgcaacaaaaataaaaattgacaagtggnnnnnnnnnnnnnnnnnnnnnnnnnnnnnnnnnnnnntca

SEQ ID NO: 30975 - DNA, 443 bp, Homo sapiens
  misc_feature (1)...(443): n = a,t,c or g
ttganaccttgtatgaccngntatgacatgattacgaatttaatacnnnnnnnnnnnnnnnnnnnnnnnnnnnnnnnnnnnnnnnnnggcacgaggacttttattcaaaaccacctccatcatggcacacctgtgcactctggtaacttaaaaggatgttcttaaagaatagtgaagtccaggaaaatatgttcatcatagtttgggtggaggaaaaagctttcaaaataacaaatacggaggatctattttatatagataaggaaggataggcaccaaagtgttcactggttgcttctgggctgtaggatgagaaatggtttttattttcatcttgattgcccatggttttattttttctttatagaggatatatattatttttataaagagagaaaagcaatgaaagtaatttttgtgtgatcacacaatagatcttctgt

SEQ ID NO: 30976 - DNA, 433 bp, Homo sapiens
  misc_feature (1)...(433): n = a,t,c or g
gctatgacatgattacgaatttaatatnnnnnnnnnnnnnnnnnnnnnnnnnnnnnnnnnnnnnnnnngcacgagattatctccttcagtaacaaagactcctgcagtagcattgagacagacacaacacatacattaaaaaacctcataaatacaccatacctgtagtaagagcatgtcaaatacttgccatctgtgtgtgattgtataaaagaaagcnnnnnnnnnnnnnnnnnnnnnnnnnnnnnnnnnnnnnnnnnnnnnnnnnnnnnnnnnnnnnnnnnnnnnnnnnnnnnnnnnnnnnnnnnnnnnnnnnnnnnnnnnnnnnnnnnnnnnnnnnnnnnnnnnnnnnnnnnnnnnnnnnnnnnnnnnnnnnnnnnnnnnnnnnnnnnnnnnnnnnnnnnnnnnnnnnnnnnnnnnnnnnnnnnnnnnn

SEQ ID NO: 30977 - DNA, 435 bp, Homo sapiens
  misc_feature (1)...(435): n = a,t,c or g
nnnnnnnnnnnnnnnnnnnnnnnnnnnnnnnnnnnnnnnnnnnnnnnnnnnnnnnnnnnnnnnnnnnnnnnnggcacgagnnnnnnnnnnnnnnnnnnnnnnnnnnnnnnnnnnnnnnnnnnnnnnnnnnnnnnnnnnnnnnnnnnnnnnnnnnnnnnnnnnnnnnnnnnnnnnnnnnnnnnnnnnnnnnnnnnnnnnnnnnnnnnnnnnnnnnnnnnnnnnnnnnnnnnnnnnnnnnnnnnnnnnnnnnnnnncaattatatacttattttaggtgtattatgctgtgccctgtgcttttctttgttatactggaaggtcatgatggcaggatgtcttatttatgcttctctgtactctgtcctgtccagtgcctttcagaagtaaggtttttagaaaggtttgagttatttcctgttttctgaaccagacagg

SEQ ID NO: 30978 - DNA, 440 bp, Homo sapiens
  misc_feature (1)...(440): n = a,t,c or g
nttggananccgtnnnnnnnnnnnnnnnnnnnnnnnnnnnnnnnnnnnnnnnnnnnnnnnnnnnnnnnnnnnnnnnnnggcacgagtactcgagtaattgcatcaggggacacagagcaggttgctgttaaagagggttggttgtacatgcgtctgcaaggaaggccctgggccaggcagctgtcagaccagtgtgcaacgggtttaaacaaacacagggaagggtctgtggaaacagcaaggaggaaatccccttctgtaagggtgtgtggaacattattccagggccacacatactgccagggaataatgcctttcctctcctccctccaagtaaacacataactccgttatggagatggcgctgggcccacccagatcactttcaaattcaggtgtcagaaaccacggttgacatggagcaaaattgtttttaagta

SEQ ID NO: 30979 - DNA, 439 bp, Homo sapiens
  misc_feature (1)...(439): n = a,t,c or g
nttttgaannnnnnnnnnnnnnnnnnnnnnnnnnnnnnnnnnnnnnnnnnnnnnnnnnnnnnnnnnnnnnnnnnnnnnnggcacgagggcagagggggcagaggcgctctaacctggggctgttgcctttgtctgcttgtttctgctctctggagagccccagagcctggagagacggggaggggagtgtgtgcccagggctaaacccagggagggggcccaggaaggctctgccccgtgacatttactccaaggctagcatttgctgagccacctgcaaacacagtgatgtggagaagaggcccgggaggggaggtttgcacaggggcaggctgctggggtcctgggggcatcctgtcccaagcttactagaatgcattcgagtaactggtctgagccagatgccctcagctcttggactggtttctcacggacatct

SEQ ID NO: 30980 - DNA, 437 bp, Homo sapiens
  misc_feature (1)...(437): n = a,t,c or g
ntttggannnnnnnnnnnnnnnnnnnnnnnnnnnnnnnnnnnnnnnnnnnnnnnnnnnnnnnnnnnnnnnnnnnnnnnnggcacgagcagcactcaaaagaggaagatgagcaattggggccctcactttgggggatattgggaatgtggaagtcagagaccctcctgggcaggacgccccctggctccaccctctgcctcttagatttactgggagggttggatgcacagagaaggaagaaacccatcccagtggagggtgtgggtaggggtctgcaatcaatgacaaattcctagaggaggggctgtttatatccaactctgaaaacaggttgaagctgaatggcattgaagaagagggtgccctttaagagaaaagccctagagaccagcccctgctcctcccaccccaacaagtccccttcagcatcttctat

SEQ ID NO: 30981 - DNA, 433 bp, Homo sapiens
  misc_feature (1)...(433): n = a,t,c or g
nnnnnnnnnnnnnnnnnnnnnnnnnnnnnnnnnnnnnnnnnnnnnnnnnnnnnnnnnnnnnnnnnnnnggcacgaggtaatcatgtttgaaaggatcactaacatccactctaacatgaacaacactttaaacaaatcaaaactatggctctttaaccagtaaacttcatggctatggctgattttattccttagagaccctcctttttacaggtgaaacggtttacatcagatttcctctcattatagcttctcaaatgttgtccagaccagcaagccactctctttaaacaaataccagccaaccaggaaaccatgaggttttattgtgctataaaatagaccagacatttctaaaccttcataggaatgaacctgactaaatctttactaaaaatggtttcaaaataaactgtgggctccaagtttctct

SEQ ID NO: 30982 - DNA, 441 bp, Homo sapiens
  misc_feature (1)...(441): n = a,t,c or g
acccnntttgnanaccnnnnnnnnnnnnnnnnnnnnnnnnnnnnnnnnnnnnnnnnnnnnnnnnnnnnnnnnnnnnnnnnnnnnggcacgagttctttttttgtccccacccttgatatctgaagaatggctgtcattaaaaagtcannnnnnnnnnnnnnnnnnnnnnnnnnnnnnnnnnnnnnnnnnnnnnnnnnnnnnnnnnnnnnnnnnnnnnnnnnnnnnnnnnnnnnnnnnnnnnnnnnnnnnnnnnnnnnnnnnnnnnnnnnnnnnnnnnnnnnnnnnnnnnnnnnnnnnnnnnnnnnnnnnnnnnnnnnnnnnnnnnnnnnnnnnnnnnnnnnnnnnnnnnnnnnnnnnnnnnnnnnnnnnnnnnnnnnnnnnnnnnnaaagacatcannnnnnnnnnnnnnnnnnnnnnnnnnnnnnnnnnnnnnnnnnnnn

SEQ ID NO: 30983 - DNA, 434 bp, Homo sapiens
  misc_feature (1)...(434): n = a,t,c or g
ntttgaanaccgtnnnnnnnnnnnnnnnnnnnnnnnnnnnnnnnnnnnnnnnnnnnnnnnnnnnnnnnnnnnnnnnnnggcacgagaggtggagctgcaccgactttgacaacatcctcatgaccgtcacctgctttgagaagtctgagcaggtgcagggtgcccagaagcagttcaagaactttcagatcgaggtgcagaagggccgctacagtctgcacggttcggaccgcagcttccccagcttgggagacctcatgagccacctcaagaagcagatcctgcgcacggataacatcagcttcatgctaaaacgctgctgccagcccaagccccgagaaatctccaacctgctggtggctactaagaaagcccaggagtggcagcccgtctaccccatgagccagctgagtttcgatcggatcctcaagaag

SEQ ID NO: 30984 - DNA, 432 bp, Homo sapiens
  misc_feature (1)...(432): n = a,t,c or g
attnnnnnnnnnnnnnnnnnnnnnnnnnnnnnnnnnnnnnnnnnnnnnnnnnnnnnnnnnnnnnnnnnnnnnnnnnnggcacgagtggtagcaatgaatgcagtctgggaaggtaggcttgctgtacaggcatgtgataagtcacacctgcagagaggaataccttgactaaaaggccaattagctcagacacttttggtaatggtcaagagtgccaagattagttgttttcaccttcactcagtggtacagattacatgttcttaaccccatgttagccctcttcctgatacttactgttactgccaagggaaaagtagggcttggggccacccatttctgctaccaagaaaaatactcagagcatacacatgctaattactgaggtgactaaagaatgtccacttcttcaatgaaagacaatgctctttt

SEQ ID NO: 30985 - DNA, 435 bp, Homo sapiens
  misc_feature (1)...(435): n = a,t,c or g
anancgntnnnnnnnnnnnnnnnnnnnnnnnnnnnnnnnnnnnnnnnnnnnnnnnnnnnnnnnnnnnnnnnnggcacgaggagagagctagcactcaatacactgccatatttttaggcaccctactcctggtaacaaaattcgtatnnnnnnnnnnnnnnnnnnnnnnnnnnnnnnnnnnnnnnnnnnnnnnnnnnnnnnnnnnnnnnnnnnnnnnnnnnnnnnnnnnnnnnnnnnnnnnnnnnnnnnnnnnnnnnnnnnnnnnnnnnnnnnnnnnnnnnnnnnnnnnnnnnnnnnnnnnnnnnnnnnnnnnnnnnnnnnnnnnnnnnnnnnnnnnnnnnnnnnnnnnnnnnnnnnnnnnnnnnnnnnnnnnnnnnnnnnnnnnnnnnnnnnnnnnnnnnnnnnnnnnnnnnnnnnnnnnnnnnnnnnnnnnnn

SEQ ID NO: 30986 - DNA, 434 bp, Homo sapiens
  misc_feature (1)...(434): n = a,t,c or g
nnnnnnnnnnnnnnnnnnnnnnnnnnnnnnnnnnnnnnnnnnnnnnnnnnnnnnnnnnnnnnnnnnnnnnnggcacgaggacaaagtctcactctgttacccagactagagnnnnnnnnnnnnnnnnnnnnnnnnnnnnnnnnnnnnnnnnnnnnnnnnnnnnnnnnnnnnnnnnnnnnnnnnnnnnnnnnnnnnnnnnnnnnnnnnnnnnnnnnnnnnnnnnnnnnnnnnnnnnnntgagaccctatctctaaaaaaaattaaagtaataaaatatcattacattcttgtaccgctttatagtttagaatgtatttcacatattccctgtgtgcctctcataatcctccaagacaaggcagctattaactcatttttatggatgaataagctgaaacatgcagaaataatttgctaaaggtggaaacaatcca

SEQ ID NO: 30987 - DNA, 441 bp, Homo sapiens
  misc_feature (1)...(441): n = a,t,c or g
naaccgntttgacataccnnnnnnnnnnnnnnnnnnnnnnnnnnnnnnnnnnnnnnnnnnnnnnnnnnnnnnnnnnnnnnnnnnnnggcacgagatattttgaaagctatacattattaggagaagatttttctaactacccaaatctcctttttagcatatcagaatccaggcttggagaatcaaaagtgtaaggagaaaagctcttccctctgaggtctgcactgtgagaaaaattcagagaggtagaagaggccataacgtcccagtttctcctctttactgtgcagtgggttctgagccaatatgaagtgactcagcttacttaagtgggtgaaaaatgtagcaagacagatctacttctttggtttcctgtggtgtaaacagtaggtttagagctactacacctgcaatggggccctttgtaatggggctggggga

SEQ ID NO: 30988 - DNA, 439 bp, Homo sapiens
  misc_feature (1)...(439): n = a,t,c or g
nnnnnnnnnnnnnnnnnnnnnnnnnnnnnnnnnnnnnnnnnnnnnnnnnnnnnnnnnnnnnnnnnnnnnnnggcacgagggttcagaggagaccaggagggagtgtgggatctagagaacaaggggatagaacagcttttgtggaaggggagggtggctaactcttcctccggtgaaaacgtcagaccgtgtaaggcagacagggctacatgcccagctcaggagctccagtcactgtgtttgatgcatgtgcaccaaggctgggacactgggtgaatagaggatagcggcgatcgggacattgcgagtgccgtcctcatagctcagaagtcatagcatgtcttaatcatggccatatcctcagtgcctggcccatagtaggtgtcctttaagtgattatgaactgagttgctggtaggagctggaggattagggaaca

SEQ ID NO: 30989 - DNA, 440 bp, Homo sapiens
  misc_feature (1)...(440): n = a,t,c or g
anaaccgctntgacatgattacgaatttaatacnnnnnnnnnnnnnnnnnnnnnnnnnnnnnnnnnnnnnnnnnggcacgagaaattaaaaattaaaaaaaattagccaggcatggtggcatnnnnnnnnnnnnnnnnnnnnnnnnnnnnnnnnnnnnnnnnnnnnnnnnnnnnnnnnnnnnnnnnnnnnnnnnnnnnnnnnnnnnnnnnnnnnnnnnnnnnnnnnnnnnnnnnnnnnnnnnnnnnnnntacaaataagtttccttgcaaaccttctgtgaacttcatttgtcttccatcatccatgctttgattctctgaagtcatcagaaggcaatttgtaggccataacattttgagtaaaacataacgttagtttgattagtcccaaatggtgttctgacaactgcaaagctttgtgattcaatcaggtgggtgtt

SEQ ID NO: 30990 - DNA, 442 bp, Homo sapiens
  misc_feature (1)...(442): n = a,t,c or g
tttganaccgntnnnnnnnnnnnnnnnnnnnnnnnnnnnnnnnnnnnnnnnnnnnnnnnnnnnnnnnnnnnnnnnnggcacgagctggtgagtgcagctgagcagttagggctccctttctccaccaagctcccacttacagaatggaggcttcatcccatttgcagcagaatactggagccctaatcgtcctcaccccagctcactcgtagggcagaggttccactgagagaagcaagccaagaaggcaagaggctactatcccacccagcacccagagtagtgcctcagagacctttcccagggcgagagacagttcataacaaaagagagctccgaggtactctccaaaggaactgactttatttgaaacagtgtggggaagtacaggcctaaggacactttagaaaatgataacataccttaaagaacagtaactaaa

SEQ ID NO: 30991 - DNA, 429 bp, Homo sapiens
  misc_feature (1)...(429): n = a,t,c or g
tacccgntatgacatgattacgaatttaatacnnnnnnnnnnnnnnnnnnnnnnnnnnnnnnnnnnnnnnnnnggcacgagctgggtgtcaaaaaagcattggcacttctgggagtcataggtgttacttgataggtcttcagaccatccagtggctgaaacataaaatccttaggtgcaaaggaattcttcccttttatttttgcagtatttatctcaggtaagttttccatttttgataagactccatctggcatccattccacttgttgcattagtttgtgaattcaaagtattttcttcactatcgactttacaagaaatacccttgtcgggttttgtttctacatttttggcaggtcttcctttacttggcacctttccttctggttcgttttcattagcagctcttgtgactggctttcttgc

SEQ ID NO: 30992 - DNA, 440 bp, Homo sapiens
  misc_feature (1)...(440): n = a,t,c or g
anatttgannaccgtnnnnnnnnnnnnnnnnnnnnnnnnnnnnnnnnnnnnnnnnnnnnnnnnnnnnnnnnnnnnnnnnnggcacgagcaacatgctaagactgagtaaagcttcatctcctgtgaataccgtataaagcacaattgatgctgtacagtattttatttcagctgtgaaaagggaccgcgggtgtctggctgtgctggaggaggagtctggtctttctcggtgggaagtgctgggtggccgtgggcttggaggctgggtcgtgggggtgtggcccaggcaagtttccttctctgctctcggctgtgcacctgtctccttgtctgttctccttcagcaagtttgtgaggctgcacatgtgaaaatgccttgtcaatggcacagtggcacgtggacctgctgcgctgtgtgcgtgtcagggcggccatgttgt

SEQ ID NO: 30993 - DNA, 440 bp, Homo sapiens
  misc_feature (1)...(440): n = a,t,c or g
ttgaanatncgtttgncatgattacgaatttaatacgactcnnnnnnnnnnnnnnnnnnnnnnnnnnnnnnnnnnggcacgagtttacaggtgtaggagggattaggggagacaaggagaaggatcataaacccaaagtgcacacatccttcgattcttcagttctctgtatagagccaaagacagtaaaataagaggcatacaagaacagagcattgaaatcaagaatagtgtgcaaataaaagatgaaaagttttgaaaattataaatatgttgtcacagatggtgtaaaaaagacatggttttgttagagtttagttttttttaagtttactttctgaattcgctcctattcttcctgagttattaataaatgcatganaacaaaactanaaaaatnagaggaaaggangancagagaanaaacatacttaaacatt

SEQ ID NO: 30994 - DNA, 430 bp, Homo sapiens
  misc_feature (1)...(430): n = a,t,c or g
nttgttnnnnnnnnnnnnnnnnnnnnnnnnnnnnnnnnnnnnnnnnnnnnnnnnnnnnnnnnnnnnnnnnnnnnnnnggcacgagaagtagctaaatacgaaattataacaaatgtatcttggcaatttttgacccttcaaagtcttctgttaagtatccccactatgatcctcctgggttgtttctcttgagctcaaggctaaagtcttaaggggaaagaggcttagtgtgtattgttggcttaataagcaggtcaataagtatttgttaaaattggtaaatacccatggtatcaggggtattcttcagacatattttagcaatatgaaagaacactgctcacttaaaaaaaaaggacaatcgtctgtactgtgaatttagctaatatgaagaaatcttttcattattctaactgaatagttagccatc

SEQ ID NO: 30995 - DNA, 475 bp, Homo sapiens
  misc_feature (1)...(475): n = a,t,c or g
gggnggnnaggttngtattttgnnnnngaaaagactnantngaagaacccccntacanattggggaaaaggacccccggccctcgaggccaaggaattcggcacgagtcaaaaagagacaaacagctgggacacaaatcaggtttccattgggggggccctttccacagccgtatatgctggcagcatagcaggacagacagatggagcaaggtgtgactagattgcagttgactttctgtccacctgacaccttagaaaacaattgggttggcatttttttttcttgatgtagaggtgtaatacaatcataacctaccacatgacctagctcccctcctactttaaggattcagtaaactacagggaaaatatatcaaagtatatgaagaaataatccattctcagttgctccctcgctaaagtaactcttttggaagcaatggagaaggcatgtaaatctctgccacccagca

SEQ ID NO: 30996 - DNA, 452 bp, Homo sapiens
  misc_feature (1)...(452): n = a,t,c or g
tngnnntttgnnnnnnnnnnnnnnnnnnnnnnnnnnnnnnnnnnnnnnnnnnnnnnnnnnnnnnnnnnnnnnnnnnnnnnnnnnnnnnnnnnnnnnnnnnnnnnnnnnnnnnnnnnnnnnnnnnnnnnnnnnnnnnnnnnnnnnnnnnnnnnnnnnnnnnnnnnnnnnnnnnnnnnnnnnnnnnnnnnnnnnnnnnnnnnnnnnnnnnnnnnnnnnnnnnnnnnnnnnnnnnnnnnnnnnnnnnnnnnnnnnnnnnnnnnnnnnnnnnnnnnnnnnnnnnnnnnnnnnnnnnnnnnnnnnnnnnnnnnnnnnnnnnnnnnnnnnnnnnnnnnnnnnnnnnnnnnnnnnnnnnnnnnnnnnnnnnnnnagctggtccaagcacagtggtgttcacaacgaattgatcacagccaggtagaattcttcattctttctccagttccactgctttg

SEQ ID NO: 30997 - DNA, 444 bp, Homo sapiens
  misc_feature (1)...(444): n = a,t,c or g
atttgganaacngntatgacatgattacgaatttaatacnnnnnnnnnnnnnnnnnnnnnnnnnnnnnnnnnnnnnnnnnggcacgagctcctgtatgtcagagagccttggactagccagtgaaatatgaatgcagaccaagggattagtgttatcggtggcacgttgatgggaaagagcggtgtttgctccaggagtgacaaggagtctcctttcaatgatatctagattatatcctttttaggcatctgtgtttgtggtctgtgtgtcagagcttcctgggaaatgtctaaaatgtaaattcctagacttcacttagacctacagactatatggaaagaaaacctggaatctgcattttaacaagatacctaagatattctgatggaagttagtctatgaattgggatggaagaaccctgctttgaggaattttaaaaagt

SEQ ID NO: 30998 - DNA, 445 bp, Homo sapiens
  misc_feature (1)...(445): n = a,t,c or g
ananccgntatgacatgattacgaatttaatannnnnnnnnnnnnnnnnnnnnnnnnnnnnnnnnnnnnnnnnnggcacgaggcactattcataaaacacttagtggagcatccagcacgttagaagatattagtgttatgatcttagtccttcctcccgagtaaattgtagagtacattaccattggaaatcagaggactcagattctagaaagacctaattctgctaccaattaactagaagcccttggacggtggcaacagctaatgcttgcctaggctccttactgatcaccatgccccatcctgtctgccccttgagggggtcccttaaaggtgatgtggggagaggtcagtgccatcctggcttgcagataagaaacctgggagacttgagctgcttaccttaacaaggtttgtgatatagcaggtcactgctcctccc

SEQ ID NO: 30999 - DNA, 445 bp, Homo sapiens
  misc_feature (1)...(445): n = a,t,c or g
atttgatnaccgttatgacatgattacgaatttaatacnnnnnnnnnnnnnnnnnnnnnnnnnnnnnnnnnnnnnnnnnggcacgagctggacggggatgctggaggctccagggttagccaacagcattaacctgcttgtccgtcaagacttttataagagctgctaacaggcaggaaaattgcaggatttgagtttcacctcctccccttaaccaggtcaccttctggaggaggtgctcatgagcagcaaaatgaccaaaatgtgggcagtaagggaggcagagaaggaaacagccaaggagcttggacagccctctgctagctacccagctcttgaagctaggcctaacaggcatcccagagcccagcacaaggcccctcttggcaccaaggggagaataaccatgcaagggccagagatgtggtttttgttccggtgaagc

SEQ ID NO: 31000 - DNA, 443 bp, Homo sapiens
  misc_feature (1)...(443): n = a,t,c or g
annnnnnnnnnnnnnnnnnnnnnnnnnnnnnnnnnnnnnnnnnnnnnnnnnnnnnnnnnnnnnnnnnnnnnnnggcacgagagaaaacaactttgtcctgttggtattgttctttagttatccaagggagctgctatttcaactgttctaaagatcaatagaggttagttcccaatcttcctttcaggcagccgactaaaaaaaatgcaatcccagttgatattttcattcaaaacagaactttgtctttttcgaaggtcaatggtccacaagaaggcatggctgatcagtgctaaacaggatcttttcctataccagacacactcaggtactatcccccttcaccaagtaccccttcccttgtgcctcactcaatgttggcccctccttccctatcttttggccatttcttgatgaccattaacacccgaagctgccctaca

SEQ ID NO: 31001 - DNA, 438 bp, Homo sapiens
  misc_feature (1)...(438): n = a,t,c or g
annnnnnnnnnnnnnnnnnnnnnnnnnnnnnnnnnnnnnnnnnnnnnnnnnnnnnnnnnnnnnnnnnnnnnnnggcacgagagtagcaccatgagcttcaataccctgcttacataacatctaatcattgagggctttcctgaccatccaatctcaagtagcctcttctcctgacccatgaattctgtgtctgcttaccaataggtaagtcttcatggcacttaatgcactctgaaattatcttgccaatttacttatttgcctgctccttatctcctttccctactaagacgcaagctctgtgaaggtaaggatcctgtctttttcatgtctgtatccccaacacttacagcagcatgaaacacataccaagcattcaataaattgtttaatgcataaatgaataggctataatccatgtactacagaaaccttacc

SEQ ID NO: 31002 - DNA, 447 bp, Homo sapiens
  misc_feature (1)...(447): n = a,t,c or g
tgganatccgtnnnnnnnnnnnnnnnnnnnnnnnnnnnnnnnnnnnnnnnnnnnnnnnnnnnnnnnnnnnnnnnnnggcacgagaaggtttgcagattatactattgtatcattgttaatttcctgaacttataattgtactgtggttacataacatgctaacatttggagaatctggttaaagaatatacgggaattccttttacaatttttgcaattgctttataaggctaaaattaatttaaaaatttgaagcttaaagaaaggttaaagaannnnnnnnnnnnnnnnnnnnnnnnnnnnnnnnnnnnnnnnnnnnnnnnnnnnnnnnnnnnnnnnnnnnnnnnnnnnnnnnnnnnnnnnnnnnnnnnnnnnnnnnnnnnnnnnnnnnnnnnnnnnnnnnnnnnnnnnnntgggcngtggtggcatgtgtctgtaataacagct

SEQ ID NO: 31003 - DNA, 439 bp, Homo sapiens
  misc_feature (1)...(439): n = a,t,c or g
nnnnnnnnnnnnnnnnnnnnnnnnnnnnnnnnnnnnnnnnnnnnnnnnnnnnnnnnnnnnnnnnnnnnnnnnggcacgagtgagcacctccggggtagttggggtttcacccttggatggacagggagggagaatacttgaggtgatccacgtttctcatgagtttgaatctgaaaacatgcttggctcttgtaatcaagcttttgtaatttggagtgagtgggaacttggttcgactcggtgtttgggtgttcctgctgtctgttcccatttgggccatgctggtttccttgggaagcacattccctgtcactatcgccatcctcaaggcaggcagctgaccaggtgctgcttgcggtggccatgctgagcccagggcatgggtgaagtcctcagcccaatcacaagggaagggagggagggacctgggaaatagccc

SEQ ID NO: 31004 - DNA, 434 bp, Homo sapiens
  misc_feature (1)...(434): n = a,t,c or g
nnnnnnnnnnnnnnnnnnnnnnnnnnnnnnnnnnnnnnnnnnnnnnnnnnnnnnnnnnnnnnnnnnnnnnnnggcacgagactttatagctgtatttcttgttcaatctaaaatccagtctagaagtccagcgcgctatccattgtgctacggagccacctctaagatccaatctaagatgaaaaccataattggtcttttgttgttgctgttgattttgcatttggtctttttaaactccttgtacttagaactgtttttcatgccttttctgtatttcacagcattggttttaagctttttttttttnnnnngnccaggccnttngnatngcanaangnccctnaattngnatngctgcattgttaatgatgagcttcncattaattatgttanacaaaaatnctacnttganggggcttntnatccatcaa

SEQ ID NO: 31005 - DNA, 439 bp, Homo sapiens
  misc_feature (1)...(439): n = a,t,c or g
naccngnnnnnnnnnnnnnnnnnnnnnnnnnnnnnnnnnnnnnnnnnnnnnnnnnnnnnnnnnnnnnnnnnnggcacgagccactttcctgtgcattttcactcctgagaagtgctcccctaactcagatcccctaacttagatttggcccccaactccatttcctgtctgtcttagacagcccttccaactgtgtcatctcttctctggaggtcaatggtggagggagatgcctgggtcctgttcttcctacataaaatgcaagaaaacagcatggccagtaaactgagcaagggccttggaatccttgagaatcacatttatgtgcttatgattacgggcaagctaattaaccttgttgaatctcagattccccatttgcaacattaggttaagaccagtactgcaggattgttgcactaaatgaaatactgtatgt

SEQ ID NO: 31006 - DNA, 445 bp, Homo sapiens
  misc_feature (1)...(445): n = a,t,c or g
ttgnnattgganaccngtnnnnnnnnnnnnnnnnnnnnnnnnnnnnnnnnnnnnnnnnnnnnnnnnnnnnnnnnnnnnnnnnnggcacgagccgtatccctggcccttaacgctgtcaggaccgtatccctggcccttggctttctgtgcatgtaggttcggctcccagaccaaccctctccaccaagctcaggataccatctagtttcacatttcccggcatcatctgctgctgcctgaacccgaactcaccattggaggctttggcatcaataatcccaggggagggctctgactggccccgtttggcccagatagtaatccttggaccaatcagtgaggcccaggcaggagggggtctcccacaggcccggcttgtcttcagtctctggcacgganggtggggtcacgtgacaacacggaagtagccctcgcccccgcaatg

SEQ ID NO: 31007 - DNA, 438 bp, Homo sapiens
  misc_feature (1)...(438): n = a,t,c or g
nnnnnnnnnnnnnnnnnnnnnnnnnnnnnnnnnnnnnnnnnnnnnnnnnnnnnnnnnnnnnnnnnnnnnnnggcacgagctcctgaactttgctcggtctctcccgtctatgatttgtcccgcaacaccagttgcctgcggaacacctctacctagagagctaacactcatccccggtcagtaaatccaaaactaaacccgttgcctcctcctaccaacctgtccctcctataatgcctgtgaagaaaaggcatcactgtgcacactgttgccctctccatgcttcatctaatcagtcatcagatcctataattctaccaccttaaaagtttcaccgtttnnnnnnnnnnnnnnnnnnnnnnnnnnnnnnnnnnnnnnnnnnnnnnnnnnnnnnnnnnnnnnnnnnnnnnnnnnnnnnnnnnnnnnnnnnnnnnnnnn

SEQ ID NO: 31008 - DNA, 452 bp, Homo sapiens
  misc_feature (1)...(452): n = a,t,c or g
ttganaccgntttnnnnnnnnnnnnnnnnnnnnnnnnnnnnnnnnnnnnnnnnnnnnnnnnnnnnnnnnnnnnnggcacgagaattactgaaattgcacattaagttaaaaaaaaaatcagggttttgggtcctgagacttgttacctaaacatctgtcttgctattttgttacagcacaaagtaggaattgtaaaacatcttcgttataaactgagtactatacagtctctgggagagcagaagaaacgtggtaggaaggaaccacccagggtgggtaatgacagagtagagatagtcagatagggccggagacaaggccaggaaaggcgagaggaagagcctgcaggaacgagtttcttgcacgtttgagagctggacctgccaagagggtaaggccaacatctgtgtgtgttctttgaggaaatccgagtagcctgccctgctttgacc

SEQ ID NO: 31009 - DNA, 457 bp, Homo sapiens
  misc_feature (1)...(457): n = a,t,c or g
ttnnnnnccnnnnnttggannnnnnnnnnnnnnnnnnnnnnnnnnnnnnnnnnnnnnnnnnnnnnnnnnnnnnnnnnnnnnnnnnnnnnnnggcacgagcaataaaaaccaagggcataatgttaaatcatcatttagtgagtgtgtttctctggagaaccaagccaatattgtccagtttgctgtttttgctcatttgtttgtttgttgttgttgttgtctagcccgacagcccttatgggacctgggagatgtgactggttaacaccacccctcactgttcctttcacaaacattattatcactctgtgctttgtatagaacattagaaaaataatatgctgaaaggctgcatttggtgaacttttctaagtgggtttgatttaatgaaagatttgcaacatatatttgatccttggattattttctgcattttatttccatttgcagcctgtca

SEQ ID NO: 31010 - DNA, 445 bp, Homo sapiens
  misc_feature (1)...(445): n = a,t,c or g
ntttgaannnnnnnnnnnnnnnnnnnnnnnnnnnnnnnnnnnnnnnnnnnnnnnnnnnnnnnnnnnnnnnnnnnnnnnnggcacgagctgggagataccaacattaactagacagggatgtacaaacattgtagaatcacactgtgtggaataccctttaaaaatacatcaccaaaagacaacatgagaaacactaatgaaaagtaccccatttatcaatgatctgggttgaaagcaggctgtggacatgcactcgttgactccccagcacacactcaatttcactgattaagtcattcagcttctggcattccctggggaccacctttggttcagaagtagacactcaaggcagcccaagcagacttagagaaattgtggtgtgagggaaaaatctcctgcagtcatcttataaccatgaggggaatgtcaggcctctgagccc

SEQ ID NO: 31011 - DNA, 450 bp, Homo sapiens
  misc_feature (1)...(450): n = a,t,c or g
ttgganaccgttatttntgaccctnnnnnnnnnnnnnnnnnnnnnnnnnnnnnnnnnnnnnnnnnnnnnnnnnnggcacgagcttaggcttaaagaatgcagaaggcttagatgtcctgaagccattatcttttccactagggcacataattgtccttgggcttaaaagctgaactaatctctgccaacaaatagttgtgtgaccttggggacgccacttcacctttctggaacaatagtataaaagacggcacttaataataatgataatagctgctatacatggagtagtcactgtctgtcagcacttgggacaggttattcatttaaatcttccagaaacacttggaggtttttaatccccattttgcagaagcaaaaataggctcagaaaggtcaagaaactttctcaagaccacacagctcacaagtaagtgaacagactccaag

SEQ ID NO: 31012 - DNA, 440 bp, Homo sapiens
  misc_feature (1)...(440): n = a,t,c or g
nttggagaaccgtnnnnnnnnnnnnnnnnnnnnnnnnnnnnnnnnnnnnnnnnnnnnnnnnnnnnnnnnnnnnnnnnnggcacgaggaattggaaaaatacatcccactctgggctgaaaaatttcaaactctgggactggatcattttgagactctagatgtgaggtggagctgaattttaggaccccacagaccaaaaggtgcctggcacaaaccccacaatgaagtctgcagttctctttcaggatttcttctttcaggtctagtccctgaagaataggaagggagaggaggctccaggacgggagaaacagaaggagtgtttgccattaagggttgcataatgactggacacctcttcnnnntnnnnnnntnactgngaacactttatagacatgggcttcatttcatataagtttatggcacctattatacattt

SEQ ID NO: 31013 - DNA, 442 bp, Homo sapiens
  misc_feature (1)...(442): n = a,t,c or g
tttganacccccccttgagcaccgctatgacnnnnnnnnnnnnnnnnnnnnnnnnnnnnnnnnnnnnnnnnnnnnnnnnnnnnnnnnnnggcacgagtgccttcatggagtgacctgagccaaggtatgtgggttttatttccgggggcaaagttgacataaagaaaacttggaaaacccaagggaggcttgaaaggactgtgtattacactggaatgtatttcatcaattgttacagtacttaagaacactgagtcatcatggggaacgtccccttnnnnnatncaagaacatgctggcantagnggacagtnatnntcncttctanaagactcatgtcgnagttttccgnggtatacncanaangttantccantccanactcaccnatgaccgtgcncaaggtgttccnanactgnccnntgttggccccngtnaacga

SEQ ID NO: 31014 - DNA, 461 bp, Homo sapiens
  misc_feature (1)...(461): n = a,t,c or g
gnnnnnnnnntttgnnnncccnnnctttgannannnnnnnnnnnnnnnnnnnnnnnnnnnnnnnnnnnnnnnnnnnnnnnnnnnnnnnnnnnnnnnnnnnnnnggcacgagcatggaaatgacatttttgtatgtttagttcctaagaaattattaacagcctttgaataataagcagctttagtaaagtggtgctggcagaagccagaattcagtgagttaaagannnnnnnnnnnnnnnnnnnnnnnnnnnnnnnnnnnnnnnnnnnnnnnnnnnnnnnnnnnnnnnnnnnnnnnnnnnnnnnnnnnnnnnnnnnnnnnnnnnnnnnnnnnnnnnnnnnnnnnnnnnnnnnnnnnnnnnnnnnnnnnnnnnnnnnnnnnnnnnnnnnnnnnnnnnnnnnnnnnnnnnnnnnnnnnnnnnnnnnnnnnnnnnnnnnnnnnnnnnnnnnnnnnnnnnnnnn

SEQ ID NO: 31015 - DNA, 457 bp, Homo sapiens
  misc_feature (1)...(457): n = a,t,c or g
gnnnnnnnnnnttggnnnnccccccctttgannacnnnnnnnnnnnnnnnnnnnnnnnnnnnnnnnnnnnnnnnnnnnnnnnnnnnnnnnnnnnnnnnnnnnnnggcacgagctgtgtgggaaggacgctgacgcctgtaatgccaccaactggattgaatacatgttcaataaggacaatggacaggcaccttttaccatcactcctgtgttttcagattttccagtccgtgggatggagcccatgaacaatgccaccaaaggctgtgacgagtctgtggatgaggtcacagcaccatgtagctgccaagactgctctattgtctgtggccccaagccccagcccccacctcctcctgctccctggacgatccttggcttggacgccatgtatgtcatcatgtggatcacctacatggcgtttttgcttgtgttttttggagcattttttgcagtg

SEQ ID NO: 31016 - DNA, 443 bp, Homo sapiens
  misc_feature (1)...(443): n = a,t,c or g
ttgganaccngnttttcntgatcncnnnnnnnnnnnnnnnnnnnnnnnnnnnnnnnnnnnnnnnnnnnnnnnnnnnggcacgagnnnnnnnnnnnnnnnnnnnnnnnnnnnnnnnnnnnnnnnnnnnnnnnnnnnnnnnnnnnnnnnnnnnnnnnnnnnnnnnnnnnnnnnnnnnnnnnnnnnnnnnnnnnnnnnnnnnnnnnncttcttaagaggcactcaggaagcatctggacaatgctgaacagatgaggactttcataggctcacctggcctggggtctggcccaggagggtgctctttgatgagaaacatcccagcggtattgggcatggaggaagcagctagtgaaagaaaagcagagctgatgggaggaagatgtttgactgtgcccagccctgccacatatctcccactttgcctccctaatcccaccacaccc

SEQ ID NO: 31017 - DNA, 461 bp, Homo sapiens
  misc_feature (1)...(461): n = a,t,c or g
gnnnnngnncctttgaantccccccctttgaacacccgtnnnnnnnnnnnnnnnnnnnnnnnnnnnnnnnnnnnnnnnnnnnnnnnnnnnnnnnnnnnnnnnnnggcacgagaaaaacatagctttagaaacagtatagagatactggtaaatatagataagttatgaaggaagcaattaaaatacttggccatcccactgttgagaagacttattgaagcctatctcctcactgtgcagcctcccctttgattaagatcctttcttcccacacagccacactgggagggctggagaaggatctctctactttctctgctcccaagagaccagtggctatctgcatggggagagtcctgggctctacttcagttccttgggggtggcaccatggtatcacctctgtgtggcaagcagtgtgaatctgggcccttccccatctcttgccccgccagggctgg

SEQ ID NO: 31018 - DNA, 460 bp, Homo sapiens
  misc_feature (1)...(460): n = a,t,c or g
nnnnnnnnnnnttnnnnnncnnnnctttggnnannnnnnnnnnnnnnnnnnnnnnnnnnnnnnnnnnnnnnnnnnnnnnnnnnnnnnnnnnnnnnnnnnnnnnggcacgaggaaactgtgataccttatgatacctctgatcttattgttagaacatagagcttgagtaattttgtagcaacagtgatacactgaatccagtacttaggtttaattgattggagttagaaatgcagtatgtctttgcctatcctgtgtattgcagataagattgccccatagaatgaaatctatgacttaagttttgttaggagcatgctgcaaccaactgaacagaccttgatgaacttgcaatgaacattttttcatactgggaccctgatattctactttaggatctggggagtttattacgtgcattttaaaagatgctgttatcggccgggcatggtgactcatg

SEQ ID NO: 31019 - DNA, 455 bp, Homo sapiens
  misc_feature (1)...(455): n = a,t,c or g
gnnnnnnnntttgnnncccnnnctttgannaccgnttgacnnnnnnnnnnnnnnnnnnnnnnnnnnnnnnnnnnnnnnnnnnnnnnnnnnnnnnnnnnggcacgagtgagagtgacctccacgccaggggcacagaggccaacgtgagacagaggtgagacaggagctttctggaagtctcctcctggattcactccagagctctgttctctggcagggagagtggcctggggtcagcatgggtcaacctgtgcctctgctctcgtgactccaaggaactttccagagcagccaagatcattgctgaatctgcaccttccatgtaggcctgctgtttgtgctactgtctagtgtacacactgtggatattgcccatgtggtcgcattagatgtttccaaatctgtgcttctatcttgttcttcccaacctgctcaatgtcttaccagatcaaagg

SEQ ID NO: 31020 - DNA, 427 bp, Homo sapiens
  misc_feature (1)...(427): n = a,t,c or g
acngcttgtnnnnnnnnnnnnnnnnnnnnnnnnnnnnnnnnnnnnnnnnnnnnnnnnnnnnnnnnnnnnggcacgagttcagacaacaagcattcgtaggcctgctcataggtttataggtgctattagtatcctaggtgctgaagtatcttatacaagagaaataagtcacttcttacagactactgggatgttcaagatgcacatacataaaagttaagtaacattttcaggcagtatgtgattatgtgctaaatgtgtgctatagcaataattactctgggaggcagtgacttagcaggtgtctaatacatttattttttatttattattnnnnnnnnnnnntttgagacagngtcttgctntgntncccaggctgnagtgnacnggacgactnactcatgnancttnaactctgggctnaagc

SEQ ID NO: 31021 - DNA, 461 bp, Homo sapiens
  misc_feature (1)...(461): n = a,t,c or g
gnnnnnnnnnttggnntccccccctttggagnaccnnnnnnnnnnnnnnnnnnnnnnnnnnnnnnnnnnnnnnnnnnnnnnnnnnnnnnnnnnnnnnnnnnnnggcacgagaaaataatttgaacttctaaaaaaagcattcagataattttatgaagtttgataattactagagaattaatgctgcttagatgcagtaaaccagtcagtcatacagaataacttgtttttaagaagcatgaacagtaacacaggattccttgtgaagaatgagaagatttaattgagaaattaaaataccagctcatgtagagttcaaatcctaacagttgttggattccttagtgactcatcaaggctgttgttattgagccacagtctgcaagtatgcagagaaagtatgcagtctccaagtatggagaaaaataaagaatatgtttttacttttttctcttactaaa

SEQ ID NO: 31022 - DNA, 441 bp, Homo sapiens
  misc_feature (1)...(441): n = a,t,c or g
ttgnanaccgctnttctgatnccnnnnnnnnnnnnnnnnnnnnnnnnnnnnnnnnnnnnnnnnnnnnnnnnnnnggcacgagttgctttcctcctgctacatagagggcatctttcacaagggagttttgtttcttgatttcaagaaggggaggcctagctcttataaatgtgccatttatttatcatttattaaggatgtatagggaggatcattgaaggacctatagtttgtaaatatagaggaggcaaaactttacccgtaccctctaaaagcctccacctggttctgagaactaaatggacacaaggcattagcaggagaaaagtatacagatttttacatgtgcataggaacccccatgggaaaatgaagacctaaggannnnnnnnnnnnnnnnnnnnnnnnnnnnnnnnnnnnnnnnnnnnnnnnngactcagt

SEQ ID NO: 31023 - DNA, 462 bp, Homo sapiens
  misc_feature (1)...(462): n = a,t,c or g
gnnnnnnnnntttgnnnnccccccctttggnnaccnnnnnnnnnnnnnnnnnnnnnnnnnnnnnnnnnnnnnnnnnnnnnnnnnnnnnnnnnnnnnnnnnnnggcacgagctggcattttcattcatttcatattaatgaaattaaaatttgacccttgtcattataaatagggataaaagaaaacaaaaattagaaaaactctggaaaaatttagatgataacatgttacctgcagaaattgactcaaaaaaatcccatagtcttggaggaatgaggatatgacaaagtcacaatgaatttcctgccacagctagaagatgctcggatagaaacaaatgctttctactttggttagaatttcttctctcctttcagaaatgtgaggagtggtttctactgttcaataaaaccacaacccaggctttacaatggagactttcctatcaagagactgagtgtc

SEQ ID NO: 31024 - DNA, 442 bp, Homo sapiens
  misc_feature (1)...(442): n = a,t,c or g
ttganaccgctcttgngatcccnnnnnnnnnnnnnnnnnnnnnnnnnnnnnnnnnnnnnnnnnnnnnnnnnnnggcacgaggaggcatcatggtaggtattggaactataaagttggaaatgacacaatctcagcttttgaaggatcctacaatcnnnnnnnnnnnnnnnnnnnnnnnnnnnnnnnnnnnnnnnnnnnnngaannnnnnnnnnnnnnnnnnnnnnnnnnnnnnnnnnnnnnnnnnnnnnnnnnnnnnnnnnnnnnnnnnnnnnnnnnnnnnnnnnnnnnntccctcacaatttgcccactggaaattccttatggacaaaggacagacagaacacaaagtcatccctctgagnnnnnnnnnnnnnnnnnnnnnnnnnnnnnnnnnnnnnnnnnttttatttgtataaaaatgcagattcactgggccagact

SEQ ID NO: 31025 - DNA, 469 bp, Homo sapiens
  misc_feature (1)...(469): n = a,t,c or g
ggnnnnncccccttganacctnttgacnnnnnnnnnnnnnnnnnnnnnnnnnnnnnnnnnnnnnnnnnnnnnnnnnnnnnnnnnnggcacgaggcacgttaatgtgcattctggccagaatcaattcctggggaaagttggaaaaatctcctttcctttctaaattagtgtctaccaggaaaaaaagttgtatatcttaagatcatacttgtctcacagcaaactgatcctggtgttgagtcaaattgagcctgttgatcaggtgtgcatagtgctccagaggctgtcatttgtaatggaaagcctaaggggcatttgcggagcagcccagccggcccctccccagcaccgtcctctctgtgtgtgttccgtctctgccaagttgtttccaattttcaacactaactggttgctgtcagcagacgtaatggaaaaatcatttctcagggtggcccctggctccctgggg

SEQ ID NO: 31026 - DNA, 456 bp, Homo sapiens
  misc_feature (1)...(456): n = a,t,c or g
ncttgnnnacagctatgacnnnnnnnnnnnnnnnnnnnnnnnnnnnnnnnnnnnnnnnnnnnnnnnnnnnnnnnnnnggcacgagnnnnnnnnnnnnnnnnnnnnnnnnnnnnnnnnnnnnnnnnnnnnnnnnnnnnnnnnnnnnnnnnnnnnnnnnnnnnnnnnnnnnnnnnnnnnnnnnnnnnnnnacccactgtgtccattcctcatatactatctttaaacagttattcctatattgatttttctctatccccaataaggacttaaaaattaaatatttgtatatgagattacaatatcccacatgtgaaaaaagggctacagaataagagaaaataaaaattactccagtagttatgaaggtacttatatatggaggattttttnnnnnnnnnnnnnnnnnnnnnnnnnnnnnnnnnnnnnnnnnnnnnnnnnnnnnnnnnnnccgtcgtt

SEQ ID NO: 31027 - DNA, 450 bp, Homo sapiens
  misc_feature (1)...(450): n = a,t,c or g
ttganactcttgactgattcgaatttaatacgactcnnnnnnnnnnnnnnnnnnnnnnnnnnnnnnnnnggcacgagcggcacgagctggaaggaataaaaaaatgtaaagtggcactgatttaaatctaactgtaataaactctaagtctcctaacagctctgaaggagtgcttgctattttaaaagattaataactctctgaattcctggtaaaagaaagcagaactaaagtaggacttaaaccaaagaataagatgccctggtaggggaggatagcatctggggcaaagcaaaagcaggccactgctggcccatgtggagagcagtaaaaaagtagccactttgatttagagaagggggtcagaangcagagcagtggatgnatggatggctgctgcgcnaggctttanatantgnccnaaatgccttgctagctgnccganggtga

SEQ ID NO: 31028 - DNA, 462 bp, Homo sapiens
  misc_feature (1)...(462): n = a,t,c or g
tttgnanacttnnnnnnnnnnnnnnnnnnnnnnnnnnnnnnnnnnnnnnnnnnnnnnnnnnnnnnnnnnnnnnnnnnggcacgagtcaaaatcatcctgtctacatttccccacataaaaatgaaacaatcctttctcctcgagaaaagattttctattacttcagcaacagaccttcaaagagactgagagaaattaatagtatgatacgcacaggagaaactcctactaaaaagagaggaattcttttggaagatggaagtgaatcacctgcaaaaagaatttgcccagaaaatcattctgccttattacgccgtctccaagatgtagctaatgaccgtggttcccactgaggttagtctcttgtattaaactcttcacaaaatctgtttagcagcagcctttaatgcatctagattatggagcttttttccttaatccagctgatgagttacagcctgt

SEQ ID NO: 31029 - DNA, 451 bp, Homo sapiens
  misc_feature (1)...(451): n = a,t,c or g
nnnnnnnnnnnnnnnnnnnnnnnnnnnnnnnnnnnnnnnnnnnnnnnnnnnnnnnnnnnnnnnnnnnnnnnnggcacgaggaacaatgaacctgaattctaaagctattggtagagagaaatgacctttgatgtaagaggtgtccctactgcacagaaaagatggggtgtttttcctttccaaaccaagggaatgtcaggggaagaaaagatagagattaaaggggaaaagtgagttttatgtatcttggcttctccattcagggctgatatcacaagtagtagataaattgaaagaaaggaatcccaaaagaagaaaaagactgtgttctgctcctcacttaaaactcagcaaaagggacccccaccaagtggcccatgccaatatgtaacacagaaaggaaaaccaacagcatgggcctcttggcttggaggaagccaaagtgcacatt

SEQ ID NO: 31030 - DNA, 454 bp, Homo sapiens
  misc_feature (1)...(454): n = a,t,c or g
accnnnnnnnnnnnnnnnnnnnnnnnnnnnnnnnnnnnnnnnnnnnnnnnnnnnnnnnnnnnnnnnnnnnnggcacgagcgtggtgtaactaagaattgcacaatgctgttgcagggcatgcgggatgcatgacaggtggggctacctgctcttccccctcgccctcccgaggcatcacggtgaatcaatctgagttctcatttctttagagcacagttggatcacagactgaaaacagactacagacatccactaccagttaattagaattggcataaaagatgttatctagtttccattcctactgctgccatttggatttaagagtgtggagnnnnnnnnnnnnnnnnnnnnnnnnnnnnnnnnnnnnnnnnnnnnnnnnnnnnnnnnnnnnnnnnnnnnnnnnnnnnnnnnnnnnnnnnnnnnnnnnnnnnnnnnnnnnnnnnnnnnnnt

SEQ ID NO: 31031 - DNA, 452 bp, Homo sapiens
  misc_feature (1)...(452): n = a,t,c or g
anactctnnnnnnnnnnnnnnnnnnnnnnnnnnnnnnnnnnnnnnnnnnnnnnnnnnnnnnnnnnnnnnnggcacgagtaacctcatgtggcctcactggacagcctctttgaggctgccttcatcaacacctgttactctgttgcccacttcattttccccagtctgttgtgttggctcgacatccctgagtcttgcccactgtctgctgtcttattcctgtgtttgttctgacttgacaaattactctcatctcaactactgtgtagcaatactttttattcaacttttaccaatttcctaataccatggtcagtgcaaatattctccattctttggctttacctcaagtttccatcctattatttttctctttcctaaanagaagtccatacattctaactctgttatgacttgcttgntccttaatctcttgtcattnggatnccact

SEQ ID NO: 31032 - DNA, 457 bp, Homo sapiens
  misc_feature (1)...(457): n = a,t,c or g
ctttggannaccngnnnnnnnnnnnnnnnnnnnnnnnnnnnnnnnnnnnnnnnnnnnnnnnnnnnnnnnnnnnnnnnnnnggcacgagaaatacctcatcacagctgcagccaaggcaaagcatgggaagccaaaccatctcccagggcctcctcaggctttaaaagacaggggcacaggtggaaccacagttatgagctttcttaagagtgtcagggataagaccttggagtcaatccttcacccacgtggttaggaggctgccctctccccagcaatgcagagcccccatggagggcaggtgggcctggagaatgagggttagggttctgcctgggatcatccaggaaggatctcagccctattcatgtttctgctctacagagcactatattctccttgttgagagctgttggcttcacaaaggagagttgatgtggccaagcctttccctcct

SEQ ID NO: 31033 - DNA, 235 bp, Homo sapiens
  misc_feature (1)...(235): n = a,t,c or g
gnananttggatacnnnnnnnnnnnnnnnnnnnnnnnnnnnnnnnnnnnnnnnnnnnnnnnnnnnnnnnnnnnnnnnnnnnnnggcacgaggtcattagggtcctctcagccacccagcaagtgtttgggccagaaacaagaaagaacttttccctcctctgaattcagactgtcttgctgtccaccactgggttagcctgcaccacagagtgcacgctggtttttttttttttt

SEQ ID NO: 31034 - DNA, 446 bp, Homo sapiens
  misc_feature (1)...(446): n = a,t,c or g
acnnnnnnnnnnnnnnnnnnnnnnnnnnnnnnnnnnnnnnnnnnnnnnnnnnnnnnnnnnnnnnnnnnnnnggcacgagcggcacgaggtcttttaggccttgatcagctagtcagttttggtgttgtaggacaaaaacagccataaacaatagtaattgagtgaacatggttgtttttccataaaacgttacttgtaaaaactggcagcaggctgagttttgtttaatggctgtagtttgctgaccaactcctgacttaggttgcttgacatttgttgggttttctctgtagcctcttccatggcaattcttttttaacattctacatttgcctgaaaagactgtattctctggttggagatagtccattaagttgagcatgctaattgtgttgtgcaaatgtcttcatcattgcaagtttttatccctttgaccagttactaaa

SEQ ID NO: 31035 - DNA, 440 bp, Homo sapiens
  misc_feature (1)...(440): n = a,t,c or g
gaanntttgatacngntatgacnnnnnnnnnnnnnnnnnnnnnnnnnnnnnnnnnnnnnnnnnnnnnnnnnnnnnnnnnnggcacgagnnnnnnnnnnnnnnnnnnnnnnnnnnnnnnnnnnnnnnnnnnnnnnnnnnnnnnnnnnnnnnnnnnnnnnnnnnnnnnnnnnnnnnnnnnnnnnnnnnnnnnnnnnnnnnnnnnnnnnnnnnnnnnnnnnnnnnnnnnnnnnnnnnnnnnnnnnnnnnnnnnnnnnnnnnntcccggcttacgtgtgacttttgcttagttattgactgtggcaagttacaggccaatgcctgattgaaaaaggggcagggaaggcccatcctaccattccataaaaaggagaaagattattggtgaagaacactaattactaccaaactcttcttccttaataaggatcttcctggacacc

SEQ ID NO: 31036 - DNA, 466 bp, Homo sapiens
  misc_feature (1)...(466): n = a,t,c or g
gnnnnngnnnnttnnnntttganatctggatgcctttangacgaacnnnnnnnnnnnnnnnnnnnnnnnnnnnnnnnnnnnnnnnnnnnnnnggcacgagggatcgtgctgtatattcgttgtgattggctgaataatggcccccacagatatacacatcctaatccccaaaatctatgaatgtgaactcatgtnnnnnnnnnnnnnnnnnnnnnnnnnnnnnnnnnnnnnnnnnnnnnnnnnnnnnnttgagctctaaatgtaatctctaaggcccttatcagagggaggcagaggaagatctgataaaaagaggcagcgatgtggccacagagacagagtggagtgacgtgaccgcaagccaagagacactggccgttgaagaggcaggacgaattctcttctggagcttccagagggagcctggtcctgctggcaccttatgcttgcccttaagtactgattt

SEQ ID NO: 31037 - DNA, 445 bp, Homo sapiens
  misc_feature (1)...(445): n = a,t,c or g
ttganactcttgacnnnnnnnnnnnnnnnnnnnnnnnnnnnnnnnnnnnnnnnnnnnnnnnnnnnnnnnnnnggcacgagnnnnnnnnnnnnnnnnnnnnnnnnnnnnnnnnnnnnnnnnnnnnnnnnnnnnnnnnnnnnnnnnnnnnnnnnnnnnnnnnnnnnnnnnnnnnnnnnagctctatatctttcattctagagttgaggggatccgtcagaaagaaattctgattattccttaaagaactcaagtgatctgatagaccacacaaggccagaaatcaggtaacctcaaatagtnnnnnnnnnnnnnnnnnnnnnnnnnnnnnnnnnnnnnnnnnnnnnnnnnnnnnnnnnnaattacccaccacgtgacaatcgagcatctaaaatgtagctagtacaacagagaaactacattttttacttaatagttaaataactcc

SEQ ID NO: 31038 - DNA, 448 bp, Homo sapiens
  misc_feature (1)...(448): n = a,t,c or g
tnnnnntttgannatttgaananccgnnnnnnnnnnnnnnnnnnnnnnnnnnnnnnnnnnnnnnnnnnnnnnnnnnnnnnnnnnnnnnnnnnggcacgagattttagaagcagctcctccgaccccggggcctttctggcctgttccctggggggtcgcgagtccccctccttgccacctttcggggggaaaaaatgacatttcgagtgtgactactttaaggcgcaggattttctccttcgtttggacctagatgcccccccttggatgggtggctgataggatgtcggcctgcaggctgggggtttaagcgtgactgatgggaaattatcgattggnnnnnnaaagggtaaatgagggnaactgnaggtgnnataaagnnacccatangggctttctggnnctgcagcgnatgnagcatggngctacttctatnnttgcantgctg

SEQ ID NO: 31039 - DNA, 437 bp, Homo sapiens
  misc_feature (1)...(437): n = a,t,c or g
anatttgaataccgntnnnnnnnnnnnnnnnnnnnnnnnnnnnnnnnnnnnnnnnnnnnnnnnnnnnnnnnnnnnnnnnggcacgaggcaaataagtgttgtgtctggtcatgttgaatatgtcctcgtgttcatggccatttttagttcttatctgatgtattttgttcagatttggcagtccttatggtcaagttttttcttactgacatgtaggagtctctttctattaagaattataacctccatatacttcttactttttcttgtgggttatttgtattttggttctatctgttttggtgcagatggttttttagatgttatatttatgcaaactggttattgtgtttgatttcagattatgaatatagctgatttatttcaaagtggttctactggaatgatcagcataaaccaatggggagtacatggca

SEQ ID NO: 31040 - DNA, 447 bp, Homo sapiens
  misc_feature (1)...(447): n = a,t,c or g
ttgganatttgaatanccgntnnnnnnnnnnnnnnnnnnnnnnnnnnnnnnnnnnnnnnnnnnnnnnnnnnnnnnnnnnnnnnnggcacgagactggagtttggtactattttattccttgagcagggcgctggtcacacaggtgtgctcaattgtgaaatttcgctgagctaaatcaatgatttatgtacctttttgggatgtatattatacttcgatagaacttacatatacaaaaattatttattcccaggaaatacctatggtgccttatcaaataaactttggggtaaacaccaacaatagtttatagttcagtagccatcattataatagaaaagctacttaaaagcaacagggaaaccaggtgcaaacctcaattgtgaagaagacatataaaaagaaaaataaaaaggcattacctatgggaatattgggggagaaaag

SEQ ID NO: 31041 - DNA, 437 bp, Homo sapiens
  misc_feature (1)...(437): n = a,t,c or g
ntttgaanaccgttatgactgattacgaatttaatacgactcnnnnnnnnnnnnnnnnnnnnnnnnnnnnnnnnnnggcacgagcaaagatggaaaagagagagagtgagaaacagtgtcttcttcctggctggagagcccgtgtcatgaaaatggggacagggtaagggatctgaaaggagcagcatagaagctgggaggatgaggcctgtcttcctggcattgatgctgcagaactacaggaaagaatttcagaggtgtcattatttttcatataagcagatgaaagagaagaattctttgaaaaaagaaaagtaggtgaaaaagggagagacggagggatgccagcagtgaaagaagccaggactgagatacaagattgtgatgctgggagagctgtgcaagggctcatgctgtaggtgaggagtgaggctgcc

SEQ ID NO: 31042 - DNA, 466 bp, Homo sapiens
  misc_feature (1)...(466): n = a,t,c or g
gnnnngnnnnatttgaatcccttatctggaagaccctnnnnnnnnnnnnnnnnnnnnnnnnnnnnnnnnnnnnnnnnnnnnnnnnnnnnnnnnnnnnnnnnnggcacgaggannnnnnnnnnnnnnnnnnnnnnnnnnnnnnnnnnnnnnnnnnnnnnnnnnnnnnnnnnnnnnnnnnnnnnnnnnnnnnnnnnnnnnnnnnnnnnnnnnnnnnnnnnnnnnnnnnnnnnnnnnnnnnnnnnnnnnnnnnnnnnnnnnnnnnntannnnnnnnnnnnnaaaaggantattgcatggtcagactgttcanatctcatgaatgctccctgcttctctattccttctttgatttgacatgtgccaggccatgtattccagtggatttctgtactttctactttattccaaaggctaagcattcctgaaagccacanagggagttgatgtgcttaaggaaagaagtatcg

SEQ ID NO: 31043 - DNA, 453 bp, Homo sapiens
  misc_feature (1)...(453): n = a,t,c or g
atttgananccgnttttcnnnnnnnnnnnnnnnnnnnnnnnnnnnnnnnnnnnnnnnnnnnnnnnnnnnnnnnnnnnggcacgaggaaaccctatactgagaatgggtaaagcagcagtaagaaagaaaatccttactaacatgatgttacactgtccctactggcctgcctatccctggatttctttgacatgacagagataaaattctgtattgtatgagccattcacttttgggctttctgtcactcctggccaaaactaatcctgatacaccaagctagcttgatgaagaatgtttatgccattgtggccggatgcggtggctcacgcctttttnnnnnnnnnnnnnnnnnnnnnnnnnnnnnnnnnnnnnnggcagaggtgggcagatcacttgtctggagtnnnnnnnnnnnnnnnnnnnnnnnnnnnnnnnnnnnnnnnnnnnnnn

SEQ ID NO: 31044 - DNA, 432 bp, Homo sapiens
  misc_feature (1)...(432): n = a,t,c or g
ngnnnnnnnnnnnnnnnnnnnnnnnnnnnnnnnnnnnnnnnnnnnnnnnnnnnnnnnnnnnnnnnnnnnnnnnnggcacgagcagtatgctgggtcccccccactggatgggacctctttgaggctggggactgagtcttttcatcttcgggtgtcctgaatggccttgctaatcagaggggtccctgggcgggcagcatcagcatcacgttggagctcgctagcgatgcagaatttccagctctccagggacctactgcatgggaatctgcattttatcaaggtttcctggcgcatatttgaagttgcgaagctccacccggcagcgcatgggtagctgcaaggggtggctgctcagtggacgccgggttgagggacagaaggaaagttgctggctgcgggctcctccatgctcttctnctntctcccagg

SEQ ID NO: 31045 - DNA, 439 bp, Homo sapiens
  misc_feature (1)...(439): n = a,t,c or g
ttnnnnnnntttggannnnnnnnnnnnnnnnnnnnnnnnnnnnnnnnnnnnnnnnnnnnnnnnnnnnnnnnnnnnnnnnnnnnnnnnggcacgagcgcgcacacatcccaaacttcaccttcaacctgggctactcagggaaattcttccacacaggtaccaatgctgaggacgctggggatgatctgctgctgtcgtatgtgaaggagttctggtggttcccccacatgtggagccacatgcagccccaccttttccacaaccagtccgtgttggccgagcagatggccttgaacaggaagttggctgtcgagcatggcattcccacagacatggggtatgcagtggcgccccaccactcgggcgtgtaccccgtgcacgtgcagctgtacgaggcttggaagcaggtgtggagcatccgngtgaccannacggagga

SEQ ID NO: 31046 - DNA, 433 bp, Homo sapiens
  misc_feature (1)...(433): n = a,t,c or g
accttgnannnnnnnnnnnnnnnnnnnnnnnnnnnnnnnnnnnnnnnnnnnnnnnnnnnnnnnnnnnnnnnnnnnnnnnnggcacgaggagagctagcaccatgataccctgaacacggccatccacaatgtttatttatttgctcccctgattgcccactctaaagtatgaatttcnnnnnnnnnnnnnnnnnnnnnnnnnnnnnnnnnnnnnnnnnnnnnnnnnnnnnnnnnnnnnnnnnnnnnnnnaattttgtannnnnnnnnnnnnnnnnnnnnnnnnnnnnnnnnnnnnnnnnnnnnnnnnnnnnnnnnnnnnnnnnnnnnnnnnnnnnnnnnnnnnnnnnnnnnnnnnnnnnnnnnnnnnnnnnnntgaagtatgaatttcttgaaggtgagaatggtgacctttattacctcaatgcctaccata

SEQ ID NO: 31047 - DNA, 464 bp, Homo sapiens
  misc_feature (1)...(464): n = a,t,c or g
gnnnngnnnnntnnnnntnnnnnntttgnanaaccgtnnnnnnnnnnnnnnnnnnnnnnnnnnnnnnnnnnnnnnnnnnnnnnnnnnnnnnnnnnnnnnnnnggcacgagagttcaagataaaattcctgaagcccatactgattattttaaacactgtttcagaattcctaagaaactaagcttctattaaaatacaaacaagttttgaagtcgtttgacgataaaagatattttctgggccaagcctggtgagggggaaggcttacagtattttgaaacaaactttggagagctcatcatagtttgaaaagattctgataatagatcacagacatgtttgtctcagcccggccgagacaacacactccatcctgagtcttgcgcaactgctcacattctacagccccagtgtacagaagtaccgggatctgtcaagacccacaactccagagccaggtggcc

SEQ ID NO: 31048 - DNA, 431 bp, Homo sapiens
  misc_feature (1)...(431): n = a,t,c or g
nnnnnnnnnnnnnnnnnnnnnnnnnnnnnnnnnnnnnnnnnnnnnnnnnnnnnnnnnnnnnnnnnnnggcacgagcggcacgagcggcacgagcggcacgagcggcacgagcggcacgagaggatattaaaatttacagcaaatattgaacttaattttaatgttttggaattatttctggtaaagtcaagaaaaagacaagaattcttgctctcactctggataaatggtcacatacatgtgtacacagagagtacctgtaagaatgttcattgcaacattgtttaatagtgaaaaactgtagtttacctaaatatgtattaaaagaagaaaggnnnnnnnnnnnnnnnnnnnnnnnnnnnnnnnnnnnnnnnnnnnnnnnnnnnnnnnnnnnnnnnnnnnnnnnnnnnnnnnnnnnnnnnnnnnnnata

SEQ ID NO: 31049 - DNA, 414 bp, Homo sapiens
  misc_feature (1)...(414): n = a,t,c or g
acnttnnnnnnnnnnnnnnnnnnnnnnnnnnnnnnnnnnnnnnnnnnnnnnnnnnnnnnnnnnnnnnnnnggcacgagcggcacgagctggaaactttgtcagaaaataactggggttactgaggctggagggggaaaagggcgggaagtgcatgggcaagactggacagacagcaggataggttaacaataatgcaactttcaaatacatgaaaagtagaatcaaagagaattcagctgaaatttctttgagcactaattaaatgtttgctgacccaacctaccactagaattgctgggccataaggtatgcaaataccagctttattaggtaatgccagtgtcatagcaggttacaccaccctgtagtgtggtgtaccaccctcaacangattcantgatggtaggttttca

SEQ ID NO: 31050 - DNA, 430 bp, Homo sapiens
  misc_feature (1)...(430): n = a,t,c or g
gctnnnnnnnnnnnnnnnnnnnnnnnnnnnnnnnnnnnnnnnnnnnnnnnnnnnnnnnnnnnnnnnggcacgagcagcacagtctggtaggctacagcagcaagtctctaaagaaaggctgagaacacccagaacaggagagttcaggtccaggatggccagcctgttccggtcctatctgccagcaatctggctgctgctgagccaactccttagagaaagcctagcagcagagctgaggggatgtggtccccgatttggaaaacacttgctgtcatattgccccatgcctgagaagacattcaccaccaccccaggagggtggctgctggaatctggacgtcccaaagaaatggtgtcaacctccaacaacaaagatggacaagccttaggtacgacatcagaattcattcctaatttgtcaccagaa

SEQ ID NO: 31051 - DNA, 439 bp, Homo sapiens
  misc_feature (1)...(439): n = a,t,c or g
nnctttgnannnnnnnnnnnnnnnnnnnnnnnnnnnnnnnnnnnnnnnnnnnnnnnnnnnnnnnnnnnnnnnnnnnnnnnggcacgagctagtttctgttttacaaaattataataaaatctttttaatggtagaagtgatgtgattgagtattcattaataagttgcttatgcattggaattataagcaaggcaaaagaagtgtaataatggagtttctgcccccaagggacttttactgtagtccggagagaagacctacacatatggaaagtttattaataataatcattactgatagctattaattgtaccattaagtggctattcagattatgatagtgaatctctacatttttaataatgttaaatctatgtaaatctatgtgatatacatgtattatttcactgaatcctccccacagacacatagggtacg

SEQ ID NO: 31052 - DNA, 445 bp, Homo sapiens
  misc_feature (1)...(445): n = a,t,c or g
ttgnnnaccttgnanacnnnnnnnnnnnnnnnnnnnnnnnnnnnnnnnnnnnnnnnnnnnnnnnnnnnnnnnnnnnnnnnnnnnnnggcacgannnnnnnnnnnnnnnnnnnnnnnnnnnnnnnnnnnnnnnnnnnnnnnnnnnnnnnnnnnnnnnnnnnnnnnnnnnnnnnnnnnnnnnnnnnnnnnnnnnnnnnnnnnnnnnnnnnnnnnnnnnnnnnnnnnnnnnnnnnnnnnnnnnnnnnnnnnnnnnnnnnnnnnnnnnnnnnnnnnnnnnncctatttgttttttatgcccataagaaacaacagtgaaggaactgcaattctgagtggttgagtgacttgtatgcaatcctggaaacagatgatggtagcatctgaaacatgaaattctctgatttcacctcctcctctgcctttgtcatgtgcctaattcttacttg

SEQ ID NO: 31053 - DNA, 439 bp, Homo sapiens
  misc_feature (1)...(439): n = a,t,c or g
nccttgganacnnnnnnnnnnnnnnnnnnnnnnnnnnnnnnnnnnnnnnnnnnnnnnnnnnnnnnnnnnnnnnnnnnnnnggcacgagcgagcaatgaaaaccacgcatgtgcgcaggcaagtgctctgagccaaagtcattaagctgacaatgaaacatgtgtatggagaaagaagggaacaatgattaaatggggaagaaagtgagtaagggctgaaaagagcctgctgttgactgtgtgcatcccaagaaggctggtggagggaagacccaggtcactgtaacagaaaggcggcaagagaggctcactgttcttccagaccattcatgtgagctaccactgagtcttttgtgttcccaatgttgaggactgaaaatgaatactaggccnnnnnnnnnnnnnnnnnnnnnnnnnnnnnnnnnnnnnnnnnnnnnnnn

SEQ ID NO: 31054 - DNA, 433 bp, Homo sapiens
  misc_feature (1)...(433): n = a,t,c or g
catnttgactgatacnaattttnnnnnnnnnnnnnnnnnnnnnnnnnnnnnnnnnnnnnnnnnnnggcacgaggatggggtgccctgcagggtgtccaagagagatgtacgatctcatgaatctgtgctggacatacgatgtggaaaacaggcccggattcgcagcagtggaactgcggctgcgcaattactactatgacgtggtgaactaaccgctcccgcacctgtcggtggctgcctttgatcacaggagcaatcacaggaaaatgtatccagaggaattgattgtcagccacctccctctgccagtcgggagagccaggcttggatggaacatgcccacaacttgtcacccaaagcctgtcccaggactcaccctccacaaagcaaaggcagtcccgggagaaaagacggatggcaatgatccaagggg

SEQ ID NO: 31055 - DNA, 433 bp, Homo sapiens
  misc_feature (1)...(433): n = a,t,c or g
acnttgntgnnnnnnnnnnnnnnnnnnnnnnnnnnnnnnnnnnnnnnnnnnnnnnnnnnnnnnnnnnnnnnnnnnnnnnnggcacgagtacatttttaaatagtctctcagctcacggacagggatttgaagcaacagtctccgttcaaagcctgctttaagctcaataccagctgcagtggggctccccttgggggaatagagctcaccttgcagtaggcaccatggtagcaaccagctcagaaaactaacctagggacagcagagaaatggaatgcggctctgccacattaaaaaagcaagtgtgcaagtgcgatgctacattgttttccaacccactttttctttgaggtgcaggctacatctgtgtgttggcagatggagagagacctcagatgtctcgagaaataagattagccatgagttgaccctt

SEQ ID NO: 31056 - DNA, 406 bp, Homo sapiens
  misc_feature (1)...(406): n = a,t,c or g
ccnnnnnnnnnnnnnnnnnnnnnnnnnnnnnnnnnnnnnnnnnnnnnnnnnnnnnnnnnnnnnnnnnnnggcacgagcagaatccatacctgagtccatttagagagttccaaaggtggaaacaccatcctagcattcggccaaccttggaaggtggaaaaaggattgcatacggagccagagctctcaatgaaggtggctttcagtctataccaaaactcacctttcctggtggtttactaattggttgtagtcctggttttatgaatgttcccaagatcaaaggtactcacacagcaatgaaaagtggaattttagcagcagaatctatttttaatcaactaactagtgaaaatctccaatcaaagacaataggactccatgtaactgaatatgaggacaattt

SEQ ID NO: 31057 - DNA, 415 bp, Homo sapiens
  misc_feature (1)...(415): n = a,t,c or g
anatccnnnnnnnnnnnnnnnnnnnnnnnnnnnnnnnnnnnnnnnnnnnnnnnnnnnnnnnnnnnnnnnnnnnggcacgaggcctaagtctgaggttagtgtataaacagatatttactgaagtcctgctgggtgcagacaccgtggccagccctgaggctacagtcgagatgaagccagtctctgtcctcatgaagacctgtctattgataagagaaagctcactgagcattgaccctgtgcccactgcttttggtgcatctctcatttaatccttctatcaaatctgtgaaataaacacatcaccatcatccctatttcacatttagggaaacatatgcttagagagggtaagtaacttggtcaaggtcacacagcttcgaactctcctnnnnnaggcgcaggaatganatgc

SEQ ID NO: 31058 - DNA, 415 bp, Homo sapiens
  misc_feature (1)...(415): n = a,t,c or g
nnnnnnnnnnnnnnnnnnnnnnnnnnnnnnnnnnnnnnnnnnnnnnnnnnnnnnnnnnnnnnnnnnnnnnnnggcacgagctcagtccttgctttcttttctctctgctccccaccgaccttccagccctctcttgttctggtctgaggttgttgcagtgggggttgcagatgtctgggggagactgccaggagacagagacaatagttgtgcctgttgttctctgcatgccacgaagtccttttcccttagcatttgcttctgatttaagggggaaaaatatggctttatgtgtttttatagctaaagtgatcagacattccgtttgtgttgagattttaggtctagaaaggaatggaatggggagtagggatgtaggccagtcccttgtcagatttttgatttgctggacact

SEQ ID NO: 31059 - DNA, 414 bp, Homo sapiens
  misc_feature (1)...(414): n = a,t,c or g
nnnnnnnnnnnnnnnnnnnnnnnnnnnnnnnnnnnnnnnnnnnnnnnnnnnnnnnnnnnnnnnnnnnggcacgaggcatggttccacctggcttcagggtgcgtgccatccaacctgaggagaaaaggcgtagctcaagcagggagaagtaaggaagatgtggacaaggaattcccgatacagctgacgggcaagaagaagacatgcaaagtcttcacctgggagcacagaatcagagctgggctctacagctaatcccagctgtggaaaggacgggcaccaaaaccaatcatgggtaagaagacagggcaatgcagtggcaataaaagcgtcacagagaacaaagaggaggaggaaaataccagggagaacaatgccaggaaagacaatgcctgtgatcttgacttaaaacac

SEQ ID NO: 31060 - DNA, 420 bp, Homo sapiens
  misc_feature (1)...(420): n = a,t,c or g
nnactnnnnnnnnnnnnnnnnnnnnnnnnnnnnnnnnnnnnnnnnnnnnnnnnnnnnnnnnnnnnnnnnnnnnggcacgagaatgctgaatggctaatatagccttctctcaaatgtttgaagtgtttgaaactctcaaacactgaaactctcaaatgttcagtgtttgaaaaccagggcccttttttttttnnnnnaangntttnnnccccaaannaaaancnnancnccnngtccnacnaggggncntgacccttncnnccgggttnantngtngccaaaaggnaaggggccttnnctaaaaaaaanttnaggnaancgnaaaacnttgaancccnngtttgannaaacnttgnantttttggnccccanggaaaaagtaanaaanngnncnntaaangtnncagngaaaaanattag

SEQ ID NO: 31061 - DNA, 420 bp, Homo sapiens
  misc_feature (1)...(420): n = a,t,c or g
acnnnnnnnnnnnnnnnnnnnnnnnnnnnnnnnnnnnnnnnnnnnnnnnnnnnnnnnnnnnnnnnnnnnnnggcacgaggctatatatacatatagatatagatatataaagctacataaggaattctaattaatagtttgaaccatgagtagtgagaataaaattattctaaattttgacaagggaaattgttattgttttattttttaagatgttattttactggagcatattctaattagtctcctccaataaaagcagaatctttttatttagtaattgactctcatctgatactcttgggtactataattttgttgtttctgtatatttgagtattatcaataatccaaaactgatagaggtgctgatagtttatatttctggaaggctagaagataacctgtgaaaagctgatg

SEQ ID NO: 31062 - DNA, 416 bp, Homo sapiens
  misc_feature (1)...(416): n = a,t,c or g
nacnnnnnnnnnnnnnnnnnnnnnnnnnnnnnnnnnnnnnnnnnnnnnnnnnnnnnnnnnnnnnnnnnnnnnggcagaggtatggaggtggcttttattcaacccaggacacaatcaatgccattgagggcctgacggaatattcactcctggttaaacaactccgcttgagtatggacatcgatgtttcttacaagcataaaggtgccttacataattataaaatgacagacaagaatttccttgggaggccagtagaggtgcttctcaatgatgacctcattgtcagtacaggatttggcagtggcttggctacagtacatgtaacaactgtagttcacaaaaccagtacctctgaggaagtttgcagcttttatttgaaaatcgatactcagggtattgaagctcatggtgct

SEQ ID NO: 31063 - DNA, 425 bp, Homo sapiens
  misc_feature (1)...(425): n = a,t,c or g
ttnnnnntttgannnnnnnnnnnnnnnnnnnnnnnnnnnnnnnnnnnnnnnnnnnnnnnnnnnnnnnnnnnnnnnnnnnnnnnnggcacgagcggcacgagaccctgtctctaaaagaagaaaacctctgttcctcagggttcccccatccttgggcagtgctccatcatggcatccaccgccttgactgtgacgccgcctcctcaaatggccttcccttccacaccccagcaggagggcaaccccatcaccatcctgtgactccctgcctctgtcacctaacgtcacctctgtcactatctattccctgcttagaaaccatgtgtcccaccccatggtaagttccactctatctgtcttacccctgctgtaccccagcacctagcacagtagccagcatgcgttaggtactcaaatatctggtg

SEQ ID NO: 31064 - DNA, 410 bp, Homo sapiens
  misc_feature (1)...(410): n = a,t,c or g
ntnnnnnnnnnnnnnnnnnnnnnnnnnnnnnnnnnnnnnnnnnnnnnnnnnnnnnnnnnnnnnnnnnnnnnnggcacgagcggcacgaggagccatccatccatgccataccacttgtcagggcacaggggactggctgggcccccagggctgctccccacttgcagcacaatgccttctccacctgccctcccactcttccagtccaatccacgctgtcttctgttgcaggactaacctttgagaaatccttttgtgaagtcattgcctgctcaagaatgtacagtggctccccaatgccttggaggccataaggccagccagttctagctctctattacctgtccccactcaactgactcatacctgttttcggctgcatcactatgtgccccacagagaacgatgat

SEQ ID NO: 31065 - DNA, 411 bp, Homo sapiens
  misc_feature (1)...(411): n = a,t,c or g
nnnnnnnnnnnnnnnnnnnnnnnnnnnnnnnnnnnnnnnnnnnnnnnnnnnnnnnnnnnnnnnnnnnnggcacgagctccatcgcagttcttagagctcttgtttagtccctttggatctgcacagtactccagtgtgtgggcgcaccataagtttattcagcaagtgccctggtgatagggatcgggggtattggaagcctttggctggtaaaaataatgttgtagcaaataacatcatgcatatgttctttgagatttctggaggtgtctctttagcatagatttctagaaggcattccttacgtcacgtttaggtttatagtttgacctcatggtgattaaggtatttgggaaatgcaaatgagagtttcgaagaagccagatttttcccattagttcactgtttttc

SEQ ID NO: 31066 - DNA, 407 bp, Homo sapiens
  misc_feature (1)...(407): n = a,t,c or g
nnnnnnnnnnnnnnnnnnnnnnnnnnnnnnnnnnnnnnnnnnnnnnnnnnnnnnnnnnnnnnnnnnnnnnnggcacgagtgtgaaactagaagccaacagccagaagcagtatctcttgactggtcaggtcctcagtgatggaaaagtcttcatccatctgtgcaactacatcgagccctgggaggacctgtccttggtgcagagggaaagtctgaatcatcactaccatctgaactgtggctgccaaatcaccacctgctacacagtaccctgtaccatctcggcccctaacgagtgcctctggacagactggctgttggaacgaaagctctatggttaccaggctcagcattatgtctgtatgaagcatgttgacggcacctgcagctggtaccggggccacctg

SEQ ID NO: 31067 - DNA, 417 bp, Homo sapiens
  misc_feature (1)...(417): n = a,t,c or g
nnacnnnnnnnnnnnnnnnnnnnnnnnnnnnnnnnnnnnnnnnnnnnnnnnnnnnnnnnnnnnnnnnnnnnnnggcacgagatttttaaccataattttgacatgattgagatgtacttgaggcttttttgttttaattgagaaaagactttgcaatttttttttaggatgagcctctcctagacttgacctagaatattacatattcctccagtaatactgaagagcaaaagagaggcaggattggggtcacagccgcttcttcagcatggaccaagtgggccttggggattgcagcgttctcgaagtggctgtaggactcgaatttacagaaagccacagaggtgcaacttgaggctctgctagcaagccaccagtgaggctattgggtaaccacctttctatacaggagattgg

SEQ ID NO: 31068 - DNA, 460 bp, Homo sapiens
  misc_feature (1)...(460): n = a,t,c or g
ggnnnnnnnnnnttnnnntttgnnnnnnnnnnnnnnnnnnnnnnnnnnnnnnnnnnnnnnnnnnnnnnnnnnnnnnnnnnnnnnnnnnnnnnnnnggcacgagatgacttgcccgcagttgactcaatgatagagaccagtctctaagccaggtctaagcccgtgtctctgcctgttagacaaatctgattggccttgttctctgtgagtttaaggaacagaacgaggataactgggcagaaattaatagaaagacagattttgggctcgttatataaggaatcactaatgagccgtccaaggtgggaacaaactgcttccagagtagtgagtttctttgtcgctggaggtattcaaacaaatgccagaaaatcattgggtgggcatattatagaaaattttcaagcattggcaagagatcgaaccagactttccaatcctataattgnataatctgcag

SEQ ID NO: 31069 - DNA, 410 bp, Homo sapiens
  misc_feature (1)...(410): n = a,t,c or g
naaccgctatgacatgattacgannnnnnnnnnnnnnnnnnnnnnnnnnnnnnnnnnnnnnnnnnnnnnnnnnggcacgagggaattaggtatgaggaagcatctttggtcattcttagttctttgagatatttttcatttaaatgaaaacgtatgcctttttctagatcttgatgcaaacagttgcatcaaagtggagcttgtgagtaagaatgcagatagaaaatcatgggaattattcacgtggatgacctgattttattctagtcttacttatgaagtcttcttcctgctccacaacgattgaagagacaggaaacaaacttttaaaattacgtaaataaacgggccaaggggaaatacaagaggacaagcaaagacagacacagctcggcactgcactcatggct

SEQ ID NO: 31070 - DNA, 466 bp, Homo sapiens
  misc_feature (1)...(466): n = a,t,c or g
gnnnngnnnnnnnnnngnnnnnnnnnttnnnnnccnncncccnttggnntacnnnnnnnnnnnnnnnnnnnnnnnnnnnnnnnnnnnnnnnnnnnnnnnnnnnnnnnnnnnnnnnnnnnnnggcacgaggagagagagacagaaagaaagagaaatttgaagctggagatggggatgcatagggacatggagagggagaaggaggggaccataaagtggggtgctgcataggggaaggaccagaggaagaatgtgctgatggcatgattgtctgaaggctgagaatagaaatgttgaatacagatttttaacatgtctgctgtagttatgcacactttattaagcaagaggaaaacatgggccagtttcataatttatagtttttcataaaagaagaatgnnnnnnnnnnnnnnnnnnnnnnnnnnnnnnnnnnnnnnnnnnnnnnnnnnnnnnnnnncaggagga

SEQ ID NO: 31071 - DNA, 427 bp, Homo sapiens
  misc_feature (1)...(427): n = a,t,c or g
accngctatgatttgantacnnnnnnnnnnnnnnnnnnnnnnnnnnnnnnnnnnnnnnnnnnnnnnnnnnnnnnnnnnnnnnnnnnnnnggcacgagctgggaaggaagtggagggggtgggtcttgaaggtagctaagctgcttcccgcttagtcattcctgctgacaaatttctctcctgttggagagtaactgggtggatctcgcgccgtgcaggtttctcaaaccaatgtaagactttttttcacttcgagaactggctgttgccagttaattactttcttttagccttagtcagatctaaaatgtgaccttttgtacagtcaggacattgcacttttctgataatattaaattatttcatgaagactggactacctcatctgtgaaattgtaaaaagatttatttgaagttattgngtttaa

SEQ ID NO: 31072 - DNA, 417 bp, Homo sapiens
  misc_feature (1)...(417): n = a,t,c or g
naccagctatgattgattaccaatttntacgactcnnnnnnnnnnnnnnnnnnnnnnnnnnnnnnnnnnggcacgagccatcttgtactaagaagataagttgttcagaacagatttgagctggagttctgttttatgaatttttccttgaatcgtctatcaacatgcatgaatgattatgtgaaaagtgtagttcttatgtaaatcattttgctaatgcacttaaaagacaaaatatttaatttgattatagatgtttttccttgctcaatagtggatagtaagattttcattatgtctgtaagggtttcagttatttttatgacaagggaaaggtcatttccgacatatatggtccagtcaagttaaccttcagagaattaacagcaaaggactgcttcttggcatancttaatg

SEQ ID NO: 31073 - DNA, 417 bp, Homo sapiens
  misc_feature (1)...(417): n = a,t,c or g
nnnnnnnnnnnnnnnnnnnnnnnnnnnnnnnnnnnnnnnnnnnnnnnnnnnnnnnnnnnnnnnnnnnnggcacgaggggtttaatgagctaaggatgtctgtgcttctgggaagtgtgagccatggctgtgtcacccttgtccctgaccccgctgatgtgggggctctgcagagagcccagctgggtactcactggatgcctgcaagtccaaacatcctgttcttttttgaactcctcactggagaaacagggaaaagctgtagttttttccttccactcatatcgagtgacacaaaaaaacaagcctgtcgggggccgagctgcttgactctctgatgtttgggagcagatccgagcagctgagcagggtggctgntcctttcctggattagggctgaatctgtgggaaccacacc

SEQ ID NO: 31074 - DNA, 434 bp, Homo sapiens
  misc_feature (1)...(434): n = a,t,c or g
gccccccnttgnccnnnnnnnnnnnnnnnnnnnnnnnnnnnnnnnnnnnnnnnnnnnnnnnnnnnnnnnnnnnnnnnnnnnnnnggcacgagtggaaagagggtgagatttccagaggtcaaggagtgttgccttttaggggaagtaggatatgaaccactaaacatctcttcatgccacaagaattccatagaaaaaatatttaggaatttgcctggtagcatttcaagccacactacaagagtctaaatgcttattgggactcgctcttcaaaaactatctcaagaaagataacttgacagctgaaaggtttatgatccctaaatcttctgtttcaatatattcatactaacctcctttacacagtgcctcttgactatgaaactttagtgcagctattttgcctcacctataaaataacntanattatata

SEQ ID NO: 31075 - DNA, 430 bp, Homo sapiens
  misc_feature (1)...(430): n = a,t,c or g
ntttggnnaacagctatgacnnnnnnnnnnnnnnnnnnnnnnnnnnnnnnnnnnnnnnnnnnnnnnnnnnnnnnnnnnggcacgaggtaagccctctgaaaagcctctccagtgactaataatgaatgttgttaaaactaccttaatcagtcaacataaaattcaaaacaaaaagaaaaacttttggaacatttattccagtttatgactctgaagggatagaaaacattaacatttaaaaagttagattnnnnnnnnnnnnnnnnnnnnnnnnnnnnnnnnnnnnnnnnnnnnnnnnnnnnnnnnnnnnnnnnnnnnnnnnnnnnnnnnnnnnnnnnnnnnnnnnnnnnnnnnnnnnnnnnnnnnnnnnnnnnnnnnnnnnnnnnnnnnnnnnnnnnnnnnnnnnnnnnnnnnnnnnnnnnnnnnnnaa

SEQ ID NO: 31076 - DNA, 403 bp, Homo sapiens
  misc_feature (1)...(403): n = a,t,c or g
annnnnnnnnnnnnnnnnnnnnnnnnnnnnnnnnnnnnnnnnnnnnnnnnnnnnnnnnnnnnnnnnnnnnnggcacgagaaaaaacataaacaaaaactgttgatagacccacaggagccccatacgctggagttggcaccggcaggtggtgcctcaggtctgcagggagcacatgggaagggccctgtggcagcagagtgcccaccggcagcagagtacagcagtctggcccagcacagacgcttggagaggcaggactcttcacacggtgctgctggcttgaggacacagnnnnnnnnctgaccttccctcaggttgngctgtggtgtgagcagctgccttggcctcgcctctccccggggcaggcctgtgcctcagcncccactggccacctccctactt

SEQ ID NO: 31077 - DNA, 419 bp, Homo sapiens
  misc_feature (1)...(419): n = a,t,c or g
ntttnnntaccnnnnnnnnnnnnnnnnnnnnnnnnnnnnnnnnnnnnnnnnnnnnnnnnnnnnnnnnnnnnnnnnnnnnggcacgagccagaaaatctcttaatcagccacaatgatgtcctaaaactgtgtgactttggttttgctcgtaatctgtcagaaggcaataatgctaattacacagagtacgttgccaccagatggtatcggtccccagaactcttacttggcgctccctatggaaagtccgtggacatgtggtcggtgggctgtattcttggggagcttagcgatggacagcctttatttcctggagaaagtgaaattgaccaactttttactattcagaaggtgctaggaccacttccatctgagcagatgaagcttttctacagtaatcctcgcttccatgggctccg

SEQ ID NO: 31078 - DNA, 422 bp, Homo sapiens
  misc_feature (1)...(422): n = a,t,c or g
nnnnnnnnnnnnnnnnnnnnnnnnnnnnnnnnnnnnnnnnnnnnnnnnnnnnnnnnnnnnnnnnnnnnnnnggcacgagtgatcagttctttagggttataatcagataatgcaagaatttgaattagggataaaagtaaatctgtccaagattataattcaaatatcagtacacacaaggagatatcagaagttaatgtggcgccaggtgcagtggcgtgcatctgtaattgnnnnnnnnnnnnnnnnnnnnnnnnnnnnnnnnnnnnnnnnnnnnnnnagtttgaggccagtctgaggaaacatggcaagaccctgttttgaaaaaaaaaagaagtgaatgtgtgcggaagtgctgtggagcccacatcctatgggctctgcttttctagcaggcacattgnctttgtggcgnnaccctc

SEQ ID NO: 31079 - DNA, 426 bp, Homo sapiens
  misc_feature (1)...(426): n = a,t,c or g
accgtttngacacnnnnnnnnnnnnnnnnnnnnnnnnnnnnnnnnnnnnnnnnnnnnnnnnnnnnnnnnnnnnnnnnnnnnnggcacgagcaagtgggatcaactggaatcacctggagcttcatcactcatgcatgtggcatctggactgtgatgagtggagagtcaggctaagctgggactgtgcagtggagcactgcatgtggcctccccaggtggccccagcttctcacagcctagtggctgtgtccccaggggacacattttgaaagggagcactgagagaatgaggggcagagtcacaaggtttcatttatatctcgtacccaattggtcaaagcagtcactagtctgcccaggtccaagaggaggggacaaagccccacatttcggtggaaggaatatcaaagtattggtgaccatttt

SEQ ID NO: 31080 - DNA, 423 bp, Homo sapiens
  misc_feature (1)...(423): n = a,t,c or g
accnnnnnnnnnnnnnnnnnnnnnnnnnnnnnnnnnnnnnnnnnnnnnnnnnnnnnnnnnnnnnnnnnnnggcacgagagacaatgttgagtttggatttgtaactgttttttgctttttgtttgagttggttgattggggtttgatttgcttttgaaaagatttttatttttagaggcagggctgcattgggagcatccagaactgctaccttcctagatgtttccccagaccgctggctgagattccctcacctgtcgcttcctagaatccccttctccaaacgattagtctaaattttcagagagaaatagataaaacacgccacagcctgggaaggagcgtgctctaccctgtgctaagcacggggttcgcgcaccaggnnnnnnnnnnnnnnccccagaagcanagagcacagccctg

SEQ ID NO: 31081 - DNA, 428 bp, Homo sapiens
  misc_feature (1)...(428): n = a,t,c or g
gctatnnttngatnnnnnnnnnnnnnnnnnnnnnnnnnnnnnnnnnnnnnnnnnnnnnnnnnnnnnnnnnnnnnnnnnnnnnnggcacgagagcaggcacagtcccgggccgacgccccagcccgactgtagcctcaggaccggccagaggagcgtccaggtgtcggtcacctcgtcgtgctcccagctgtcctcctcctcgggctcatcctcctcatccgtggcgcccgctgccggcacgtgggtcctgcaggcctcccagtgctccttgaccaaggcctgccgccagccacccattgtcttcttgcccaagctcgtgtacgacatggttgtgtccactgacagcagtggcctgcccaaggccgcctccctcctgccctccccctcggtcatgtgggccagctctttccgcccctgctcagcaagac

SEQ ID NO: 31082 - DNA, 424 bp, Homo sapiens
  misc_feature (1)...(424): n = a,t,c or g
accnnnnnnnnnnnnnnnnnnnnnnnnnnnnnnnnnnnnnnnnnnnnnnnnnnnnnnnnnnnnnnnnnnnggcacgaggaatttagagagctgagaagagcagagggtgatctaactggggggataagaaagcaaatggaccagtctggaagcaggacacagcacaacacgtttggcaaaccaaggaaggtgccatagacttggaatatagggtccctggagtggagtagagtggggaaggagttgaggtgaaagggagttttgaatcagattgtaaagaggcttagatttcatattctggagttgaggctttacttgttgggcaaggagtggagtgaagccctatcagaagcacctgccagagtcctggctcaaattcctccatcccannnnnnnnnnnnnnnnnnnnnngttataattagcc

SEQ ID NO: 31083 - DNA, 439 bp, Homo sapiens
  misc_feature (1)...(439): n = a,t,c or g
nnnnnnnnnnnnnnnnnnnnnnnnnnnnnnnnnnnnnnnnnnnnnnnnnnnnnnnnnnnnnnnnnnnnnnnggcacgagggcacgagccctgtgtgtatatctctttgcttctatggtcctgaaaagaggaatggttgacgaaaagatataaagtgatcattagaatgaattggtagtaaatccagagatggccttgcctgtggccagggtacacacctatgaagcccaactcagagcaaactgctgaagacaggaaagggagtaatcactgtccttatcccacataagagtcttaagttgcaaactagttaaaagaattccaaagcagtcacaatggtctttgatgagaatggcagtcaaagataagggaaattacttacaaaagaatacttctaaggcaagtactccaggagataaataaaacccgaaaaatataag

SEQ ID NO: 31084 - DNA, 470 bp, Homo sapiens
  misc_feature (1)...(470): n = a,t,c or g
gnnnngnnnnnnnnnnnnnttnnnnancnnnntttgnnnnnnnnnnnnnnnnnnnnnnnnnnnnnnnnnnnnnnnnnnnnnnnnnnnnnnnnnnnnnnnnnnnnnnnnnnggcacgagaggggtgccatctcgccggggccgaggaggagggaggccccctcctcaagtttgcccaggctggagccctccagccaagtctctggctcccaagaaacctcccacaggccctttgccaccaagtaaggagcctttgaaagagaagttgatcccagggcctctgtcccctgtggcgcgcggaggcagcaatggaggtagcaatgtgggcatggaagatggggagcgaccccgaaggaggcgacatgggagggctcagcagcaggataaaccgcctcgtttccggaggctgaagcaggaactggagaatgccgcaagggggtctgagggcaagccctccctaacccttccagcc

SEQ ID NO: 31085 - DNA, 435 bp, Homo sapiens
  misc_feature (1)...(435): n = a,t,c or g
ccgttntgacnnnnnnnnnnnnnnnnnnnnnnnnnnnnnnnnnnnnnnnnnnnnnnnnnnnnnnnnnnnnnnnnnnnnnnggcacgagccacagactcagagagaacccaccatggtgctgtctcctgccgacaagaccaacgtcaaggccgcctggggtaaggtcggcgcgcacgctggcgagtatggtgcggaggccctggagaggatgttcctgtccttccccaccaccaagacctacttcccgcacttcgacctgagccacggctctgcccaggttaagggccacggcaagaaggtggccgacgcgctgaccaacgccgtggcgcacgtggacgacatgcccaacgcgctgtccgccctgagcgacctgcacgcgcacaagcttcgggtggacccggtcaacttcaagctcctaagccactgcctgctggt

SEQ ID NO: 31086 - DNA, 447 bp, Homo sapiens
  misc_feature (1)...(447): n = a,t,c or g
gntnnnnnnnnnntttnnnnnnnnnnnnnnnnnnnnnnnnnnnnnnnnnnnnnnnnnnnnnnnnnnnnnnnnnnnnnnnnnnnnnnnnnggcacgaggtagttcataagccctgtagttgactgtgtggtggcctggccaaggggcatattagccagagtagaagaggcaagagctgggtcttagtggccaggctgaagggataaagtgtgaggttggcccttgcagaagaaagtgattggacatcattccagagtagagtgcccaaaggaaagaaccaaagcatccctgatccaggccactgttgatgtcaaaaggggtggggcttttggcatctcatagggcgttcccagtcgtgacacattatagttctgaatggttcacataattaaggcattgattcgttccttatatgaatcacagganggganatggaaatgattagaca

SEQ ID NO: 31087 - DNA, 449 bp, Homo sapiens
  misc_feature (1)...(449): n = a,t,c or g
gntnnnnnnnnnnntttnnnnnnnnnnnnnnnnnnnnnnnnnnnnnnnnnnnnnnnnnnnnnnnnnnnnnnnnnnnnnnnnnnnnnnnnnggcacgagaaacctttatgaacctcacatttcttcccccggaggacctaaaagatggtcctagggaaagtgcaactcagggagagccagcactgtcctgtggggaaagcggggagtgggtaggaataaggtaatggggagtgatgcggctcagagatctgaagtgttgaacaaccggagacagcaggcgggactggaccatcaagctgatggaccccagacatatgcgcacactcacaccatttgagccaatcctactggaccagcccagtaggagcaggcctgtgggcagggccctggggtggaggaggatttcaggcaccctcagcttcttcctatggttccaccattagagcttct

SEQ ID NO: 31088 - DNA, 448 bp, Homo sapiens
  misc_feature (1)...(448): n = a,t,c or g
gtnnnnnnnnnnntttgnnaacagcttgacntgattacnaatttaatacnnnnnnnnnnnnnnnnnnnnnnnnnnnnnnnnnnnnnnnnnggcacgaggcatcccgctggtgcctcccgggacgaaggacttcccgagcggtgtggggaccgggctctgacagccctgcggagaccctgagtccgggaggcaccgtccggcggcgagctctggctttgcaagggcccctccttctgggggcttcgcttccttagccttgctcaggtgcaagtgccccagggggcggggtgcagaagaatccgagtgtttgccaggcttaaggagaggagaaactgagaaatgaatgctgagacccccggagcaggggtctgagccacagccgtgctcgcccacaaactgatttctcacggcgtgtcaccccaccagggcgcaagcctactattacttg

SEQ ID NO: 31089 - DNA, 450 bp, Homo sapiens
  misc_feature (1)...(450): n = a,t,c or g
gnnnnnnnnnnnnntttgnnnnnnnnnnnnnnnnnnnnnnnnnnnnnnnnnnnnnnnnnnnnnnnnnnnnnnnnnnnnnnnnnnnnnnnnggcacgagctatcaaagcaccttagacatgcacgaggaagaaatatacacctctcttcagtgggatagcccagcaccagacacttaccagaaatgtctgtcttccaacaaatgttcaggagcatgctgtcttgtgatggtgatttcatgtgttttctgcatgggattattaacagcatccattttcttgggcgtcaagttgntgcaggtgtccaccattgcgatgcagcagcaagaaaaactcatccaacaagagagggcactgctaaactttacagaatggaagagaagctgtgcccttcagatgaaatattgccaagccttcatgcaaaactcattaagttcagcccataacagcagt

SEQ ID NO: 31090 - DNA, 453 bp, Homo sapiens
  misc_feature (1)...(453): n = a,t,c or g
gnnnnnnnnnnnnntttganacccttnnnactttgannacnnnnnnnnnnnnnnnnnnnnnnnnnnnnnnnnnnnnnnnnnnnnnnnnnnnnnnnnnnnnnnnnnnnnnggcacgagtgccccgactgtggtctgaggccacccccatcagcacctggggtgctttgtaaactcctagttcctgggcacacgttggatcctcccagtcagagcttctgcatgtaggatctagagagctgcatttttaacaagcaccctgggtaaatgttaggaccacaaaagtttgagaatcactagtccactagaatatgtggctctaagcacagatctgattctgactgtgtgactctgtctgctagagggcagagttgatcccgcatcccagctccattcaggtggtcaccacatgctcactgtcctgctaagctgtaggcatgccagcgctctgtgttg

SEQ ID NO: 31091 - DNA, 457 bp, Homo sapiens
  misc_feature (1)...(457): n = a,t,c or g
gnnnnnnnngnnnnntttgnnaccgttatgactttgatnnnnnnnnnnnnnnnnnnnnnnnnnnnnnnnnnnnnnnnnnnnnnnnnnnnnnnnnnnnnnnnnnnnnnnnggcacgaggcagatttaggagcaagacccctagctttggactgttaagggttgccaaagatctgtgtttagcgggctggttttccttagaaccgaagcattagcagcgtccggtgaaaactgagcatacaataccgtggtctggaatttggacagataattaaatgagacaccttactggggcgttcagagagagggggaagaataaaggtaagggtgggaagaggtttgtaaaacagcagatcccggtgtttaatttcagagtggaggtttcggatcttcagacgggaaactggaagaggcgtgtgcattagtttaatttactcgctgtggcatgtgacagcgaccc

SEQ ID NO: 31092 - DNA, 545 bp, Homo sapiens
  misc_feature (1)...(545): n = a,t,c or g
nnnnnnnnnnnnnnnnnnnnnnnnnnnnnnnnnnnnnnnnnnnnnnnnnnnnnnnnnnnnnnggcacgagacttgatatacagaaaagtgcacacgttgagtgtatatacatcttgatgtatttgtatgtatgcgtatacccatgataccgtcatcacaaccaagacactaaacgtttttataatctccaaaaatttctttgtttgtgtgtgtgtgtgtgtgtgtgttgtaacaatagttaacattaaatctaccctcttaacatatcataaagtgcacaatattgttaattgtgggtactatacagtagatctctagaactcgttcattttgcataaagaaattctatagctgaagaacaactctccatttccccctcccctcannnnnnnnnnnnnnnnnnnnnnnnnnnnnnnnnnnnnnnnnnnnnnnnnnnnnnnnnnnnnnnnnnnnnnnnnnnnnnnnnnnnnnnnnnnnnnnnnnnnnnnnnnnnnnnnnnnnngnggctgacttattttacttagcataataacctctaggttatc

SEQ ID NO: 31093 - DNA, 552 bp, Homo sapiens
  misc_feature (1)...(552): n = a,t,c or g
tttnnnnnnnnnnnnnnnnnnnnnnnnnnnnnnnnnnnnnnnnnnnnnnnnnnnnnnnnnnnnnnnnnnnnnnnnnnggcacgagcaggaaaaaaatcagtcagtgttacagtttttaggttcaggtgagaatccttacataatcttaattttagtagccaaaaggccatgttgaggatcattaattttctcccttcttannnnnnnnnnnnnnnnnnnnnnnnnnnnnnnnnnnnnnnnnnnnnnnnnnnnnnaaccttgtcttaaatgtggnnnnnnnnnnnnnnnnnnnnnnnnnnnnnnnnnnnnnnnnnnnnnnnnnnnnnnnnnnnnnnnnnnnnnnnnnnnnnnnnnnnnnnnnnnnnnnnnnnnnnnaggggctagggctggaatgatgtggttcanctgtgtcctgatgtnnnnnnnnnnnnnnnnnnnnnnnnnnnnnnnnnnnnnnnnnnnnnnnnnnnnnnnnnnnnnnnnnnnnnnnnnnnnnnnnnnnnnnnnnnntgngctattctcatgatattgaatacatctcatgaganctaa

SEQ ID NO: 31094 - DNA, 537 bp, Homo sapiens
  misc_feature (1)...(537): n = a,t,c or g
nnnnnnnnnnnnnnnnnnnnnnnnnnnnnnnnnnnnnnnnnnnnnnnnnnnnnnnnnnnnnnnggcacgaggtagagtctatacctatttagaattttatgtcaaattctctttttttttaattgatatgtaatagatatacatatgttttctggtgcagttgtaccactgtgccagataattgagctacttaatgactgaaagtgatgggattagtgattcaaagaaaggttaggaaagtggaccaggtgaatccaattatctatctgtgggattcaaatcccatctcattttacctcctccactgagtttttttttttttaanctnngcccnanttttttttnccnggngtttaattnnntttggnnatggncgggnncnnagnngagngcncccaaatntcaagnccaatggttttngggnangtcccaacttttnngggancnaaanntngccaaaanttggncntnggcctgggccttngctnattttttaaagtggnggtttngccncntttaaacccctggaagggtggg

SEQ ID NO: 31095 - DNA, 434 bp, Homo sapiens
  misc_feature (1)...(434): n = a,t,c or g
gnaaaccncttgacnnnnnnnnnnnnnnnnnnnnnnnnnnnnnnnnnnnnnnnnnnnnnnnnnnnnnnnnnnggcacgannnnnnnnnnnnnnnnnnnnnnnnnnnnnnnnnnnnnnnnnnnnnnnnnnnnnnnnnnnnnnnnnnnnnnnnnnnnnnnnnnnnnnnnnnnnnnnnnnnnnnnnnnnnnnnnnnnnnnnnnnnnnnnnnnnnnnnnnnnnnnnnnnnnnnnnnnnnnnnnnnnnnnnnnnnnnnnnnnnnnnnnnnnnnnnnnnnnnnnnnnnnnnnnnnnnnnnnnnnnnnnnnnnnnnnnnnnnnnnnnnnnnnnnnnnnnnnnnnnnnnnnnnnnnnnnnnnnnnnnnnnnnnnntgganaantgcncttanatttcaaatttagtttgnaaagagaaattntaattgaatccctaattccc

SEQ ID NO: 31096 - DNA, 412 bp, Homo sapiens
  misc_feature (1)...(412): n = a,t,c or g
ttgnanaacctntatgacctgattacgaatttaatacnnnnnnnnnnnnnnnnnnnnnnnnnnnnnnnnnnnnnnnnnggcacgagaaaaaatactaggtgagtacctatgtcactgaagaatgtttttgccaagtcagccagtgaattcagtcattgaacacattgtgtactttccttgtaccggacattgttctgggttttgaggatgcagcagtgaatagaacntgagttcttaccctcgtggactttactttatactatgggggacacacgtttggaananaaatnatgctaagngcttnnaagagaaatgatacggnatcagaataanaggttanagngacanacggtggnttactttaaattatgggannntgnacggccttttnaaaangncntttnaccntact

SEQ ID NO: 31097 - DNA, 419 bp, Homo sapiens
  misc_feature (1)...(419): n = a,t,c or g
tttggagacccgtnnnnnnnnnnnnnnnnnnnnnnnnnnnnnnnnnnnnnnnnnnnnnnnnnnnnnnnnnnnnnnnnnggcacgaggttatgaggcccagaccctagaaacaggaacataacaaaaatatgtctaaagtatggtaaaggggtagagattggaaaaaaagaaacttggcttgtatcccaagctgttctcaggtgggatctatgtccctcccactagggtcctatgagaaagtgattccttggggaaaaacccatttatctaaatcattccatggattctctatttctttctgataattagctaagtaggaaggaaaaagctaggatgacaaaaaggctaatttgnggatatatgtgcttattggtgaaacgtatattgngcattggtaagtaaataaagttcaagatttt

SEQ ID NO: 31098 - DNA, 419 bp, Homo sapiens
  misc_feature (1)...(419): n = a,t,c or g
anaacctttnnnnnnnnnnnnnnnnnnnnnnnnnnnnnnnnnnnnnnnnnnnnnnnnnnnnnnnnnnnnnnnggcacgagcaaacctacattgtgaagctatagccttctttagtttatttgaacattctgcctatatttactgaatgcgcttactctgccggttgcttttctaagtcttggaatataggagcagtgaacaagatgtgccaaaatcctgtgcttgtggagcttccattatagtggggggagacacagtaagcaaagtaaaacatagtatgttaggtggtgataagtgctgtggagaaaaataatagagggtaagttgttagtagggcaagggggaggacatgcagtttttaaaagggtggtcagaaagatctctctgaaaaggtgacttatggggttgggtaaagacct

SEQ ID NO: 31099 - DNA, 421 bp, Homo sapiens
  misc_feature (1)...(421): n = a,t,c or g
tttnngancgnttgacnnnnnnnnnnnnnnnnnnnnnnnnnnnnnnnnnnnnnnnnnnnnnnnnnnnnnnnnnnggcacgagccagtgcacccagttagacttggagcggaaactcaagttgaatgaaaatgccatctccaggctccaggctaaccaaaagtctgttctggtaagaccagcctgggtcagccaggcctgtgagggtgtgggacgtggtactgcatgcctagcctccattcctgtaggttccttggggtttctccacaaatgagaattgtaggtacagttgactacaccatgcggtagcctcaccttgatgtcaggatttgttatgaaattagtttaagttttaaacctggcaagtgatttgctttttaataatataaattagaaccaagactaatcctgtaataacaacat

SEQ ID NO: 31100 - DNA, 496 bp, Homo sapiens
  misc_feature (1)...(496): n = a,t,c or g
ggtgnnntttgnattgganancnctatgacnnnnnnnnnnnnnnnnnnnnnnnnnnnnnnnnnnnnnnnnnnnnnnnnnnnnnnnnnnggcacgagatctctattcttccagaacacatattccctccacgcgtcagcctcatttccaaattggatccatctggagcagagaaaagaccagagttcagaagttacattcatttagaagtgattttagaaaagaagtttcctctggacacttgggattttatgttgtccttaaaatggtgcctgattttggacattgcccagctccacacagtagagaattttaatatgttaaaatctaggaagcaattaggatttttatctatatctacttacaaaggaaaatgtttacaggttaaagtttttaaactttctgttttgtttccacctattactaggacagatgtaaatactcttttttgtacagaaatagataaattcgactcangttatttaaatttgactcagg

SEQ ID NO: 31101 - DNA, 490 bp, Homo sapiens
  misc_feature (1)...(490): n = a,t,c or g
gcgngnnnntttgnaattngnataacnnnnnnnnnnnnnnnnnnnnnnnnnnnnnnnnnnnnnnnnnnnnnnnnnnnnnnnnnnnnnnnnnnnnggcacgagaannnnnnnnnnnnnnnnnnnnnnnnnnnnnnnnnnnnnnnnnnnnnnnnnnnnnnnnnnnnnnnnnnnnnnnnnnnnnnnnnnnnnnnnnnnnnnnnnnnnnnnnnnnnnnnnnnnnnnnnnnnnnnnnnnnnnnnnnnnnnnnnnnnnnnnnnnnnnnnnnnnnnnnnnnnnnntataaaannnaggtgtctttctgatataacgatnccttttcctttgggnagccgtgttgcntcnttncangagctgacgaaatgcnctatcnnatgctgtccnagngcnacattacctacgnncgnancctagatacncagnnnggcngggncccnnatcccgantgctgncagatccctcctggnangcagtantnncnctaanatttata

SEQ ID NO: 31102 - DNA, 496 bp, Homo sapiens
  misc_feature (1)...(496): n = a,t,c or g
ggngnnnntttgnaattgganancnnnnnnnnnnnnnnnnnnnnnnnnnnnnnnnnnnnnnnnnnnnnnnnnnnnnnnnnnnnnnnnnnnnggcacgaggaaaatgcaaagctgattactaaaatttatatggaaacacaaaggacccttatttacaaagaaattgtaaataagaagggcagagtttgcagacttacgtgaattgctttggatacttacaataagactacagtaaacaagacagtatgtgtggtgagttgaataatgtccccccaaattaatgttcacctggactnnnnnnnnnnnnnnnnnnnnnnnnnnnnnnnnnnnnnnnnnnnnnnnnnnnnnnnnnnnnnnnnnnnnnnnnnnnnnnnnnnnnnnnnnaatgactggtgtccttatgagagaaggaaaggacacagagacaaagacactgagggaaaacgcttatatgatgatggagttagagattggactgatgtatctgcatgccaag

SEQ ID NO: 31103 - DNA, 449 bp, Homo sapiens
  misc_feature (1)...(449): n = a,t,c or g
ggngnttntcnctttganacntnttgactngntttcgaatcnnnnnnnnnnnnnnnnnnnnnnnnnnnnnnnnnnnnnnnnnnnnnggcacgagagcagatgaaagagtagaccaggagtgagagacgctgtgaagagagaaggcccagagggaggtgcgggggaccctgtcacgtggttagtggttggccagaggcggatgccccacagtcaggcagtggcgctggcttctgcctttcaaagtcgcttctacagggtgaccgttaagcttgttctttgacaccgacattgttaagtggtttcactgaaatttgagactctctgaagaaagggaagatggcatttatgaagcaagtgttattttatctggaaatgatttctcaggggtaagcctgtcactctgcctctggtaaagtctgcttctccttcaagaagagaagggccactgg

SEQ ID NO: 31104 - DNA, 449 bp, Homo sapiens
  misc_feature (1)...(449): n = a,t,c or g
gntgtgntnntccctttganactttgnnnnnnnnnnnnnnnnnnnnnnnnnnnnnnnnnnnnnnnnnnnnnnnnnnnnnnnnnnnnnnnnggcacgaggctgtaaaactgagcagcttcagaaaggagatgagagctgggagtgcagcagaggcagggacctttacgttatgcctatttctgggggccctgtcctttcctgcggccttgcctgcgctagctagtcactggggcttttacagacccatagcagaagattctgctagcctcttctgaagcatgttttcttgttcttaatgatagttaacttggctggcataaatcctaaatctgcctcctctgaggtggggagcaggtaaaatctccacttgattttcttgtttttccaactgtccccttctgctggattccttggagtttcctgagcacatgcacagttggggtcctgaa

SEQ ID NO: 31105 - DNA, 467 bp, Homo sapiens
  misc_feature (1)...(467): n = a,t,c or g
gnnnngtnnnnnttnnnnnttggacnntgaataccgttnnnnnnnnnnnnnnnnnnnnnnnnnnnnnnnnnnnnnnnnnnnnnnnnnnnnnnnnnnnnnnnnnggcacgaggggatttcgtgcgactgtcccaggccctgcaggtatggcctgtcccagccccgccaggctggctggctccactccgggtgacctctcctgggtcttgcaaggacagttccctggttaggggagtcctttcttcctcctggggctggcatggtcctgtcctgagctgttactcaaaaaaccctgaaactctcatgtgagccttggtcagtcacctgaagccctcagtacagggcatggtggacgctcagggcatttgtggcatcagccccctagaggtggcccctgggtccactggtaccaggccccgcccttgggggctggcaggtggggtaggggctgcgtttccccacaagtgc

SEQ ID NO: 31106 - DNA, 440 bp, Homo sapiens
  misc_feature (1)...(440): n = a,t,c or g
naancgnnnnnnnnnnnnnnnnnnnnnnnnnnnnnnnnnnnnnnnnnnnnnnnnnnnnnnnnnnnnnnnnnnggcacgagctggtttgtctttcttcaaaagatggtgtcatgatggatgcccagcaaatggtaacacccgcagagtagtagagagtagattcggggaccctgggctggcagctccataattctttctcccttttctgccaaagagacaggatattaaaccactgaactggcgcggtcctgggctgcctgccaatggaatatttggggagagaatggtgcagcttttgtttctcttgccttctgtggagccctggggtggattctgaagggatgttttccctcgcaggagtaacccatttggtattgagaaagcaggaaagcaagttttcctgttacgagcagtgaacaaaaagcagaaaagcaggcagc

SEQ ID NO: 31107 - DNA, 439 bp, Homo sapiens
  misc_feature (1)...(439): n = a,t,c or g
attgganacccgnnnnnnnnnnnnnnnnnnnnnnnnnnnnnnnnnnnnnnnnnnnnnnnnnnnnnnnnnnnnnnnnnnggcacgagtccgaaaatacgcagtgagattagtcccattttttggttttgaacggaagctataagcagtttgtaaacctgtctacggccacaaatatggttgtggaacctagattcacattcagcaattataactccagatcccgtgctgtttctgttttctatttgcaaaccacctctctaattaactggctaactttgttatgtaattaacaggttgatgggcattgtattctggtaatagcaacctttgcactttgttctatgtaacatattttcctgaacagtcacatgtgaagtgactttttccctatttaaattccctcggttggccaggtgcggcggctcacggttgtgatcct

SEQ ID NO: 31108 - DNA, 446 bp, Homo sapiens
  misc_feature (1)...(446): n = a,t,c or g
tttgaanacccgttnnnnnnnnnnnnnnnnnnnnnnnnnnnnnnnnnnnnnnnnnnnnnnnnnnnnnnnnnnnnnnnggcacgagctggaagattaataaagatcttttcnnnnnnnnnnnnnnnnnnnnnnnnnnnnnnnnnnnnnnnnnnnnnnnnnnnnnnnnnnnnnnnnnnnnnnnnnnnnnnnnnnnnnnnnnnnnnnnnnnnnnagaatcacttcggaggttgcagtgatcacgccgctgcactccagcttgggtgaggcagagtgagactttgtctcaaaaaaaaagagaatataggaaggcaatggagtgaagcagagtcaagtgaatcttgtttaattctcaaaaactaagcttatttccaagtttagttgtgctatcacacagtattaactgttgccaaatttaattattggcatttgtaatttacattgcttgg

SEQ ID NO: 31109 - DNA, 439 bp, Homo sapiens
  misc_feature (1)...(439): n = a,t,c or g
anatttganaccgttatgacnnnnnnnnnnnnnnnnnnnnnnnnnnnnnnnnnnnnnnnnnnnnnnnnnnnnnnnnnnggcacgagtatgtgcatcagtggttgttagcccagccctatgaaaagggccagctggcctccatagatctaaggcagccgagagtgctgtcccctttgtcccaggctctgcagcatccaaggcgagtgcagatggggccagctgttcttccaaaaccatcatctcttctttacctgctccttctgagcttcacctgacatggctgtgcagtccccaggaaaaagaaagtctctcttgtcttcctacttcctaagtcaatcctaggaactgttacgttcaattccaagcagttgtcataaaagaagtttccttggaactttgaaaacaaaagaaagggtttaattttcttcttttcgttttg

SEQ ID NO: 31110 - DNA, 459 bp, Homo sapiens
  misc_feature (1)...(459): n = a,t,c or g
ggtgntnnnntattgnanttngnanaccgtntatgacnnnnnnnnnnnnnnnnnnnnnnnnnnnnnnnnnnnnnnnnnnnnnnnnnnnnnnnnnnggcacgagtggcctttgtacctcaccataagaaaaatcttggtttagaaaatgaaaacatttcaacttacacaggaatttgttttttaactttttttctaaataaaaaagcatagtaatggaggaaaaaagttctgcttttcagatttaaagacgtttagaatatatattattttgtcaaagtgtcaaaggtatcctgtaagacttttcccatcacagaattcagcattcaaaactgtttgccaggctctgtgctaggtgtaaggaatatattggtaaatagaatacatctgattcctgcacttatgaaacagatagtaaacaggtaaacaagtatttagttataaaatataatcaagaaagga

SEQ ID NO: 31111 - DNA, 448 bp, Homo sapiens
  misc_feature (1)...(448): n = a,t,c or g
gtgntnnnnattgantcgtttcctganacnaatttaatacgactcnnnnnnnnnnnnnnnnnnnnnnnnnnnnnnnnnnggctcgagaagaatatgccttttgtaatcaattttttatcatgcaaaaaagtattttgttatgacatttgtaagtggagactatatttcaaaacaagtttatacagacttcaaaaggtctcaagtcaaagagaaagtgaaatatatttaaatatgattagttacatcgtatgcagctggcatactcatattcacagtttataaagtaaaaaaactaaactcttcatgtcggctctgaaatagatgcattttcattcatacattcgctagttaggtctgttcttctaaggaggaaagacgagatatatgagatattttttaaagaacaaactcaacatatcagcagcaaatttcagttaaactaaattgg

SEQ ID NO: 31112 - DNA, 455 bp, Homo sapiens
  misc_feature (1)...(455): n = a,t,c or g
tgntnnnnnntttgaanaccgntatgncnnnnnnnnnnnnnnnnnnnnnnnnnnnnnnnnnnnnnnnnnnnnnnnnnnnnnnnnnnggcacgaggttgctttttaaagttttgtctcaaaattatcatgttaaggataggatttcaagaaggaaagcatcatggagaaaagatagaagctttgaggtttatctctttgtaacagtgcctttgtgtttttacttcgaaatttctttgtgcagtgaaataatgctacctttgtatttgtgctttggtaagaatgtggactgtttgcaattgtcatgtgaaagtacaaagagaatgagaatgaattttgtgaaattagctcattcccagtctggcacaccatgtgccctgtgtgactgctgattctgctggcagattgaagtgccgaaccaacttctgctctaactgctaaaattgccagccatcatt

SEQ ID NO: 31113 - DNA, 458 bp, Homo sapiens
  misc_feature (1)...(458): n = a,t,c or g
gnnnntnnnnnnttggnntttgannnnnnnnnnnnnnnnnnnnnnnnnnnnnnnnnnnnnnnnnnnnnnnnnnnnnnnnnnnnnnnnnnnnnnnnggcacgaggaaagattccatttggtttttcttgatgataacaaaggtttatgtgcaaatagttttacactcacagaaactctatttttctgttcctgtatctatgatgaagggattagagataaacggttctttatctacccttccaagcacagtctttatggaagagaaaacttctctttccataaattaaatacccattattcaacatcctacaaaattgttggaccaagaaaaacataatttggcatcatcctcggcctgtcaatggtattcccaacatggcgaaagggtcttctagagactggcaaaaaacactttattttcttgcctatatatggaataactctttctctaacaagtg

SEQ ID NO: 31114 - DNA, 455 bp, Homo sapiens
  misc_feature (1)...(455): n = a,t,c or g
ggtgnnnnnnnnttgnanaccgctatgacnnnnnnnnnnnnnnnnnnnnnnnnnnnnnnnnnnnnnnnnnnnnnnnnnnnnnnnnnnggcacgagaatgagatcatgggtatggagaatgtgtatttcagtgtctggcacattgcaaatacttaaaaaagttagtaattgttattaatatttttccttttcaatagccatgtatggtactgtgaacccagaaannnnnnnnnnnnnnnnnnnnnnnnnnnnnnnnnnnnnnnnnnnnnnnnnnnnnnnnnnnnnnnnnnnnnnnnnnnnnnnnnnnnnnnnnnnnnnnnnnnnnnnnnnnnnnnnnnnnnnnnnnnnnnnnnnnnnnnnnnnnnnnnnnnnnnnnnnnnnnnnnnnnnnnnnnnnnnnnnnnnnnnnnnnnnnnnnnnnnnnnnnnnnnnntgggcccccccttcaggggcttcc

SEQ ID NO: 31115 - DNA, 455 bp, Homo sapiens
  misc_feature (1)...(455): n = a,t,c or g
ggtgntnnannnttgaaatcgcttgccatgattacgaatttaatannnnnnnnnnnnnnnnnnnnnnnnnnnnnnnnnnnnnnnnnnggcacgagcattcttaacaccccttttgaggcgtcctttttctcctaattcctctttggagctggtgggtgggcattttctttcacccctaacaggtctgctactattaataagcaagccccggttcactcctgtaaaccgtgtgattaggccacgacagtccctctggttcctctaatttgagtgttaaggtcaagagggcgccactggcatgagatggccaaactggcgactggaaacctttccttttaaccaatttgtttctgatccaaacctgcgtttcccttgccgggggacatggccaccctggtggaaacactgaaggctgcttcctgctcctctcagcggcttctgacagagtcgattgg

SEQ ID NO: 31116 - DNA, 455 bp, Homo sapiens
  misc_feature (1)...(455): n = a,t,c or g
tgnttnnnnntttgantccgtnnnnnnnnnnnnnnnnnnnnnnnnnnnnnnnnnnnnnnnnnnnnnnnnnnnnnnnnnnnnnnnnnggcacgaggtaacttgcaagagggtttattttattagcctcattgtttttcatagctgagtctgattttaagaactccaggccannnnnnnnnnnnnnnnnnnnnnnnnnnnnnnnnnnnnnnnnnnnnnnnnnnnnnnnnnnnnnnnnnnnnnnnnnnnnnnnnnnnnnnnnnnnnnnnnnnnnnnnnnnnnnnnnnnnnnnnnnnnnnnnnnnnnnnnnnnnnnnnnnnnnnnnnnnnnnnnnnnnnnnnnnnnnnnnnnnnnnnnnnnnnnnnnnnnnnnnnnnnnnnnnnnnnnnnnnnnnnnnnnnnnnnnnnnnnnnnnnnnnnnnnnnnnnnnnnnnnnnnnnnnnnnnnnnnnnnnnnnnn

SEQ ID NO: 31117 - DNA, 457 bp, Homo sapiens
  misc_feature (1)...(457): n = a,t,c or g
tgntnnnnnnttgnanatccnnnnnnnnnnnnnnnnnnnnnnnnnnnnnnnnnnnnnnnnnnnnnnnnnnnnnnnnnnnnnnnnnnnggcacgagcggcacgaggggtgggcttgaaggcattggaggttttaattgttctcattggattgaggggcctgtgctcctgcatagggctccctctgtgcagagacaaggaggtgggaatcccagaggttgggtgagcttctgcaggggtagaccagtgagaagtgagggtggaaaagggggtttgggttagatgtagatggccttaacatttacccttggtcagctaaaatgtgtggaaagtttttgaatgaaagggaaaaaaatgattcaaagagtagcgttttagaagactagtctgtccgcaagcctggattaggtttttgttcctaacccactacttttcangacttggctgnatatttcagtcc

SEQ ID NO: 31118 - DNA, 453 bp, Homo sapiens
  misc_feature (1)...(453): n = a,t,c or g
gtgnnnnnnnntttganatcgctatgccnnnnnnnnnnnnnnnnnnnnnnnnnnnnnnnnnnnnnnnnnnnnnnnnnnnnnnnnnnggcacgagtatgtatagaaaggctagtcctttttcctctgctagttagcactctaatgatattaatgatggaagatttttctcagcccctttgctggacttatgacaggggtatcccatttactcggcccaccatgctcaacctcttgcgggagggagcacgtgagtgagtgagtgcgggatctggctggctgttccaggcacttgcaggagcaagcttcatgtgctggtatgagtgagcaagtgcgggatctggccagcacagctcggagtgccagcaggagcaagctctgtgtgggatccgcggccagaccaggcatgagctagcgagtgtgggatccggccagccactctgggagctgccagga

SEQ ID NO: 31119 - DNA, 460 bp, Homo sapiens
  misc_feature (1)...(460): n = a,t,c or g
ggtgnnnnnnnntttganattggannnnnnnnnnnnnnnnnnnnnnnnnnnnnnnnnnnnnnnnnnnnnnnnnnnnnnnnnnnnnnnnnnnnnnnnggcacgagagcaaaagagcctgtattttttagctcactcctgcccacttctggtcttgaatgacttatggcttaggtgttacaaatgggagtcctggaactcttcccagaatctcttaattccattcttgtggtatatgacgttctaaacattaaaatgatgtaatatataactcccaaccaaaacaaaagaggagatccctgctagccaaattcttccctcctctccatacacgtttttccgtcgctgtgcagtgaatcctgggatgtgtttgtcagtcagcttccttgttcttctggctcctcactccccagggaccaccgagccacagactccacggttttctctgagggcatgcgaagtg

SEQ ID NO: 31120 - DNA, 468 bp, Homo sapiens
  misc_feature (1)...(468): n = a,t,c or g
ggtgnnnnnnntttganatnggannnnnnnnnnnnnnnnnnnnnnnnnnnnnnnnnnnnnnnnnnnnnnnnnnnnnnnnnnnnnnnnnnnnnnnnggcacgagctggaagaattaatccatataaagcatttacaaagcgagtggcatagagcaagcacccaaatagtatagttaggaggaaacaatagatctgcagataaaaacacaactgcccaagtcaggtagcatatcgtaaatatgaatggtaactggcaaattacaggaggaaagatcactgtgaattaaaggcagtggggtttgtccagagtcttaacatagagggaggaggagaggtgcttgttaagagcatttcaggaaggccaggatgcaagtgtctcatgttcatatgagaaggggatgcaataaacaagcccttctggcggaagcattgggttcatgcaggagagaagtgggagagaggtggtaga

SEQ ID NO: 31121 - DNA, 464 bp, Homo sapiens
  misc_feature (1)...(464): n = a,t,c or g
ggtgnnnnnnnattgnannnnnnnnnnnnnnnnnnnnnnnnnnnnnnnnnnnnnnnnnnnnnnnnnnnnnnnnnnnnnnnnnnnnnnnggcacgagttctaattaacttcattaaattttcttcctttttagcaataaaacatctctgagagggagtgtgtataaatacagtatnnnnnnnnnnnnnnnnnnnnnnnnnnnnnnnnnnnnnnnnnnnnnnnnnnnnnnnnnnnnnnnnnnnnnnnnnnnnnnnnnnnnnnnnnnnnnnnnnnnnnnnnnnnnnnnnnnnnnnnnnnnnnnnnnnnnnnnnnnnnnnnnnnnnnnnnnnnnnnnnnnnnnnnnnnnnnnnnnnnnnnnnnnnnnnnnnnnnnnnnnnnnnnnnnnnnnnnnnnnnnnnnnnnnnnnnnnnnnnnnnnnnnnnnnnnnnnnnnnnnnnnnnnnnnnnnnnnnntgagactccgtct

SEQ ID NO: 31122 - DNA, 465 bp, Homo sapiens
  misc_feature (1)...(465): n = a,t,c or g
ggngntnnnnntttgnnattnnnnnnnnnnnnnnnnnnnnnnnnnnnnnnnnnnnnnnnnnnnnnnnnnnnnnnnnnnnnnnnnnnnnnnnnnnggcacgagaaggagcactgtagcagaaggaataggagatgtttatctcataggattatgatgaaacttaaataaatagtacacatgagaattcctaacctagaccaggcacaaaataaattcttttaaaaaattattttaaagttgttacagtgagcatgaatacttttgtaatcagaaagccaaataaacgtttaaaagtagttgatgctctgagagagactaaactaccttggattgtgtatttgctgagacaagagggaatctgggctggtatcctagggagtgatgattggagtgaatgaaaaaggataagggtgcaaaagaacctgagaaggattggtcagagaggcattagaagaacctagggaa

SEQ ID NO: 31123 - DNA, 466 bp, Homo sapiens
  misc_feature (1)...(466): n = a,t,c or g
ggtgntnnnntnttgnaatntgaanaccntnnnnnnnnnnnnnnnnnnnnnnnnnnnnnnnnnnnnnnnnnnnnnnnnnnnnnnnnnnnnnnnnnggcacgagggtagattaaatttttcattgtttcaagttttgacttttgtatttctgcacattagtgatccttgaagattaggcaaggccaagttcttttgacttttataattagtgtgtcggaatcccagtttttcctaccctagggtggactgtattttttacaattaactctgtgaagggtgactgggggtggactggtgaggagaggcttccagttaccagagagcctgtgacttactctctgtgcttttcctaggtcaccaattttcaaagaatttgagtataattaaatacacttcataataaactaggctgaacataatttaatctttccctgaaggtacttcagagtcttggagtgctttaggg

SEQ ID NO: 31124 - DNA, 467 bp, Homo sapiens
  misc_feature (1)...(467): n = a,t,c or g
ggtgtnnnnnntntganaccgttatgacatgattacgaatttaatatnnnnnnnnnnnnnnnnnnnnnnnnnnnnnnnnnnnnnnnnnggcacgagaactggaatgtgtccacctttgtgagctgaagtaccgggagaagacttccaatcagaaaagaaaattataattatctacaattgtgttaaaccaatagttctcagcaaactcaaattatgtatgtttggcagagcactannnnnnnnnnnnnnnnnnnnnnnnnnnnnnnnnnnnnnnnnnnnnnnnnnnnnnnnnnnnnnnnnnnnnnnnnnnnnnnnnnnnnnnnnnnnnnnnnnnnnnnnnnnnnnnnnnnnnnnnnnnntacaaaaattggccaggcnnnnnnnnnnnnnnnnnnnnnnnnnnnnnnnnnnnnnnnnnnnnnnnnnnnnnnnnnnnnnnnnnnnnnnnnnnnnnnnnnnnnnnnnct

SEQ ID NO: 31125 - DNA, 467 bp, Homo sapiens
  misc_feature (1)...(467): n = a,t,c or g
ggtgnnnnnnnnttgnanaccgnnnnnnnnnnnnnnnnnnnnnnnnnnnnnnnnnnnnnnnnnnnnnnnnnnnnnnnnnnnnnnnnnnggcacgagctggaagattggcatggagagaccactgggataggagaaaaccaagggagtggtgctctggaggcaaaggaagaagatgttttaagttggaaggatggattatctaatgttcaaggagcattgaatttagctatatggagcccactggaggacgtcgataacagtagtttggtagagaaaaagccttacttgagaaagttcaagggagaaaggggaagaggaattacagacaactccttcaagggattttgatacaaaagggagcacagaaatagaatgttcagacggggagaaactgagattaagaaagtttaattttttatttatgtannnnnnnnnnnnnnnnnnnnnnnnnnnnnnnnnnnnnnnnn

SEQ ID NO: 31126 - DNA, 459 bp, Homo sapiens
  misc_feature (1)...(459): n = a,t,c or g
gnagaggngncncngatacccttatgatntgatacccnnnnnnnnnnnnnnnnnnnnnnnnnnnnnnnnnnnnnnnnnnnnnnnnnggcacgagggctcnnnnnnnnnnnnnnnnnnnnnnnnnnnnnnnnnnnnnnnnnnnnnnnnnnnnnnnnnnnnnnnnnnnnnnnnnnnnnnnnnnnnnnnnnnnnnnnnnnnnnnnnnnnnnnnnnnnnnnnnnnnnnnnnnnnnnnnnnnnnnnnnnnnnnnnnnnnnnnnnnnnnnnnnnnnnnnnnnnnnnnnnnnnnnnnnnnnnnnnnnnnnnnnnnnnnnnnnnnnnnnnnnnnnnnnnnnnnnnnnnnnnnnnnnnnnnnnnnnnnnnnnnnnnnnnnnnnnnnnnnnnnnnnnnnnnnnnnnnnnnnnngcaggtcagganttggcaattttttttccataangggccntagagtaaatacttta

SEQ ID NO: 31127 - DNA, 467 bp, Homo sapiens
  misc_feature (1)...(467): n = a,t,c or g
gnagtgngnnntttganaccttggcctaannatactctnnnnnnnnnnnnnnnnnnnnnnnnnnnnnnnnnnnnnnnnnnnnnnnnnnnnnnnnnnnnnnnnnggcacgagcttagaacatgacggttcaggaacatgcagccccactgagttttgtaatgtggagagctgcccactgaaggggagtgccttataatgatgacatgtgttcaaacagaaaacatcagagatggcttttcctacactggatgactctctatatgaggttacatctcagtttgtttccaacagcaggattttataaatcggagtcataaaaatttagaaatataaaattattgaagataatggatggctgcttgatgtctcctaggtgcccctacaacacacccccaaaaacatcctaatcaaatgaaaaatacaaggaaaaaatcgtctctggaatgaatcattccaatcactgttgg

SEQ ID NO: 31128 - DNA, 461 bp, Homo sapiens
  misc_feature (1)...(461): n = a,t,c or g
gnngngnnnnnttggnnccctnnnnttgganaccgtttgacnnnnnnnnnnnnnnnnnnnnnnnnnnnnnnnnnnnnnnnnnnnnnnnnnnnnnnnnnnggcacgagatccgggtgttttaaattggggagtagaattaatatgtagacgtgcacccgttgaactgtgtttctcctttcaggctaatggaggctggcaggacgcaacaactccatcttctgtgacttctcctacagaaggcccaggaagtgtgcactcggatacctctaactaatctctggccacacttttccctgagctacatgccttgataagtgcattcagagcaataggaggaaaaggaaagcgtttttgtagcccaccatctacagctttactgtaaaaccttgtcttattcgagaacttggtaaatctgttttttaaggaatcataatcatttgtatttatacttaaaaacacac

SEQ ID NO: 31129 - DNA, 465 bp, Homo sapiens
  misc_feature (1)...(465): n = a,t,c or g
nnnggnnnnnnntttnnnnccnnnnnnattgganacccgnnnnnnnnnnnnnnnnnnnnnnnnnnnnnnnnnnnnnnnnnnnnnnnnnnnnnnnnnnnnnnnnnnggcacgagttggccatcaactagttttagggctttcgcctcctaaagaatatgaattatggttgtaatttttacagtttaaaaaacaagatggcatatgaagaatctttatttcattatgaaaatagaacatggatgcttaatcctctgtattgaaagtaacttgtagtgaaatacttcctagtgttctcttcttctagttgtccatatgtagtatgtataactatagaccttgatgatttaagttgagcacagtttagtgtcaggttcctttcagtgatgcatgagattggttatatgatctagtgagtgttatttagaaattaattcaccagacccgggtgtggtggctcatgcctga

SEQ ID NO: 31130 - DNA, 462 bp, Homo sapiens
  misc_feature (1)...(462): n = a,t,c or g
ngnngtgnnnnnntttganaccnnnnnnnnnnnnnnnnnnnnnnnnnnnnnnnnnnnnnnnnnnnnnnnnnnnnnnnnnnnnnnnnnnggcacgannnnnnnnnnnnnnnnnnnnnnnnnnnnnnnnnnnnnnnnnnnnnnnnnnnnnnnnnnnnnnnnnnnnnnnnnnnnnnnnnnnnnnnnnnnnnnnnnncccgaggtctgtattttctaaagataactgcattgtaatttatagaatgcatagaagggagataaggaaatcaggaggccatgaaatcccagtgagccaagcctccgtcacccaccatgtaaagcacggagcagcttgaaaagacattgagagaagtaaacccacaggttcagtggccagtggcaaaggacaagagccacagaggcactgggacctgaaagctaagagagcagggatgcgggtcacagagggagggatgtttggggctc

SEQ ID NO: 31131 - DNA, 409 bp, Homo sapiens
  misc_feature (1)...(409): n = a,t,c or g
gnnngngnnnnnntttnnnnnnnnnnnnnnnnnnnnnnnnnnnnnnnnnnnnnnnnnnnnnnnnnnnnnnnnnnnnnnnnnnnnnnnnnnggcacgagctcataacattattaaccagacttgttcatttctgagtatgaaaaaaaatacagagtgtaatataaaaagttcagccatactctttatactgaatagcaatcatttaactgtgttccacagatctccaaggcattttcaatagtatcaatctaagaagcttctctagcaatttgtttaaatctagtttaataatgacattttcattttgtctctatggctattcctgtagattctatggcatttaaaaggtacatatgagctcaaaaaaaaaagacccaaatcttgtagagaatcagtttttttttttttt

SEQ ID NO: 31132 - DNA, 459 bp, Homo sapiens
  misc_feature (1)...(459): n = a,t,c or g
gnngtgnnnnnntttganacgctnnnnnnnnnnnnnnnnnnnnnnnnnnnnnnnnnnnnnnnnnnnnnnnnnnnnnnnnnnnnnnnggcacgaggaacattttgttaaagcagcagggtataagcggtattaaagtaattgattttggctccagttgttacgagcatcagcgtgtctacacgtacatccagtcgcgtttttaccgggctccagaagtgatccttggggccaggtatggcatgcccattgatatgtggagcctgggctgcattttagcagagctcctgacgggttaccccctcttgcctggggaagatgaaggggaccagctggcctgtatgattgaactgttgggcatgccctcacagaaactgctggatgcatccaaacgagccaaaaattttgtgagctccaagggttatccccgttactgcactgtcacgactctctcagatggct

SEQ ID NO: 31133 - DNA, 458 bp, Homo sapiens
  misc_feature (1)...(458): n = a,t,c or g
gagnnnnntttngnaccctgngntttgnataccgtttgacnnnnnnnnnnnnnnnnnnnnnnnnnnnnnnnnnnnnnnnnnnnnnnnnnnnnnnnnnnggcacgagagaagctgtcagggacccagggcgcctggagaaagaggccctgttactattcctttgggatctctgaggcctcagagtgcttggctgctgtatctttaatgctggggcccaagtaagggcacagatccccccacaaagtggatgcctgctgcatcttcccacagtggcttcacagacccacaagagaagctgatggggagtaaaccctggagtccgaggcccaggcagcagccccgcctagtggtgggccctgatgctgccaggcctgggacctcccactgccccctccactggaggggtctcctctgcagctcagggactggcacactggcctccagaagggcagctccac

SEQ ID NO: 31134 - DNA, 469 bp, Homo sapiens
  misc_feature (1)...(469): n = a,t,c or g
gnnngngnnnnnntttggannccntnnnnntttgnanaaccgtnnnnnnnnnnnnnnnnnnnnnnnnnnnnnnnnnnnnnnnnnnnnnnnnnnnnnnnnnnnnnnnnnggcacgagcggcacgagtttttttttaaatgaaaaaaagaagttcaatacaaagctcaagaagtgaacaggcccactcagatgagagggttttatgcgttcacacaagcacacccacacttcttcaacataccatttcacaaatgctgtgtattattaagaggaggcggattctgccaggcacataatttgtatatttaagggaggtgtatggaatgaaaaagcgaaatatgttaaatttcaaaggacttggaagcaatgctgcctgtaagcttgtattacaaatagccctacattattacatacgctattaatgaggccgagtgaatgaaagtacaatttgaatatgcatgactctaccc

SEQ ID NO: 31135 - DNA, 458 bp, Homo sapiens
  misc_feature (1)...(458): n = a,t,c or g
gngnntnnntnnnnntntganacccttattncnnnnnnnnnnnnnnnnnnnnnnnnnnnnnnnnnnnnnnnnnnnnnnnnnnnnnnnnnnggcacgagagggtagtgaagaagaagggctttcccctaagatcctagaaatcacaacaggaaggcaactatctattttgtccgccagtaaagtcaactgactgagtatgacagaaaattgggttgatctgatgttctcaaacatggccgtggaaatggccttgagagcagaacgtgtgttgaagactagtccaggcattccatcagtccaccagtgaatcagatacaactaggagcttccgtcacagaggagcttactgtagttacaaaaacagccagagtcnnnnnnnnnnnnnnnnnnnnnnnnnnnnnnnnnnnnnnnnnnnnnnnnnnnnnnnnnnnnnnnnnnnnnnnnnnnnnnnnnnnnnn

SEQ ID NO: 31136 - DNA, 475 bp, Homo sapiens
  misc_feature (1)...(475): n = a,t,c or g
gnnnnnnngnnnnnttnnnttntnncnaatgaanactctnnnnnnnnnnnnnnnnnnnnnnnnnnnnnnnnnnnnnnnnnnnnnnnnnnnnnnnnnnnnnnnnnggcacgagcggcacgagctactgatgagttggtacaaatcctaagatcttaaggagagaggagccaccaaggccatttnnnnnnnnnnnnnnnnnnnnnnnnnnnnnnnnnnnnnnnnnnnnnnnnnnnnnnnnnnnnnnnnnnnnnnnnnnnnnnnnnnnnnnnnnnnnnnnnnnnnnnnncttggtctgtcttaagaaaaggggggcgggggcattttcttaactttgggtagcagtgcaacccgactctttggatctagtaagggtttttattatttttagctcacctgaagagtttcttcagtcagcctccactctcatcactcctttacaacccaacacttctatatacatttgtactacactggt

SEQ ID NO: 31137 - DNA, 472 bp, Homo sapiens
  misc_feature (1)...(472): n = a,t,c or g
gnnnnnngnnnnntnnnntntnnnntntgananntgatacctttnnnnnnnnnnnnnnnnnnnnnnnnnnnnnnnnnnnnnnnnnnnnnnnnnnnnnnnnnnnnnnnggcacgagaaaggtttttccaattatcattttagagatgtggaaactgaagctcagggaggctaggaaacttatccaaagcctcttaagaggctatgttagtcagactgggctaacagctgtaacaaccccagaatttaaatggcttaacacattaggagtttatttgttattgccataacaattcagggtgtatgtttggcaggtagtctacacagtgattcagggacccaggctccttccctctggtggctttttctccctctagtgctgggagctctccatgcagatggtggatggagaaagagaacaaaaagtgggggatttttataggccaggcctggaattggcccacatcacttccac

SEQ ID NO: 31138 - DNA, 437 bp, Homo sapiens
  misc_feature (1)...(437): n = a,t,c or g
accnnnnnnnnnnnnnnnnnnnnnnnnnnnnnnnnnnnnnnnnnnnnnnnnnnnnnnnnnnnnnnnnnnnnggcacgaggatattgacaattgttgcgtaaactattggtgattatgtcattaagatagtaattctcaaccttggacactcattataatcacctgcagaagtttttgcagtcctgatgcccagacctgaacctcatacttacaaaactggaaactctcagggatgagacccaggcatcaatatcaatatttttaaagctccctagattattccaatgtgcacccaagattgagagcgactgcttgaagagaaggtacttgtagcattggcagttagtatagatcagtgaggaaattcagtgaggtagagccttgtatatttgggtgaaaaatgtgaagtgaatgaacacatagtggccagatattca

SEQ ID NO: 31139 - DNA, 440 bp, Homo sapiens
  misc_feature (1)...(440): n = a,t,c or g
atttgaataccngnnnnnnnnnnnnnnnnnnnnnnnnnnnnnnnnnnnnnnnnnnnnnnnnnnnnnnnnnnnnnnnnnnggcacgaggtgacgtctagagataaaactttaagtcaggttactggccggaccaggaaggtgggggtttcaggcccaggccagtggccggaggcagctttgttagggacagggaagggccctgggaccagcagggaccatgtctggcttcgggccttgtgcgagggtcttgcagaggcctgcttggcttctccggggaggggctgctccccctgttacttccacctctctgcaacccttgtgacatcatacaggcacagccaatctctgcaaagttctgtctctacctcaggcccctatacattctctctgagctggcactcaagcaccgtgggaccttggctggcttctggggagcaaga

SEQ ID NO: 31140 - DNA, 435 bp, Homo sapiens
  misc_feature (1)...(435): n = a,t,c or g
accgctatgacnnnnnnnnnnnnnnnnnnnnnnnnnnnnnnnnnnnnnnnnnnnnnnnnnnnnnnnnnnggcacgaggtaggcatgagccactgtacctggccttatttttattttaaatgaaaacattgctacaaagtgaggcaagtgccctgtggaatgggagtaagttcatgtcattgttgatgactgctaggtgtaacttttgtaggtgggcattttctagtggcagtttagccacttttgttatataaatttaaaaaaataatccttgcaggccatgtatgtnnnnnnnnnnnnnnnnnnnnnnnnnnnnnnnnnnnnnnnnnnnnnnnnnnnnnnnnnnnnnnnnnnnnnnnnnnnnnnnnnnnnnnnnnnnnnnnnnnnnnnnnncaccaccaaaataacttacagggtacgatggcacatgtatata

SEQ ID NO: 31141 - DNA, 437 bp, Homo sapiens
  misc_feature (1)...(437): n = a,t,c or g
ttggananccgnnnnnnnnnnnnnnnnnnnnnnnnnnnnnnnnnnnnnnnnnnnnnnnnnnnnnnnnnnnnnnnnnnggcacgagatcttgttatatttttcttaaaaaactannnnnnnnnnnnnnnnnnnnnnnnnnnnnnnnnnnnnnnnnnnnnnnnnnnnnnnnnnnnnnnnnnnnnnnnnnnnnnnnnnnnnnnnnnnnnnnnnnnnnnnnnnnnnnnnnnnnnnnnnnnnnnnnnnnnnnnnnnnnnnnnnnnnnnnnnnnnnnnnnnnnnnnnnnnnnnnnnnnnnnnnnnnnnnnnnnnnnnnnnnnnnnnnnnnnnnnnnnnnnnnnnnnnncgaagcatttagcctctgcactccagcctaggtgacagtgagactgtatctcaaataaataaaccagtaaaaatgtttacctgtagggagagaga

SEQ ID NO: 31142 - DNA, 437 bp, Homo sapiens
  misc_feature (1)...(437): n = a,t,c or g
atttgnannnnnnnnnnnnnnnnnnnnnnnnnnnnnnnnnnnnnnnnnnnnnnnnnnnnnnnnnnnnnnnnnnnnnnnnnggcacgagctaaaactgaaattcgtgctatatctgctgttttacaacacaatcttgtcagagattgtgctcttattctctttccttagagaatgctctttcttcagattgtcatagatcttgcttttccattttatttttatnnnnnnnnnnnnnnnnnnnnnnnnnnnnnnnnnnnnnnnnnnnnnnnnnnnnnnnnnnnnnnnnnnnnnnnnnnnnnnnnnnnnnnnnnnnnnnnnnnnnnnnnnnnnnnnnnnnnnnnnnnnnnnnnnnnnnnnnnnnnnnnnnnnnnnnntactttttgtattttttgtagaggtggattttgcattttgtccaggctggtcttcaactcctg

SEQ ID NO: 31143 - DNA, 471 bp, Homo sapiens
  misc_feature (1)...(471): n = a,t,c or g
gnnnnnnnnnnnnntnnnnnnnnnnnntttgganacccgnnnnnnnnnnnnnnnnnnnnnnnnnnnnnnnnnnnnnnnnnnnnnnnnnnnnnnnnnnnnnnnnnnggcacgaggagcttcaataccctgtacaaatcttggcatcctaaggcagggctaacatttgcttcaagatgctgttgggattcaatggcaagtaagacaggggataataccacagtgtatacacatttcaaaacatgttgtacaccacaaaaatatgccatttttacttctcgattttaaaaagaagagatgaacataaggagatcatggaaaggtgtatcaattgtgaactggaatttcttccgagagagaggaattcacatctactcactcgctggctgagtgcacagcaccatcagacgatactaaaaggctgatccannnnnnnnnnnnnnnnnnnnnnnnnnnnnnnnnnnnnnnnnnnnn

SEQ ID NO: 31144 - DNA, 441 bp, Homo sapiens
  misc_feature (1)...(441): n = a,t,c or g
ttganatntgaanaccgtttgacnnnnnnnnnnnnnnnnnnnnnnnnnnnnnnnnnnnnnnnnnnnnnnnnnnnnnnnnnnggcacgagtcacatttcaagaatccctttctgaaattctccaactctctggtcaggaggaggagcaccattggggcggggtaggcagctagaggcgcaggagcgaatccaggttccttgcgtggttcccagcctctgctgacagcacctcagctaccaggtggggagtggaaattcagcctgcttagaggactgacctctacagttcatatttgcagtgacataaaaggcaaagaggagctggcatggtggtacagaaggtatcagtcaagcgcaggctcttcagaaacctagaaactaaaaagagatgcaacatgtgactggccatcagccagacatgtctagggtgagaccagtgctt

SEQ ID NO: 31145 - DNA, 436 bp, Homo sapiens
  misc_feature (1)...(436): n = a,t,c or g
anttggnnnnnnnnnnnnnnnnnnnnnnnnnnnnnnnnnnnnnnnnnnnnnnnnnnnnnnnnnnnnnnnnnnnnnnnnnggcacgagagataacttgagtaagacacggtcggtccttgcgctcaaagagctcttggtgcagtcagggaatttgattgttaaagcataaataaattactgtgtgctggtgaatagctcttgtggttgatatggtgctttggcttgtgctcctcatttctgtcatagaatggcttatgacatgccattctacgacagagatgcttagttttgggaacctcttgcagctggaaggcttagccgtgccacacctcttccttggcctggatacaagaccccttatactgaacacacctctttcctggcagctctgccacactcttaaccataaacccaacacacgagtgatatcaaatga

SEQ ID NO: 31146 - DNA, 446 bp, Homo sapiens
  misc_feature (1)...(446): n = a,t,c or g
nnttnnnnnnnnnnnnnnnnnnnnnnnnnnnnnnnnnnnnnnnnnnnnnnnnnnnnnnnnnnnnnnnnnnnnnnnattcggcacgagaccactgtcagtctccttggtgtacagcagtttacctgctgacagagggtaaaggggtccatctggctgcacaccggatccactactggatctgaacagcccagtctgctttgaagcactttcagattctgaaggctcactgtcagcatcaacattgctttcagaatggctggcttctttttcactgtcatcagtagggctttcattcagacgtgactcagaattcatgaggctggcaaacattaaagaatccccattcatttcaaggttttcatttttctggtatgtgacagtttctccagatgacaattttctaatacattttcggtcatgaattagttgactctgtaagttgacag

SEQ ID NO: 31147 - DNA, 438 bp, Homo sapiens
  misc_feature (1)...(438): n = a,t,c or g
tgnanaccgtttggaacannnnnnnnnnnnnnnnnnnnnnnnnnnnnnnnnnnnnnnnnnnnnnnnnnnnnnnnnnggcacgagcagtagttttgacttgcatttcccannnnnnnnnnnnnnnnnnnnnnnnnnnnnnnnnnnnnnnnnnnnnnnnnnnnnnnnnnnnnnnnnnnnnnnnnnnngatcatttttgtatatgggctgagatagggaaccagattcattcttttacatgtggatattcagttgtcccagtaccatttgttgaaaagattattctttccccactaatttgtcttgacacccttgttgaaaattagtcgaccatttctggtttctcagttctattccattgaactagatgtctttgcttacaacatcttgattactgtagctttctttttttaaagttaaaaaatttataaagtagaagtg

SEQ ID NO: 31148 - DNA, 456 bp, Homo sapiens
  misc_feature (1)...(456): n = a,t,c or g
gnnnngnnnnnntnntttnannncntntgannaccngtnnnnnnnnnnnnnnnnnnnnnnnnnnnnnnnnnnnnnnnnnnnnnnnnnnnnnnnnnnnnnnnnnggcacgagggtaggtggggatgggagtgggcgggaggggaccctgggtgtcagccccagtgccacctgctctggctcagtctgggccttcggacaggtcacactccctttannnnnnnnnnnnnnnnnnnnnnnnnnnaggggggcgggaatggacttgtttagcgtttcccaaacttcaaatattcttttatcaacgaagggatttttgccatgcccaaacactaccagtactatcatttacttaatgtttcttttttgtttgttttttgnnnnnnnnnnnnnnnnnnnnnnnnnnnnnnnnnnnnnnnnnnnnnnnnnnnnnnnnnnnnnnnnnnnnnnnnnnnnnnnnnn

SEQ ID NO: 31149 - DNA, 448 bp, Homo sapiens
  misc_feature (1)...(448): n = a,t,c or g
ggtngnnnngtnattgatncaanaagacnctttntgacnnnnnnnnnnnnnnnnnnnnnnnnnnnnnnnnnnnnnnnnnnnnnnnnnnnnnnnnnnggcacgaggatttgaccttcttaaatgtgaacatttcatatgttccttgtgttttgtaatataattactgtcatcaccatgacatctttatttcttattcttctctcatgtatatttattttgataacctgttgctataaatgtagatacatttctttctcctttacattttccgtcacaccctccggtttctttgttagcatcctccagtatcttgcccacattctcctacttattactcttcaattccatttcagagtctgttacgtgaacataattacccttatccctcttgcacaaatctttctttaatctgttggatgactctgaaaggattagtttcagtttgggg

SEQ ID NO: 31150 - DNA, 453 bp, Homo sapiens
  misc_feature (1)...(453): n = a,t,c or g
gnnnngnnnnnntnatttgatncctntnnatacctttnnnnnnnnnnnnnnnnnnnnnnnnnnnnnnnnnnnnnnnnnnnnnnnnnnnnnnnnnnnnnnnggcacgagcggaggttgaagttgccggggggtgtggccggggtcatgcatgaggcgacagctctgcaggtgcgggtctgggctcatctgaactgtttggtttcattccagttcctgttcaacagcaacacatagcctgaccctcctccactccacctccacccactgtccgcctctgcccgcagagcccacgcccgactagcaggcatgccgcggtaggtaagggccgccggaccgcgtagagagccgggccccggacggacgttggttctgcactaaaacccatcttccccggatgtgtgtctcacccctcatccttttactttttgccccttcactttgagtaccaaatcc

SEQ ID NO: 31151 - DNA, 446 bp, Homo sapiens
  misc_feature (1)...(446): n = a,t,c or g
ttgaatcccttttgataccgtttgacnnnnnnnnnnnnnnnnnnnnnnnnnnnnnnnnnnnnnnnnnnnnnnnnnnnnnnnnnnggcacgagggaaaactgcagaaaccctgtttctgttaaaacttacattagccccgtttcacagatgagaacctggagatgtgtactgtcatacagtcagttcagtgctaccaccgctcctggcatcctcctcgccccctgaacctgccccccaccaccagagccccccagcccactcacctgtgctgtgttggttccgcagactcggcggtggcgaggactgggctccctcttccggagggcgtgctgtgtggcgctcccactgcagctgcttctgctgctgttcctcctcctgctgttcctgctcccaatcagggaagaggaccgcagctgcaccctggccaacaacttcgcccgctcctt

SEQ ID NO: 31152 - DNA, 445 bp, Homo sapiens
  misc_feature (1)...(445): n = a,t,c or g
annccnatttgaanaccgtnnnnnnnnnnnnnnnnnnnnnnnnnnnnnnnnnnnnnnnnnnnnnnnnnnnnnnnnnnnnnnnnnggcacgagtcttttttctactcttctagcctttcaaattacttagaatttagttttctttgtatagtttgagttgccctcagctgctcacataagcattcaataggttgctgtgatcaatctataatcctttaaatgactgttgaggcctagaaattctagtaatcaatacagaaattagaactcaaagtgttctccccttttattttttatttttgacaatttttgcccttgatgtagagatttagtgattgcctaatcattttaaacaaatgtttccttatctcattgaagagaattacattgataatatagaaaaacaattggcaattaaaatatgaaatccaagagaagaataaagt

SEQ ID NO: 31153 - DNA, 462 bp, Homo sapiens
  misc_feature (1)...(462): n = a,t,c or g
cgctatgacatgattacgaatttaatannnnnnnnnnnnnnnnnnnnnnnnnnnnnnnnnnnnnnnnnnggcacgaggactatgtcattgagttattgaattgttttgatggcttccacaggctgatgcagtcacacagggcagctacagcttcagttttgtctggctgtttatcagctttggagtgagttgtaacagaattccttcctgcactgtggactgctcctcagctgtgagagccctgccaccatccagatccccagtttccacaacactcatggctcagagacaaaggcttttattaaagctgcatttcagttctctttgaactgaagtcccatgagcaggaggcggacaggccaagatactatttttgtgcaaagttttctcaatctaggcaccatgtacattttgggtcanaattatctgttgtggcagtgtgtgtgtgagggggtgctcttc

SEQ ID NO: 31154 - DNA, 466 bp, Homo sapiens
  misc_feature (1)...(466): n = a,t,c or g
aaatcgctngnctnatgacnnnnnnnnnnnnnnnnnnnnnnnnnnnnnnnnnnnnnnnnnnnnnnnnnnnnnnnnnnggcacgagcagaaggatctggtatctgtgggactctgaatagatggaaaagttccctcacaagtggtgatgagagaaaagttacctcacaagtggtgatgagagaaaagttacctgacacactctggcttatttcacaggcatggagcgccatccacttagctgctggggttttcctgagttttatctttcctctctactcattctaagtgttctttctggatgagctcactgaatcacatgcctttaaccacctgctagccacagataactcacacatttatttctgtagccctgacctctcctcaggcttccactcatttgctcagggactaccagatatctctacctgcatgtcccacggacacttcaaactcactctgtctaaca

SEQ ID NO: 31155 - DNA, 496 bp, Homo sapiens
  misc_feature (1)...(496): n = a,t,c or g
gnangnnnatttgaaatcngnnnnnnnnnnnnnnnnnnnnnnnnnnnnnnnnnnnnnnnnnnnnnnnnnnnnnnnnnnnnnnnnnggcacgagcttgaggtcatgctcatgctggttaaagctggagcagaccagagagccaagaatcaggatggaatgaacgccctccactttgccactcagagcaatcatgtgcgcatcgtggagtatcttattcaagatctgcacctcaaggacctgaaccagcctgatgagaaaggaagaaaaccatttcttttggcagctgagaggggccatgttgaaatgatagaaaaacttaccttcctaaacctgcatacttcagaaaaggacaaggggggaaacactgccttgcacctcgctgcgaagcatggtcacagtcctgcagtgcaggtgctgctagcccagtggcaagacataaatgagatgaatgagctcaatatcagtagtttgcagatagcaaccaggaacggccatg

SEQ ID NO: 31156 - DNA, 499 bp, Homo sapiens
  misc_feature (1)...(499): n = a,t,c or g
gngagtggnncacnaganntnnntgganantccccatgantttnngggaaannnnnnnnnnnnnnnnnnnnnnnnnnnnnnnnnnnnnnnnnnggcacgagcaatatgtcactctacatgacatgatcctgaaaaatatcgagaagatcaaacggccccggagcagcaatgcagagactctgtactgaggccagggccagggccaggggactctgtgagtctggctcaagaccgacattgccttggtttgttacatgactatcgtgatggggaaactggctggaaatagtaatcacacctctctgtttttagttagagtctaatgaaactctcatctagttctgtgatgtgtttacctcttttttcaggcctcaggaactcttctatttccttccctaataccccacacccaacctgtcgtaatttctggagaactccaggtttgtgtgtgcaggatgttggcacaaaaatacctgtgttttcattctccccctctctc

SEQ ID NO: 31157 - DNA, 462 bp, Homo sapiens
  misc_feature (1)...(462): n = a,t,c or g
gtgttnnnnatttnnnnnnnnnnnnnnnnnnnnnnnnnnnnnnnnnnnnnnnnnnnnnnnnnnnnnnnnnnnnnnnnnnnnnnnnnggcacgagtttacattaatttctgcccttatttctttccttatatattctttaggattaataagctattattttcctgccttgagaaagatactttgattattgtttttcattcttttctaatgttttgttttttgtttttttttttttnnnnnnngantttngctntngtgncccagncnnaagggnanggggggnatntngncccnccgaaccctnngcctcngggntnaangcaattntcnngcctaaccctccccannancnggantnncgggctngccccaccacncnngcnantttnganttttaagnaaaaacgtttntngangtnggnaggcnggnctaaaacnccggacctnnggnnancccccccc

SEQ ID NO: 31158 - DNA, 467 bp, Homo sapiens
  misc_feature (1)...(467): n = a,t,c or g
tgntnnnnnattgaaaatnnggaanaccgtnnnnnnnnnnnnnnnnnnnnnnnnnnnnnnnnnnnnnnnnnnnnnnnnnnnnnnnnnnnnnnnnnggcacgagcttctaaagaagagatggaaaaaaaatgactctgtagttaaacttgaattgccttagtagtgtagctttaagccttataaaattgctaagttaaattggccctgtgtgacttcctaatcactgtcttatacaatacccagtcagtttggtggcccagtggtgcatagataagttgagatttaatttaatcattattgcatgcaatgtttatacatagaaaggtttccacttttaatgtaagagatgattaaagtcctgctgggaaagctgatgtaattatcagcttgtaattatcgagtgtgttaaattagtatccaattacttcttcccatttttttttctcgtttgcttcttgtttcttaca

SEQ ID NO: 31159 - DNA, 465 bp, Homo sapiens
  misc_feature (1)...(465): n = a,t,c or g
ggtgttnannatntgantncgttatgccatgantacgaatttaatacnnnnnnnnnnnnnnnnnnnnnnnnnnnnnnnnnnnnnnnnnggcacgagcaatgtgtgtcatccttgggcgctccacacccctccccaaacccacgtagattcagtgtgctcaaccagaaagacgtaatcagagagaatagcctggcatttcttggatttggtacctatcttttcagttcaatagaatggagttaaaataaaaaaaaaaacaagaaacctttctgagctcctactatatgactgaatatacagaaatgaagaaataaatagactcagtttttcaataacttgcagactaaagagaaaacagaagccccagccacctgggggcgggggagggggggcctgacgttagaaaacnctaggccaggtctgcacaatgcagcagaagagtccgacctcagggcggtgcacctt

SEQ ID NO: 31160 - DNA, 452 bp, Homo sapiens
  misc_feature (1)...(452): n = a,t,c or g
tttgaanaccgttatgacntttnnnnnnnnnnnnnnnnnnnnnnnnnnnnnnnnnnnnnnnnnnnnnnnnnnnnnnnnggcacgaggaagatttagcaggaactactgatgaaaaatcattagaacgagtgtcactgtctgcagaaagtctcctgaaagcagcatcctctgttcgcagtggaaaaaattcatcccctataaactgctccagagcagagaagggtgtagctagagttgtgaatatcacttcccctgggcacgatgcttcatccaggtctcctactaccactgcatctgtgtcagcaacagcagctccaaggacagttcgtgtggcaatgcaggtacctgttgtaatgacatcattgggtcagaaaatttcaactgtggcagttcagtcagttaatgcaggtgcaccattaataaccagcactagtccaacaacagcgacctct

SEQ ID NO: 31161 - DNA, 449 bp, Homo sapiens
  misc_feature (1)...(449): n = a,t,c or g
tttgaanaccgtnnnnnnnnnnnnnnnnnnnnnnnnnnnnnnnnnnnnnnnnnnnnnnnnnnnnnnnnnnnnnnnnnggcacgaggatattgcttggtaatagtgcaatttctatccttttccctcccccctcaacttttaagttcttttctttataattttgctgccccctccctgatggtttgggtttttgtttttgtttttgtttttttttttnnnnnnnctactatgccatcctccntntgngaggcaaagngactgnnagngtttngtnatgccntgccttganctgngggtgtttggcaacaataagggggttgaataaatnggctgagcacacttccacccacctagngttctnaaaggggttatgngattgtttaaacctggagngggtngnacccttaangctttcctntgcaactaaaccgccacatatatgtncattg

SEQ ID NO: 31162 - DNA, 472 bp, Homo sapiens
  misc_feature (1)...(472): n = a,t,c or g
ngtgttnaancgtttccnnnnnnnnnnnnnnnnnnnnnnnnnnnnnnnnnnnnnnnnnnnnnnnnnnnnnnnnnnggcacgagcttaatttccnnnnnnnnnnnnnnnnnnnnnnnnnnnnnnnnnnnnnnnnnnnnnnnnnnnnnnnnnnnnnnnnnnnnnnnnnnnnnnnnnnnnnnnnnnnnnnnnnnnnnnnnnnnnnnnnnnnnnnnnnnnnnnnnnnnnnnnnnnnnnnnnnnnnnnnnnnnnnnnnnnnnnnnnnnnnnnnnnnnnnnnnnnnnnnnnnnnnnnnnnnnnnnnnnnnnnnnnnnnnnnnnnnnnnnnnnnnnnnnnnnnnnnnnnnnnnnnnnnnnnnnnnnnnnnnnnnnnnnnnnnnnnnnnnnnnnnngtgcctgtttccttaatttcagaatcacttcatggcagcatatacattgnaatatatgtgcagttatgancttattggtaaaac

SEQ ID NO: 31163 - DNA, 454 bp, Homo sapiens
  misc_feature (1)...(454): n = a,t,c or g
anatttganaccgtnnnnnnnnnnnnnnnnnnnnnnnnnnnnnnnnnnnnnnnnnnnnnnnnnnnnnnnnnnnnnnnnnggcacgagggatacactgctgtatcctcagtgcctgacacagtgccaggtccatggtagctactcaacacgtggttgttgaatggataaaagttgccggagcagaatatctaatcatttttgcgacccactgctaatttcacagactcctccttatgtctgtggatagtggcctcattgattgatgctttaagaacgtaactnnnnnnnnnnnnnnnnnnnnnnnnnnnnnnnnnnnnnnnnnnnnnnnnnnnnnnnnnnnnnnnnnnnnnnnnnnnnnnnnnnnnnnnnnnnnnnnnnnnnnnnnnnnnnnnnnnnnnnnnnnnnnnnnnnnnnnnnnnnnnnnnnnnnnnnnnnnnnnnnnnnnnnntgagct

SEQ ID NO: 31164 - DNA, 404 bp, Homo sapiens
  misc_feature (1)...(404): n = a,t,c or g
nacccgnnnnnnnnnnnnnnnnnnnnnnnnnnnnnnnnnnnnnnnnnnnnnnnnnnnnnnnnnnnnnnnnnnggcacgaggtaatggagaaaacgttagtcatacagaacttgaaagtgcttgtcaggccgggcacagtgccctcannnnnnnnnnnnnnnnnnnnnnnnnnnnnnnnnnnnnnnnnnnnnnnnnnnnnnnnnnnnnnnnnnnnnnnnnnnnnnnnnnnnnnnnnnnnnnnnnnnnnnnnnnnnnnnnnnnnnnnnnnnnnnnnnnnnnnnnnnnnnnnnnnnnnnnnnnnnnggagatttgcttgagcctgggaggcagatctcnnnnnnnnnnnnnnnnnnnnnnnnnnnnnnnnnnnnnnnnnnagaccctgtctttaaaaaaaaaaaaaa

SEQ ID NO: 31165 - DNA, 454 bp, Homo sapiens
  misc_feature (1)...(454): n = a,t,c or g
anntttgaanaccgtnnnnnnnnnnnnnnnnnnnnnnnnnnnnnnnnnnnnnnnnnnnnnnnnnnnnnnnnnnnnnnnnnggcacgagggaatgcttgacttgaagttcagagctgcttgttcccaggtgaacagctactgctggaagttgctgcatcaacattctaatggctttttctatggcctgttgtctttcaacccaaacctggcctgctgaccactgcatctagtcccatgcctgctaaatgtctctaagcctgccctctgccccaaatcatacataaaggtgtttgtaagtacactggtattgaattactagtcatattttttccactgaagactggaacctcaggtgtcctgtttggatttttttaatttgttcaagttaaagtacatacatgtagtaccaaactttgtggtggatttagatctttgcgtcttcctcaatttctga

SEQ ID NO: 31166 - DNA, 452 bp, Homo sapiens
  misc_feature (1)...(452): n = a,t,c or g
ttganaccggttgacnnnnnnnnnnnnnnnnnnnnnnnnnnnnnnnnnnnnnnnnnnnnnnnnnnnnnnnnnnggcacgagttaaaaccaatttctgtcgtgcttaattgaaaatcacaactaaaccaataaaccattattaaatttccattctgcagcagaaggcacctctggacggctcccggcttgtagtttaatgaagtatgtgctccctgctgttaacccgcagccctccccaactctccagcagctttgccaagtcagcctccgggccatctggctgtccttggccaaggcactgttaacggagtgacgttaaccatcttgtattgtgacctgtggccgcttttctggtttaagtccttcactttttcaagaggaatggatgaaattaatgtgcatgcagagtctcacagtgatgccggaaggaaggatgtataggcagtgaatga

SEQ ID NO: 31167 - DNA, 448 bp, Homo sapiens
  misc_feature (1)...(448): n = a,t,c or g
nttganaccgttatgacnnnnnnnnnnnnnnnnnnnnnnnnnnnnnnnnnnnnnnnnnnnnnnnnnnnnnnnnnnggcacgaggcacaatggagatatggctgacttttgaaaaaagaagtagttttttgggggagggcagggcaaagaggtaggaagtagttggtactataaggaaatgttagagactattttggaaatgtattcattattttaaggcaactaacaaatggtcatctttctgttaggacattgtagcagcagcctttactggtcatgaaatttgcatgatatctaaaattatacttctgtaaataggtcagtgtcgattaatagtaactttgtatagaaaagcagatgccagctggcatagaagtggcagtgtagatgctggtagttctggagtcctggaagctatgagatgccatacatcacaaggccatcacagc

SEQ ID NO: 31168 - DNA, 458 bp, Homo sapiens
  misc_feature (1)...(458): n = a,t,c or g
ttganntttgannaccgnnnnnnnnnnnnnnnnnnnnnnnnnnnnnnnnnnnnnnnnnnnnnnnnnnnnnnnnnnnnnnnnnnggcacgagcgtcccaaacctgtggcgggagttggagattctgcggcgaatacgccaggtgtgactggctggaagtggcgtggctggatcatcatgcctagggttcataacataaaaaagtctcttacacctcacatttcttgtgtgacaaatgaatctgataatctgctggattttttgcctgacagactaagagcaaagctacttccattccagaaagatggcatcatttttgccctcaaaagaaatggcaggtgtatggtggctgatgaaatgggtctaggaaagacaatccaggcaattggaattacttacttctataaagaggaatggcctctgttaatagtggtcccttcgtctctgaggtacccttgga

SEQ ID NO: 31169 - DNA, 470 bp, Homo sapiens
  misc_feature (1)...(470): n = a,t,c or g
gnnngnnnnntgnnttttggnntttgaataccgtttgacnnnnnnnnnnnnnnnnnnnnnnnnnnnnnnnnnnnnnnnnnnnnnnnnnnnnnnnnnnggcacgaggtatcttactgtcagcacataacttgttgctgtgttattgacattttcactgttttgaaatttttactgttatctgggtttgaatcccagctctcccaagcttcagttttctttcatttgtcaaatgagataaaagtatccacttcatagggttgttatgaggattaatgatgaatacaaaacacttaacatagtacgtggcatgtaatattagttgtaaagttaatgtattcattatcatcattctgtttcaaatcagcaatgaaatacagactacactaatcccatttctgcttggaattgtgagtctaaatgccatgtagcagttccctgcttgaaatacactgtaaaccttccaattgcag

SEQ ID NO: 31170 - DNA, 448 bp, Homo sapiens
  misc_feature (1)...(448): n = a,t,c or g
atcgnnnnnnnnnnnnnnnnnnnnnnnnnnnnnnnnnnnnnnnnnnnnnnnnnnnnnnnnnnnnnnnnnnggcacgagacttgaccttgctttgtcagtgcctgagtctcagtgcccaggtctgtggggctgtaatgctcctccgagggctcactcctcagttgtccttcctgcctttactgactggatcttgagctttgaggaaacattgtggcctcctaagatgcaagtggtggacagtcatttgcctacattgtactttagtatttgaaagaaatttttttttaattgtatgtggctggaaccaggcacatagatgatggttgtctatcatttgaatgtttccaggacattagctatttgtcttagtttcaataatacagctaccacttattggtaatttactatgtgccagacactttttgtactttggattatttaatgtatt

SEQ ID NO: 31171 - DNA, 454 bp, Homo sapiens
  misc_feature (1)...(454): n = a,t,c or g
tttgaaanccgtnnnnnnnnnnnnnnnnnnnnnnnnnnnnnnnnnnnnnnnnnnnnnnnnnnnnnnnnnnnnnnnnnggcacgagagcccatggactctgggtccccgaaggacatctcaggaaccccctagttctctactttgagacatatgcggtggctggggtcactctgagaagtgtcactttggacttgtcccttgcgttgggtgatggagtcagacaccaccagcagtggatggccaagcttcaagggcaccttcttagcagctctgtgggctgtgggcaaaagactttcctgttctcccttctccatattagggacccagggaagtgcttgctgcttccagcctcgctgatggctctgaggagcaggtgatggctgtggcattggtgagagaaagggacctgtcatttccaggggtgggtgatgctgtggtaaaccccacaaggtgg

SEQ ID NO: 31172 - DNA, 450 bp, Homo sapiens
  misc_feature (1)...(450): n = a,t,c or g
anancnnnnnnnnnnnnnnnnnnnnnnnnnnnnnnnnnnnnnnnnnnnnnnnnnnnnnnnnnnnnnnnnnnnggcacgagcggcacgagtataaatggaattacattttacacactctcttatgtctggcctattcactcagcataattattttaaattttatctacctacctgcatagtacctatannnnnnnnnnnnnnnnnnnnnnnnnnnnnnnnnnnnnnnnnnnnnnnnnnnnnnnnnnnnnnnnnnnnnnnnnnnnnnnnnnnnnnnnnnnnnnnnnnnnnnnnnnnnnnnnnnnnnnnnnnnnnnnnnnnnnnnnnnnnnnnnnnnnnnnnnnnnnnnnnnnnnnnnnnnggtaaanactgggtgtagctgggtttctcaggctggttttgaactcctagngttaattgaggcctcagcctctcaaagtactgggattatag

SEQ ID NO: 31173 - DNA, 444 bp, Homo sapiens
  misc_feature (1)...(444): n = a,t,c or g
nnnnnnnnnnnnnnnnnnnnnnnnnnnnnnnnnnnnnnnnnnnnnnnnnnnnnnnnnnnnnnnnnnnggcacgaggcagattgctctgtggccacacagaaggaattggtggcgttatgtctatactaatctaannnnnnnnnnnnnnnnnnnnnnnnnnnnnnnnnnnnnnnnnnnnnnnnnnnnnnnnnnnnnnnnnnnnnnnnnnnnnnnnnnnnnnnnnnnnnnnnnnnnnnnnnnnnnnnnnnnnnnnnnnnnnnnnnnnnnnnnnnnnnnnnnnnnnnnnnnnnnnnnnnnnnnnnnnnnnnnnnnnnnnnnnnnnnnnnnnnnnnnnnnnnnnnnnnnnnnnnnnnnnnnnnnnnnnnnnnnnnnnnnnnnnnnnnnnnnnnnnnnnnnnnnnnnnnnnnnnnnnnnnnnnnnnnnnnnnnnnnnntgctgatctaa

SEQ ID NO: 31174 - DNA, 448 bp, Homo sapiens
  misc_feature (1)...(448): n = a,t,c or g
nttganaccgttatgacnnnnnnnnnnnnnnnnnnnnnnnnnnnnnnnnnnnnnnnnnnnnnnnnnnnnnnnnnnggcacgagctgctattataagagtaagataatgaccactctagtgtattctaaagaaatattctaaaggaaatacctttcatccatttgaaaagaaagcatggttttagatttctgcctgaggggtgagagattcagaaggaccaaaagctacatagctctctttcccaggccaggcttggtacataccagcaggtggtagttacaaacactgatgcatgctgggaaggtaaccttcccctgcccctccacagaccacccaccccagaatggaatgtgttccagactcaggtaagtcaggtgtgtaatagagcagagtgggggaagggaggaggttgcttgcacacattgcccaaaggacaggcccttgccca

SEQ ID NO: 31175 - DNA, 452 bp, Homo sapiens
  misc_feature (1)...(452): n = a,t,c or g
ttganatcgntnnnnnnnnnnnnnnnnnnnnnnnnnnnnnnnnnnnnnnnnnnnnnnnnnnnnnnnnnnnnnnnggcacgagcagaggaggaccggcgggccaagctttcctagcctgacagcagccatttcggaacgtacgtcccagccctctttagctacttagcgcctctgggcccgagaacacctgctccttggctcagtctggcgccaccggcatcacggaactgtacttcccagagacgtcacaccgggagacttccgattcccgctcttgagattggactctcacgtgcaggagccagtcctcgctgggctctagcgggcttctgatggaggagctactcctctgggaggacagaaattagcggcagcctctgtcaccatccaaagattacaacccatgaaaccattgaatttgtgccttgtatcagaaagcaaaggagaatgaa

SEQ ID NO: 31176 - DNA, 449 bp, Homo sapiens
  misc_feature (1)...(449): n = a,t,c or g
nttgganaccgttatgacnnnnnnnnnnnnnnnnnnnnnnnnnnnnnnnnnnnnnnnnnnnnnnnnnnnnnnnnnnggcacgagatgttatatttgtgagattgatccatgttgtatgtggttatgggttcatgctcattgctgtatagtgttccatcatgtgaatatactgctgttcatcctgttgtccatgaacgttaggtttctagttttggaccagtatgaacagtactgtcatgaatgattttgtatgtattttctggtgaatataggtacacatttaagttagatatatatctaggagtgcaatttttgggccatgcagttcaactggagtaggtaccgtcagagtggttttatcaagcggtattcccagcagtggtgtatgagtttcagttgcaccacagtgcttgttattgtctgttgtcttattttagctaatctggtaa

SEQ ID NO: 31177 - DNA, 456 bp, Homo sapiens
  misc_feature (1)...(456): n = a,t,c or g
tttgnanaccgnnnnnnnnnnnnnnnnnnnnnnnnnnnnnnnnnnnnnnnnnnnnnnnnnnnnnnnnnnnnnnnnnnggcacgagtttaaaattgttttatctttgtattagggcacaggatggtagagatagtatggttgggtgtttctagtgaaaattatggtaatttgctaggatttacaactaggaagggaattatttagaattttagttagtgaaatgataatatagtaatagcatcagaattttggaatgtgcctcatgatttcactatgctcttttaatttttacatagttccttctggtagttgtctacaagtgtatgtattttgtgtagatattcttactatgtgtttttgttcttgtattctgtttctcatttaacataactagtaataacaaccatttattgagtgaacatatattttaaaagtcctaacaaaattttagcaagg

SEQ ID NO: 31178 - DNA, 170 bp, Homo sapiens
  misc_feature (1)...(170): n = a,t,c or g
tttgataccgnnnnnnnnnnnnnnnnnnnnnnnnnnnnnnnnnnnnnnnnnnnnnnnnnnnnnnnnnnnnnnnnnnggcacgaggtcattctgtgttttgagggcaaggcagtggggtaaagctgagttgaaaagcataatatggctcatcttttctttttttttttttt

SEQ ID NO: 31179 - DNA, 389 bp, Homo sapiens
  misc_feature (1)...(389): n = a,t,c or g
ttttgaanacccttnnnnnnnnnnnnnnnnnnnnnnnnnnnnnnnnnnnnnnnnnnnnnnnnnnnnnnnnnnnnnnnnnggcacgagctgagaattaatctggggaagctggcttctacagataacagggtctgtgacgttttgaagctgattttagatatagaatgatatacaaaatgtaattattgaaaagggaaaatttgtaaaatacgtcacatcagttggtaattaatgtagtacatactgaattgcttcagaggatttagagtactggtttcaagttttaggagggaaggagccttttacagaaaatgtttgtgttgtgggcatttgaagatggttggttgatcgtcctaaactttgcaaattttcacatttttttttttttt

SEQ ID NO: 31180 - DNA, 458 bp, Homo sapiens
  misc_feature (1)...(458): n = a,t,c or g
tttganaaccgtnnnnnnnnnnnnnnnnnnnnnnnnnnnnnnnnnnnnnnnnnnnnnnnnnnnnnnnnnnnnnnnnnggcacgagcccctttcattctttctcttaagaaagactcctgtagttccttcttcccagaaagactatccccaagcttagcaaaacctacttttttctactctggagatatttgttctcttctctaacaggccagtgtaccatggaaataacctgttagaaatctaagctggtggattttgatctgtttgtacatctgcatccctgaaatactatgagccacttctccaccccaagggaaatcttcctgtttgtctccgtgttcccagcaccagcacagggctggcccacttcataggctcaaaattaatgtctgtggaatgactggatggttatatgaatgaggaagtggccctgtcactacagcctataggaagttcta

SEQ ID NO: 31181 - DNA, 463 bp, Homo sapiens
  misc_feature (1)...(463): n = a,t,c or g
anacccttatgacangattacgaatttaatacnnnnnnnnnnnnnnnnnnnnnnnnnnnnnnnnnnnnnnnnnggcacgagcaataccctgaacttactcctctacctgacagtaatgaggcaacatcctttccccctgccaggatactatttaaagagacctgccaaaacagaagacttaaatgaaatgcaaaatctcatgacataatgtccaaaatgtctaggttttgattgaaaaccatttgccatatcaagaatcaggaaaatcataacttgaatgagaaaagacaatcaatggataccaacaccaagataacagacataagaattattttacaagggaggaaaaatggtagatagaaggcaggactaacttcagctcccagttggatggttacaacagcatgtagagacccacatcacgaacttctgctccaacaactaccacaagaacataccagga

SEQ ID NO: 31182 - DNA, 463 bp, Homo sapiens
  misc_feature (1)...(463): n = a,t,c or g
ttggnccccttggacaccgttnnnnnnnnnnnnnnnnnnnnnnnnnnnnnnnnnnnnnnnnnnnnnnnnnnnnnnnnnnnnnnnggcacgagctacaatacatatcatttatcacattaaggaagaatacttcatttttattgtattttatcaagatgttgaattttgtcataatgcattttcagcatctgtggagatgattatatggtttttctctttaggcttactaatttgattaattgtaataaaagtttccaatatagaaccaaactggattttgtagaataaactattgtcaggtttttttttaatatgttgttgtattttatttgctaatttttaaaggattttcttgtttcatgagatggtatatagttttcctttgtagcataattttagttgggctttgatctatcagtttactcccttcaaaaataatttggaatggttcccttttttcaat

SEQ ID NO: 31183 - DNA, 461 bp, Homo sapiens
  misc_feature (1)...(461): n = a,t,c or g
cccctttgagaaccgtttgacnnnnnnnnnnnnnnnnnnnnnnnnnnnnnnnnnnnnnnnnnnnnnnnnnnnnnnnnnnggcacgagcttgaaagccatggaaatgacctggaataacatggaaaagaaggagaaactgatgtggattaagaaggcagccgaagaccaaaagcgatatgagagagagctgagtgagatgcgggcacctccagctgctacaaattcttccaagaagatgaaattccagggagaacccaagaagcctcccatgaacggttaccagaagttctcccaggagctgctgtccaatggggagctgaaccacctgccgctgaaggagcgcatggtggagatcggcagtcgctggcagcgcatctcccagagccagaaggagcactacaaaaagctggccgaggagcagcaaaagcagtacaaggtgcacctggacctctgggttaagg

SEQ ID NO: 31184 - DNA, 462 bp, Homo sapiens
  misc_feature (1)...(462): n = a,t,c or g
ttganaccgtnnnnnnnnnnnnnnnnnnnnnnnnnnnnnnnnnnnnnnnnnnnnnnnnnnnnnnnnnnnnnnnnnggcacgagccacagtgctgcatgaactgaaaattcatacagggtagattgatgccactgtttcactgtttgtcgcatcacagacctgtggtcaacccttcacactgcccagcagtttcactctttttctttagtcagcttgctccagcagttatttctcttcagacctccatctctcccttgggtttcctcccttgtagtaaatgatcttactttctatttctcagagaaaagagaaagcatcaggtaggaactatgctcattttttgccgctaaatctagaactttacttgtattttctccccttttatgttnttctttttccctcctcttttantggagggtggtgtcctcttctgtcaggccacatctcaacctgtgctatggg

SEQ ID NO: 31185 - DNA, 459 bp, Homo sapiens
  misc_feature (1)...(459): n = a,t,c or g
anancctttnnnnnnnnnnnnnnnnnnnnnnnnnnnnnnnnnnnnnnnnnnnnnnnnnnnnnnnnnnnnnnnggcacgagatttcagaagagagggggctgcaaggaaagttggaccctacccactacaccctaggagcaggaagcaacatagaaggccctaacgaatccaagcacagtggaatgtattatctgtgtgtcagctctcactagagatagaggagagggacacattttatcacaacatttttgtatctacaacaaatagcccaggggcacacataggatggacttaatacaaataaattctaattccattggaatggctaaggccacaagtaagtgctctgccttctcctctgtaatgagttctctagagtcaggaaggtggccattctcacctttcccaatcaaaacagttactcctaggagtcccctattcatctctctgctctctctt

SEQ ID NO: 31186 - DNA, 464 bp, Homo sapiens
  misc_feature (1)...(464): n = a,t,c or g
gancncctttgaagaaccgtnnnnnnnnnnnnnnnnnnnnnnnnnnnnnnnnnnnnnnnnnnnnnnnnnnnnnnnnnnnnnnnnnggcacgagccaggagctgggagcgggtgaccggcggcggggaagcggcctgggttggccctcagattgcggggtctgggggcatctcgccgggcaaacccttggcccgcctacaaggacttcccccggccagagcaatggccgctgagaacagcaagcagttttggaagaggagcgctaagctgccggggaggtgagcccaggacgctgagagggataggggattggaccaaacccttccagatcctaatccctgaatcccgcgggcctggggcgccacagaggccagaagactggtttggggaagctgggactgcctggtggcggcagggcagctgtcaggcagcgaagcgaacagcgagctttggggacggctggat

SEQ ID NO: 31187 - DNA, 456 bp, Homo sapiens
  misc_feature (1)...(456): n = a,t,c or g
ttnnnnnnnnnnnnnnnnnnnnnnnnnnnnnnnnnnnnnnnnnnnnnnnnnnnnnnnnnnnnnnnnnnnnnnnnnnggcacgagcnnnnnnnnnnnnnnnnnnnnnnnnnnnnnnnnnnnnnnnnnnnnnnnnnnnnnnnnnnnnnnnnnnnnnnnnnnnnnnnnnnnnnnnnnnnnnnnnnnnntgggtagggagcctttctaagaaagtttttctattctggtctttctttttttccctgtatgtcatcaggatagcccaacagtttatttgccaggcaagttctatctaggaactgcacacaaaaaagtcatggtttaggaagtaattcatgcagcaataggagaaaagaaaggaagctacaagcttagtgaccttgggtggaggaacagctcacaaggcagcctctgatccatcaccaaccagcatctcttcactccgtgtaccctgcaggt

SEQ ID NO: 31188 - DNA, 462 bp, Homo sapiens
  misc_feature (1)...(462): n = a,t,c or g
tttganaccnnnnnnnnnnnnnnnnnnnnnnnnnnnnnnnnnnnnnnnnnnnnnnnnnnnnnnnnnnnnnnnnnnggcacgaggcaggtggcctggcagaggtgggtgggagccctgccctcgtcctcctgcctgtgggcgaggagggagtcctgcgagagaaccctcattggccatctacttaggtagcaggtttgcctccctgggcaacattcttagctacagacagggacatcttagagtcactggaatcacacaggccttccctcagcttgaggggctgcctggaggtgggggtgggggtacacctcctcagtggggagagacttgccaaatctctatcgccagcggctaagggacttgacttgaagcttgtacctccctctctctccctccccctctctccctccccaccctcaaaagacaagtgtgccatttgaccatctcgggaagtgaggagag

SEQ ID NO: 31189 - DNA, 462 bp, Homo sapiens
  misc_feature (1)...(462): n = a,t,c or g
tttgacaccntnnnnnnnnnnnnnnnnnnnnnnnnnnnnnnnnnnnnnnnnnnnnnnnnnnnnnnnnnnnnnnnnnggcacgagtagtagaaaaagggatcgaggtgattggaaaaccaggagagtgcctttcaaaggcacttttctctgattttattctgttctaaaataattaaaagactgtcatgaagaagaattaaacttttctttggaattttagaaggcagatttagaaataattagtgggtggatgttacgggtcttagactttgaatcagaataaagaacattctgacatttcaaaatggaatgagtaactcttaaaggaattaagctctcttcctattgttcagtagagactaactgaccatttggaatgtcaaggatccttccaactctggggttctttgaagtcatgacctatttttaagtgcagtaagagcagaagcccactgctttgct

SEQ ID NO: 31190 - DNA, 460 bp, Homo sapiens
  misc_feature (1)...(460): n = a,t,c or g
ttgganaccnttnnnnnnnnnnnnnnnnnnnnnnnnnnnnnnnnnnnnnnnnnnnnnnnnnnnnnnnnnnnnnnnggcacgagtggatttaatgagtaatttatgtttttaaaattcagaatagttaatctctgatctaaaaccatcaatctatgttttttacggtaatcatgtaaatatttcagtaatataaactgtttgaaaaggctgctgcaggtaaactctatactaggatcttggccaaataatttacaattcacagaatattttatttaaggtggtgcttttttttttggccnttaaanntngatttttntnancttnattcnngannccaaagtaanngnggaaaaaanntcaaanccagtngagtntcntngcaaacaaanntnccagnagcccntatngttaaanattaagtngaanaaaataaattttntttcagncanancctaaatcc

SEQ ID NO: 31191 - DNA, 465 bp, Homo sapiens
  misc_feature (1)...(465): n = a,t,c or g
tttgaanaccctttatgacangattacgaatttaatacnnnnnnnnnnnnnnnnnnnnnnnnnnnnnnnnnnnnnnnnnggcacgaggggccctaagcaccacgcctaatcccagctaagtctggaagaaaaaggagtggagagggccgtcagcgccgcacctgatcccagctaagtctggaagaaacccatttggtttacatgttgacttctccctttagaatacagtgggaaattcagcaaggagttaaagccagtgtcattttgggagggcctggctggcgaatccaatttgcaaaataaacttctggctacatttcaaggtgaagtcactccaacactgagaagtctcttttgttttgctcttgaatgttgtttcaagggagatttacaagtattcatgactaataggtggtgagtcttctaattatggctagtaatgacagttagctcttcctttttgcg

SEQ ID NO: 31192 - DNA, 462 bp, Homo sapiens
  misc_feature (1)...(462): n = a,t,c or g
acnccctttgantaccgtnnnnnnnnnnnnnnnnnnnnnnnnnnnnnnnnnnnnnnnnnnnnnnnnnnnnnnnnnnnnnnnnnggcacgaggaaatacaaggcttgggttcggtcgtatgcccacacagtgattaaactaggattaaaatctagttttgaatttggagtcaaaagtggtttttctgcttcctcactgcttcaagagctctttgtctccctgctttaaaaatgcttcctatgttgttactgcctctgtaggtacaaacagccttcatctccttcaactcggtttattgggtccatcagggccaactttccagggaaataaaaacaactcacactcagcttttggctccagttggtttaacaggtgggactctacaatgatagcacttggtaagattcctttaaaataaaagcagccataaatacgaccctcagcagagtggtcttttaatgat

SEQ ID NO: 31193 - DNA, 459 bp, Homo sapiens
  misc_feature (1)...(459): n = a,t,c or g
tttgnnnnnnnnnnnnnnnnnnnnnnnnnnnnnnnnnnnnnnnnnnnnnnnnnnnnnnnnnnnnnnnnnnnnnnggcacgagcttcctgcattatagaaataaattacagagatatagtgtggggtgatgaaagaaatagaccatgtttgcttttcagttcttaattttcttgcctttatagaaacatggcaagagtaaaaataactaataaactaaagatttttctctgtatcaagaacataattttttaactttttaaaattttctttttcatttatttttctttttttatttttgttnnnnnnnnnnnnnnnnnnnnnnnnnnnnnnnnnnnnnnnnnnnnnnnnnnnnnnnnnnnnnnnnnnnnnnnnnnnnnnnnnnnnnnnnnnnnnnnnnnnnnnnnnnnnnnnnnnnnnnnnnnnnnnnnnnnnnnnnnnnnnnnnnnnnnnnnncccgac

SEQ ID NO: 31194 - DNA, 464 bp, Homo sapiens
  misc_feature (1)...(464): n = a,t,c or g
tttgaacaccgtnnnnnnnnnnnnnnnnnnnnnnnnnnnnnnnnnnnnnnnnnnnnnnnnnnnnnnnnnnnnnnnnnggcacgagatcaaactcagtgataacagggacagctggtctgacatcttaggttttctttttatctcagaccatatcctccctcttccttttttcacttctataaaggtagtgcttataggcatatttatagtggggaaagaggcagtgaaatccttgtgcagaaacataggtaggcagttttgggggccaggagagaaagaacattcaacactaaaggccacctcctaggacatttaactgaactaagtatcatttttcatattctgtttttgtcatctgtacatgcagggctatcagctcccagctggattaaggttagggatttggatctagtcagtaaatgacttctgatgagattagaatcgtctccaaatccccattaagg

SEQ ID NO: 31195 - DNA, 461 bp, Homo sapiens
  misc_feature (1)...(461): n = a,t,c or g
annccnttgaanacccgtnnnnnnnnnnnnnnnnnnnnnnnnnnnnnnnnnnnnnnnnnnnnnnnnnnnnnnnnnnnnnnnnnggcacgagggaaaacgaaggtaaggcagaagggtgaggatctcttgtgctgcccccacttgtgtttttgagaggaaactccttttcctggctggaaaaacagtaaagcatgatgttttcctaacatggactgcttcagataggtgtttattacagtttctttctgaagcctgacttgtcctgactctcgaattgttttctttcttgaataatactaggtacttttgtcctttcccttttgactgtctggtatctttgggtcccaaatggcctggcgtggtagcacatatctctattccaagctactaaagaggctgaggcgagatggggagcgggttacatgagcccaggagttctaggccatagtgtgcaatgaaga

SEQ ID NO: 31196 - DNA, 459 bp, Homo sapiens
  misc_feature (1)...(459): n = a,t,c or g
anaccctttatgacangattacgaatttaatacnnnnnnnnnnnnnnnnnnnnnnnnnnnnnnnnnnnnnnnnnggcacgagnnnnnnnnnnnnnnnnnnnnnnnnnnnnnnncttcgctaatctttgattgctttttgatgcttcaagctgaaaaaattattccttcatagacatgaaaaatattttattcattatattatgtgaaatatatatcaaaaaggtatcaaactgctgggccacatggcgtgattgccgacaagaatagcaactgtgttgggccttggtcctgagggaacacatgacaatgagaagtggctcttttcccctggctggagaagtgacaaataacaggatccaggagcagatgttaagtgctgatgatgaggtagagcagatagtcatttgtggcaggaattgatggcatgtggtccctgagagccaggccatctggatgtct

SEQ ID NO: 31197 - DNA, 461 bp, Homo sapiens
  misc_feature (1)...(461): n = a,t,c or g
ttgacccctttggagaaccgtnnnnnnnnnnnnnnnnnnnnnnnnnnnnnnnnnnnnnnnnnnnnnnnnnnnnnnnnnnnnnnnnnggcacgaggccacatgtggggttgaagttcagttccatccttaggtcagtgaccctgaaccagtgtacatttctaagttgactgtcagtggtttttttttttcttnancaaaantncagccncanatngnaaancnttnatntccnttaatttttcanttnataatcctccnttngnaagtaccaggnttttgnnctgcatggaaaaaaccananctaatntgcaaaatctggntttanttanggtcantgaggaaaancangtgtgcaaaantaacccantaggttnggancaaaatagggaaaanagtttcnttgnactaaactgatgacnggtaaatggatgatggagagatagatatttagataagacgta

SEQ ID NO: 31198 - DNA, 438 bp, Homo sapiens
  misc_feature (1)...(438): n = a,t,c or g
tttgaantntgatnaccgttatgacnnnnnnnnnnnnnnnnnnnnnnnnnnnnnnnnnnnnnnnnnnnnnnnnnnnnnnnnnnggcacgaggggtgattggggtcggaatctaaattgtgaataacaaagccaaggaaggaggatggaacaacacacacagacctatcctccatgaccttaaggtagtggcaggccactgaaggatctcaattgagaaagataagccttagatgcatgttttggagaaatgtctcaggctgcagtgtgagcaggccaaagaggaaaagaaggccaagctaggagctgggaggctgctgtgctagtgaggcgaggaagaagagcctgaatgagggccatggccatggggcaggagagacactgaggatgcagaatcacagcctcaatgactgaggaatggggagaagggtgaaggaggc

SEQ ID NO: 31199 - DNA, 435 bp, Homo sapiens
  misc_feature (1)...(435): n = a,t,c or g
tttgganatccgtttnncnnnnnnnnnnnnnnnnnnnnnnnnnnnnnnnnnnnnnnnnnnnnnnnnnnnnnnnnnnggcacgagccacactataaccaaaattaactcagagttccacctaaaccaagctgacctcaatggaaacctaaaaccaaaacttctaggaaaaacataggaggaaatctctgtgctgccgaattcagcagatttcttagacaaaacaacaaaagcaaacctgtgacaaaacatgaaacgtgggacctcatcagtattccaaactcctgaccttccaaagacattgttaagagaacgcaaatagaaactacaaacaccatgaaagatttttgcaaatcatatttctgataatggacttaaaacaggacacaaaagtactcaccataaaagacagattgataaacggcataactaagttac

SEQ ID NO: 31200 - DNA, 515 bp, Homo sapiens
  misc_feature (1)...(515): n = a,t,c or g
gnnntncnannantnnnnnnnnnnnnnngnnnnanannatnnnnatnngatnnnnntngaaagngnntgacnngngnnnngnttannnattgantccgttacctgatacgaannnnnnnnnnnnnnnnnnnnnnnnnnnnnnnnnnnnnnnnnnnnnnnggcacgagaactcactcagtttacctaataataattgaatttaagaccaaatatcacagttgaaataacttccctggatacattctatcattttgtagctttcctaagaatttcttgctttatcattcctgattaatcactgtttttacattattaaaggtggcaattttctgtaaaaaatttaaaacagatgatcctattctgtcttgaaagttctgtaccacactgaccttaaccttgcttataacataacaattggtaaacttttaattcataatctttataccctaagatagtatttattaaatttttatgggtcatgaagaaactagaccctctccccagaaaaatctaca

SEQ ID NO: 31201 - DNA, 430 bp, Homo sapiens
  misc_feature (1)...(430): n = a,t,c or g
ttganancgntnnnnnnnnnnnnnnnnnnnnnnnnnnnnnnnnnnnnnnnnnnnnnnnnnnnnnnnnnnnnnnnggcacgagtggaaggtggaggttgcagtnnnnnnnnnnnnnnnnnnnnnnnnnnnnnnnnnnnnnnnnnnnnnnnnnnnnnnnnnnnnnnnnnnnnnnnngagagagaggggatgatgagtgtgtggaaataaagtagaatcagagacagatgaggctagaatgaaaagcagggccagtagtcttgttatgttgcacagttcctagggctgctgttcaccttgcattctacaatattaacactgtagcctcggcatgttaactagccgctgagactgactggcatctgcttgggtggttggtggctgaactgtttagatgagaaccagagcagactgaatgtatgtgactcatgct

SEQ ID NO: 31202 - DNA, 432 bp, Homo sapiens
  misc_feature (1)...(432): n = a,t,c or g
nttttgaataaccngtnnnnnnnnnnnnnnnnnnnnnnnnnnnnnnnnnnnnnnnnnnnnnnnnnnnnnnnnnnnnnnnnnggcacgagggaaaaataggacggagaggtgtagaagtgtttaaaatcatgctggtgtccaggtttcttacagggacggggatttgagttggcacatacagggagatgtttctatagcttaaaacttgggcctacactaagctcataactactcgagcccctgaaaacgcttcgattcgttttcccgtagagctaacatttttcaacatttgtggccattaagtctcggaactaccaggaatactgacttagagtgaattgtcattggataatgatgagaaatgaccgaataacaatcccagaactgcgttaaaacggaagaaagaaaagtggaaaagtttgaattcagatc

SEQ ID NO: 31203 - DNA, 430 bp, Homo sapiens
  misc_feature (1)...(430): n = a,t,c or g
ttggantttgataccttttgacnnnnnnnnnnnnnnnnnnnnnnnnnnnnnnnnnnnnnnnnnnnnnnnnnnnnnnnnnnggcacgagggctgcattttacactctcagtgccttcaaatgataagttcttaataaatatttcctgattgggtgatttggtgaatgcactttcatccaagagattttctggagagtttttattatactgccaaaaccaaacactattcaatcccagggtaaacactgcaggaaaaaaaatgtcacagggcaacatagtcataagtgggttctccccatgctcacacgcccttcattctaagctgggggaggctgctgtaggaacacagatgcataaaataaactttgactaaatggcttcatgttccagatgattggatgcctngttaaagcacccanngatnaagctac

SEQ ID NO: 31204 - DNA, 429 bp, Homo sapiens
  misc_feature (1)...(429): n = a,t,c or g
gnanttgaanaccngnnnnnnnnnnnnnnnnnnnnnnnnnnnnnnnnnnnnnnnnnnnnnnnnnnnnnnnnnnnnnnnnnnggcacgaggtcatgaaaggaggcatttcatagagtcttctgtggattgtgtcgtgatttcaattattggtgattattggtaaggtataaggggtcaagtcatctccctttggcagaaactatattacccctaatggaaaattatctctggtaagctgatgttcatcttgtccgtctctatacacacaatctgctgtcgtcttattttcctcccttctttggcttgaatgcatagagtctttaagatagtctgtattttttcatttgttcctccgtcactggccttgcatcttccctgcagtattttgaacttaattttctctaatttattttggattgactaagaagg

SEQ ID NO: 31205 - DNA, 433 bp, Homo sapiens
  misc_feature (1)...(433): n = a,t,c or g
tttgganatccgtnnnnnnnnnnnnnnnnnnnnnnnnnnnnnnnnnnnnnnnnnnnnnnnnnnnnnnnnnnnnnnnnnggcacgagcagctttctgatggttttagttgaacaagtattgctggatatgttaaaatacagccagaggcaaaacatactccctcctctcagagaacttatatcccaggataggggagactggaaacaggtcattagaatatgcagaataacagatgagtgctatggagagaaagacagcagccccactacggaggagcacgggatggggtttgcaattttagatgggtggcctttaaccaaatccttcagtgagagtaagtcacatgatgaccaggaagagcaccccagcaggggaggcagccagtgccctggcacacaagcaaaaggagttgatgagagggctggggggctga

SEQ ID NO: 31206 - DNA, 430 bp, Homo sapiens
  misc_feature (1)...(430): n = a,t,c or g
gnantntgaataccgnnnnnnnnnnnnnnnnnnnnnnnnnnnnnnnnnnnnnnnnnnnnnnnnnnnnnnnnnnnnnnnnnnggcacgagggtgttttctgaggaggtccgagtccccttaatccctgccatgggttccaggttcagaactcgggttctggttcatcctctccttttagagatgagggcattgacacccagagaggggaagtcacttgcctgcagttacacagcccagcagtgacagagcctgggcagggcccaggactccagaatcccaggctggagcttgggcctctaagtcatcatttcacattattttttgagtgcttactaagtgcattcagggcaagcagactgaagtctctgccccaccctgcctcaaggtgacncggntggcagtctggactggcgtaggacccaacctacat

SEQ ID NO: 31207 - DNA, 428 bp, Homo sapiens
  misc_feature (1)...(428): n = a,t,c or g
tttganaccgtttgacnnnnnnnnnnnnnnnnnnnnnnnnnnnnnnnnnnnnnnnnnnnnnnnnnnnnnnnnnnggcacgagnnnnnnnnnnnnnnnnnnnnnnnnnnnnnnnnggagtgatattttccaatggtcatgattctggcctgtaacaccaagcagtataacgatgagattgaagtgtgaccatgtgcgtctgcctatttttatgttctatctcatctttttgcttggagaaaaattatgttgaaagactacagtgtgcctataaagcttcaaatatgaaaaaagagctacatatgacactttgttgcagttagtccattgtctcaaaaacatgctataaaaatatgacaactagaaaagtcttggcaaatgtagcatgagtgttgccggtttaaaagccgtgtttgagtactctaaagtc

SEQ ID NO: 31208 - DNA, 437 bp, Homo sapiens
  misc_feature (1)...(437): n = a,t,c or g
ttgaantttnggattacccttnnnnnnnnnnnnnnnnnnnnnnnnnnnnnnnnnnnnnnnnnnnnnnnnnnnnnnnnnnnnnnnnnggcacgaggacaaaatgttctctttacttgtgaaatcagtggcgagccatcccctgaaatcgaatggtttaaaaacaacctgccaatttctatttcttcaaatgtcagcataagccgctccagaaatgtatactcccttgaaatccgaaatgcatcagtcagcgacagtggaaagtacacaattaaggccaaaaatttccgtggccagtgttcagctacagcttccttaatggtccttcctctagttgaagaaccttccagagaggtagtattgagaacaagtggtgacacaagcttgcaaggaagcttntcgtctcagtcagtccaaatgtctgcctccaagcaggaggc

SEQ ID NO: 31209 - DNA, 432 bp, Homo sapiens
  misc_feature (1)...(432): n = a,t,c or g
ttgantntgataccgttnnnnnnnnnnnnnnnnnnnnnnnnnnnnnnnnnnnnnnnnnnnnnnnnnnnnnnnnnnnnnnnggcacgagatagcaaacattttaannnnnnnnnnnnnnnnnnnnnnnnnnnnnnnnnnnnnnnnnnnnnnnnnnnnnnnnnnnnnnnnnnnnnnnnnnnnnnnnnnnnnnnnnnnnnnnnnnnnnnnnnnnnnnnnnnnnnnnnnnnnnnnnnnnnnnnnnnnnnnnnnnnnnnnnnnnnnnnnnnnnnnnncagacaacacaaacaattcaattgtccatcagtatgtgagtgggtaaacaaatgtcaataggcatatgataaaatatcacgtagcagtaaaaaggaatgggctattgataaactcaacaacatagatagcaggatcccgagcaagagttcatactccatg

SEQ ID NO: 31210 - DNA, 435 bp, Homo sapiens
  misc_feature (1)...(435): n = a,t,c or g
tttgatatccgtnnnnnnnnnnnnnnnnnnnnnnnnnnnnnnnnnnnnnnnnnnnnnnnnnnnnnnnnnnnnnnnnnggcacgagcggcacgagagccaatgctgggcgatggccacaggccaggaacagggagtcaggatcagtatagaacaagccccatggccagtaaaagagaatcagtatagaacaagccacaaggccaggaacagggaatacagagcaagcccaagcccccagcatggatgactcttgatgaagagtgctttagaaccaagaatgcaaggttgaattgcagtttttctgtttcacagatgagatgggaaaatgcaatgagcatgctgacaccctccccaaaccttagagaaggaattaggggcaggcctgaagcaggaatttcagagggtaggccttagctctgagctccactgcactgg

SEQ ID NO: 31211 - DNA, 480 bp, Homo sapiens
  misc_feature (1)...(480): n = a,t,c or g
ggagttnatttganacntttgactgattacgaatttaatacgactnnnnnnnnnnnnnnnnnnnnnnnnnnnnnnnnnnnggcacgagaactggatgacattgtccatttcttgcaaccctccgttgacccagttggcttatgctagagctgactaactggtaatgctaacccagcatgggaggctgaccaggggtacaggggtcttcctagggcctgcagagcagaatccaggtcagaaggcaatagctttacaccatcaaacatatattctatttgggacctggtcttccactctctctgccacactcatgaaccaccataaactacaggaggctcagtgcaaactccctcctgtttctccccagtaaattttatatgtagtcagctcactcttccccatgttacccccatccaaataattcattttgggctcaataattgctagttttgatgnagcatacctttcttgaatacgggt

SEQ ID NO: 31212 - DNA, 476 bp, Homo sapiens
  misc_feature (1)...(476): n = a,t,c or g
ggatntnaaccgttatnacnnnnnnnnnnnnnnnnnnnnnnnnnnnnnnnnnnnnnnnnnnnnnnnnnnnnnnnnnnggcacgagctgtctgacccctcagctaaaggcatatggtgctgcaattcctggtacagaggattaggaggttgggcggaatggtcttcccatttagcattatgtcatcacctgctcagaaggggcattttctcttctggagactgttccccccaacacacttactgaattaaaagccttccatttcaagaccaggagagcccattggtttnnnnnnncatgtttagttgccatttttgaggggattttgaatcccctggagaggcatggtcccctaacaaggatggctgcttctgataaaggatacatggcttttgtaatcttcctgcatgtacagntaangaaaaganggccatctcttcatcgggtgggcatanccatctatntatccatccttctt

SEQ ID NO: 31213 - DNA, 479 bp, Homo sapiens
  misc_feature (1)...(479): n = a,t,c or g
ngngttgaannngnagaccgtnnnnnnnnnnnnnnnnnnnnnnnnnnnnnnnnnnnnnnnnnnnnnnnnnnnnnnnnnnnnnnnnggcacgagaacccagcatggcatgcatgtatcagtctgtaatcatatacactaaacatcattaaattgaacctcaaataatgcattaaccattgcacagtacttaatgtttttatgtcaagttgcaagataaaacctttttcagatgagataaactgtagtatattccaaaggcctttgtttagtaaaagattctgaaatttctactacaaatataaaatagttatgcatttgctatacataatatttttaaatannnnnnnnattaaatacctttttgtgnctgntgattcagtgaatccagaaacttgctgnccttattcttggttttaaaaaccnctgtaaaantttggcatntgggactttaatggcagctgnattttncttttggaccc

SEQ ID NO: 31214 - DNA, 473 bp, Homo sapiens
  misc_feature (1)...(473): n = a,t,c or g
ggngttgagtccgtttccatgannnnnnnnnnnnnnnnnnnnnnnnnnnnnnnnnnnnnnnnnnnnnnnnnnnnnnggcacgaggatatgctgtagaatagactgaaacaaatcactggaaaataggttgttgtcgattttatttagaagcttttgttcctttggatnnnnnnnnnnnnnnnnnnnnnnnnnnnnnnnnnnnnnnnnnnnnnnnnnnnnnnnnnnnnnnnnnnnnnnnnnnnnnnnnnnnnnnnnnnnnnnnnnnnnnnnnnnnnnnnnnnnnnnnnnnnnnnnnnnnnnnnnnnnnnnnnnnnnnnnnnnnnnnnnnnnnnnnnnnnnnnnnnnctgnnnnnnnnnnnnnnnnnnnnnnnnnnnnnnnnnnnnnnnnnnnnnnnnnnnnnnnnnnnnnnnnnnnncacttcctgaagtggnaagattcnggcatatgccaccacacccagctttttttttcg

SEQ ID NO: 31215 - DNA, 461 bp, Homo sapiens
  misc_feature (1)...(461): n = a,t,c or g
ggnttnntccgtttccnnnnnnnnnnnnnnnnnnnnnnnnnnnnnnnnnnnnnnnnnnnnnnnnnnnnnnnnnnggcacgagaccctggcagcgagaggagaccaggaggctaggaccctggccgcgcttggttcttccaaagcgagaagggcttctctccctctgcctttccgcggcctccgcgaagcgttggcggggagcccaaggacataacaaattaaaagcatgaaggagagaaaaatgggggtcgtggcttgagaaattccaggccctaccgatcctctgccccctttgcgggcctggagcgccatagcacagtcgatttcgtttcgcagctgtctcccctnnnnnnnngatacctcggtccaaatctccggattgtcgggggacgcaggactcttngaggaaaaccagcccaatgagatcaaaaattgggggtngggggaagcttaacaaactc

SEQ ID NO: 31216 - DNA, 504 bp, Homo sapiens
  misc_feature (1)...(504): n = a,t,c or g
nnnnnnnnnnnnnnnnnnnnnnnnnnnnnnnnnnnnnnnnnnnnnnnnnnnggcacgagggaaaaaggaaaataatctatatgacatggataacatgtcattgtacctttgtccaaacccatacgttgtgcagtaccacgagtgaaccctaatgtaaactatgggctttgggtgattgtgatgtgtcaaggtaggctcatccgtcataacaactgtaccttcgtggagagggatactgataatgagggaaactacacttgtgtagagctnnnnnnnnnnnnnnnnnnnnnnnnnnnnnnnnnnnnnnnnnnnnnnnnnnnnnnnnnnnnnnnnnnnnnnnnnnnnnttataataaactctaaaaaatgttaattgaatgctatttcatttcactctaatacacaaaaataattggaagctctttatgaatcgacaggatttgttgcctgaggatttactgtgggtgacatggggngtaagctgattatttncttgtactccctc

SEQ ID NO: 31217 - DNA, 502 bp, Homo sapiens
  misc_feature (1)...(502): n = a,t,c or g
nnnnnnnnnnnnnnnnnnnnnnnnnnnnnnnnnnnnnnnnnnnnnnnggcacgagattttagatttattgtaacccttatcttgttgtcttaaaaccagttccaaaatccatgaatctttggggagttttactttttttttttaannnnnnnnnnnnnnnnnnnnnnnnnnnnnnnnnnnnnnnnnnnnnnnnnnnnnnnnnnnnnnnnnnnnnnnnnnnnnnnnnnnnnnnnnnnnnnnnnnnnnnnnnnnnnnnnnnnnnnnnnttctgaaagtncttcnttataanatntttncacttaccactgnaaaaattcctcatttcatggaacctgattcgttngattnttatccacaaaangcttttgnagcanaatncttaacttactttaaagcattancaaaactacnttacnttccatcagaaanatnangncccttctntaagggngttanatttccanccatgcatgccatgtggccttattggctaccctcttga

SEQ ID NO: 31218 - DNA, 534 bp, Homo sapiens
  misc_feature (1)...(534): n = a,t,c or g
tgganacntcttgacnnnnnnnnnnnnnnnnnnnnnnnnnnnnnnnnnnnnnnnnnnnnnnnnnnnnnnnnnnggcacgagcggcacgagtaggtattcacccaagagaaatgaaaatatgtttaaacaaaatgtcatgtgcacacatgttcataggatattttttctttatgactaaaaactggaaacaacgcagatttccaggtgaatatgtaaagaaattgtggtatattcacataattcagttgtaaaaagaaatatgtgaatagtaaaaaggaacagtaaaaagaaatgtggcaatgtgaatgattctcagatttatgctgtgtgaatgaagccgtacaataaaatacatattctttcttttcatgtatatgaacttctagaaaagcaaacttaatatataacaggaagcagatcagttgtttcttctctgaggctgtggatgacaggcaatttattttcttggaaaggacacncaataactttttagggtgacagaaatgntctatatattgggtatgatgatgggct

SEQ ID NO: 31219 - DNA, 539 bp, Homo sapiens
  misc_feature (1)...(539): n = a,t,c or g
ttgaaaaanntgataccctttatgacnnnnnnnnnnnnnnnnnnnnnnnnnnnnnnnnnnnnnnnnnnnnnnnnnnnnnnnnnnggcacgagcactggttagggtcagctatcacagacatcattcttattgatagtaggaacaataaacacagcgtagtgtgcaggtgtctatataacaagtatgttttctttggtgttttccccctttaattttctaactattctatcaaaataacaatatgtgaggtggccaagattcagttatcctgatgacatcaaattaattttttttgagaattcccaatgatgaaattatctcttcacagaaacttcttttaaaatgttgagaaatttgtgctattgtaacataaagacaaataggatttgatatcacaatgtggcttaaaaatagttatgtaaacaatcttaaatataaatttttatttgaaacaaatgactgaaatagtatatttggaagtatttagaaatttctgggtatatcaagaccagtagtatctctggtaaatatgnattttc

SEQ ID NO: 31220 - DNA, 538 bp, Homo sapiens
  misc_feature (1)...(538): n = a,t,c or g
anttggtnnnnnnnnnnnnnnnnnnnnnnnnnnnnnnnnnnnnnnnnnnnnnnnnnnnnnnnnnnnnnnnnnnnnnnnggcacgagtgagttctctgctttcatggaatctagcagggaagacataataatcatgcacgcagatatataatcataaattgcaataggtgctatgaaaggaggcaacagaagccagtaatagggaataatgggaaaggactagcaagacacgatgatgagaaaaagtatccctgatatttatacataagctcaggcatgaaggcagccatgcaaagagcagggaaaagaagtgttcgaggaagacagagccatgcatacaaaggccctgaggtaggaaacagctcactgagtttaaaaataaataaggccagtggctcatgcctgtaatctcagctactctgnnnnnnnnnnnnnnnnnnnnnnnnnnnnnnnnnnnnnnnnnnnnnnnnnnnnnnnnnnnnnnnnnnnnnnnnnnttaaataaaataagaataanaataagaaggtagcgnancagag

SEQ ID NO: 31221 - DNA, 535 bp, Homo sapiens
  misc_feature (1)...(535): n = a,t,c or g
anaacttnnnnnnnnnnnnnnnnnnnnnnnnnnnnnnnnnnnnnnnnnnnnnnnnnnnnnnnnnnnnnnnnnggcacgagagagtatctaagagatatggaagcaaatcttttgcctggatttcttagattacaagaattggctgacagaaatgtgactgttctctttctcagtgaaattgtttgggaaaagtttcgtccaaatactggatgctttgagccgtttgtcttatatttccctgattacagcataggcaaccttcaaaagatcctgtcccatgatcatcctccagagtattcagctgatttctatgctgcctacattaacattcttcttggagttttctacactgtttgtcgagatttgaaagagctcagacatctggcagtacttaattttcctaaatattgtgaacccgtggttaaaggagaagcaagtgaacgtgatactcgcaaactgtggagaaatattgaacctcatttgaagaaagctatgcagactgnttatctcagggaaatatcaagttcccagtggg

SEQ ID NO: 31222 - DNA, 532 bp, Homo sapiens
  misc_feature (1)...(532): n = a,t,c or g
atttgaagaccntnnnnnnnnnnnnnnnnnnnnnnnnnnnnnnnnnnnnnnnnnnnnnnnnnnnnnnnnnnnnnnnnnggcacgagcagcccttctccttccaaacagctgctgataaacctaacagacccttgtcaggcaaatctgagctaaaggcacaatgcccccaccagtgtgcacattattatagctgttgaacctacgtcagtgcaccatggtcactcagagcccatagtttacatcagggttcactcccggtatcctgcgttctgtggtattggtaatcggggaggctgtgcgttgtgtgggagtggagggtatatgggaactctgtaccnnnnnnnnnnnnnnnnnnnnnnnnnnnnnnnnnnnnnnnnnnnnnnnnnnnnnnaaaaaatccacagtgaatgagagtccctcttgctccctatccttgtcagcatttggtattgtcagggctctggattttggctgttctcatangcagggagtggtgctcattgttgttttgatttgcntcncccccccccct

SEQ ID NO: 31223 - DNA, 527 bp, Homo sapiens
  misc_feature (1)...(527): n = a,t,c or g
anaacngctatgacnnnnnnnnnnnnnnnnnnnnnnnnnnnnnnnnnnnnnnnnnnnnnnnnnnnnnnnnnnggcacgagnnnnnnnnnnnnnnnnnnnnnnnnnnnnnnnnnnnnnnnnnnnnnnnnnnnnnnnnnnnnnnnnnnnnnnnnnnnnnnnnnnnnnnnnnnnnntacagaaaacaaaaaaattagccaggcccgctgtgaatacctgttgtcttagctacttgacaggcttaggcaggannnnnnnnnnnnnnnnnnnnnnnnnnnnnnnnnnnnnnnnnnnnnnnnnnnnnnnnnacccgtttctttaaaataaaaaaagttataatgactttcttcatatttacgtgttcatatctagatattcatgaatgatacggccctctcttttatatctggtttagtactttgactcaatttttacattcactcatttagttgatagatactgatcacctcctgccaagtactgggatgctcaccatcatatgggaaagaactttcaatttaaaggngaac

SEQ ID NO: 31224 - DNA, 498 bp, Homo sapiens
  misc_feature (1)...(498): n = a,t,c or g
nnnnnnnnnnnnnnnnnnnnnnnnnnnnnnnnnnnnnnnnnnnnnnnnnnnnnnnnnnnnnnnnnnnnggcacgaggaagtcacacccattggatctatccccaaatgtgcagtccagagacgccatccaaaagcaagcatctgaagactccaacgacctcacgcctactctgccagagacgcccgtaccactgcccagaaaaatcaatacggtgggtgggacaatgttcaggcccttaggaaccctattccgcactttgcaagttggtgggagggcaggtgctccaacttacacaagaaaaagtgagagcttgctcacctgacccttatgtgctctggttcaagcatgatggtggattagagcctgtgggttacaaacccaggctttaggctccagcagacaggcttcaagacctggcttcagtgcctgacataactgcacaaccttggcaagttactttctctgagtcttactttcttcacacacaaaaaaaaaaa

SEQ ID NO: 31225 - DNA, 534 bp, Homo sapiens
  misc_feature (1)...(534): n = a,t,c or g
atntggaaancngtnnnnnnnnnnnnnnnnnnnnnnnnnnnnnnnnnnnnnnnnnnnnnnnnnnnnnnnnnnnnnnnnnggcacgaggtggattcagaattaatgggaaaaataaatcggcctcttacaggctgaaagcctcaaaatacattcctacagaagttgccagtttgtctttttcaatatgtataggatgaagttgagcgtggcgtagcatggattttgttagctcttctttgtgaagagtaaagttattgtggagggaaggccaagggaagagagtgtcctaaatttacaaaaatgtcctaaaggagaaaggctaataaattctttacaaatttggcttaagaagtagtattgtttgtatatgtcatgtcttcgctgtgcttagttagaagaagaggtaggaatgagtaaagatatcgaaattatagaaagggaaatggagaaagactgataatctattggttgtcagattattttgggtgtaaaagaagacattaggttgtaacttttaactaaatgcttaatagc

SEQ ID NO: 31226 - DNA, 538 bp, Homo sapiens
  misc_feature (1)...(538): n = a,t,c or g
tntgaaancctttatgacnnnnnnnnnnnnnnnnnnnnnnnnnnnnnnnnnnnnnnnnnnnnnnnnnnnnnnnnnnggcacgagcagccagtgagggtcaacgtcaagcgggagtatgaccacattaatcaatccagggagtctccggtggactgcagcgttagcaaatgcagcaagctggtgggcggaggcgagtccaaccccatgaactacaacagctatatggacgagaagaatggcccccctcctcccaacatgaccaccaacgagaggagagtcatcgtccccgcagaccccacactgtggacacaggagcatgtgaggcaatggctggagtgggccataaaggagtacagcttgatggagatcgacacatcctttttccagaacatggatggcaaggaactgtgtaaaatgaacaaggaggacttcctccgcgccaccaccctctacaacacggaagtgctgttgtcacacctcagttacctcagggaaagttcactgctggcctataatacaaccttccacaccgaccaat

SEQ ID NO: 31227 - DNA, 530 bp, Homo sapiens
  misc_feature (1)...(530): n = a,t,c or g
naacttctatgacnnnnnnnnnnnnnnnnnnnnnnnnnnnnnnnnnnnnnnnnnnnnnnnnnnnnnnnnnnggcacgagtgtgattttaaaatatttttcttaacattcatttgcaccaaatcgctaaaagaaccctttttttcctagatttacaaaaacaaaattacacatatgtttatgtcgtatttcactttcaacataaaataaatgtttcagagatgtgtgggtcattttttattttaactcaagtgacagtacctgaattctttggctgtgaaagcatatattctagtacttttaagaattttcctctttccgtttcaagttttcagagcaacaattgtatctctgacacaaatttactattatacttttaaaatataacaattggtaaaagtattaaatctataacgcttacccagaaatttcctggattttttattataaatctaaaacctgaaactggaagaattaacagcaatgcagactctttccaagttttcttgtccctccctagacaagcaggagt

SEQ ID NO: 31228 - DNA, 533 bp, Homo sapiens
  misc_feature (1)...(533): n = a,t,c or g
tttgaaacctgtatgacnnnnnnnnnnnnnnnnnnnnnnnnnnnnnnnnnnnnnnnnnnnnnnnnnnnnnnnnnnggcacgaggaaggaagccccagccctgatgggggtcactcccttgtgctccccgaagcccctggccgacccgctcccctttctgtctctaaggatctgccttttctgacatgtccggtgaatggaatcttacggctcatgggccttgtgtctattttcccctcacacagggtttttgggcttcacacacacagcctgtgtgaggactccattccttttcgtggctgagtcatggtccacagtgtggagggaccacgtgtggctgaggcttccacccatggatgggcatccgggtgtttccagcttggctgccagggagcgagccgctgtgggtgttggttcatgcacaggtttccacgtggacacacttttcagttctgttgggcgtgtaccagggaggcgctgccgggcggcgtggccaccctgcgtggcgctgccggacctctaccaagtgctgcg

SEQ ID NO: 31229 - DNA, 537 bp, Homo sapiens
  misc_feature (1)...(537): n = a,t,c or g
tttgaanatttgganatcngtnnnnnnnnnnnnnnnnnnnnnnnnnnnnnnnnnnnnnnnnnnnnnnnnnnnnnnnnnnnnnnnnnggcacgagaaaagctgtctcttctaaacgtgtgtattttttaaaggttagtagggtttttctgagaaacaaaggtgaaaatctgggtgaggttggaagagaagagttgtgtgtggttgttgttgatttcaaaggctggagtggtggtctgagtgacgaaccagagaaaggcctgctgcaccctggggtgcctgccccgccctggggtgccggccctgtggaagcaagtccttgttccccatgttgctgccaggtccgtgtgtcagcatcagagtatgcagactttccagatgtccttccagtggtgccctgggtgggagacccagtcccactgccgctccacccctcccacgctgggtgaccctggggcaggtccccggcagtcctggattcactcttttcatctgtagagcaagagggttggccctggaanccgtctgagctctcggctg

SEQ ID NO: 31230 - DNA, 534 bp, Homo sapiens
  misc_feature (1)...(534): n = a,t,c or g
anttgganatcngtnnnnnnnnnnnnnnnnnnnnnnnnnnnnnnnnnnnnnnnnnnnnnnnnnnnnnnnnnnnnnnnnnggcacgagtccttttccatgctgcatgtgtactaacagtaactgcattacccagaatagaagctaacaatctgttgagagtttgctcactgtcaggctccagagcaatggctcctttaatccccctcaatggccctgttatcattttccaattcagacagtcagagagttgaagtaacttgactaaggtcacagatccagtgagtagcaaggctcagataaaagtcacatgcatctaacactacatgattcttatatgtcccctcaggaatatggaataatcagagaagactcaatctcatcattggtccattcacagtcaatagtttaattaggtgggtagggagttttgatgatataagggtcgccattgaaaacaagagcaagaatttgaaacccaccaccattaacacaaaggccacgctcttaagcacagattgnatgagttatctttta

SEQ ID NO: 31231 - DNA, 532 bp, Homo sapiens
  misc_feature (1)...(532): n = a,t,c or g
aaaatntgaaatccnttatgacnnnnnnnnnnnnnnnnnnnnnnnnnnnnnnnnnnnnnnnnnnnnnnnnnnnnnnnnnngcacgagataattttaaagaagaattgttgaaaagtagatatgttttgccatttgctgagaatattttgtacgttagcttgtctcttacaaaaactaaatgtgttcctacttctgataatgtatgtcaatttaaaatttggaatggccaagataagttgctctgcatctgtccttcatatggctcctgagcacagctcagtgactggcccttgcagtgcttctaccgttgtaatgggtaaaaccaggggaaactgccttgctcttgagcttgagcaggttaatcaaaaggatagagcttccacttctcattattctcctttctactttgatgggcagaataaggggatgctcatggaagagaaattcacacccatgaaaagcaaattgccctgatgtctgaatcacattacaaatttgaattaaattacaaacttaaatcaagtctaatggt

SEQ ID NO: 31232 - DNA, 536 bp, Homo sapiens
  misc_feature (1)...(536): n = a,t,c or g
tntggananccctatgacnnnnnnnnnnnnnnnnnnnnnnnnnnnnnnnnnnnnnnnnnnnnnnnnnnnnnnnnnnggcacgagaacaacccagactggcccctgtgtgcttcttactgcacgcacttcataattactccttagcagacttaggctgtttcatgtctaggaccttcggagttattctcaaaagtaaaaatcccaaatgttgattctgtaaataccaagggtcaactataatattagcaatgatccagggctgctggaggattcaatgagataaaatgctaagtgtccagcatcctaagtgtgctctgggcttgggaccttgcacattcactgaaaatcactganattccngggttaggtggncatggctttggctgaaagagtcacaggtcaaacaagatgatnatcttantacangcatgagccaccgcacccgggcgnaaatactggtttgttgagatgaacatctaggtctcgtgcttagcctaagataantactgatcatgacactccgaaaaattnattcg

SEQ ID NO: 31233 - DNA, 217 bp, Homo sapiens
  misc_feature (1)...(217): n = a,t,c or g
ttgganancngnnnnnnnnnnnnnnnnnnnnnnnnnnnnnnnnnnnnnnnnnnnnnnnnnnnnnnnnnnnnnnnnnnggcacgagggaagaaggtaattgtttggtatactcgttaaaaccagttggttgggcaacttaaatttttagaggatcacttgnnnnnnnnnnnnnnnnnnnnnnnnnnnnnnnnnnnnnnnnnnnnnnnnnnnnnnnnnn

SEQ ID NO: 31234 - DNA, 529 bp, Homo sapiens
  misc_feature (1)...(529): n = a,t,c or g
nnnnnnnnnnnnnnnnnnnnnnnnnnnnnnnnnnnnnnnnnnnnnnnnnnnnnnnnnnnnnnnnnnnnggcacgaggaatcatttttggatagttgttacataaaaatgatttaaaattaaagatatcaaacatgttcttatttttatgtagcaaatgtttaattggcatttctgtatcttaaaaaattaattttaattgaatttacacgtgcagtcatttaagccagannnnnnnnnnnnnnnnnnnnnnnnnnnnnnnnnnnnnnnnnnnnnnnnnnnnnnnnnnnnnnnnnnnnnnnnnnnnnnnnnnnnnnnnnnnnnnnnnnnnnnnnnnnnnnnnnnnnnnnnnnnnnnnnnnnnnnnnnnnnnnnnnnnnnnnnnnnnnnnnnnnnnnnnnnnnnnnnnnnnnnnnnnnnnnnnnnnnnnnnnnnnnnnnnnnnnnnnnccctgtcatttattcattcattcataaataagtagtcattgaatgnagattaactttctggctcatcttaatatttaatccct

SEQ ID NO: 31235 - DNA, 528 bp, Homo sapiens
  misc_feature (1)...(528): n = a,t,c or g
ancnnnnnnnnnnnnnnnnnnnnnnnnnnnnnnnnnnnnnnnnnnnnnnnnnnnnnnnnnnnnnnnnnnnnggcacgagnnnnnnnnnnnnnnnnnnnnnnnnnnnnnnnnnnnnnnnnnnnnnnnnnnnnnnnnnnnnnnnnnnnnnnnnnnnnnnnnnnnnnnnnnnnnnnnnnnnnnnnnnnnnnnnnnnnnnnnnnnnnnnnnnnnnnnnnnnnnnnnnnnnnnnnnnnnnnnnnnnnnnnnnnnnntagtaatgcctgtcttgtgaagacactcgtnnnnnnnnnnnnnnnnnnnnnnnnnnnnnnnnnnnnnnnnnnnnnnnnnnnnnnnnnnnnnnnnnnnggtggggactctgggggatgattaggtcatgagaatggagccctcgtgaacaggattagtgtccttataaaacagtcccagaaagctgcatgattccttctaccttgtgaggacacagcaagaaggcaccatccatgaaccagaaagcaggctctnaccagacctgatctgcagcccttg

SEQ ID NO: 31236 - DNA, 546 bp, Homo sapiens
  misc_feature (1)...(546): n = a,t,c or g
tnnnnntttnaaaatttgganancgtnnnnnnnnnnnnnnnnnnnnnnnnnnnnnnnnnnnnnnnnnnnnnnnnnnnnnnnnnnnnnnnnnggcacgagggaaatggatgtttagggtgtcacaataatgggggctggggcccctattgcccttagtggtagaaaccaagttggatgctgaccacttaagtgtcttgtaattgtcagtgttgtgtagcagaggactgcccctctccaccccagggccaagaaccccttgttcataagctctgcatagcctctgtaagcaaatacccgagtcaaggtagctaggcatagaagcaaatatgggcctgggctgtctgccagtcattccacgtagagagacttagaagcaagtgagaagtcagtgagcaagatgaggcacatcagagacaggagcagattggacggtttagagcagaaggggccgcagcaccgtctgcacagctgtccttaaaaatcagtcgtttcttccatgtgggtccagtgaaaagatgangatttcattctgnccttggcttatca

SEQ ID NO: 31237 - DNA, 535 bp, Homo sapiens
  misc_feature (1)...(535): n = a,t,c or g
tggaaaaccnctatgacnnnnnnnnnnnnnnnnnnnnnnnnnnnnnnnnnnnnnnnnnnnnnnnnnnnnnnnnnnggcacgagtatttcaaatttttccttttatttccagtgtgccatttaacccatccaatgaatttttcatttaaattgttaaggattttagtcctgaatttcttttttattcttatttataaattccattcctttgttggcagttcatatctgttcattcattaaaattaattttataaagttctctaacatatttatattagctgctttgaattttttgttttctaatcccaacacctgggccatcctatttctttgctttgttaataatatttttattgtacgttggatgttgtgatcacacattctagaaattctgaattctgttataatcatcagaagaccgtggatattttttctagaacctaactcagttacaagtggactgcctttaaatgcagtcttgntttcatattntgntatggtgtacgtctgtgaaaatccaagcccttctagctggg

SEQ ID NO: 31238 - DNA, 531 bp, Homo sapiens
  misc_feature (1)...(531): n = a,t,c or g
ttgaanancgttatgacnnnnnnnnnnnnnnnnnnnnnnnnnnnnnnnnnnnnnnnnnnnnnnnnnnnnnnnnnnggcacgaggcctggagacccctcccatgcagcagacagggtgggatttggcctgcagctcgctctgctggtccccactgtgctgtttctgtaggaaacaggtgagcagattgccatcaagcagtgccggcaggagctcagcccccggaaccgagagcggtggtgcctggagatccagatcatgagaaggtgagggcctcgcgcatagggacccaagggaaagctggagcagcagcccccggtgtgtctagaaaggagagtcttgctgnnnnnnnnnnnnnnnnnnnnnnnnnnnnnnnnnnnnnnnnnnnnnnnnnnnnnnnnnnnnnnnnnnnnnnnnnnnnnnnnnnnnnnnnnnnnnnnnnnnnnnnnnnnnnnnnnnnnnnnnnnnnnnnnnnnnnnnnnnnngtggcccctgtagtcccagctncagagancaccagggaagggggaaggg

SEQ ID NO: 31239 - DNA, 446 bp, Homo sapiens
  misc_feature (1)...(446): n = a,t,c or g
tnnnnnnttttggnntttggntnnnnnnnnnnnnnnnnnnnnnnnnnnnnnnnnnnnnnnnnnnnnnnnnnnnnnnnnnnnnnnnnnnnnnnnggcacgagaaaaataaatctgaaaaaaggaaattatcaggggatttatatttttgtaaactttttatacagcaatttaatagcatgtgtaaattgtcaacttccaggttgtatctccagcccagacctcacatttcagcttcagaatagtatatccttttgcctacctaatatctaataagcttctcagatgtaacttgttcaaatataagcagattttccctcacatgcccaaacctcacctcccgcagtcttcctctctcagtagtggtaaccccttgcttccaggtgctcatgccaggaccttggagtcattcttatttttgacttctctctcacttctgnttccaatct

SEQ ID NO: 31240 - DNA, 448 bp, Homo sapiens
  misc_feature (1)...(448): n = a,t,c or g
tnnnnnnttttgnnctttggataaccgtnnnnnnnnnnnnnnnnnnnnnnnnnnnnnnnnnnnnnnnnnnnnnnnnnnnnnnnnnnnnnnnnnggcacgagtgtaggaggacaaaggagcctcttagtatagagaacatcatcttacatgataaatgtgaaatgatcataagataaatgcagtggggtgtttccatacaattgaaaacaattcaatagttttagctcagtggttctcactttagtgtgcaccagaatcacctggagggtttgtagaaccttagatttctgtgttctcccccataaattctgattcattgggtcagggacagagccaaagaatttgtattctaacacgttctaaggggatgctgatgctgccagtcaggaccacattttgagaatcacttgtttagatcagggtttctcaacttcggtgtcactgacat

SEQ ID NO: 31241 - DNA, 449 bp, Homo sapiens
  misc_feature (1)...(449): n = a,t,c or g
tnnnnnnnnnnnntttggnnacngctatgacnnnnnnnnnnnnnnnnnnnnnnnnnnnnnnnnnnnnnnnnnnnnnnnnnnnnnnnnnnggcacgagagacaaggctaaggaagaaattaactcactttatggaaaaatgttagagggatatacaagcagaagagtggaggtagaaggtaaatggctgaagcttgggaaaccctgtcttagtctaatctctcatacttaacagatgaaaagtaggggctagagttggtaagtcacttgcccaaggtcacaaagagacttaatggcagaagccagactagacccctcatcagcaatgtggctcccctagcttggggtcttggaagacccatgtggaggaaaggacagtagctgtcctcccctgaggaagtccttagccaacttggaggcctggggatgctgggtcagcagagaacctgca

SEQ ID NO: 31242 - DNA, 438 bp, Homo sapiens
  misc_feature (1)...(438): n = a,t,c or g
ncctttgaanatcnttatgcctgannnnnnnnnnnnnnnnnnnnnnnnnnnnnnnnnnnnnnnnnnnnnnnnnnnnnnggcacgagctggnnnnnnnnnnnnnnnnnnnnnnnnnnnnnnnnnnnnnnnnnnnnnnnnnnnnnnnnnnnnnnnnnnnnnnnnnnnnnnnnnnnnnnnnnnnnnnnnnnnnnnngggggtttgtctatgtcataaaatggatcagtaccttggnnnnnnnnnnnnnnnnnnnnnnnnnnnnnnnnnnnnnnnnnnnnnnnnnnnnnnnnnnnnnatcaactgatagactcctttctcttcctttcctacccttggagcgcttcccctcctcttgcctacccccatactgtgaaaaaacaggtctctcttagagaaatgcgagggctttatttcaggccttcccttgcagaagaggccgg

SEQ ID NO: 31243 - DNA, 497 bp, Homo sapiens
  misc_feature (1)...(497): n = a,t,c or g
nnnnnnnnnnnnnnnnnnnnnnnnnnnnnnnnnnnnnnnnnnnnaattcggcacgaggccaaaaacagcttctcactggataggaacatacaggaaactgccagcaggatccatgcaaagagccaagtctggtctgaaaagcatggatagacaagatatgcctttaaataaggannnnnnnnnnnnnnnnnnnnnnnnnnnnnnnnnnnnnnnnnnnnnnnnnnnnnnnnnnnnnnnnnnnnnnnnnnnnnnnnnnnnnnnnnnnnnnnnnnnnnnnnnnnnnnnnnnnnnnnnnnnnnnnnnnnnnnnnnnnnnnnnnnnnnnnnnnnnnnnnnnnnnnnnnnnnnnnnnnnnnnnnnnnnnnnnnnnnnnnnnnnnnnnnnnnnnnnnnnnnnnnnnnnnnnnnnnnnnnnnnnnnnnnnnnnaaataaataactcatggaggctgtatgtggtatgtggnattttgcttgccaaagtaggacctcatacatatt

SEQ ID NO: 31244 - DNA, 455 bp, Homo sapiens
  misc_feature (1)...(455): n = a,t,c or g
aattcggcacgagatatataagaacaaatcatgtatgcatgagtgcagcaaatgtctgttcaacacccactacatgtcaaatactgctataagagttaggaatagagttaggaataagatataaatgattccagtttcttggggaaaggcaaacattagatgaacacatacagtaatacaaggatactgtgataaaagaggtataggtaatgatgcaatcgtaccacagaatactttacctagtctggagggatgcattccactgagtggtgggattatcaaggttttcaaaagagtacttacccaaaggaatgccatttgagagatcattaggagacagccaagtgagaaaaaaaagtagaaatacaattattggcagagggaattgtatagtgcagaggactagcggcaagagaatagtgagacatgttactggagagctattncaggcagcc

SEQ ID NO: 31245 - DNA, 489 bp, Homo sapiens
  misc_feature (1)...(489): n = a,t,c or g
tncnnntnnncnnnnntnnnnnnnnnnncccnntnccnaattcggcacgagggagctctgagtttagagaacctgagtctttttatactgtgcagtaatcgcacctgccctttgatctggagggagacactctaccaaggccatttactgtacaagcatctttgaaaaggtagttcagagcaaagaacaatcagggtcttgctcacaagaagtggaaaaatgcaagagacctgggggtgaattgtctcctggtagtgatgtgtgtcacttttggtcagagatagctaagagcaagtgtgagccctctagtccctgccatgccccccttggaggttgtgtgtgacgctgatgctcctgtcagcatgagntccttctgaanagtggcagtgancactgntacttgcaagctgtagtaaactgggatctcaccggtgacttattgctaatgcgtanccacttatcctgatcntattttgggacattgaagga

SEQ ID NO: 31246 - DNA, 456 bp, Homo sapiens
  misc_feature (1)...(456): n = a,t,c or g
aattcggcacgagaacagggtggaatggggtggggcaggtggctgatagatgggtgattttagctccatcccttccctctgggaatgtcttaacacccaatcagaagaaaatggttaaaactggagagtcagctgtgaatttagtaatccatcagggcagatggagagctggcaaaaatgtgtgctaggtccccatgctcttcgaatgtctcactcatctttgtcttgatcttttagatactcaacgtgtttgctatttaaataatagattgtagtttaaaatcacttccacttgaaatcaggccctctatttttagaactttcctgcaaagttgagaggcacctaaatgtggtctttttgnnctctgggcctcctctaagattctgataacctgagtttaccctactcattctctaccaaaatttctatttagaaaatgcttgggggcancatga

SEQ ID NO: 31247 - DNA, 495 bp, Homo sapiens
  misc_feature (1)...(495): n = a,t,c or g
tcnttttatcnctccttangaatttgccctctancctnaattcggcacgagatgatgagtcttgcccagaccttccccattcctgctcctgttctgaaaccaatgaagtggctctgggaccagcgggcccaccaggtggtccaggactccgaggaccaaagggccagcaaggtgaaccgggtccaaagggaccagatggccctcggggtgaaattggtctgccaggacctcagggtccacctggacctcaaggaccaagtggtctgtccattcaaggaatgcccggaatgccaggagaaaaaggagagaaaggagatactggccttccaggtccacagggtatcccaggaggcgttggttcaccaggacgtgatggctcaccaggccagaggggccttccgggaaaggatggatcctcgggacctcaggaccaccaggccaataggcattcctgcaccccttggagtccagggatcacangaagcatggnacccc

SEQ ID NO: 31248 - DNA, 481 bp, Homo sapiens
  misc_feature (1)...(481): n = a,t,c or g
tnnnnnnnnnnnnntttgganattcnnnnnnnnnnnnnnnnnnnnnnnnnnnnnnnnnnnnnnnnnnnnnnnnnnnnnnnnnnnnnnnnnnnggcacgagcggcacgagggcctgataaaatcaattctggtttcttataaataaatactgtcgaagctccaggaagaagattggcaccttgtcattcattttctgtcctccatgctaggagaaaagctttgtcaatagtgggactgcttttgaggggcaggaggtcatggaaactgcagttcccggggatgacgggcatcccttgctggaggtttctagaccctgctggagtcagacacacctccttcatctgtgcttagccgcagcgtctgccctcgcttcttcctaggggtctgaggacctctgaggtgaggaggagctttttgaggaacatgggaggtgtaaaggatggagaatgtcacaggatcgaggacagcctgcagctgtggg

SEQ ID NO: 31249 - DNA, 480 bp, Homo sapiens
  misc_feature (1)...(480): n = a,t,c or g
tnnnnnnnnnnnnntttggaantcnnnnnnnnnnnnnnnnnnnnnnnnnnnnnnnnnnnnnnnnnnnnnnnnnnnnnnnnnnnnnnnnnnnggcacgagactgacttcaatgactataaaattagccagcgacttccttaatgctaacaacaacccatgaagtcaggacctaacagaaggaaacaggactcagagagggaaggctgcttctctggggtcactctgtgtgcaccagggctctgactggtgccctgtccctcagtcactactgaggctgatagtggcagtgcccagcagctgacagacgtagaatattttatataggttgggccccatgctcaatggtgtgcacatgagctcgccaaatccccagatgcacccagtgtggtgagctctgccataagccccattttataggggatgacactgagccctagggagggaaactgctcactgggcttctgagcaggaaggtgtcaa

SEQ ID NO: 31250 - DNA, 480 bp, Homo sapiens
  misc_feature (1)...(480): n = a,t,c or g
tnnnntttnnnnnatntngaaatctcgnnnnnnnnnnnnnnnnnnnnnnnnnnnnnnnnnnnnnnnnnnnnnnnnnnnnnnnnnnnnnnnnnggcacgagataactttgtcattttactttttaaacattttctcatgttcctctgcactttgcctaatgctctttgagaactatcccactcttgatgttcaggctgcctctcattttcatggaatgtcttctaaatcaaagcagtgcctaggaaaggcccaaacgatctcaacagcagtcctagatatggagaagagtatcgccagtgatcaggtggagaatttgataactcttccattcccagaagtgatgctgcatggtatagttgtgtatgttcccagaaagaaatacggggattcctcacttaatattgtcnntaggctcttcnaagactgtgactttaantgaaatgacntataacaagaaccagtttttttactcatcaacaa

SEQ ID NO: 31251 - DNA, 360 bp, Homo sapiens
  misc_feature (1)...(360): n = a,t,c or g
ttnnnttnnnnnntttggaaanncgnnnnnnnnnnnnnnnnnnnnnnnnnnnnnnnnnnnnnnnnnnnnnnnnnnnnnnnnnnnnnnnnnggcacgagcacatttaagtagtcaagggtaaactctatggcttttagcaaattggagagtaacatatgtgttacattaatgttggatgttgagataattaaatccatgtcattcttttgtgagaacacattattttgcatgctgtaatagcacagtagtttggaataaggagctatttgacgtatcaggtccacctaagaaataagaagttaacttcatatcctattttgggcatagatttattttattattttaatttttttttttttt

SEQ ID NO: 31252 - DNA, 460 bp, Homo sapiens
  misc_feature (1)...(460): n = a,t,c or g
gganaccnnnnnnnnnnnnnnnnnnnnnnnnnnnnnnnnnnnnnnnnnnnnnnnnnnnnnnnnnnnnnnnnnnnggcacgagcttaaataatcctcatcaacatctaaaagatagtgataattaaatctctcctatctaactaaaatggaatgttttaaagcttaggtaacaattctgaaattcttaattccccccaaaacaaactttttctgagcacattttgatttcttattcccatgccagaatagactgttttgtatatggtatcttccaagatattttcccactgagttaacttctgaaattgcttcttccaacgcataagcaataaacaacagattcgtttttacattctcaccttagctattgcatctctgattgttttcatctataatgagactttctatactttggccagtccttctgtttttcttaaaatgtgggaccacaggccaggcg

SEQ ID NO: 31253 - DNA, 490 bp, Homo sapiens
  misc_feature (1)...(490): n = a,t,c or g
gnnnnnnnttnnnnnttnnnnnntttgnaatttggananccnnnnnnnnnnnnnnnnnnnnnnnnnnnnnnnnnnnnnnnnnnnnnnnnnnnnnnnnnnnnnnnnnnnggcacgagnnnnnnnnnnnnnnnnnnnnnnnnnnnnnnnnnnnnnnnnnnnnnnnnnnnnnnnnnnnnnnnnnnnnnnnnnnnnnnnnnnnnnnnnnnnnnnnnnnnnnnnnnnnnnnnnnnnnnnnnnnnnnnnnnnnnnnnnnnnnnnnnnnnnnnnnnnnnnnnnnnnnnnnnnnnnnnnnnnnnnnnnnnnnnnnnnnnnnnnnnnnnnnnnnnnnnnnnnnnnnnnnnnnnnnnnnnnntaagcttaataaactatttctatttgtatttacaaagttcagtgtctctgaatataaatatattcttaatgtttattacccgataattactttaacaaacgtttatttagtctttactgtataccaggcaccatccta

SEQ ID NO: 31254 - DNA, 486 bp, Homo sapiens
  misc_feature (1)...(486): n = a,t,c or g
gnnnnnnnttnnnnttnnnntntttgganttngaaatccnnnnnnnnnnnnnnnnnnnnnnnnnnnnnnnnnnnnnnnnnnnnnnnnnnnnnnnnnnnnnnnnnnggcacgagggaactttaaaaaatcaaaataattcacattgtttgaaaaagatatcaaagaattggtatgcctttagcctaactttagagatacttatattttgcatattgaattacatatacatgtctgtctagatattttatgatgaaaaaacctggtagctttatagtagatactgtgtattatagttttgtgtactgtaccatgctcttcctgatcttccttctcagattgttgcataaaaggtctactggccctttatcaaaaattcagtttgtagttttcaggtagtttctttttttttttncccccntnttttttttttttnggaaannaaattttnnttttgnccccaaannggnttnccngggccnnantttc

SEQ ID NO: 31255 - DNA, 548 bp, Homo sapiens
  misc_feature (1)...(548): n = a,t,c or g
gnnnnnnnnnnngnnnnnnnnnnntttggannccnnnttggannnnnnnnnnnnnnnnnnnnnnnnnnnnnnnnnnnnnnnnnnnnnnnnnnnnnnnnnnnnnnnnnnnnnnnnggcacgagtctccctagataaacactggcagaggggccccgaaacgcaggggtgaagacattcactgctgaaaaaatctggatgactcgaacacccatccatgaagggggtcacgaaagctgtgctttgtttagccccttgaacaccacgcagctgtcaaggaccgaggcaggttgacaagaatcccctcacacatacagacaagcaaaacactgtcacagggcgatatatttatatgatcccttttggattaaaaagctcatgaaacttttctctggttcagtttatattattatagaatacatttcggggcagcctctggaaggactgtgggagaccagtgccatatctgaatggtgtgaatgatacngggaaaacttccatttttaaaacnttaaaaaccaaaactgnacaacccaccaaccaaaatagcc

SEQ ID NO: 31256 - DNA, 516 bp, Homo sapiens
  misc_feature (1)...(516): n = a,t,c or g
gnnnnnnnnnnnttnnnnnnntttggtttggnnnnnnnnnnnnnnnnnnnnnnnnnnnnnnnnnnnnnnnnnnnnnnnnnnnnnnnnnnnnnnnnnnnnnnnnggcacgagccagcacccatcccacatggacatccccctggatagcaagaccttcctgagccgccacagcatggacatgaagttcacctactgtgatgacagaatcacagaactgattggttaccaccctgaggagctgcttggccgctcagcctatgaattctaccatgcgctagactccgagaacatgaccaagagtcaccagaacttgtgcaccaagggtcaggtagtaagtggccagtaccggatgctcgcaaagcatgggggctacgtgtggctggagacccaggggacggtcatctacaaccctcgcaacctgcagccccagtgcatcatgtgtgtcaactacgtcctgagtgagattgagaagaatgacgtggtgttctccatggaccagactgaatccctgttcaa

SEQ ID NO: 31257 - DNA, 483 bp, Homo sapiens
  misc_feature (1)...(483): n = a,t,c or g
acnnnnnnnnnnnnnnnnnnnnnnnnnnnnnnnnnnnnnnnnnnnnnnnnnnnnnnnnnnnnnnnnnnnnnggcacgagactggaagagagttctagggagcaggaagtcaaatgcaaagtactgttgtgggagcacacagggtagatctatggaacagcaagaagctcagtacggctggggccaggtaagcaatggggagccactgaagggttctgagcagaagcatgacataatctgatttatgcgttaacaggcccatactgtctgctgagttgagagattataggaaaatgagagtagaagtggagaaaccagtaaggaagttactgcaatattccaggtaagcattaatgagaccacggtggttagtggtggaaggtgagcagcagatggactctggatacattgtgaaagcagaactaacacaatctcttgactgattggtattgagagaaaaagagttaacaaggatgattccact

SEQ ID NO: 31258 - DNA, 511 bp, Homo sapiens
  misc_feature (1)...(511): n = a,t,c or g
ttnnttnnnnnnatttggatttccctaccnnnnnnnnnnnnnnnnnnnnnnnnnnnnnnnnnnnnnnnnnnnnnnnnnnnnnnnnnnnnnnnnnnnnggcacgagggcaagttttgggtgtcattctgcaactctaggcctcaggtagatgcccacccctgaggggaataagagctccaaaaatatgtagccattaaaccaggcttcaatgcaacttttctcatcttcagtaactgcagattcagtattggaagatccgaggttttcattttaaactttctcagacccgcgttgcgtaaagttctttttgtgtggagggtaggtggaggcgcaagtgtgtgcagtttacagacttccatcataaacatttgctttatcgtcttaaattatttcctaccttgcctaagaggaagccatctgtactacaaataaagaatcctctataatagaacttgtggttcatgctgaaaactcaagtttagccagtgtgactgcggcaggggaagtcagc

SEQ ID NO: 31259 - DNA, 457 bp, Homo sapiens
  misc_feature (1)...(457): n = a,t,c or g
tnnnnnntnnnnnntttgganatcnnnnnnnnnnnnnnnnnnnnnnnnnnnnnnnnnnnnnnnnnnnnnnnnnnnnnnnnnnnnnnnnnnggcacgagcggcacgagagatgtcagtgacagaacaaaatgacttttcttggagacattccagattgccatattactttattttaaacagcgctatgactttaaatccaaggctgctcggaagatttttttaggtctctcataagcctattcttccctgatcacatgagtgggagaggtagccaaattttgaattccctttctgtgttcccacaagagctgctgagnnnnnnnnnnnnnnnnnnnnnnnnnnnnnnnnnnnnnnnnnnnnnnnnnnnnnnnnnnnnnnnnnnnnnnnnnnnnnnnnnnnnnnnnnnnnnnnnnnnnnnnnnnnnnnnnnnnnnnnnnnnnnnnnnnnnnnnnnnnnn

SEQ ID NO: 31260 - DNA, 458 bp, Homo sapiens
  misc_feature (1)...(458): n = a,t,c or g
tnnnnnttnnnnattggaattggttgncnnnnnnnnnnnnnnnnnnnnnnnnnnnnnnnnnnnnnnnnnnnnnnnnnnnnnnnnnnggcacgagagagtttatagaaacctattcaccaaaatggcatcctggttatatgaatgtctttgtgaagctgaacttgcacagtattattctcatttcactgcccttggccttcagaaaatagatgaattagccaagattacaatgaaggactactccaaattaggagtccatgacatgaacgaccgcaaacgtctcttccaacttatcaaaattattaagattatgcaagaagaagataaagcagtcagtatcccagagcgtcatcttcagacaagcagcctgcgcatcaaatctcaggaattaagatctggccctcgcagacagctgaattttgattctcctgctgacaataaagacagaaatgccagca

SEQ ID NO: 31261 - DNA, 463 bp, Homo sapiens
  misc_feature (1)...(463): n = a,t,c or g
gnnnnnntnnnnnttnnnnnttttgacnatgaaacccnnnnnnnnnnnnnnnnnnnnnnnnnnnnnnnnnnnnnnnnnnnnnnnnnnnnnnnnnnnnnnnnnnggcacgagcggcacgagcagagcttgggaaatgagagagaattggatgctgaccttgtccggggactccctactggctaggcctggacacggttgcagaacgtgtctcctccccatgtcgctctgtgaccgaggggtgcgcatggcatgaccgctcactcactcctgcctggaagtgaagggctgctaggtggaggtcagcaaggatgttgagtgccctgagacgggtggcaggattctctagatgaaaaataaggcttcacaggtccagagaagcttgctaggttcttttgagaaacctgtttcttcaggttaataattacttttaagatagactattttttagagcagtcttaggttt

SEQ ID NO: 31262 - DNA, 465 bp, Homo sapiens
  misc_feature (1)...(465): n = a,t,c or g
gnnnnnnnnnnnnnttnnnnntttggantntgaanacccntatgacnnnnnnnnnnnnnnnnnnnnnnnnnnnnnnnnnnnnnnnnnnnnnnnnnnnnnnnnnnggcacgagagtttgttttgcttggaagcaatgcgagagaaatgacaccttaccaaaccatggataccaaaaggaagtggcacaacttttttcaagggcttacagaaaatagctttcacnnnnnnnnnnnnnnnnnnnnnnnnnnnnnnnnnnnnnnnnnnnnnnnnnnnnnnnnnnnnnnnnnnnnnnnnnnnnnnnnnnnnnnnnnnnnnnnnnnnnnnnnnnnnnnnnnnnnnnnnnnnnnnnnnnnnnnnnnnnnnnnnnnnnnnnnnnnnnnnnnnnnnnnnnnnnnnnnnnnnnnnnnnnnnnnnnnnnnnnnnnnnnnnnnnnnnnnnnnnnnnnnnnnnnnnnnnnnnnnnncc

SEQ ID NO: 31263 - DNA, 452 bp, Homo sapiens
  misc_feature (1)...(452): n = a,t,c or g
tnnnnnnnttggaatntggaaanccnnnnnnnnnnnnnnnnnnnnnnnnnnnnnnnnnnnnnnnnnnnnnnnnnnnnnnnnnnnnnnnnnnnggcacgagattgcctggctcaccctcttggcttaactttcccttttgcataaggaatttgggggtcccgagcnnnnnnnnnnnnnnnnnnnnnnnnnnnnnnnnnnnnnnnnnnnnnnnnnnnnnnnnnnnnnnnnnnnnnnnnnnnnnnnnnnnnnnnnnnnnnnnnnnnnnnnnnnnnnnnnnnnnnnnnnnnnnntncctttacatggttaaanganaccaagggcttactgaagngtaaaanagcaggngctgacaggaaaggcanacatctttttcttctnattgtcactgtnaccatcatcaatacnctacttccttggcatctgggtctccctttgctttgggaaccctcctc

SEQ ID NO: 31264 - DNA, 468 bp, Homo sapiens
  misc_feature (1)...(468): n = a,t,c or g
gnnnnnngnnnnnnttnnnntnnnnnnatttganatncgtatgncnnnnnnnnnnnnnnnnnnnnnnnnnnnnnnnnnnnnnnnnnnnnnnnnnnnnnnnnnnggcacgagaaacattataagtgttcgaactagaaaatgatgttgacaatttattgcatttggcccctttccataggtcttaatttggaatcctgcaaaagctgactctgagaaaagcacttgtatacaggtggattatttgaaagtgatcccaggtaccatagtgagtggagtagggggagtgaagcagagaaaggagaaaggtcattaaagtgtacttggatgagtgggccactgatacgaacaactggggttcaacccctcttggggccatctgagaggctgggcatgtaagggaggaagacatcagcatgtgtgggaactgtgcacctaagctgcaggagtcaccttagatggtggacatgg

SEQ ID NO: 31265 - DNA, 425 bp, Homo sapiens
  misc_feature (1)...(425): n = a,t,c or g
ntttganatcnnnnnnnnnnnnnnnnnnnnnnnnnnnnnnnnnnnnnnnnnnnnnnnnnnnnnnnnnnnnnnnnnnnggcacgagggctgggtnnnnnnnnnnnnnnnnnnnnnnnnnnnnnnnnnnnnnnnnnnnnnnnnnnnnnnnnnnnnnnnnnagggannnnnnnnnnnnnnnnnnnnnnnnnnnnnnnnnnnnnnnnnnnttccagcctgagcaacaaagtaaggccttgtctcaaaaaagaatgaaacattctatgacaagttttatgaagagagaaagctatggctttctatggtggggaaataagataaaaaaaatcaaacatagttatcaatatattttatattactttggcttatgccaacaattcactgtaaggtaaaatatagtatagaaagaatttctttttttttttttt

SEQ ID NO: 31266 - DNA, 462 bp, Homo sapiens
  misc_feature (1)...(462): n = a,t,c or g
gnnnnnnnnnnnnntnnnnntttggnctntganaccnnnnnnnnnnnnnnnnnnnnnnnnnnnnnnnnnnnnnnnnnnnnnnnnnnnnnnnnnnnnnnnnnnggcacgagggaaatagcaaccagttgcctgaaatacttacgcagtgaagtgaaaagcggaagttaaagttggaaggttacggggagaatagaagacaggttaatggctgactctaaaattttgtcagaaattatgctattttttgtggcttatgtattaaaactattcagattacttcaaaacatctcaaaattaaaaggttttccattgaaatattctctttaaaagttcttgctcatattctcaggtaaaaagcagtgctttagaaaactcaatggctttatgcataatgaatttacaaagaaaggggctacagtcgagtacaagaatgaggcttattgcagggatccatgcatgagt

SEQ ID NO: 31267 - DNA, 465 bp, Homo sapiens
  misc_feature (1)...(465): n = a,t,c or g
gnnnnnnnnnnnnnntnnnnntttgganntntgganancnnnnnnnnnnnnnnnnnnnnnnnnnnnnnnnnnnnnnnnnnnnnnnnnnnnnnnnnnnnnnnnnnnnggcacgagagattgttctctatcactattacttagaaatattttatggttctgtagtattccattatgtggtagatatatctttgtatattcatccagtcccttattgatggatttatgggttgtttccaaacttttgctcctacagataatatcacaataaccatatgcatatactgttgcatatttatggggctgtttcttcatagtggattccttagaagtagaattgtcaagttaaagggtaaatctatgtgtgatttttctagatccccaaatttccctcagtaaaagtggtgtcattttgacattcccatcatagttatgagaatgcctgtttccctcatttttgccaactat

SEQ ID NO: 31268 - DNA, 456 bp, Homo sapiens
  misc_feature (1)...(456): n = a,t,c or g
tnnnntttnnnnatctggaaatntcgnnnnnnnnnnnnnnnnnnnnnnnnnnnnnnnnnnnnnnnnnnnnnnnnnnnnnnnnnnnnnnnnnggcacgagaaacttaaaaaagtgccactttttgttatctaagtctaaggctaagaggaatgatcataccaaggttgaagtagaggtggagaacaagcactgtcagatctgttgggaatgacaattgatgtagactttctcaagggtgatgtgtttacaagaagccttgctatacatatcctctgatctagcagttccactgctggaaatttaaccttaggaagtaattggacaaggggccaaaaaataagacaatgatattcatgatagcattgtttctaatctcaaatattggaaacaccttaaatttccattagtagataatcaaattatggctcttttatccactgagtaccttgtagctat

SEQ ID NO: 31269 - DNA, 468 bp, Homo sapiens
  misc_feature (1)...(468): n = a,t,c or g
gnnnnnnnttnnnnnttnnnnnttttggaactactgaatacccnnnnnnnnnnnnnnnnnnnnnnnnnnnnnnnnnnnnnnnnnnnnnnnnnnnnnnnnnnnnnnnnnnggcacgagggagtctgctcttccttggcctggctcacctcttcatggaatccgcgggctgccctgtggataagggattgggcagtgtgtgaagggctagtaaggaggctgctcagtaacttgggcttgaccagggtggtgcagaggaggaggtaagaggggttaggttctgaaggtggagtagatgtggagaatggcgggaagtttggcttggagatgatactggactcttcagcctgagcagttggaagggtggagttgctttcagctgagcaagaggagacctgggtgggcagatgctggggggcatcaggagctgaggtgtttcctttccccttgaagcctggtgactgctggcct

SEQ ID NO: 31270 - DNA, 473 bp, Homo sapiens
  misc_feature (1)...(473): n = a,t,c or g
gnnnnngnnnnnnnnnnnnnntnnnnnntttggantttgganancnnnnnnnnnnnnnnnnnnnnnnnnnnnnnnnnnnnnnnnnnnnnnnnnnnnnnnnnnnnnnnnnnnnggcacgagcttnnnnnnnnnnnnnnnnnnnnnnnnnnnnnnnnnnnnnnnnnnnnnnnnnnnnnnnnnnnnnnnnnnnnnnnnnnnnnnnnnnnnnnnnnnnnnnnnnnnnnnnnnnnnnnnnnnnnnnnnnnnnnnnnnnnnnnnnnnnnnnnnnnnnnnnnnnnnnnnnnnnnnnnnnnnnnnnnnnnnnnnnnnnnnnnnnnnnnnntagtaaaactgagaagagacatccctgttgggagaaaaatgaacatactatatgtaaatacagacacagaagaaactgcctataacctttgctttctctgaaatctccccaaagacatctaaaactactaggatagacaagagacaagaac

SEQ ID NO: 31271 - DNA, 456 bp, Homo sapiens
  misc_feature (1)...(456): n = a,t,c or g
ttnnntttnnnnntttgaaatctcgnatgccnnnnnnnnnnnnnnnnnnnnnnnnnnnnnnnnnnnnnnnnnnnnnnnnnnnnnnnnnnggcacgagaatacatatatatttttaaattagttgggcgtggttgatgcacatcttgtggtcctagctactatggaggnnnnnnnncctaggatcnctggagcccggnagtncatngnttgcngtganctnttntcacaccangggnatattnnttggaaatctgatntnngatatgtncatnnngtntgctcctnggannntatganggttaatngcatatcttttaattnancttacctgtttcnanaataatgcacatcttntcntctgtcaatcatccgncttctnntactaacccgttatngctntgtntgancctgnnacntattatnttacnacnnnggatagacggntanattgcatcc

SEQ ID NO: 31272 - DNA, 480 bp, Homo sapiens
  misc_feature (1)...(480): n = a,t,c or g
ccctnnnnnnnnnnnnnnnnnnnnnnnnnnnnnnnnnnnnnnnnnnnnnnnnnnnnnnnnnnnnnnnggcacgagtggtcccagagtttttaaagaggctgggttgtctggaaactgagtgcattttccctcagaagcaatatttcttgtctgtaattcttaccactggagctcttttaagaatatgcctgcccagtccatattttggatccactgaatcatagtgttcagagtacgtggggtgggatatgtatttggaaaaagctacccagacgcaccctgactcccctgatggttgtctttacatgtacccttaccctgcttacattacttacagaggacttgggtccccaaactatcctgcaaagtctattaagactccaatatataagcatggtcttaagaaaagaggaagagacagaactgtttctaccttttcatcttgggcgcctaagctttccctgggctcataatgctggt

SEQ ID NO: 31273 - DNA, 509 bp, Homo sapiens
  misc_feature (1)...(509): n = a,t,c or g
nnnnnnnnnnnnnnnnttggaacccctatgnttggaaccnannnnnnnnnnnnnnnnnnnnnnnnnnnnnnnnnnnnnnnnnnnnnnnnnnnnnnnnnnnnnnnnnggcacgaggcttaatgtgtcataaacttttaatgtctccttcattcatggttcacatcaagcgccctttgatttttagcacagataatatatcagaattttgcaattaaggtttagctaatagaaagattttgtagatataggcgtttaatagtgtccatttatatacagataatgtctgtttatcaatcttttaatagcattttctaaattactcgatttttgaacatttgcaatgatctaattagcatgctttgctgattttcttttccatttaatggaacaactctgcatcatcactctctttattgctttttcataggctcatgatcgttcagaaagtggagaattggcatttattaaacaactagttcgaaagatctaattggtattgcccgcctgct

SEQ ID NO: 31274 - DNA, 504 bp, Homo sapiens
  misc_feature (1)...(504): n = a,t,c or g
tnnnatttgaatncccttntttnnnnnnnnnnnnnnnnnnnnnnnnnnnnnnnnnnnnnnnnnnnnnnnnnnnnnnnnnnnnnnnnnnnnnnnnnggcacgaggttgggaaatgagtctgcaagttaaagtgttttctggccttctgatgacgccagctcctgcagctatctaagtgcaaccatgtgagacagcccaacaagaactgccaagccaagcccatcaaccatcaacagagaatcataagtcattatttcaagccaacacgttttgggatatttggttacacagcaaaagataagcagaatacctgtccatgatcttgaaagactcttttggggggcttagcctaagagaactaagtttagatcagctgacagggcctcctgaataatgtttattcagacgttcttactccaatggcaggaaaaaagagtttgtcctcccagtggacccaacccttacctctccacatgccaagcctcccttgtcangtctggaagga

SEQ ID NO: 31275 - DNA, 538 bp, Homo sapiens
  misc_feature (1)...(538): n = a,t,c or g
tttgaaancnttagaacgnnnnnnnnnnnnnnnnnnnnnnnnnnnnnnnnnnnnnnnnnnnnnnnnnnnnnnnggcacgagcggcacgagctttcggaaacttttccgcttctaccgtcagagccggcccgggaccgcagacctggaaggggtcatcgacttctcggcggcccacgcagcccgtggcaagggtcctggtgcccaaaaggtgatcaaatctcagctaaatgtgtcttctgtcagtgagcagaatgcatatagagcaggtcttcagcccgtcagcaagtggcaagcctatggactcaaaggctatcctgggtttatttttatcccaaaccccttcctcccaggttaccagtggcactgggtgaaacagtgccttaagttatattcccagaaacctaatgtatgtaacctggacaaacacatgtctaaagaagagacccangatctgtgggaacagancaaagagttcctgaggtataaagaagcgactaaacggagaccccgaantttactggagaaactgcgttgggtg

SEQ ID NO: 31276 - DNA, 551 bp, Homo sapiens
  misc_feature (1)...(551): n = a,t,c or g
tnnnnntttggaanntttnnnnnnnnnnnnnnnnnnnnnnnnnnnnnnnnnnnnnnnnnnnnnnnnnnnnnnnnnnnnnnnnnnnnnnnnnggcacgaggtggtggttgcctgtggnnnnnnnnnnnnnnnnnnnnnnnnnnnnnnnnnnnnnnnnnnnnnnnaaaattgtatcattgagaaaattatgccaattggggaagatctgatgtagccaaaccccctttgacctttagccttcaagctgccttcagttattcttgggctagctttgggagatgtttatagtttacatgataatagcccctccccaaaactcaactgtatttgtaaaactaatgaggggccaccaggctagggagaggagaggagcctgaatttggctaagatgtagacataaacaattatcagccattattccagaggtcctgcagataacaatgctattgtaacctaagattggccttttgcagtacctcgcaagggttttttgcatgtctgatacctacggctccaacaggacccactgactgatgatggctccacctggac

SEQ ID NO: 31277 - DNA, 559 bp, Homo sapiens
  misc_feature (1)...(559): n = a,t,c or g
tnnnnntnttnnnatnttgaaanctntttgacacgattccnaagntaatacgactcnnnnnnnnnnnnnnnnnnnnnnnnnnnnnnnnnnggcacgagctcacctcacctagaacaccctatcagagactagcagatgttccagcatctctataaaatttatttggttaaatgttggcatgtgataaatgaaatgaaatgaaatttatttatgcggactttttctatattctatatttgccttggaaagcatataatagatattttaatagaacagttaaaatatgattttatcaaaacacttaaggatgtctaaatgagttagtatatgaatatataaaaatagtccacatgaacctagtccatacttagtcctcagctaaaatgacttatagtttaacccaaactatagtaaagagactgaacaaatctaaatagaaacactaagtagtgaagagcaactaatcatgcaagacttttttagtttatattcttccttcctatatgttataaagttatgttaaaattactcagtaaaattatgtagtggaacatcagat

SEQ ID NO: 31278 - DNA, 528 bp, Homo sapiens
  misc_feature (1)...(528): n = a,t,c or g
ttgaacccttgacnnnnnnnnnnnnnnnnnnnnnnnnnnnnnnnnnnnnnnnnnnnnnnnnnnnnnnnnnnggcacgagacccagtgtccgcgggctacaccaaactggtgggacaggatgtggcccggtttatcaactggatggaggaggagtttaactaccctctggacaatgtccatctcttgggatacagccttggagcccatgctgctggcattgcaggaagtctgaccaataagaaagtcaacagaattactggcctcgatccagctggacctaactttgagtatgcagaagccccgagtcgtctttctcctgatgatgcagattttgtagacgtcttacacacattcaccagagggtcccctggtcgaagcattggaatccagaaaccagttgggcatgttgacatttacccgaatggaggtacttttcagccaggatgtaacattggagaagctatccgcgtgattgcagagagaggacttggagatgtggaccagctagtgaagtgctcccacgagccg

SEQ ID NO: 31279 - DNA, 535 bp, Homo sapiens
  misc_feature (1)...(535): n = a,t,c or g
tttnnnnnnnnnnnnnnnnnnnnnnnnnnnnnnnnnnnnnnnnnnnnnnnnnnnnnnnnnnnnnnnnnnnnnnnnnggcacgagctgaagtcaacgcaagacgaaatcaaccaggcaaggagcaaactttcccagctgcatgaaagccgccaggaggcccacaggagcctggagcagtatgaccaggtgctcgatggagcccatggtgccagcctgaccgacctggccaacctgagcgaaggcgtctccctggcagagaggggcagttttggagccatggatgatcctttcaaaaataaagccttgttatttagcaacaacacgcaagagttgcatccggatcctttccagacagaagaccccttcaaatctgacccatttaaaggagctgaccccttcaaaggcgacccgttccagaatgacccctttgcagaacagcagacaacttcaacagatccatttggaggggaccctttcaaagaaagtgacccattccgtggctctgccactgacgacttcttcaagaaacagacaa

SEQ ID NO: 31280 - DNA, 528 bp, Homo sapiens
  misc_feature (1)...(528): n = a,t,c or g
anaccgnttgncnnnnnnnnnnnnnnnnnnnnnnnnnnnnnnnnnnnnnnnnnnnnnnnnnnnnnnnnnnggcacgagggaagttgaatgagatggcccatgtcaagcagctgacagaccacaggcactgactgatgtccttttccatctcccatcctgtgctgctcctgggaaccctcctattgctgttatccccaggctgtttcattttgttttgatgattctcttggtcctatttattagaaaactagtataagacaaagattctctccgttgcacattttgtgccttattctctagccacttatgcttgtttctaggccacaggatagcaagaatactaggcacgtagaagattttttgtaaacgtgtactaagctggataaaacagacatgataaagaatcagcctggcttctattagccatcaggccagatttcttcattagcctgagcaagatggctcagtggttgtcacagaggctaaacgtatcactttttaaaaganagttttggttggttggttaaa

SEQ ID NO: 31281 - DNA, 518 bp, Homo sapiens
  misc_feature (1)...(518): n = a,t,c or g
ntttganacccgnnnnnnnnnnnnnnnnnnnnnnnnnnnnnnnnnnnnnnnnnnnnnnnnnnnnnnnnnnnnnnnnnnggcacgagttttttttttgaaagctgtaattctttttaatgtttaacttttctttgtaaaaaacttattaaaaaacttaaatggtcagttaaagttaaaaatctattgctgcacaatttaactgattaaaagatttccagatctcttgactccaagagtcatttctttcatttcttacagatctcacacttccagatttctctttagcaaacatgatctgaaatcatttgtaggtaatcagcacttcaagcatatggaggctctggctgaggcagcaaagtcctgggagactgaacactgggagattcaatgtcccccacagaaacctaaacctgggctcagcccaccactgctaggggtcctgcacaggacccatgcggtcctgccgggatctatgtggcgaacctgagctcgacttnggtgncagccctcccgggggg

SEQ ID NO: 31282 - DNA, 527 bp, Homo sapiens
  misc_feature (1)...(527): n = a,t,c or g
tttgaaaccgtttgtttgactncgaatttaatacgactcnnnnnnnnnnnnnnnnnnnnnnnnnnnnnnnnnnggcacgaggttcactgaaagtctatagtatgaaaaattcaaagttttaaaaataaatgtctcctgattaccttgatatggaaaccgtataagtatccgggcaagcacaaaaacaactgggatacttccagtcatgtgaggagcgaaggaggaaaatgcataaagaaaacagatggtgtaaaataaacttttggtcgggtgtggggaggcagttactttgttaaactgacaattcatttatttttttgaaaaaggtagttttaaattgatactgctcagtattaccacatttccattttgtaaactgtagttatagttttatcaatacggtggtttaaaaaactccaagtaatagttttgagttgtcgatattactctcaaatttaattttgaactganttattacngnaaagagantctacttgntgggggaatttggccaaaaattcattttt

SEQ ID NO: 31283 - DNA, 520 bp, Homo sapiens
  misc_feature (1)...(520): n = a,t,c or g
atttgaanaccgtnnnnnnnnnnnnnnnnnnnnnnnnnnnnnnnnnnnnnnnnnnnnnnnnnnnnnnnnnnnnnnnnnggcacgagctgagcagtcctttgatgtttgaatttaagttactatgtgctcatcatgaatttttaaattcctaagaatttcacagagcagaattgggagtgacaaaggaaacaatctccattcagtttctgagactaaatgatcaggaaagtccagctgtgtcaagacagaagccccatacacacaaatcgcctgtcaaaagaagtgggcaccaggcccctgcccagcttcttttcagttccacttcctgtgccaggggtgctctgtgctggagctgttcctgctaccttgtgagagccaattgtgtgcgtgtctccctgtctctgtgttcagtgacattgtgatagtagcttaatgtaggctatggtgggagtgtttacaccatggaaattggacacccacangtaaagggcttnttccanagggngggcattaaaaattg

SEQ ID NO: 31284 - DNA, 521 bp, Homo sapiens
  misc_feature (1)...(521): n = a,t,c or g
atnccctntttganaccgttnnnnnnnnnnnnnnnnnnnnnnnnnnnnnnnnnnnnnnnnnnnnnnnnnnnnnnnnnnnnnnnggcacgagagctattctacctcagatcatcagacgttatttttnnnnnnnnnnnnnnnnnnnnnnnnnnnnnnnnnnnnnnggaatgcctttcatcccgaagccatcccctnnnnnnnnnnnnnnnnnnnnnnnnnnnnnnnnnnnnnnnnnnnnnnnnnnnnnnnnnnnnnnnntgctgacctagatgaccactacagtgattttgtatggccataaactccctatgctaatttcttgatctagaaaatgtgagaatagttgttctatatacattacaaaactattctgagtaataaataaagtaaatatggttgtaaaggccctgtaatctacagagcctatgctatataaatataaatataatttctacccttatttatatcaatatctttcattctacttacagagatctctctgggtttaattaaaaattact

SEQ ID NO: 31285 - DNA, 442 bp, Homo sapiens
  misc_feature (1)...(442): n = a,t,c or g
nttttgannaccagctatgacattantacgnnnnnnnnnnnnnnnnnnnnnnnnnnnnnnnnnnnnnnnnnnnnnnnnnnnnnnnnnnnnnnnnnnnnnnggcacgagcttaaacgtaagcatccaactgtctgaccactgcccacccactaccccagtccttacaactctctgtcatccactgaatccctagcagtgtgcctccatacagtaggcatatatgtannnnnnnnnnnnnnnnnnnnnnnnnnnnnnnnnnnnnnnnnnnnnnnnnnnnnnnnnnnnnnnnnnnnnnnnnnnnnnnnnnnnnnnnnnnnnnnnnnnnnnnnnnnnnnnnnnnnnnnnnnnnnnnnnnnnnnnnnnnnnnnnnnnnnnnnnnnnnnnnnnnnnnnnnnnnnnnnnnnnnnattctgtagagacnaaagcttactatgttatccag

SEQ ID NO: 31286 - DNA, 425 bp, Homo sapiens
  misc_feature (1)...(425): n = a,t,c or g
acnnnnnnnnnnnnnnnnnnnnnnnnnnnnnnnnnnnnnnnnnnnnnnnnnnnnnnnnnnnnnnnnnnnnnggcacgagaattagagatttttcatctgttggtctcattaaccaaaatgaagtgagctgagttgggtataacctagggtgtctctcttgagctctgaaaagtgtgaattctcgttttccccaggttgccgatatagaatctggcagacagattcagctgatcaaccgaaagtctctgcgatctctcactgcccagttgctggtattgttgatgtcttgggaaggaaccacccatctttctgttgaggagctcaagagacattacgaaagtacccacaacactccccttaacccctgtgaatatggattcatgaccttgaccgaactgntgaanagcctgccatacttgggtgag

SEQ ID NO: 31287 - DNA, 414 bp, Homo sapiens
  misc_feature (1)...(414): n = a,t,c or g
ntttgannnacnnnnnnnnnnnnnnnnnnnnnnnnnnnnnnnnnnnnnnnnnnnnnnnnnnnnnnnnnnnnnnnnnnnnnggcacgagaaagtaacaatatgtatcctcggtcaagcagctcaagccatttattcagacccgagtgacaatgaggaggcagagtgacgaggaagtctggatgaagagagttccaagaaggaagagcaattgcaaagtacttgaacatgcttggctagttcaggggacagaaagaaggtcctaaggaggagagatggaagcagatgctgggtgaagttggagaggtgaggagggctgggccctgtgggggtcgcatggggcatagaattgggattggcattgatcctggcagcatgaggaggccctcggagggagaaattggactttatggtgct

SEQ ID NO: 31288 - DNA, 420 bp, Homo sapiens
  misc_feature (1)...(420): n = a,t,c or g
accagctatgacttgattaccaatttaataccnnnnnnnnnnnnnnnnnnnnnnnnnnnnnnnnnnnnnnnnggcacgagaaagataactgaaatttttttaaaaaattgacacttgaataagaatggttaatctgtggagagaaacatgttagatgctgctaaatatctgggaattccatgccaagtgtagctggagaatgattcgtgatcatgaatcacgaggtgaaaacaaggcaggacttcctaaaggtttctgtattacttttctgcaaatataatccactcagacattggtttcatcattatatactgggctagagcatgttcttatttttatttctctttgtttaacttaaagcacatgttgaagacataatttactctttttttaaggggaggtgaaanttgcatggggttt

SEQ ID NO: 31289 - DNA, 413 bp, Homo sapiens
  misc_feature (1)...(413): n = a,t,c or g
nnnnnnnnnnnnnnnnnnnnnnnnnnnnnnnnnnnnnnnnnnnnnnnnnnnnnnnnnnnnnnnnnnnnggcacgaggctgataaatgtttctggaaagtgattactaagctgctctgggactgaaacgttctgggggagcttgcatctgctcactttttcactcgtgcaccactgttattgcagagcccaggtagatgactggaccaggatggggttggcgtttgaggtttctgttgtgttcaggctcttgcaacttccttgaagggagaacaacctttttagtaggtgctacacttcatgagatgtaatgaaagcacatgggcgtgggttttttcttggtgttagccatggtggtttgttttcacattgtcataaatatgngncacgttctttactcatttactcattcatt

SEQ ID NO: 31290 - DNA, 418 bp, Homo sapiens
  misc_feature (1)...(418): n = a,t,c or g
nnacnnnnnnnnnnnnnnnnnnnnnnnnnnnnnnnnnnnnnnnnnnnnnnnnnnnnnnnnnnnnnnnnnnnnnggcacgagtcaaaatgtcatgcacctgaacatttgaagtaacctctctgatagtacggatatttatcccctcannnnnnnnnnnnnnnnnnnnnnnnnnnnnnnnnnnnnnnnnnnnnnnnnnnnnnnnnnnnnnnnnnnnnnnnnnnnnnnnnnnnnnnnncttggtgtcctcccccatggtaatgagttcactcaagagctggttgtttaaaaggtgacgtggacctaatccctgttggactgaacaaaaggggacgaacacagcaataaagataaagaccaaagagtatatttggaagaaggggtcagggggctccttgcttctagtgaaaaaggccctgag

SEQ ID NO: 31291 - DNA, 414 bp, Homo sapiens
  misc_feature (1)...(414): n = a,t,c or g
atttgaannnacnnnnnnnnnnnnnnnnnnnnnnnnnnnnnnnnnnnnnnnnnnnnnnnnnnnnnnnnnnnnnnnnnnnnnggcacgagtgcatgcacagcctcactaggtgtcaactttaaagtgagggcatttattggaaaagaataggaccctgcaacttgggatggggacatgtgggaagactctgatgaagttgggaacaatgagtttgtaaactccgatgaaccttttttttttnnnnncaaaaaaancnnttccccatttnncagangggnntaganccntttnanncnnnttnnnccaaggggaaggggcccaaaaaanccccctttgccnangnnttggnaaaaaaantttgtnaggncacanctgganntttaaaaaacccctgncntgggttttttctaaatg

SEQ ID NO: 31292 - DNA, 438 bp, Homo sapiens
  misc_feature (1)...(438): n = a,t,c or g
gnnnnnngnntttganncccttnnnnntttgaannnnnnnnnnnnnnnnnnnnnnnnnnnnnnnnnnnnnnnnnnnnnnnnnnnnnnnnnnnnnnnnnnnnnnnnggcacgaggaaggctttctagggtaagtgatgcctgagctgaaaacttagaggaggctttgaattcgttaggtaaagaaagcaggcaaaaagcatgacagtatcccaggctaaaagggacagagtgtggtaagacctagaggagaagcagcacacaccactgtctttgagaagaagtttaatttggctggttcactgagtgtaggtcaagatggggatgtagaaggtaggaaatgacaagagggtagaaaaattaggcaggaccctctaagcctttgnnnnnnnnnnnnnnnnnnnnnnnnnnnnnnnnnnnnnnnnnnnnnnnnnnnnnatg

SEQ ID NO: 31293 - DNA, 435 bp, Homo sapiens
  misc_feature (1)...(435): n = a,t,c or g
gnnnnnngntttgatncccttnnnnntttgannnccctnnnnnnnnnnnnnnnnnnnnnnnnnnnnnnnnnnnnnnnnnnnnnnnnnnnnnnnnnnnnnnnnnnnggcacgagaaataaattagttgaagtgtggtttagaaaagagagttttcttaaacctgagattctcaactgaatcacctgtggaattttttttnnnnnattggaaaggctgggacnctactnttaggcctactgaataaatctttcancctgngtnttttgaaagtttcacagatgattctganggtctcaanattgaaaancnctgcntttanccagcaccaactgancaaacnctgtaggntaagtntaanananatggcaananctgggtcagggtggtgcntgggatttccaattatncataattcctcccttcaaggaacaaagc

SEQ ID NO: 31294 - DNA, 434 bp, Homo sapiens
  misc_feature (1)...(434): n = a,t,c or g
gnnnnnnnnttgannccttnnnnnttgannncnnnnnnnnnnnnnnnnnnnnnnnnnnnnnnnnnnnnnnnnnnnnnnnnnnnnnnnnnnnnnnnnnnnnnggcacgagggagccgaataagtgattcaaagggaagggaagcacagattaatccagtctctgccaccccaaaggtttttaagatccagaggctgcccaggtggtgccttcctaaagctaagttggagggggttgctgcctcttgatattttcagtcaatatcctggatnnnnnnnnnnnnnnnnnnnnnnnnnnnnnnnnnnnnnnnnnnnnnnnnnnnnnnnnnnnnnnnnnnnnnnnnnnnnnnnnnnnnnnnnnnnnnnnnnnnnnnnnnnnnnnnnnnnnnnnnnnnnnnnnnnnnnnnnnnnnnnnnnnnnnnnnnnnnnnnnnnnnn

SEQ ID NO: 31295 - DNA, 419 bp, Homo sapiens
  misc_feature (1)...(419): n = a,t,c or g
atnaccagctatgacttgattaccaatttaatacnnnnnnnnnnnnnnnnnnnnnnnnnnnnnnnnnnnnnnnnnggcacgagccatccttttcgctggacattttatctcaagccacagatattcttcacagactagtaaaaagtaatgtttgttgagccaccactgtgtgctaggcattttctcattgctttacccataaactcaaccttattatccctacgctgtggagaaagtaataatcaaatactatccctatctaggtgtcattaaggacagttgtaattttttcatttgcttattttttgttttgttttggtttcatttgtcctatgtatgtatattcatcatcttcccaagacatttttcaaagtatcttttaaagacaggtttataaggacttttaatacttgcaattg

SEQ ID NO: 31296 - DNA, 427 bp, Homo sapiens
  misc_feature (1)...(427): n = a,t,c or g
gnnnnnnnttgatnnctcttgattgantancantttantacnantcnnnnnnnnnnnnnnnnnnnnnnnnnnnnnnnnnnggcacgaggcagaaattaattgcaatggagtgattgaagtcattaattatactcagaacagtaataatgaaacattgagacataaagaggatctacataatgctaatgactgtgatgtccaaaatttgaatcaggaatctagtttcctaagctcccaaaatggagacagcagcacatctcaagaaacagactcttgtacacctataacatctgaggtgtcagacaccatggtgtgccagtcttcctcaactgtaggtcagtcattcagtgaacaacacattagccaacttcaagaaagcattcgggcagagataccctgtgaagatgaacaagagcangaacataac

SEQ ID NO: 31297 - DNA, 426 bp, Homo sapiens
  misc_feature (1)...(426): n = a,t,c or g
ttgaanncctcttgattgantaccattctngactnattactaaatnngnacnantcctatanggantttngncctcgaggnccgaattcggcacgagaataggattgtaatggagtctccccgtgattttaaaaaacacttagtatggnnnnnnnnnnnnnnnnnnnnnnnnnnnnnnnnnnnnnnnnnnnnnnnnnnnnnnnnnnnnnnnnnnnnnnnnnnnnnnnnnnnnnnnnnnnnnnnnnnnnnnnnnnnnnnnnnnnnnnnnnnnnnnnnnnnnnnnnnnnnnnnnnnnnnnnnnnnnnnnnnnnnnnnnnnnnnnnnnnnnnnnnnnnnnnnnnnnnnnnnnnnnnnnnnnnnnnnnnnnnnnnnnnnnnnnnnnnnnnnnnnnnnnnnnnnnnnnnnnnnnnnnnnnnnnnnnnnnnn

SEQ ID NO: 31298 - DNA, 427 bp, Homo sapiens
  misc_feature (1)...(427): n = a,t,c or g
accngtnnnnnnnnnnnnnnnnnnnnnnnnnnnnnnnnnnnnnnnnnnnnnnnnnnnnnnnnnnnnnnnnnggcacgagctggaggtgtgtacaataagccccgctggactgttagttctttgagtgcaaggtcagtgtcttatccacctctgttctctcagcatctgggtctgccacgtggaagaatctcaaagatgttggctaactgcagagaactacaagggttacatagcgaggacagacccatctgttggctatttaagaatttactacttttgaaatataaatagatatagaagagtcagtgctttggtgaccataaagacctccactgccactgtgtctcagccacaggcagccaagcttgtgcattgggcccccttccttatactccctgagttctcttataaggaaattgatttctgc

SEQ ID NO: 31299 - DNA, 441 bp, Homo sapiens
  misc_feature (1)...(441): n = a,t,c or g
tgaananccgntnnnnnnnnnnnnnnnnnnnnnnnnnnnnnnnnnnnnnnnnnnnnnnnnnnnnnnnnnnnnnnnnggcacgagggcggcgctgagggctttgtgcggcttccggggcgtcggggcccaggtgctgcggcctggggctggagtccgattgccgattcagcccagcagaggtgttcggcagtggcagccagatgtggaatgggcacagcagtttgggggagctgttatgtacccaagcaaagaaacagcccactggaagcctccaccttggaatgatgtggaccctccaaaggacacaattgtgaagaacattaccctgaactttgggccccaacacccagcagcgcatggtgtcctgcgactagtgatggaattgagtggggagatggtgcggaagtgtgatcctcacatcgggctcctgcaccgaggcac

SEQ ID NO: 31300 - DNA, 442 bp, Homo sapiens
  misc_feature (1)...(442): n = a,t,c or g
tttgaanaccntttnnnnnnnnnnnnnnnnnnnnnnnnnnnnnnnnnnnnnnnnnnnnnnnnnnnnnnnnnnnnnnnggcacgagtaacaatggatcctagaaaactcttatcagtacaaatggagtgtcttcattctgctaaactgtctttggagagtaatgtttgtagagactgatagttagttgcctttcccttggtttatcagtttaattgctgtttagggcctgcttctctttatctagagagagatggtaggctataggaagtgaaggcagattccttcacttaggaaaacccagttcagtagtaaacccatccaggatgcatttgtgaagcaccaactttatgcctccctaacatggtactaggcactttggatgaagtggtctcttcttcatctccacttgttcacatccttcaagttctagctcanatgcctt

SEQ ID NO: 31301 - DNA, 436 bp, Homo sapiens
  misc_feature (1)...(436): n = a,t,c or g
acccntttgaanaccgttatgacnnnnnnnnnnnnnnnnnnnnnnnnnnnnnnnnnnnnnnnnnnnnnnnnnnnnnnnnnnggcacgaggaggattcagctgttacttaacacgctgtcacataggtgagaacaaacatgctgggtagtctacttgagtgaggctagactcacttggtatcaagtgattcacttctgcacccttaatatgccttatctgaagaattccagattgttacatactggggcttttgagatcattcataaatagttaaaactgagaatattaaattgccaaatgccgagagtcctaagcacttactggtaggcatttgttgatggataaccatttttggttaataaatactaaatcatgtgataaagcagtggngagtgcacagtcttgaggatgtctttggatataaaantcctggaat

SEQ ID NO: 31302 - DNA, 436 bp, Homo sapiens
  misc_feature (1)...(436): n = a,t,c or g
nnnnnnnnnnnnnnnnnnnnnnnnnnnnnnnnnnnnnnnnnnnnnnnnnnnnnnnnnnnnnnnnnnnnnnnnggcacgagatgagcttnnnnnnnnnnnnnnnnnnnnnnnnnnnnnnnnnnnnnnnnnnnnnnnnnnnnnnnnnnnnnnnnnnnnnnnnnnnnnnnnnnnnnnnnnnnnnnnnnnnnnnnnnnnnnnnnnnnnnnnnnnnnnnnnnnnnnnnnnnnnnnnnnnnnnnnnnnnnnnnnnnnnnnnnnnnnnnnnnnnnnnnnnnnnnnnnnnnnnnnnnnnnnnnnnaggaagtcnttactagngaaacncncggagngttnanttgccanaggctgacnttttnttcctggcagttnacagggaaatttagtaangaatacccacacccacantcgtaaatcaaaatanaccaccgccntactta

SEQ ID NO: 31303 - DNA, 443 bp, Homo sapiens
  misc_feature (1)...(443): n = a,t,c or g
gaanncccntttgaanaccgtnnnnnnnnnnnnnnnnnnnnnnnnnnnnnnnnnnnnnnnnnnnnnnnnnnnnnnnnnnnnnnnnnggcacgagccttgggcggccaggcaccacctagggaagaaaggtggggatcctggtccctaggctgacagcaactgagacctgataggttcctcagccccccaggtgatggccaagtgagacaggcctcaggagctcctctccaaagaaaacagtcattttttttcctacctgtccctttcagtctttggaagctccctccagaaaccgaactgtgaaaggagcaagagttgaaatgaagaatgtgctctgatacttcagtctgagagtatttctttcctggagagagaggcatcactcctagatgtgtgggggtcttcaccctttcaggaataagacaggtgtctttacagagcag

SEQ ID NO: 31304 - DNA, 441 bp, Homo sapiens
  misc_feature (1)...(441): n = a,t,c or g
ttgaanacccnttnnnnnnnnnnnnnnnnnnnnnnnnnnnnnnnnnnnnnnnnnnnnnnnnnnnnnnnnnnnnnnnggcacgaggatgctaatcaggcctattcagaaaagccctaattaatgtaattaaaatctgtcagatcaaactgattagcctgatactcaagccgagtggagggagtggggctcctggggggaggggaggcagctgctgctaaggtggggttagctttcagaagaaggaggtggttggtctccaaggtgatcaaagcaacttgtctttcatttccatggagggaggacagtgggctcctggctggagacctagtttcctgtgtctctagttgttctcccgcaccaaaccattcaggtaggagaagcagggcctttctgggctgtggtggaaggcagctggggaggtgtcttgccttcctctttgag

SEQ ID NO: 31305 - DNA, 435 bp, Homo sapiens
  misc_feature (1)...(435): n = a,t,c or g
nnnnnnnnnnnnnnnnnnnnnnnnnnnnnnnnnnnnnnnnnnnnnnnnnnnnnnnnnnnnnnnnnnnnnnnggcacgagcaaaaaattaattgtgtatttattgaatttatgcaaaggaacagctaagttcagaattagcagaagaatttaaaaggagattgttgacagattggaccacataaaaatcttttatatcatctaaaaatatagcccaaatgaaatttaaaaaattgtagcagactggaggaaatatttgtagcaaatttccagggttttaatattcttgtatatgaaacccttatgcaaatacataaataggcataggacaaggctggacaattagttaaataggaaattcagcaaataacaaaacatggaaatattttagatgtgaattaaacttctcaagagttccaggatccattcattaaatt

SEQ ID NO: 31306 - DNA, 440 bp, Homo sapiens
  misc_feature (1)...(440): n = a,t,c or g
aatcccnttttgaanaccgtnnnnnnnnnnnnnnnnnnnnnnnnnnnnnnnnnnnnnnnnnnnnnnnnnnnnnnnnnnnnnnnnnggcacgagcggcacgagnnnnnnnnnnnnnnnnnnnnnnnnnnnnnnnnnnnnnnnnnnnnncttttttccttatttttaaaattaattttatcttctggttacgaaatactatgtgattattatagaatatttagaaaaaaatcatagaaatcagaaaatatgtctccttaccccagtaactagaaataatgtgaccactgtgaagaatttggtttgtttgctttcaatctttggtttttaaaaatataatttagagcactttttatattgttttgtatcctgttgatttacttaatctaaatgctaatattttatgtcatcataaaaatataggctgggtgcagtggcacacc

SEQ ID NO: 31307 - DNA, 433 bp, Homo sapiens
  misc_feature (1)...(433): n = a,t,c or g
ttgaanaccgtnnnnnnnnnnnnnnnnnnnnnnnnnnnnnnnnnnnnnnnnnnnnnnnnnnnnnnnnnnnnnnnnnggcacgagaattttaataattttaatttcagctatttgaataatcttaaactttatgaacagtgtgaagtagaaactgagtataggagatgcgctcatgaattttattccctgaaaaatgtcataaagtaatataaagtattcaatgagtatgtgagtattgaataattttaacaagaactctgagttcccagatacctatgacaaaagaacaaattacttggaagtctcttctactccagacctttctgtctatccccttatttaaaaaaatgtacattgattgtcccttatcccatcaagagagtgttctttgccaagataaacgctaattagagaagtaattgtgtttatgtgt

SEQ ID NO: 31308 - DNA, 457 bp, Homo sapiens
  misc_feature (1)...(457): n = a,t,c or g
acttctnnnnnnnnnnnnnnnnnnnnnnnnnnnnnnnnnnnnnnnnnnnnnnnnnnnnnnnnnnnnnnnggcacgaggcttgacccctctggttcctgagagcatggttttttccccatgctaccaagtaatgcttttaaggaaaagtagagttcacatattttaagtggatcatggcttggtgacctgagtctgtaaagtatgtaattcagtgtaactacctggaccccttgggttcttggtccagaagttgatctgtggcagcctaaaataaacatgaggacctcgaaacagtgggatcagctccaaagagccagagctgagcactgcctgtgtcaaaaggtgcgcacctggagggaaagcgagaggtgggaaatggatgtagcagcaatggcactggacaggagaggccttaaaaggagccgagggcagcttgcactggcagagaagtccacgg

SEQ ID NO: 31309 - DNA, 477 bp, Homo sapiens
  misc_feature (1)...(477): n = a,t,c or g
gngnnnnnnnnnnttgnnncttgaanacngntatgacnnnnnnnnnnnnnnnnnnnnnnnnnnnnnnnnnnnnnnnnnnnnnnnnnnnnnnnnnnggcacgagggctcggctggcactgagcagaggcggacagtcatcacggataaagcaaaccgatcccagactccctctacttcgggatcccaggaagtcttcatgggcagaattcaataatcagggcagacggctttcggaatgtttactatcaaccctgcaaatgctcatggagagcatcacttcagagaaaatgggatggtcctggacccaaaaatagaatctcctccatgagcccatggttccaggaaggagatgggaagacaaagatatcgaatcaggagaaacaaaccaccaaggcagccccggctctcggtggacccatctctctgtgcaccttgcatggtgctgaccactgcacctcctctctaaaggctccgggt

SEQ ID NO: 31310 - DNA, 482 bp, Homo sapiens
  misc_feature (1)...(482): n = a,t,c or g
gngnnnnnnnnnnnttnnnnncttggannnnnnnnnnnnnnnnnnnnnnnnnnnnnnnnnnnnnnnnnnnnnnnnnnnnnnnnnnnnnnnnnnnnnnnnggcacgaggagaaactcagagaggctagaaactctcaataaaaattctgatatcagcatttaagatcccgcaagatagggtatacgggcatttaagggattcacaatccacagtttactggcactttaaatgctgtgaatcttgtactggcaatcacaatcttgattttattaccgagggggacccctcgtgaggaatatgtcggtgcagtgtgcaggttaaactgtgagctgctccagcctctctcccgccggctgacggaaaggtggtcaaattaccttcgcaaatctgaagggtgcttggctccagcaaattggccatttagtcaaaaagtgtctgaaaatgacgtagtcgttggaagtgtttgggaataagcgatgagt

SEQ ID NO: 31311 - DNA, 478 bp, Homo sapiens
  misc_feature (1)...(478): n = a,t,c or g
gnnnnnnnnnnnctttgnnanttgnnnnnnnnnnnnnnnnnnnnnnnnnnnnnnnnnnnnnnnnnnnnnnnnnnnnnnnnnnnnnnnnnnggcacgagctttaataccatattgagataccattttctgctaactgaattgtcagatattaataaatctgataatgcccactgttcctggaaatacagaaaagcaagaattcttatacaatgctgtcaggagtatacattgacacagttacattgtacaattcagcattatgtggtaaaagtagaaggtgtgcacacttcattactcaagaattctgagtatattctggagaaattctgacactcggagacatgtacgagaatgttcatagcagtattgttcttaatagccaaaaaattggaaacagtgttcattgacaggaaaatgggtgagtaaatgtttgtttggccacatgcagaatgttgcatagcagtgaaagttcagttac

SEQ ID NO: 31312 - DNA, 475 bp, Homo sapiens
  misc_feature (1)...(475): n = a,t,c or g
tgnntnnnnccttgganacttttataacnggnctnnnnnnnnnnnnnnnnnnnnnnnnnnnnnnnnnnnnnnnnnnnnnnnnnnnnnnnnnnnnnnggcacgagtttccccagatgtgattaaattgtccgtaacttttaactcttccctcccccgtgctttagttgaaaaataaaatctctgttcatatttcttgcatatcataggcttatgtctctttccagctctataagtcaaggctaaagattttttttttaagaaagaggaaaaaaaagacatttatttgagaagacatttttgtgtgtgccctgctcccaccatgcattcattcggtgctggaaagtggttaggggattctaagcagcccccttgctatagctggactgngacgctgtcccttactgtcagtctgcttggctcctccaggcctgatgcanatgctgcccgctccccacacagccctcctttttctctg

SEQ ID NO: 31313 - DNA, 481 bp, Homo sapiens
  misc_feature (1)...(481): n = a,t,c or g
gggnttgnntttgananccttntgacatgatacgaatttaatacgactcnnnnnnnnnnnnnnnnnnnnnnnnnnnnnnnnnnggcacgagagcatgtatcatcttatttcatgatctatttcttcactgtttctttaatgtcgaagcatttttggttcatcttctagttctcctttggttcagaggcagaggaagaaatccaatatggggattgggggtaatattcttagtttgttaggaatgtaatagaacatgtgtgtattatatgtcatgatgttatatataaatctctttactaggtttttaactaccatcaaaattcacctgagggtgacactctgtaggtaagaaatcttaatggaagagagatttacaaaaccagaccttaaggaaaacacgggagtgtttctaattttcttaagcacagttttaatatttgtattccctctaatatggcactatgatttttaacactaaatt

SEQ ID NO: 31314 - DNA, 442 bp, Homo sapiens
  misc_feature (1)...(442): n = a,t,c or g
anaccngnnnnnnnnnnnnnnnnnnnnnnnnnnnnnnnnnnnnnnnnnnnnnnnnnnnnnnnnnnnnnnnnnnggcacgagatatattgttctaacatcagtatgtcatgacagggaaggaaaacctatgacacataaagacacctaagcactagagaacatcttttttatgtccttagttctctggcaggcaaactccttctcatcctttaaaaccgcacattaatatcccttcctcgtgaagccttttaaaatattctccacaagagtcagtcagtccttttactgggctaatgccatatttggttactctcttcttgtagtgtttatcacattatattgtatatattggtatatgattctgtctgtcctactgcactccaggctcctcaaggacagggacaatgtccctgttttattcatcctttgactttcaatatgt

SEQ ID NO: 31315 - DNA, 443 bp, Homo sapiens
  misc_feature (1)...(443): n = a,t,c or g
cnnnnnnnnnnnnnnnnnnnnnnnnnnnnnnnnnnnnnnnnnnnnnnnnnnnnnnnnnnnnnnnnnnnggcacgagaggacacagccaagggccatatcgtcctgctccaggaggctgagacgctcatccagattgaagaagactcgacccatatcatctgcgacaatgacgagatgctcagagtgcgactgcgggaccttgtcctcaaattcttacagaagttctgagtgggccatctgagctacttccctgaaatcctgcagtccctcactggctgccctcacaagccacctgaggagtggcatgagaggccattaactgtgtctttgtggtgtcctctggcttaaggagtgaagaggtggctcttgagggaaatggtctggacttattcccagcactgtttcaggcaagaactttccctttcaacttcaggctcattttc

SEQ ID NO: 31316 - DNA, 445 bp, Homo sapiens
  misc_feature (1)...(445): n = a,t,c or g
anttcgntacnncttgacntnattacgaacnactcnnnnnnnnnnnnnnnnnnnnnnnnnnnnnnnnnnggcacgagcggcacgaggttgtacagctctgtgaatatactgaagtcattaagttgtgcactttaattgggtgaattgtacatgtgagttatatatctgactgtagttgttattaaaaaacaacaggaggccatgtgggctgctaggagtagcaatgtctgttcccagccagcaggtagagaccagggctggacagaggagtatgggctgtgctgcagattatttgtggtacccaactgttgcataaaacagggtgtgatctcttgcattgctatgcatgagtggattcccagtaaattgtgccaggctgcctgatgatgtgtggcttgtgctttggatcgtaatgcttacctatgctacttaagttacataccct

SEQ ID NO: 31317 - DNA, 452 bp, Homo sapiens
  misc_feature (1)...(452): n = a,t,c or g
atttganaccgnnnnnnnnnnnnnnnnnnnnnnnnnnnnnnnnnnnnnnnnnnnnnnnnnnnnnnnnnnnnnnnnnnggcacgagggcagggtgaagaaaggaagtacattccaagtagagagaacactatgatgtaagtaaaggaggcagaattaagtgtaagtggtggatttagagaaaatcagtatatctgtttgacaaggatagtagaaataataaaagtgcctaactatggcagactgtgttctcccaaaatgaatgcagtgaacagcaatattttcagtttcacatgttatttattctatccgccatcaaatggtggggtctctttcccatctctttaatctgggttatgactggtttatgtctgtttcaactgagaaagtatagtggaagtgatgctatgtgacttccaagtctaggtcataaaggatatagcttctgcctggct

SEQ ID NO: 31318 - DNA, 449 bp, Homo sapiens
  misc_feature (1)...(449): n = a,t,c or g
cnnnnnnnnnnnnnnnnnnnnnnnnnnnnnnnnnnnnnnnnnnnnnnnnnnnnnnnnnnnnnnnnnnnggcacgaggttattaattggtttcccctcaatattgtgtctagggatcgggcggcatgaggagagggagagagatgggagtggccagtnnnnnnnnnnnnnnnnnnnnnnnnnnnnnnnnnnnnnnnnnnnnnnnnnnnnnnnnnnnnnnnnnnnnnnnnnnnnnnnnnnnnnnnnnnnnnnnnnnnnnnnnnnnnnnnnnnnnnnnnnnnnnnnnnnnnnnnnnnnnnnnnnnnnnnnnnnnnnnnnnnnnnnnnnnnnctgttggaaaagaggcatggaaagacctgcagagttgccaaaaccttcagcctataataaacacaatgtctaaaaaacccaagtaagagaagcactgtaagctgaagtgtgcctctatctt

SEQ ID NO: 31319 - DNA, 454 bp, Homo sapiens
  misc_feature (1)...(454): n = a,t,c or g
atttgnnnnnnnnnnnnnnnnnnnnnnnnnnnnnnnnnnnnnnnnnnnnnnnnnnnnnnnnnnnnnnnnnnnnnnnnnnggcacgagtgcttttttgcaagttaaatttttggttgggattacaggcttgagccactgagcccggccatatttagatatatttaaatatggatgaaaaggagccagtggagagagaagttaaagatattgggtgaggacgacaaagagcggaagagaatgtggagtcattgacctttagaagcaaatcaaactgtgcttccattgtcagaggaggaaagcagggaaggaagcataggtgcagatgctggaatgtttggtactggaagttggagaagttctttctatagtttctattttttcctatgaaacaagacaatgagaattatagggaagtggtaggtagatttgaggaaattgaagaagccttagagta

SEQ ID NO: 31320 - DNA, 453 bp, Homo sapiens
  misc_feature (1)...(453): n = a,t,c or g
nattcgctatgncatgattacgaatttaatannnnnnnnnnnnnnnnnnnnnnnnnnnnnnnnnnnnnnnnnnggcacgagcctcaacccatgcactcatccactgtctatccgtggtccctacatttggtctaaaggtaggatcttttctctggcagagacgtggctgcctcccccaccgctgcatcgcagctcgaaggacggatgcatctgctcttctcacatcagcatgatggtccgcctaacgtgaggggagggggcctggcccaccttagctgcagaacgcatcactgacttgggaaatgaagcctcaagatagttccccggggaggagcagtgttctcagacttctgttgacgcttctagactcaagctttcagagagactcccatgacagcagccgggcacctggctcactgggttcatcatgtgtgtgctcgtgggtctggaatc

SEQ ID NO: 31321 - DNA, 444 bp, Homo sapiens
  misc_feature (1)...(444): n = a,t,c or g
atttgaananccgnnnnnnnnnnnnnnnnnnnnnnnnnnnnnnnnnnnnnnnnnnnnnnnnnnnnnnnnnnnnnnnnnnggcacgaggggctcggcgtggtaaggtagcacacacataattctggtggcacatagggtgtacattgggaagcaaaaatacaggtatcctgtaactggaaaaactaggtttatggtatattatgtcggggaaaaagacagttaagctcctcctttcctggtatactataatttaaacaaacctaataaagcgacacacagtttttttcccatagaaataaaacattttcttatttactaagttgtcctaactccctttctaggtgactcatatgagtttcaagcatctattctctaggtttcatatcaatttcaaacatcaattctctagatttcattaagcaggaaaatttgaaaaggggaaag

SEQ ID NO: 31322 - DNA, 443 bp, Homo sapiens
  misc_feature (1)...(443): n = a,t,c or g
atttgananccgnnnnnnnnnnnnnnnnnnnnnnnnnnnnnnnnnnnnnnnnnnnnnnnnnnnnnnnnnnnnnnnnnnggcacgaggttggttagcagactagaccactggagctgtgaaggcagaagccggggtggggagggcgactataaagaggattcctgtgttggttagcagactagaccagggtcagtgagctttttctataaagggccagatagtaaatacttgtggcttcgtgaaccagatggtctctgctgcaactacccagttctgccattatagcacaaaagcagctacataggccataggtaaatgaatgagaatgactgtgcataaataaaaatatttatgggcaatgaaatttgaatttcacgtaattttcacatatcatgaaatattattcttcttcagcttttttttttcccaactatttaaaaata

SEQ ID NO: 31323 - DNA, 451 bp, Homo sapiens
  misc_feature (1)...(451): n = a,t,c or g
anacccntttggacacccnnnnnnnnnnnnnnnnnnnnnnnnnnnnnnnnnnnnnnnnnnnnnnnnnnnnnnnnnnnnnnnnnnnggcacgaggtcttttccagagtgtgtggaaccatcagtttagtaatttgtatcccttccaattaatcttttttttttttaagttaangtcccntnancngnanagggtnaaannaaaaaggctanggantnatnnntaatttggtnaggnntaaaangggcntnggnctnaggtttttttttaangccnttatntnngaaanccttttgnaaannttnggggnnaaaaggnttanccccgggnnggaaccnngggcnangncnngaaancnnanccntttgganggntngggcaannngatcnntngnggccagnanttanaaaccancnnggccanctngggnaacccccnttttnantaaaaaa

SEQ ID NO: 31324 - DNA, 442 bp, Homo sapiens
  misc_feature (1)...(442): n = a,t,c or g
ttganaccttnnnnnnnnnnnnnnnnnnnnnnnnnnnnnnnnnnnnnnnnnnnnnnnnnnnnnnnnnnnnnnnnnggcacgagaannnnnnnnnnnnnnnnnnnnnnnnnnnnnnnnnnnnnnnnnnnnnnnnnnnnnnnnnnnnnnnnnnnnnnnnnnagttaaaattataaatgttatatatattttaccacaataaatcacactggaggtcctagccaatgtaataaagcacaaaaataaaataaaagccacatggctcagaaaaaaagaaaaaaaaattactgcttacagaagacatgtttgtctacaaagaaaatccaaaagaacattcaaagaaagctactagatttagtaagtgattttagcaaggtcccaaaatacaaggtcactatacaaaaattaactggacttctgtataatttttgtgcattgaacaatt

SEQ ID NO: 31325 - DNA, 440 bp, Homo sapiens
  misc_feature (1)...(440): n = a,t,c or g
tgaanacttgtatgacntgattacgaatttaatannnnnnnnnnnnnnnnnnnnnnnnnnnnnnnnnnnnnnnnnnggcacgagtgtttgcattgttctcttctttctgataatccttagttgtgtgttcatgattagaacaaatagaccaaaaaattcaactggaagctatgaatatatgggtgtcatccaccttaaatttcactgtagggttctctgggtgaatttattagcaacttgtcaggttttcaataaagtaactcttccagtctcctacttagaagaaaaaggtctgcgtaccagcattttgggagcccagtgtgagaagagagctgggattcaatatctggttgctgtgtgtgtgtgtaacttaatcccatttttggttctatacctatgctttcatctgtgcaagcccattacctcttcagaatttaaac

SEQ ID NO: 31326 - DNA, 461 bp, Homo sapiens
  misc_feature (1)...(461): n = a,t,c or g
ttgaananccgnnnnnnnnnnnnnnnnnnnnnnnnnnnnnnnnnnnnnnnnnnnnnnnnnnnnnnnnnnnnnnnnnnggcacgagtatgattcttgagcaaatacaaattgtgacctttatgtgtgtattgtgtgggtttttttgtttgtttggaacagaatcccccttacttgggactcagtaagggaaagggctcatagttttgacttacctgaattgtaggtgagattagctgtgttgttgtttaggaacttttattctgtgtgaagggaactgtagtcacccaactggctcttcctgtctgctgcacagacaaaactgaaggggtggcctgcccctccacacttgtgggccgtttcttgttgggtggaacgagagacttgannnnnnnnnnnnnnnnnnnnnnnnnnnnnnnnnnnnnnnnagtgggcgcaggggacccgcgctcagcatacggagg

SEQ ID NO: 31327 - DNA, 454 bp, Homo sapiens
  misc_feature (1)...(454): n = a,t,c or g
acttggnnnnnnnnnnnnnnnnnnnnnnnnnnnnnnnnnnnnnnnnnnnnnnnnnnnnnnnnnnnnnnnnnggcacgagtcggcgtggctacttattcgaaaaccatcacgtgttgctttgggttgctgtggtttctttaaacgcacgttgcagtcctggctgtgagctcctggagaacatgggtactgcatccgtactgaatcaggactacctgagcaacagtaacaacatccagatggccctgacggtgggcgggacagtgccctccctgcttagaaacaggaaccacatttcatctccacaacaaccctatgaaagagatgctactactacccctcattatacagctgaggacctgggagctcagacagcttcagtcacaggcccacggtcacttggtcagtggccaagtcaggatttgaaccaggtggtcttgtttcagagtctgggctt

SEQ ID NO: 31328 - DNA, 471 bp, Homo sapiens
  misc_feature (1)...(471): n = a,t,c or g
gnntncccccttganactctatgacnnnnnnnnnnnnnnnnnnnnnnnnnnnnnnnnnnnnnnnnnnnnnnnnnnnnnnnnnnggcacgagaactgggtaaacttcaggcattcttcatggccatagagcacaatctcctcagattgactgaattgcactattataaagactaatgagccattagtaatgagcctagttacactgtcaggctattgggttccctaggacagaactcnnnnnnnnnnnnnnnnnnnnnnnnnnnnnnnnnnnnnnnnnnnnnnnnnnnnnnnnnnnnnnnnnnnnnnnnnnnnnnnnnnnnnnnnnnnnnnnnnnnnnnnnnnnnnnnnnnnnnnnnnnnnnnnnnnnnnnnnnnnnnnnnnnnnnnnnnnnnnnnnnnnnnnnnnnnnnnnnnnnnnnnnnnnnnnnnnnnnnnnnnnnnnnnnnnnnnnnnnnnnnnnnnncgtgatctg

SEQ ID NO: 31329 - DNA, 466 bp, Homo sapiens
  misc_feature (1)...(466): n = a,t,c or g
ttnnnnctttnnnnnnnnnnnnnnnnnnnnnnnnnnnnnnnnnnnnnnnnnnnnnnnnnnnnnnnnnnnnnnnnnnnnnnnnnggcacgagcgcagctcagctacagcacagatcagcaccatgaagcttctcacgggcctggttttctgctccttggtcctgggtgtcagcagccgaagcttcttttcgttccttggcgaggcttttgatggggctcgggacatgtggagagcctactctgacatgagagaagccaattacatcggctcagacaaatacttccatgctcgggggaactatgatgctgccaaaaggggacctgggggtgcctgggctgcagaagtgatcagcgatgccagagagaatatccagagattctttggccatggtgcggaggactcgctggctgatcaggctgccaatgaatggggcaggagtggcaaagaccccaatcacttccgacct

SEQ ID NO: 31330 - DNA, 461 bp, Homo sapiens
  misc_feature (1)...(461): n = a,t,c or g
ggnnaccnnnnnnnnnnnnnnnnnnnnnnnnnnnnnnnnnnnnnnnnnnnnnnnnnnnnnnnnnnnnnnnnnnggcacgagaatttgtataaatctgatttatgactaaaataaggttaaaaattacacctctatgtatgtttaccctattaccttagtgggggtgaaattaattagctctttgaacataaatttttcatgtcttagagttcttttttcaagctgcataatttatgttcttcaagccatttttatcccataccacccccacaaagggggaaattttattttttatcatttttattgtctttcaatggtgagattttcgccaccccactcctgaaatgtgaagactcaaataaaactgagtaatctaataaggtatatgcgttgctgaatgtagtangatgatngttcatcattcttagatattatgatctagnttgaatctggttccagaa

SEQ ID NO: 31331 - DNA, 466 bp, Homo sapiens
  misc_feature (1)...(466): n = a,t,c or g
ttgnnncttgnanaccngnnnnnnnnnnnnnnnnnnnnnnnnnnnnnnnnnnnnnnnnnnnnnnnnnnnnnnnnnnnnnnnnnnggcacgagattgagtgtaacagaggagcaagtggagttcatgttgctattataagaaggatgaaaccatttgaaactacttcccattgattttttagaaatcccttaacagatcagtatttttattaactactttcttgaagtgtttgtagtcaagtgtttaatttatgcaaagttctcgttctgcttttgctaaaaattattctaaattggtattatctccttaatttttgtttctccagattttttagtaagtttactgtatggccaatataaaaatttatagtattactaacataatcctcagtttgtggattaattcaaacattttgaaattctgatatacctgtaaaagtataaaattctatgcttttcacagctat

SEQ ID NO: 31332 - DNA, 474 bp, Homo sapiens
  misc_feature (1)...(474): n = a,t,c or g
gatgnntncccccttgnanacttctatgacnnnnnnnnnnnnnnnnnnnnnnnnnnnnnnnnnnnnnnnnnnnnnnnnnnnnnnnnnnggcacgagaggaagtaatgagttttgagtatttattacctttctttttaatttaatggtttttttttnnnnnacanantntnattnnnnnnnnnnnnnnnnnnnnnnnnnnnnnnnnnnnnnnnnnnnnnnnnnnnnnnnnnnnnnnnnnnnnnnnnnnnnnnnnnnnnnnnnnnnnnnnnnnnnnnnnnnnnnnnnnnnnnnnnnnnnnnnnnnnnnctttnggtttttagnaaaaacgggtttttgccangttgcccaggntggtctnaatntccgggnntnanngatgcctccngtctnagnntcccaaagngctgggattcaggacaggnncctaaananggnatgaggattntntganatgagagaggaccagggacccca

SEQ ID NO: 31333 - DNA, 467 bp, Homo sapiens
  misc_feature (1)...(467): n = a,t,c or g
anacttggataccnnnnnnnnnnnnnnnnnnnnnnnnnnnnnnnnnnnnnnnnnnnnnnnnnnnnnnnnnnnnnnnnnnnnggcacgagggagtagccttagcaaaagagtggtatttgggtagtaggactttgttcatgtggctggagtgtatgatgtgtactaggagatagagtgaaaaggtggaggtaatagtaatttaaaatataacagtaaaaagaagcagctgtgtattgatcacttactgtgcactgttttaaatggtttacaggtgccacatctttgataatacagcatttctgtgggtgcaataagtgatggagccaggagttcacctggggcaggctggttccggagcatcactggtgccttagggcctcaaataccagattcagcagcgctaagcacttttttgggtcttatttttggatggngatangtancaggatattaactgatttttaaaa

SEQ ID NO: 31334 - DNA, 464 bp, Homo sapiens
  misc_feature (1)...(464): n = a,t,c or g
gcgcccctcccttgncncnttgganaccgttnnnnnnnnnnnnnnnnnnnnnnnnnnnnnnnnnnnnnnnnnnnnnnnnnnnnnnnnnnnnnnnggcacgagtatgtgctctcatgcatactggcccaatttctcaggctctgttaatgatgttgggaacctctgtttaacatgaattattttctacctgaatccctgtaaattcacgataggtgttaattgtattgatctgcttgtcctgttcaggaaagaaaaatatcaaaatgaaccctacttgttgcactttttctgattacttcaatatgtgtataaaatgatactatttatgaaagttatgcaggcagctttgtaatacttctgatattatgatattatatataatacatgggtttcttacttcaaattaagctcttttctattctttctttctttctttnttttttttngaaacanagtttnncctt

SEQ ID NO: 31335 - DNA, 472 bp, Homo sapiens
  misc_feature (1)...(472): n = a,t,c or g
gngntnnctccccttgnanacttntatgacnnnnnnnnnnnnnnnnnnnnnnnnnnnnnnnnnnnnnnnnnnnnnnnnnnnnnnnnnnggcacgagaaatttttaagtgagttcagttgtaatggtttcatatagaaattagccgatatattttctaacagtttctgcattatttttagaaatgaaagttttctcacagggcctttttttttttaaaatannnnnacngggcagtnaaaaaattnggaacnttatttnanngnggtnttnacccncntcntngtttnanttngnancnganngnttttnaggcccgttccnttnanngccnggagtcnnngataaccnttaannaaantngcanttngaatncccagngttnngttaangncnatatcccnganctggtttggatanctttggccnaanancgggcaaatttngaccaggtngtaaanncttntacnagcct

SEQ ID NO: 31336 - DNA, 483 bp, Homo sapiens
  misc_feature (1)...(483): n = a,t,c or g
gngnnnnntnnnctttgaccctttgganacccgnnnnnnnnnnnnnnnnnnnnnnnnnnnnnnnnnnnnnnnnnnnnnnnnnnnnnnnnnnnnnnnnnnggcacgagaggctgcagcccagctcgtctcggcgcccgcgtcgccgtcgcgaagccccccgccccgcttccgccgcgtcggaatgagctcccggaaagtgctggccattcaggcccgaaagcggaggccgaaaagagagaaacatccgaaaaagccggagcctcaacagaaagctcctttagttcctcctcctccaccgccaccaccaccaccaccgccacctttgccagaccccacacccccggagccagaggaggagatcctgggatcagatgatgaggagcaagaggaccctgcggactactgcaaaggtggatatcatccagtgaaaattggagacctcttcaatggccggtatcatgttattagaaagcttggatgggg

SEQ ID NO: 31337 - DNA, 477 bp, Homo sapiens
  misc_feature (1)...(477): n = a,t,c or g
gagnnncntccccctttganacntnttgacnnnnnnnnnnnnnnnnnnnnnnnnnnnnnnnnnnnnnnnnnnnnnnnnnnnnnnnnnnggcacgagctcaattcagacttcccctcatgcctggaaaatggcagttgtccccacaaacagggaaggacacagaggccctgggagcaagttgcaccttcatggtggcaaagccttgcttcccggttcccccaaggtctccagcagcccttccccctagctgagaacagagggctgacagggaggttccagagctggtatggactctggagtcaggtcagctttcaaatcccagtcctgcccagtcctagtggtgccagtgcgggcaggcggcctcacagctctaagctcatctgtaaaattagcattcaacagcatcagcctcctaagtttgtgaggactggatacaagaacagaagttaagctttcatcaccaagcttggcatacag

SEQ ID NO: 31338 - DNA, 474 bp, Homo sapiens
  misc_feature (1)...(474): n = a,t,c or g
gngnnnnntcccccttgacacttgatgactgattacgaatttaatacgactcnnnnnnnnnnnnnnnnnnnnnnnnnnnnnnnnnnggcacgaggctgaccaaaagatttcgaatcatacctttaatcatggcaaggatcttatgtcacattcttgagtacacatgttcactaaattttacctatatgtgtatgtgaacatggacttcagaattaattagtgtggtaattattatttctattgtagactttaatcagccatattaaatatatgcattatgttcacagagaaaacatggtatcatctttggaaactttacggtatgctctatattatagataccctatataactatggtactaaacacacgagttagtgacaagtcaggcatttggagggaatgtttgtaacccattgtgggagagagttattcttactggtaggtaacagttatggctgtaatgaatagaatgt

SEQ ID NO: 31339 - DNA, 475 bp, Homo sapiens
  misc_feature (1)...(475): n = a,t,c or g
gcgccnntccccttgcctttgataccgttatgacnnnnnnnnnnnnnnnnnnnnnnnnnnnnnnnnnnnnnnnnnnnnnnnnnnnnnnnnnnggcacgaggggatgctggacattgcaggaccgtaaatcagtgaaatctgaaaggtaaacattgccacaattaatggagagaatgaagaaaaatgaggtgagagaaaccctaccccctagagaattcagttgtcaatatccttgtcctgctctaagtacaactcattttcttacctgttctcattgaattcacctatcctcggcaaaaccctctggcaaagctgttcatccaaaagacagccaaacccagaagcacagtgaagaggccgctaagcagccagcagacagggcaccaaatgctcacatcgctgtcttgccacacctgctcccctgtcactcacttcactgggccactcacccatgtctctaatgaaaagtttgggg

SEQ ID NO: 31340 - DNA, 466 bp, Homo sapiens
  misc_feature (1)...(466): n = a,t,c or g
gnnttttnaaacccttgacatgatntgaaatccatnnnnnnnnnnnnnnnnnnnnnnnnnnnnnnnnnnnnnnnnnnnggcacgannnnnnnnnnnnnnnnnnnnnnnnnnnnnnnnnnnnnnnnnnnnnnnnnnnnnnnnnnnnnnnnnnnnnnnnnnnnnnnnnnnnnnnnnnnnnnnnnnnnnnnnnnnnnnnnnnnnnnnnnnnnnngcctatctcaaaaaataaaaaatgaactggactagtgatagatatccaaaaccaccagcctgaaaaattctaatagtctcctacctgattttgctacctgcatttgcacttcacttctggtttgtcttcccacatggtcagcatggacagcttcctaaaataaagacctgcttatggccaggcacagtgggaagataagggaaggnttatttttcgtcactgacttcaccagcaaatctcaaaaacccaaaccta

SEQ ID NO: 31341 - DNA, 452 bp, Homo sapiens
  misc_feature (1)...(452): n = a,t,c or g
ntttgnannnnnnnnnnnnnnnnnnnnnnnnnnnnnnnnnnnnnnnnnnnnnnnnnnnnnnnnnnnnnnnnnnnnnnnnggcacgagaataaaacaccatgcgatcgtatttctgggcagatagaatgcaagagcctggggcactggttgtttctggggaggggaagggaaccgagagacccaagaagagggtggacannnnnnnnnnnnnnnnnnnnnnnnnnnnnnnnnnnnnnnnnnnnnnnnnnnnnnnnnnnnnnnnnnnnnnnnnnnnnnnnnnnnnnnnnnnnnnnnnnnnnnnnnnnnnnnnnnnnnnnnnnnnnnnnnnnnnnnnnnnnnnnnnnnnnnnnnnnnnnnnnnnnnnnnnnnnnnnnnnnnnnnnnnnnnnnnnnnnnnnnnnnnnnnnnnnnnnnnnnnnnnnnnnnnnnnnnnnnnnnnnnnnnnnnnnntcc

SEQ ID NO: 31342 - DNA, 457 bp, Homo sapiens
  misc_feature (1)...(457): n = a,t,c or g
ttntnnnnnnttggaaaaccgntatgacnnnnnnnnnnnnnnnnnnnnnnnnnnnnnnnnnnnnnnnnnnnnnnnnnnnnnnnnnnggcacgaggtggtagacagctcaatggtggagaatgaggtcatcaaaagcttggggaaggacggcagcctggaggatgacgaggatgaagaggatgacttggacgaaggtgtagggggcaagcgccggagcatggaggtgaaacctgcgcaagcctcccacaccaactacctgctgatgaggggctactactcccccggcatcgtcagcacccgcaacctcaaccccaacgacagcattgtggtcaactcctgccagatgaagttccagctccgctgcacccctgtgcccgcccggctcaggcccgctgccgctcctctggaagagctaacaatgggaacctcctgcctccctgatacgttcaccaagctg

SEQ ID NO: 31343 - DNA, 448 bp, Homo sapiens
  misc_feature (1)...(448): n = a,t,c or g
ntttgnnnnnnnnnnnnnnnnnnnnnnnnnnnnnnnnnnnnnnnnnnnnnnnnnnnnnnnnnnnnnnnnnnnnnnnnnggcacgagttagaagataaacttgaggaaatctcccagaaaatgaaagggtggtgggggaaagacaataaatattggacccagtaagaaattttgttagaacattgggaggtgggggcgggagagggatcatgtgagtatgtggaagatagtgtaagagaactgaattctcagcttcctaggtgagacatcactggacaatgtctaacatcaagaaaccaggacatagcatatgagtatttttgtctagcaatgtaagggcaaatgccagaaaaataactcaaagtgttaaaaagaggtggggagtcagggggactccaagaggtagaatggagtgaaggaggactgctttctttgttataaaccttgta

SEQ ID NO: 31344 - DNA, 439 bp, Homo sapiens
  misc_feature (1)...(439): n = a,t,c or g
ttggananccgtnnnnnnnnnnnnnnnnnnnnnnnnnnnnnnnnnnnnnnnnnnnnnnnnnnnnnnnnnnnnnnnnnggcacgagccacgattcatttgttagaagacctgcaaatttttttcccccaagatataattagaaatcacacacttataccgcagttaatttgtatatattaattctggtgctacctgaacattctgcattctttgttaaaatagcacatctgtcaggtgactcgggtagttaaccttttgatttcttaacattgcaagtacagaaggctaaagaggcagtatttaatggatattgtagagggcggcatatgaccaacactgagcatgtcttttctaagagagaggctagatctaattgtttaacaaattaaaaaatttatacaaacaaaatataaataaaaaaacaaaataaaataaaaaa

SEQ ID NO: 31345 - DNA, 458 bp, Homo sapiens
  misc_feature (1)...(458): n = a,t,c or g
tttgaaaaccnntatgacatgattactttgnataaccctnnnnnnnnnnnnnnnnnnnnnnnnnnnnnnnnnnnnnnnggcacgagcctgcgaggccgctccccgggaggccaagggggaggctgccctcatcctggagtgcgggaggccacgggagaagtgccaaggtggggctggggccaccttcaccgcgcagaaccacccgccgcagactccgcttctgggacctggggcggccctttctaagcctgtctgtctcgggccagggccaaggggcccgtcgcccatctgtctctgaaggtggcacccacaggcagtctgtcagtgtccgagggcagcagttgccccaggaccagtgcctaactttggtgatgccgccactgggagcccaggcccctggcggaagcctcccaggtcacatcttgccttgtttccccacagggcagctgtgcggaggg

SEQ ID NO: 31346 - DNA, 436 bp, Homo sapiens
  misc_feature (1)...(436): n = a,t,c or g
ttggatacngnttgacnnnnnnnnnnnnnnnnnnnnnnnnnnnnnnnnnnnnnnnnnnnnnnnnnnnnnnnnnnggcacgaggtctgatgatcaggacaaagtagggggccctaaaggctggggtcgagcctaagtaaagctgcacacagtggagaagacccgtttagaagaccatgtgtggtctgtaatgtcagcaaggtttgtttgagccatcagttctaggaggcctctagcccgagagtataagagagcagaaagttgctttgaacgccttgttcaagagcccagcnnnnnnnnnnnnnnnnnnnnnnnnnnnnnnnnnnnnnnnnnnnnnnnnnnnnnnnnnnnnnnnnnnnnnnnnnnnnnnnnnnnnnnnnnnnnnnnnnnnnnnnnnnnnnnnnnnnnnnnnnnnnnnnnnnnnnnnnnnnnnnnnng

SEQ ID NO: 31347 - DNA, 458 bp, Homo sapiens
  misc_feature (1)...(458): n = a,t,c or g
tttgnanaccnntatgacatgattacntttttaatncnnnnnnnnnnnnnnnnnnnnnnnnnnnnnnnnnnnnnnnnnggcacgaggaaagattgtatgttgaggcaaaagatcaaaatggaaaacaaggaacagatggaaaaaagaaagggggcagaggaagccacagggctaaaaataagtcaaaggaaacatttttgggttcagttaaggaaacatttgatgccatgaagaattctaccaaggagtttgtaaggcatcataaagagaaaattaagcaggctaaagaagctgtgaaggaaaatctgaaaaaattctcagattcagttaaatccactttcagacactttaaagataccaccaagaatatctttgatgaaaagggtaataaaagatttggtgctacaaaagaagcagctgaaaaaccaagaacagtttttagtgactatttacatccc

SEQ ID NO: 31348 - DNA, 438 bp, Homo sapiens
  misc_feature (1)...(438): n = a,t,c or g
ttggannnnnnnnnnnnnnnnnnnnnnnnnnnnnnnnnnnnnnnnnnnnnnnnnnnnnnnnnnnnnnnnnnnnnnnnggcacgagcagctgtggtgtcctctacaccatctgtggtcatgtcaacagtagcacaaggtgtatctacatcagcaatcaaaatggcatcaaccagacttccttcccccaaaagcttagtgagtgccccaactcagattcttgcacagttccctaaacaacatcaacagtctcctaagcagcagttatatcaagtgcaacagcagacacagcaacaagtggcccagccttctccagtatctcatcagcaacagcctcagcagtctcctttgccacctggtattaaacctaccatccaaatcaaacaggagtcaggtgttaaaatcatcacacaacaggttcaaccaagtaaaatcttaccc

SEQ ID NO: 31349 - DNA, 457 bp, Homo sapiens
  misc_feature (1)...(457): n = a,t,c or g
ntttgganaaccgntatgacatgattacgaatttaatacnnnnnnnnnnnnnnnnnnnnnnnnnnnnnnnnnnnnnnnnnggcacgnnnnnnnnnnnnnnnnnnnnnnnnnnnnnncatcttttgcttaatgcatggactcaggtcattgaaaaaaagttgcagttgtttccttagggccttccagctgagacttgaatgcgaggagtcgtatctcagacacaacctgtgcggtgcctcagtttttcattggaagaaactgtcccttggagagagggaggttgtactatacctgatggctggcaggggacagagccttcacttcgtctcctggagcctgtgctgtctcccagactagggtggatggacttctcccaggttccggagaccctgagatggggacaactgcccacactcacatggtagcctggtggaagaatgcttgtacggtacaacgc

SEQ ID NO: 31350 - DNA, 459 bp, Homo sapiens
  misc_feature (1)...(459): n = a,t,c or g
ttggananncgnnnnnnnnnnnnnnnnnnnnnnnnnnnnnnnnnnnnnnnnnnnnnnnnnnnnnnnnnnnnnnnnnnggcacgagccactgccctgaccttgttcgtgtattttccagtcacttagtgtggaggaagggaatctcatcccatggagaatagatcgaacatggtcttcacctgacttaaaatataaaatgctaaattagaaatatcttaagtggggcggggggcacagttattttaaaaataaaacctatcaactccctccttgcctgaaagctgtaggggacatatgggtcttctgagatttgctgtgtgatgctgtctcctctccagggacaaggctgctgggcactagaggactagatctttcaagggtcccagatccactgtcacataaagtcacatccagaagacctttcctgccagcttccagggctctttgtgttctgtgaca

SEQ ID NO: 31351 - DNA, 457 bp, Homo sapiens
  misc_feature (1)...(457): n = a,t,c or g
atttgganaaccgntatgacatgattacgaatttaatacnnnnnnnnnnnnnnnnnnnnnnnnnnnnnnnnnnnnnnnnnggcacgagtgcaacttcagcaacttcaaatattgaatatgcccacgttcctcatctcagcccagctgtgattcctactctgcaaaatgaatcgtttttattatccccaaacaatgggaatctggaagcacttacaggacctggtattccacacattaatgggaaacctgcttgtgatgaatttgatcagcttatcaaaaatatggcccagggtcgccatgtagaagtttttgagctcctcaaacctccatctggaggccttgggtttagtgttgtgggactaagaagtgaaaacagaggagagctgggaatatttgttcaagagatacaagagggcagtgtggcccatagagatggaagattgaaagaaactgatcc

SEQ ID NO: 31352 - DNA, 454 bp, Homo sapiens
  misc_feature (1)...(454): n = a,t,c or g
nacccnnnnnnnnnnnnnnnnnnnnnnnnnnnnnnnnnnnnnnnnnnnnnnnnnnnnnnnnnnnnnnnnnnnggcacgaggtcgttcagtcgtcgtattagtcatttgttcttccataaagaaaatgattggggattttccaattttatggcctggagtgaagtgaccgatcctgagaaaggatttatagatgatgacaaagttacctttgaagtctttgtacaggcggatgctccccatggagttgcgtgggattcaaagaagcacacaggctacgtcggcttaaagaatcagggagcgacttgttacatgaacagcctgctacagacgttatttttcacgaatcagctacgaaaggctgtgtacatgatgccaaccgagggggatgattcgtctaaaagcgtccctttagcattacaaagagtgttctatgaattacagcatagtgataaac

SEQ ID NO: 31353 - DNA, 450 bp, Homo sapiens
  misc_feature (1)...(450): n = a,t,c or g
nnnnnnnnnnnnnnnnnnnnnnnnnnnnnnnnnnnnnnnnnnnnnnnnnnnnnnnnnnnnnnnnnnnnggcacgaggttttaaacttttttattgtatgtatattgaatataaaatggcctggcacatggtaggctctccataaatatggaatttatgttattatagttttggtggttattgtccaatgaatgattgaatgaaaacatgcaacatggagggtaaaaatcatcagctagcagcaggtctctgtaactgttatagtttcctaaaagtcattacacacagagcccttaaacccaggggacggcagtcacctctgagcgcaaacacaggcactatttgtgattgcaggagaagggcaatatcaccaacttagcccagaacacattgagtgactttgttggtgccacagctggagccttgtttcacttctaacattctggtaaag

SEQ ID NO: 31354 - DNA, 456 bp, Homo sapiens
  misc_feature (1)...(456): n = a,t,c or g
atntnnnnnnnnnnnnnnnnnnnnnnnnnnnnnnnnnnnnnnnnnnnnnnnnnnnnnnnnnnnnnnnnnnnnnnnnnnggcacgagaaccagcttgcccttccctgaaaatgaggggcatggaggaagtttccttcctccaaggacaggtattcttaatctttaggagatcttagagtgaccctcagaaatgaacatcacacaaaattgtgaactggtgcccacccaaatgctccctcccctgcccccatggactgcctggcccattgcctccccccagtggagtttggcctgcaaagaacgtgtttctctgaccttttcgacagaagagccagaaaatggatgcttggcttgctactattgtagaaacctgttctggggaaatacttctattttgatgatttcttctataacctttcagtctaaaccccttttcaatatcaggagtttttctgat

SEQ ID NO: 31355 - DNA, 481 bp, Homo sapiens
  misc_feature (1)...(481): n = a,t,c or g
gnnnnngnnnntnttgnnnttttganntnnggnaagacccntnnnnnnnnnnnnnnnnnnnnnnnnnnnnnnnnnnnnnnnnnnnnnnnnnnnnnnnnnnnnnnnnnggcacgaggctgnnnnnnnnnnnnnnnnnnnnnnnnnnnnnnnnnnnnnnnnnnnnnnnnaactggctttatttgctttccataggctcaaggtttatccattttgtagcatgtatgagtcattcctttttgtagccaattttttttgcagttggaagatgnnnnnnnnnnnnnnnnnnnnnnnnnnnnnnnnnnnnnnnnnnnnnnnnnnnnnnnnnnnnnnnnnnnnnnnnngctataagnnnnnnnnnnnnnnnnnnnnnnnnnnnnnnnnnnnggggatatannnnnnnnnnnnnnnnnnnnnnnnnnnnnnnnnnnnnnnnnnnnnnnnnnnnnnngctatgtttaaatttgaggaattgccagactgt

SEQ ID NO: 31356 - DNA, 456 bp, Homo sapiens
  misc_feature (1)...(456): n = a,t,c or g
atttgnanacccgtnnnnnnnnnnnnnnnnnnnnnnnnnnnnnnnnnnnnnnnnnnnnnnnnnnnnnnnnnnnnnnnnnggcacgagcttccatgaagaagagctttatccaaagccacatccttttgttctctttttagtaccaatatgtattttaattcatgttttataattcattactgtcatgtttttcttgaaattgttccacgcggggcaaagtgagctccttctggttcactcttaggtccatttaacatgactctgttaatctttgggcagttccttgatttctgggcaacatgggatgtcccagactcaccattttcatttcatagtccacannnnnnnnnnnnnnnnnnnnnnnnnnnnnnnnnnnnnnnnnnnnnnnnnnnnnnnnnnnnnnntgcaaataaatttccaagggagaagagttttctaagggaagataaagtattg

SEQ ID NO: 31357 - DNA, 459 bp, Homo sapiens
  misc_feature (1)...(459): n = a,t,c or g
ttgganacccgntnnnnnnnnnnnnnnnnnnnnnnnnnnnnnnnnnnnnnnnnnnnnnnnnnnnnnnnnnnnnnnnggcacgagaaaataaaaagtggaaacgtgcagtgtttgnnnnnnnnnnnnnnnnnnnnnnnnnnnnnnnnnnnnnnnnnnnnnnnnnnnnnnnnnnnnnnnnnnnnnnntatactgtactttctttatattagccagtcctctgctgacagacacttaggttgattgcatatctttgctgttctgaatactactgcaaaacctacaacagctgtgtgcgtggatcagggctctgtgcctggaaggcagggaaggaggtactgaatgtgtgtgtgtgggtctagctgtgtgcatggatctgggctgtgtgcatggatcagggctgtgtgcatggatgaaggcagggagggaaatattgaatgcatgtgcatggatcagggctgt

SEQ ID NO: 31358 - DNA, 462 bp, Homo sapiens
  misc_feature (1)...(462): n = a,t,c or g
anatttgannacccgttatgacatgattacgaatttaatacnnnnnnnnnnnnnnnnnnnnnnnnnnnnnnnnnnnnnnnnnggcacgagaactggatgaagtctgtagagttccagaatgcatgtcctattttaggggagcagcatctatctgactgcagtggactaatgccatgtgtgaacattttctgattttggtaaagagatgctagagattccaatatataagagaagtcacggaatttttaaacagtggcacacagacaaacacacaaatgcagccagccaaacaaaacatatctgcaagtcaggtttggcctaagcaaataatttagggtctataatgcagataaatccagaacacctcttactacaactaaaatctgaagaaaagtcttcctcctattctgcactgagtggaaaacactgattgctaacaactgtataagcagagttacattt

SEQ ID NO: 31359 - DNA, 456 bp, Homo sapiens
  misc_feature (1)...(456): n = a,t,c or g
nnnnnnnnnnnnnnnnnnnnnnnnnnnnnnnnnnnnnnnnnnnnnnnnnnnnnnnnnnnnnnnnnnnnnnnnggcacgagctccctacaaactaggatttagatctctgactccatgatctgactttttccatagccaagctcattctgacctcaatgaaagataggaacagttttacctctcccaatatcccatctaccctgtgaacgattagaaaaaaaaaatgattcctggcaccagtgatatctaaaagcaggtgttcctagaaggtaaagaaaggcatagcaacaggatcttgtagtatccttagagagatctggtgaagttcaggcccctcagcaagccagtgactgaactgggacttgaaccaggccaccagacccgcagtccagtgcttaactatcttttctcatgaatctgaaaacgcagatgccacagtttcctttgcattctctc

SEQ ID NO: 31360 - DNA, 470 bp, Homo sapiens
  misc_feature (1)...(470): n = a,t,c or g
gnnnnnnnnnnnnnnnnngnnngnntttganaccntnnnnnnnnnnnnnnnnnnnnnnnnnnnnnnnnnnnnnnnnnnnnnnnnnnnnnnnnnnnnnnnnnggcacgagaggctgatgaagagatgtatttgaccttgtctcctccttgtgatgcctgacttccacacttggaggtgtctttagaaatgcaagggcataagaatttaaagactattataggggtagatatttaagagcagtgacaggaaaatctgaagaccatttgtttaatgattgtactttaatttcagtaactttccggggtaattagactaattattcaagtactgagaagtttaaacattcacaagttttataataggaacgccaaaccttggtgaattttgcaaatgtaacaactttggcatagaaaatttaggatgaaagtagcctgccagattgaaacattggggattctctcttttttttt

SEQ ID NO: 31361 - DNA, 465 bp, Homo sapiens
  misc_feature (1)...(465): n = a,t,c or g
gnngnnnnnntnnnnngnngncttganaccttnnattganacattatgacnnnnnnnnnnnnnnnnnnnnnnnnnnnnnnnnnnnnnnnnnnnnnnnnnnnnnnnnnnggcacgagnnnnnnnnnnnnnnnnnnnnnnnnnnnnnnnnnnnnnnnnnnnnnnnnnnnnnnnnnnnnnncagcaagccagttaatttttaattttttttgtagagacggggtctctgtgttgcataggctggtctcaaactccannnnnnnnnnnnnnnnnnnnnnnnnnnnnnnnnnnnnnnnnnnnnnnnnnnnnnnnnnaggaattttctttacctgttatttttttgcttaagacttttattctgtgttttagattatgtgctttcatccaatgtttccgaattactcatttcttttgggttatactgtgattttttaacatcttagcaaatttctgtttttgagtatttgg

SEQ ID NO: 31362 - DNA, 451 bp, Homo sapiens
  misc_feature (1)...(451): n = a,t,c or g
gnnngntttggnnaccctntatgatctgaataccgnnnnnnnnnnnnnnnnnnnnnnnnnnnnnnnnnnnnnnnnnnnnnnnnggcacgaggaacccaaaagggtagtagagatgggcttcaaaagttctcacggaagaaactcctggtccctatattagacctgaattaagggctacattttatagtatggttaagaaagcacagtagcttatgtaggttttgctatttctcttgcagttatctatcattgcataacaaactaccttgaagcttaggggcttagaagaacaacagttcattttttctcataatgaattggatggctctgctttacatggtgtgggttagggcacttgacaaggttgggaggtccaaatagccttattcacgtggctgatanttggtggngctgactgctggttaggagtgtagctggggcttttggccca

SEQ ID NO: 31363 - DNA, 447 bp, Homo sapiens
  misc_feature (1)...(447): n = a,t,c or g
gnnngnntttganaccntttgatnnnnnnnnnnnnnnnnnnnnnnnnnnnnnnnnnnnnnnnnnnnnnnnnnnnnnnnnnnnggcacgagnnnnnnnnnnnnnnnnnnnnnnnnnnnnnnnnnnnnnnnnnnnnnnnnnnnnnnnnnnnnnnnnnnnnnnnnnnnnnnnnnnnnnnnnnnnnnnnnnnnnnnnnnnnnnnnnnnnnnnnnnnnnnnnnnnnnnnnnnnnnnnnnnnnnnnnnnnnnnnnnnnnnnnnnnnnnnnnnnnnnnnnnnnnnnnnnnnnnnnnnnnnnnnnnnnnnnnnnnnnnnnnnnnnctctttttaaagtgtcattttggtataaccaagtttttaaatcaaatatttaataacttccactgcctgctatccaagagcttgcaatgagttaataaaggggggaaaacatatatacaaaataatccga

SEQ ID NO: 31364 - DNA, 444 bp, Homo sapiens
  misc_feature (1)...(444): n = a,t,c or g
gnnngntttgtnacntttgatctgnatacagnnnnnnnnnnnnnnnnnnnnnnnnnnnnnnnnnnnnnnnnnnnnnnnnggcacgagattacattcttcataatgaagttaacaatgacaaaaacaaaccatgaaaactgttataagtaataattacaacacgatgacaggcaaatctttcctaaatgcttcaaatgcacagctgcatgtggcaaaaaatacctctctagtggcttcagtggcaaatgggcagaccgtagaaaaagatgaatctggaaagttcgtctttgtttttgttgttttatgtccacaatcattgtttttccctggcaaattcacttttcttcagagctacggaagaacacatagtctctattctcacagtacccaatattgttggactgggacccaaataatgagtctcatgcttttgtatattacctt

SEQ ID NO: 31365 - DNA, 421 bp, Homo sapiens
  misc_feature (1)...(421): n = a,t,c or g
ttganaccttttgattnnnnnnnnnnnnnnnnnnnnnnnnnnnnnnnnnnnnnnnnnnnnnnnnnnnnnnnnnnggcacgagcatagttgtttaagttcctggatcttccttgggtgattattccatttctggtgttttcttgtttttgttttagcaaagaggaaataggtaggggtgtgtgtgtgtgtgggtgtgtgggtgntgcctcngtttctttcaccanctnctatctggcatgtgatcatatactacaatctnnccccaatctgngtcttattgctactncccaatctccctccaacttgntatctctattntacctcactagatgctcnntagnacctganttgncnacangngnacactntncncannnatacnncnccactgcttccnatnatgnnctgaaccagcnaatcc

SEQ ID NO: 31366 - DNA, 441 bp, Homo sapiens
  misc_feature (1)...(441): n = a,t,c or g
gnnnnntttgnnaccnttnnnactnnnnnnnnnnnnnnnnnnnnnnnnnnnnnnnnnnnnnnnnnnnnnnnnnnnnnnnnnnggcacgagcggcacgagaattagaaaagaactttgtaatttttcagagttgcgtaaaactggaatgacctgccttctgaagccctgacttatgtcactgaaggtattaaagggcagactggatgactacttgccaacagtggctagagaggatcaaagcagcttgcagagtctagataaaaggtggagatggtggtagggatgagatggtacaaagtctgttgtctcaggtttgcagagcagtgatggaaaattagcagacttgggctactgtggccttgaagcagttatgaacagaagacaccagagcattcacttacattttcaaactccagactgtctgatatccttcttaatctg

SEQ ID NO: 31367 - DNA, 373 bp, Homo sapiens
  misc_feature (1)...(373): n = a,t,c or g
ttgnanaccgnttgacntgnataccnnnnnnnnnnnnnnnnnnnnnnnnnnnnnnnnnnnnnnnnnnnnnnnnnnnnnnnnnnnnnnnnnnnggcacgagtgagaaccaaagatgtggcagatgttgtccctgcatcccagagtctgaatcttaagcctaattgtttttaaacatccaaattcctgcatgcgttttgccattctaatatggctttgcagggggcagaagggaggttgtgaatagaaggaaggtaaggatttttttttaatagaagtttataaaatctcttatttcacaccataaggaaaacataggtaaaactctgttatggtaaaaatcttggtcatttggacaccaatttttttttttttt

SEQ ID NO: 31368 - DNA, 442 bp, Homo sapiens
  misc_feature (1)...(442): n = a,t,c or g
gnnngntttgtnaccttnnntctctgannnnnnnnnnnnnnnnnnnnnnnnnnnnnnnnnnnnnnnnnnnnnnnnnnnnnnggcacgagaccagacagttctccctgggttcagtgaaggcagccatggagtcatcgggacattgaccttatctgcagctctcaaggaatggaaaaccatcagggaccatctgagatatggtcaaagcctcagggatgacgcacccttcctggtgttgttagcatctgtttcattacaaacagcataaactgtagcatggctgtgtttgcctgtccgtaaccccacccagacttcactggcaggcttaacccacaagaagttttagggaaggaggtactgtctacaaggttttacattgtgctgagtgtaaatgtgaacttttaaaattannnnnnnnnnnnnnnnnnnnnnnnnnnnnnnn

SEQ ID NO: 31369 - DNA, 447 bp, Homo sapiens
  misc_feature (1)...(447): n = a,t,c or g
tttgnanacccgttatgacttgnnnaacnnnnnnnnnnnnnnnnnnnnnnnnnnnnnnnnnnnnnnnnnnnnnnnnnnnnnnnnnnnnnnnnnnnnnggcacgaggccttctatgtatactgaggagctgactttattcggaggacagtgagaaaatagtaagcattctaaggccaggttcgtgcttttggaaagagctcactctagctgctatgataaacaagaagaccagtgaggaagttttgaaactctcctctgcaagagaatggtggccagccaggcgtggtggttgtcgaatctgtggcacctgtgggaagtgggctcagcccagggactgcctttggatcccccagcattggcaccatacctaccctgggccctaaggtggccatgcttctctggatttgcttccctagcaggggctctagtgcttgcccactccctgcc

SEQ ID NO: 31370 - DNA, 439 bp, Homo sapiens
  misc_feature (1)...(439): n = a,t,c or g
gnngntttganacccttnnncttgnatacaatttaatacgactcnnnnnnnnnnnnnnnnnnnnnnnnnnnnnnnnnnggcacgagaactggaaggaattttgaacagaaatctaatgaaacttttagaaactaaaatatatgttttagaattcttaagaatgcagcccagaaattcaaagaaatagaaaatatgaagttaaaggcataaaggagagagtgaaaaattctaacatatacccttttattttaaaaaggaaataatagaaagaggtaataattgaataaataaataatacttctgaattttctagaaattaaaaaattaatcctcaaatcttggatagacagcaaataaagaaatagaataaacacaataataactgcctagacacatcataataaaaatgcggatcattaaagacaaagagcccttaaga

SEQ ID NO: 31371 - DNA, 470 bp, Homo sapiens
  misc_feature (1)...(470): n = a,t,c or g
gnnnnnnnnnnntnnnnnnngnnngntntganaccgttatgacttggannnnnnnnnnnnnnnnnnnnnnnnnnnnnnnnnnnnnnnnnnnnnnnnnnnnnnnnnnnnnnnnnnnnnnnnggcacgagccaagactcagtactcagcatgttgtgctcctgagggaggatgaggttggagatccaggaaccaaagacctgggccacccccagcatggcagtcccatccaggagacacagagtgaggtggtcaccctggtcagtccactcccagggagtgacatggcagctttaccggcttggagagctacttctgggctgacactctggccccatacagcagaaggcagggatctgctgggagctgagaacagagccttgactggtgggcaacaagcagaggatcccaccttggcctcaggggcttatcagtggcctggctctgttgagaagctgcaagggtcagtatgg

SEQ ID NO: 31372 - DNA, 436 bp, Homo sapiens
  misc_feature (1)...(436): n = a,t,c or g
acccgntatgacttgannaaccgtnnnnnnnnnnnnnnnnnnnnnnnnnnnnnnnnnnnnnnnnnnnnnnnnnnnnnnnnnnnnnnnnnggcacgagtttaacattgttattttagctttattaaaaaatcaccctcagttgaacaccctgtacattcttctttgatcccattcctatcttaaaagcttcctaccatccttcccttgctacagaaatgtatctgctatcttgaacttggtggttatatgttccacatgcattgttcagttaatcttctcaaaaacctgaggcaaattctgattatattttataggtaaagaaaccgaggtttcagtttcttgcctgaggtcaatagacacttggaatcagaacgcgaaccctcaggctctctgtcagcaaaacttatgctctaaccacttttctatgctgccctaa

SEQ ID NO: 31373 - DNA, 424 bp, Homo sapiens
  misc_feature (1)...(424): n = a,t,c or g
accttnnnnttgatncaattaatacgactcnnnnnnnnnnnnnnnnnnnnnnnnnnnnnnnnnnggcacgagacatatttcaagactctgtctccaaaaataaataaataaataaatgcagaattactacaaataaaccagttgttgatgttatggtgaaggaaagtgtttaattcagagaagttatattgatcaagtatattatggcaacatcagtgctactgcattaacatcaatcaatttagcaaggcatatctgcatcattaatcatttagtaaattataagactaaaccatggttgcaggcttaaagatcttctgctatctcaacactatcactagtaaacagaggccattatcagtaggactgttgactttaaaaaatttccctctgttgtttcatatttttgattttcatgtgataa

SEQ ID NO: 31374 - DNA, 451 bp, Homo sapiens
  misc_feature (1)...(451): n = a,t,c or g
tttggannnnnnnnnnnnnnnnnnnnnnnnnnnnnnnnnnnnnnnnnnnnnnnnnnnnnnnnnnnnnnnnnnnnnnnnggcacgaggctcatcaagcttcataggatttgaatgaaataataaagtatatctgtatttgataaagacattatgagaaggcagaactgacattgtctgctgcataaacctgtctattttggtctctgttccaaagttattgtttccccaaatttttgtttattaccctgtcatgtaaagatagaagaatgatgaaacttgcaaatcaaagtatataataattatgagagaatggttttcttannnnnnnnnnnnnnnnnnnnnnnnnnnnnnnnnnnnnnnnnnnnnnnnnnnnnnnnnnnnnnnnnnnnnnnnnnnnnnnnnnnnnnnnnnnnnnnnnnnnnnnnnnnnnnnnnnnnnnnnnnnnnnnnnc

SEQ ID NO: 31375 - DNA, 443 bp, Homo sapiens
  misc_feature (1)...(443): n = a,t,c or g
nnnnnnnnnnnnnnnnnnnnnnnnnnnnnnnnnnnnnnnnnnnnnnnnnnnnnnnnnnnnnnnnnnnnnnnnnggcacgagcctgctttctggttcatagatggcaccttctagggtgttcttaatcacggaagggatgaggggagtttttagggtagacccgatgcctagtgaaggcctgctccttcatagatggccatcttctcactgtaaccccatatggtggaagaaacaaagggtctctctctggcttcttttatatgggcactaatcttatacatgagggctctgnnnnnnnnnnnnnnnnnnnnnnnnnnnnnnnnnagatttaatatttcaacatggggattttgaggggacataaacaatcagacagtaacagacatctgctaaaggtaatctttaaaaataaaaggacagctgggtgcggtggctcacgcctg

SEQ ID NO: 31376 - DNA, 453 bp, Homo sapiens
  misc_feature (1)...(453): n = a,t,c or g
ttgnnaaccgtttnnnnnnnnnnnnnnnnnnnnnnnnnnnnnnnnnnnnnnnnnnnnnnnnnnnnnnnnnnnnnnnggcacgagtttgataactcagtttccctattttttcaatgatgagaacaatcacagcctaataccagacaggtgtgctgaggctggaactagaatgggaattgtcccagaagaaggctctcacaagaatccaagaaaggatgaaaggagaaggagttggaggaggaggggaagaagaggagagaatgtttcaaatcaatcaaagtcatctgtgtgtaaccattgcaagaattcaatcgcactgagaaaaaattattaacacagaaaactatcttttcttggactgatttccagttgataactctgggccagcatctttcatggaacacttttcctcttcagaaaccaccataaatgtggctaagggcatttgtatag

SEQ ID NO: 31377 - DNA, 449 bp, Homo sapiens
  misc_feature (1)...(449): n = a,t,c or g
ttgannnnnnnnnnnnnnnnnnnnnnnnnnnnnnnnnnnnnnnnnnnnnnnnnnnnnnnnnnnnnnnnnnnnnnnnggcacgaggggggtttttcaatgggatttcagctttctaatggaaaaaacctgttgtcattggagtgaccatgactccacatccccatctgccctcatctcagcacccttcccaggcctgaaggctgtttcttccttcttgaaatagctcccctgggattctgtgatgctggtctctcaaggtttccctcctcttttctgcctctgcctcactccttcggccccacttttcaccctccactttattctgggggacctcactcacctccaaagctctcagatctcccatgcactgacgaccccagcatagccctcttctcgcggttcantgccattttccagttgcccgcttgacgtctccccttgggtctccc

SEQ ID NO: 31378 - DNA, 445 bp, Homo sapiens
  misc_feature (1)...(445): n = a,t,c or g
anaaccgnttnnnnnnnnnnnnnnnnnnnnnnnnnnnnnnnnnnnnnnnnnnnnnnnnnnnnnnnnnnnnnnnggcacgaggttcaataaacttaactttaactgaacaatggccctgtagccagcacctgtaagaaacagagcagtaccagcgctctaaaagcacctccttgtcactnnnnnnnnnnnnnnnnnnnnnnnnnnnnnnnnnnnnnnnnnnnnnnnnnnnnnnnnnnnnnnnnnnnnnnnnnnnnnnnnnnnnnnnnnnnnnnnnnnnnnnnnnnnnnnnnnnnnnnnnnnnnnnncttacatttgtgagattcctctgtattgtgctgattgtggatcttttcattctcattgcagaataatgttctattgtgggacttattacaatttgttcatcctattgttgatgggcacttgagaactttccattttggcg

SEQ ID NO: 31379 - DNA, 439 bp, Homo sapiens
  misc_feature (1)...(439): n = a,t,c or g
cgnttnnnnnnnnnnnnnnnnnnnnnnnnnnnnnnnnnnnnnnnnnnnnnnnnnnnnnnnnnnnnnnnggcacgagcggagagcagattagtaacctcaactgaaagttttgatctttatcaatttatcagttgctcctcttgggctttcacaggttttgattccataaagttctgtgtctatttgagtgcatacttcatttctaagcagttattcccatggactctcagggaatttaagagattatctctactgaaatctccctacagatttcctgccaagcagtcaacaagtcttgatcatactccttccttcaagggtgactagctccaaatgcccacaaagtccatttgcatcaaatattgtgaaagttcttcctagaccaccccaaaatngcttttntctacaagccttatgatgttgccaatatgaactgcca

SEQ ID NO: 31380 - DNA, 462 bp, Homo sapiens
  misc_feature (1)...(462): n = a,t,c or g
tnnnnnnnnnnnntttgganacccntnnnnnnnnnnnnnnnnnnnnnnnnnnnnnnnnnnnnnnnnnnnnnnnnnnnnnnnnnnnnnnnnggcacgagtttttttttttcaggagatagttcatacttttttatcaaattttcaaattgcttttaaacccacagaaagttaaggggcccccactggagtacatcctacttaagccagcaggaatgccagcccttggtaggcttcctcagtaggcttccaggacagcctttccacaaaccagctcttgccccagcaccaataatgcccctcattctgtcccaggttatatccaggtagcttttctattgctgtccccacgtccccaccccttgtctgctgctacctcaaatagagccagaaagtgacctagtcgttcccacgcacaactntttgctgtagcagcaaaactttccttcccattatnttacaggg

SEQ ID NO: 31381 - DNA, 455 bp, Homo sapiens
  misc_feature (1)...(455): n = a,t,c or g
tnttttgnnnnccctatggaaacccgnnnnnnnnnnnnnnnnnnnnnnnnnnnnnnnnnnnnnnnnnnnnnnnnnnnnnnnnnnnnnnnnnnggcacgagcggcggccgcgtcgacgtcgacccagactggagcgacgtttaaagaaggggcagaatcgctggggagtgcggcttcttcttgttgggggactcccagccttccgcgcgtccggaggaggagaagcggcggcgccgggaagcagtgtctgttgacttcacttggcactgtttaacattccacctctggaaattgtaaagatggagagatgaggggaagggacaaggggatgaagaaagaggaaagggcatggagagtagaaaactgatttctgctacagacattcagtactctggcagtctgctgaactccttgaatgagcaacgtggccatggactcttctgtgatgttaccgtt

SEQ ID NO: 31382 - DNA, 443 bp, Homo sapiens
  misc_feature (1)...(443): n = a,t,c or g
tggnnaccncttgacnnnnnnnnnnnnnnnnnnnnnnnnnnnnnnnnnnnnnnnnnnnnnnnnnnnnnnnnnnggcacgaggagaaaatagcaagtgaaaaggatgtgtacacagcagcatgaatggggtgctattcttagctgggtctctaacctagagaacaggaaacaagatgcttctgaatgtggactatggctgccctatgctagagccaagaggcttcgagtcatagggaaactcatgacagttgctagtgtccttcagaccttcctcttttgtagaaagtttcattctttgtgtgtctcagactgagatggaggaggggtgacgtctgttttctaagggatctagagagaaagggcagatgtagtcttgagcagtgggcttctcgctgtgctgcttcttccacggagaccatctggatctactcggttgatggagc

SEQ ID NO: 31383 - DNA, 445 bp, Homo sapiens
  misc_feature (1)...(445): n = a,t,c or g
tgganancnntttgacnnnnnnnnnnnnnnnnnnnnnnnnnnnnnnnnnnnnnnnnnnnnnnnnnnnnnnnnnnggcacgaggcacagcttgctcaatagttgattttaccatttgtggatgatttttcacctattaaatttgagaatttatccttacacaggttagctgtgtgagatattaaagaaaaacggcacattcttccatacctacaccaattctgcttttagaacttgtgtcccctaactaaatttgataacattgtcaatttttgtttttggaaactgttgccaggcaggatcaatgttaaacaagtttgagcatgcctcttatttggtttggaaatccagacatctccttttccagatattcttttttaagtgccagaacctgtccacttaaccttatctccttgtgaaccttcttgnttcccagaacagagtatt

SEQ ID NO: 31384 - DNA, 454 bp, Homo sapiens
  misc_feature (1)...(454): n = a,t,c or g
ggnnnnnnnntnctttgtnacaagaagcctctttgggaaataccnnnnnnnnnnnnnnnnnnnnnnnnnnnnnnnnnnnnnnnnnnnnggcacgagagaattcttgtccaaactgtatccctgataaacatcactttttctctgagaggtggtatagnnnnnnnnnnnnnnnnnnnnnnnnnnnnnnnnnnnnnnnnnnnnnnnnnnnnnnnnnnnnnnnnnnnnnnnnnnnnnnnttnnnnnnnnnnnnnnnnnnnnnnnnnnnnnnnnnnnnnnnnnnnnnnnnnnnnnnnnnnnnnnnnnnnnnnnnnnnnnnnnnnnnnnnnnnnnnnnnnnnnnnnnnnnnnnnnnnnnnnnnnnnnnnnnnnnnnnnnnnnnnnnnnnnnnnnnnnnnnnnnnnnnnnnnnnnnnnnnnnnnnnnnnnnnnnnnnnnnnnnnnnnnnnnnntcaggat

SEQ ID NO: 31385 - DNA, 443 bp, Homo sapiens
  misc_feature (1)...(443): n = a,t,c or g
ctttganacctttnnnnnnnnnnnnnnnnnnnnnnnnnnnnnnnnnnnnnnnnnnnnnnnnnnnnnnnnnnnnnnnnggcacgagcggcacgagaggaaaaaagcgtgttgtactcttcagtcctcgagatgcccagtatttatatttaaaaggtactaaatcagaagtactgaatatagataacccagacttggctaaatatccacttttttccaaggctagaagatatgaatgttcccttgaagctggtgatgtattattcattcctgctttatggttccataatgtaatttctgaagagtttggagtgggagtgaatatcttttggaagcaccttccatctgaatgctatgataaaacagatacctatggaaacaaagatcctacagcagcatcaagagctgcacaaattctggacagagccttgaaaacactggccgag

SEQ ID NO: 31386 - DNA, 442 bp, Homo sapiens
  misc_feature (1)...(442): n = a,t,c or g
tttgananccgtnnnnnnnnnnnnnnnnnnnnnnnnnnnnnnnnnnnnnnnnnnnnnnnnnnnnnnnnnnnnnnnnnggcacgaggggattataggcatgcaccaccgctcccagccagcagagtaaactttcttgaatgaattttcttactatttaatttatttaattattttattttattttatgatacatgcnnnnnnnnnnnnnnnnnnnnnnnnnnnnnnnnnnnnnnnnnnnnnnnnnnnnnnnnnnnnnnnnnnnnnnnnnnnnnnnnnnnnnnnnnnnnnnnnnnnnnnnnnnnnnnnnnnnnnnnnnnnnnnnttgatttatttctgctggcccatttctctgcctcacaatggtagagaaatgcctgagtcacagataggctaggtgaccagggaagcttggaagaaaccccacaggccacccaagctccca

SEQ ID NO: 31387 - DNA, 441 bp, Homo sapiens
  misc_feature (1)...(441): n = a,t,c or g
ancctttgannnnnnnnnnnnnnnnnnnnnnnnnnnnnnnnnnnnnnnnnnnnnnnnnnnnnnnnnnnnnnnnnnnnnnnnggcacgagcagcattcagcagtatatttataaacaggaacctgtacagaagtgccctggaagaaggcctgctctaaattatccagtgtatggagaaacgacacaggttaggagacgtcgctttgaacgtgctataggaccttctcaaacacacaccatcagaattcaatattcacctgccagactggcttatcaagacaaaggtgtccttcataatgaagttaaagtgagtatactgtggagaggacttccaaatgtggttacctcagctatatcactgcccaacatcagaaaacctgacggctatgattactatgccttttctaaagatcaatactataacattgatgtgcctagtaga

SEQ ID NO: 31388 - DNA, 427 bp, Homo sapiens
  misc_feature (1)...(427): n = a,t,c or g
nnnnnnnnnnnnnnnnnnnnnnnnnnnnnnnnnnnnnnnnnnnnnnnnnnnnnnnnnnnnnnnnnnnnnnnnggcacgagcccttgatcnnnnnnnnnnnnnnnnnnnnnnnnnnnnnnnnnnnnnnnnnnnnnnnnnnnnnnnnnnnnnnnnnnnnnnnnnnnnnnnnnnnnnnnnnnnnnnnnnnnnnnnnnnnnnnnnnnnnnnnnnnnnnnnnnnnnnnnnnnnnnnnnnnnnnnnnnnnnnnnnnnnntggaggctgagacaggagaatccttttgtaatgcctaaccttgtttttttactaaccctatttttaaattttccctttttgtctccttaattacctagccttgtttcccatatgagtagactctcccttagctgggaaagcctgacgaacgccatctggccccttgatttacaa

SEQ ID NO: 31389 - DNA, 452 bp, Homo sapiens
  misc_feature (1)...(452): n = a,t,c or g
tnnnnttnnnncctttganaccgtnnnnnnnnnnnnnnnnnnnnnnnnnnnnnnnnnnnnnnnnnnnnnnnnnnnnnnnnnnnnnnnnnggcacgagtttacagttactgaacagaacatgaaataacacatctggcaaagttaaattatacgaattaatgttacttttaaaaaactttaaatgctgcactataatttggccatttgtccagttatagctatgttttgctcaccgtttaaaacttttataaacaattcaaaatgtttcttttactgtaggtttgtactgcaattaagaaaattacaaattgcaatatctggaatggaagtatattaatggctttcattctgttttccagttggatgtgtgttagccatttgatgacctcttttattcataattaacagatttcagactggtgtacagggtaactgtataacagttagtttta

SEQ ID NO: 31390 - DNA, 437 bp, Homo sapiens
  misc_feature (1)...(437): n = a,t,c or g
nccctttgannnnnnnnnnnnnnnnnnnnnnnnnnnnnnnnnnnnnnnnnnnnnnnnnnnnnnnnnnnnnnnnnnnnnnnnggcacgagnnnnnnnnnnnnnnnnnnnnnnnnnnnnnnnnnnnnnnnnnnnnnnnnnnnnnnnnnnnnnnnnnnnnnnnnnnnnnnnnnnnnnnnnnnnnnnnnnnnnnnnnnnnnnnnnnnnnnnnnnnnnnnnnnnnnnnnnnnnnnnnnnnnnnnnnnnnnnnnnnacaccggttttgtggccaccccagggttaatgcgacacatgctggcttttcattttaactgtcatgagggaaacctttcaaaatgtattagactctgagacacttgaaactgccttcttcctaggatcagcagagcatttgtttgtttgtttgtttttgagatggagcagagcgttttttaaagcta

SEQ ID NO: 31391 - DNA, 454 bp, Homo sapiens
  misc_feature (1)...(454): n = a,t,c or g
tnnnntnnnnnnctttgnanaccgtnnnnnnnnnnnnnnnnnnnnnnnnnnnnnnnnnnnnnnnnnnnnnnnnnnnnnnnnnnnnnnnnnggcacgagcagaaaaacccgaatactttctatgtgtatctagatttctaccttagcagatgataagggccagatcacaagtgtcttttaattatttaaaatccatccctgatttcacaagtgtttaaacatgagaaaatggagacctgagaaatgtgtggtgtttgttaggtaaagagcaggaggaaaaatggattggttggaggagaggatatattcagtatatttggtagcaggagagagaaagagagaaggcatgctggagaaccaaagaagttcagtgtaactgcagttcatagcgaaggggtggaaagctatgggaaatagaagagagcacttaactctgtggcgtggagtcatgtcag

SEQ ID NO: 31392 - DNA, 444 bp, Homo sapiens
  misc_feature (1)...(444): n = a,t,c or g
ttgganncccttggnnnnnnnnnnnnnnnnnnnnnnnnnnnnnnnnnnnnnnnnnnnnnnnnnnnnnnnnnnnnnnnnnnnnnnnnnggcacgagagactggaattggagctccaatctcttgctaaatccaatgccacacttcctctccttatcccccaaggtactggcgccaactccactaagcattcagttttccagcatcacctgattcttggaagataagtgggtagacatgcatgggcctccctgagttagatactctggcatgtttcacagatggtattccagccagttggactgtgccttttagccagaaaggttatgaaatgcaccaaataggatcacaggatttgttgtcaaggccagcccctgtttattgagtgtctacaatggcctggcacttgtggtagctgcagagagaaatgcagtggcggaggggatg

SEQ ID NO: 31393 - DNA, 437 bp, Homo sapiens
  misc_feature (1)...(437): n = a,t,c or g
acccttggannaccgnnnnnnnnnnnnnnnnnnnnnnnnnnnnnnnnnnnnnnnnnnnnnnnnnnnnnnnnnnnnnnnnnnggcacgaggtcagaattgaacaaagattctaggtgcagcacaagcagaaggtgtttattccctttttgctctacaaggggtgtctactttgagtcttacagaagccaaaacagtgtgaatataacctaaattcatctgaagacttatactgagaagtatattggtatcattggcttattgagaatctacagtagacgtttgttgctttttagctgtccaggatctattctccttcctgagaacaccccagtttctatgaggaaagcacagggctgttcccactagggaagcgaaccagggccccctccacctcctttctctttgggtgtggaactttgagtttctgcagcctgggg

SEQ ID NO: 31394 - DNA, 452 bp, Homo sapiens
  misc_feature (1)...(452): n = a,t,c or g
tnnnntnnnnnctttganaccgtnnnnnnnnnnnnnnnnnnnnnnnnnnnnnnnnnnnnnnnnnnnnnnnnnnnnnnnnnnnnnnnnnggcacgagtgcagagttgtttatggccctctacgacccagaccagtccacttttatcagtgagaactatctaattcgttggggcagtaacgggatgcccaaggaaatagagaagctcaataacctccaagcagtgtttacagaccttagcagcatggacctcatccggccccgcgtcagccttgtgtgccagattgtccgcgtgggccatatggagctgaaggaaggcaagaagcacacctgtggactccgaagaccttttggagtggcagtgatggatattactgatatcatacatgggaaggtggatgatgaagaaaagcagcattttattccctttcagcaaattgcgatggaaacctaca

SEQ ID NO: 31395 - DNA, 441 bp, Homo sapiens
  misc_feature (1)...(441): n = a,t,c or g
nnttnnnnnnnnnnnnnnnnnnnnnnnnnnnnnnnnnnnnnnnnnnnnnnnnnnnnnnnnnnnnnnnnnnnnnnnnnnggcacgaggcttcaataccnnnnnnnnnnnnnnnnnnnnnnnnnnnnnnnnnnnnnnnnnnnnnnnnnnnnnnnnnnnnnnnnnnnnnnnnnnnnnnnnnnnnnnnnnnnnnnnnnnnnnnnnnnnnnnnnnnnnnnnnnnnnnnnnnnnnnnnnnnnnnnnnnnnnnnnnnnnnnnnnnnnnnnnnnnnnnnnnnnnnnnnnnnnnnnnnnnnnnnnnnnnnnnnnnnnnnnnnnnnnnnnnnnnnnnnnnnnnnnnnnnnnnnnnnnnnnnnnnnnnnnnnnnncattagatgatttttaaggtgcatagcagaatctgagatattttctaaatatgaatctgtatatattcaggacagct

SEQ ID NO: 31396 - DNA, 457 bp, Homo sapiens
  misc_feature (1)...(457): n = a,t,c or g
gnnnnngnnnnntnnntttganacctntganaccgttnnnnnnnnnnnnnnnnnnnnnnnnnnnnnnnnnnnnnnnnnnnnnnnnnnnnnnnnnnnnnnnggcacgagnnnnnnnnnnnnnnnnnnnnnnnnnnnnnnnnnnnnnnnnnnnnnnnnnnnnnnnnnnnnnnnnnnnnnnnnnnnnnnnnnnnnnnnnnnnnnnnnnnnnnnnnnnnnnnnnnnnnnnnnnnnnnnnnnnnnnnnnnnnnnnnnnnnnnnnnnnnnnnnnnnnnnnnnnnnnnnnnnnnnnnnnnnnnnnnnnnnnnnnnnnnnnnnnnnnnnnnnnnnnnnnnnnnnnnnnnnnnnnnnnnnnnnnnnnnnnnnnnnnnnnnnnnnnnnnnnnnnnnnnnnnnnnnnnnnnnnnnnctgcattctctctatacaatctatgtgccttcatttgctcaaggtgctagaa

SEQ ID NO: 31397 - DNA, 461 bp, Homo sapiens
  misc_feature (1)...(461): n = a,t,c or g
gnnnnngnnnnnntnntttgannnccttgnananccgnnnnnnnnnnnnnnnnnnnnnnnnnnnnnnnnnnnnnnnnnnnnnnnnnnnnnnnnnnnnnnnnnnggcacgagtgaacattgaaaatataacaatgaacaaggacccttggggagcnnnnnnnnnnnnnnnnnnnnnnnnnnnnnnnnnnnnnnnnnnnnnnnnnnnnnnnnnnnnnnnnnnnnnnnnnnnnnnnnnnnnnnnnnnnnnnnnnnnnnnnnnnnnnnnnnnnnnnnnnnnnnnnnnnnnnnnnnnnnnnnnnnnnnnnnnnnnnnnnnnnnnnnnnnnnnnnnnnnnnnnnnnnnnnnnnnnnnnnnnnnnnnnnnnnnnnnnnnnnnnnnnnnnnnnnnnnnnnnnnnnnnnnnnnnnnnnnnnnnnnnnnnnnnnnnnnnnnnnnnnnnnnnnnnnnnnngaagcactttaa

SEQ ID NO: 31398 - DNA, 456 bp, Homo sapiens
  misc_feature (1)...(456): n = a,t,c or g
ttgnagnaccgnnnnnnnnnnnnnnnnnnnnnnnnnnnnnnnnnnnnnnnnnnnnnnnnnnnnnnnnnnnnnnnnnnggcacgaggacattccttatgagaattgactaaggatgacatggagctgatctacatatagagagatagatacacacacatatatatacacacacatacaaacatatatgtctcaatttttttcaagaaagtctatacctatttacatcctcgccagcagagcatgaatgttaatttcttcgcactctcagtaacactggtcgttacaatcctttggatattttgatttatttgattatgagtagagttgaaaattttttgtatgtttacaagacaacagggtaggcagttttgcagcctactggacttgggtcaggaaggcaggatttagtggaccttgacatcgggggtgtcagctccaatggactgcacttggcag

SEQ ID NO: 31399 - DNA, 440 bp, Homo sapiens
  misc_feature (1)...(440): n = a,t,c or g
accgnttgacnnnnnnnnnnnnnnnnnnnnnnnnnnnnnnnnnnnnnnnnnnnnnnnnnnnnnnnnnnggcacgagggaagttgcagctccacaggatatcccatggtactgatgagagtgtaaagtggtgtagtcactttggaagagagtttggcatgatctcctcataggtatatattcaaagactcttgcatgtgtacagtaggagacatgtagaagaatgttcgtagaacagttcacctcaccagaatcctgggaacaacccagatgccaatgcaacaagaaagtagatgataaaatgtggtaatagtcacagtgctatgttaaaaatagtgacccacaaatcagtatgaatgatcatagcagcacgaggtaaaaaagtaaatccaaaaagatgataatgtaggatattatttttatgttaaaaacaaaattttaa

SEQ ID NO: 31400 - DNA, 440 bp, Homo sapiens
  misc_feature (1)...(440): n = a,t,c or g
tttgnanaccngntatgacntgattacnnnnnnnnnnnnnnnnnnnnnnnnnnnnnnnnnnnnnnnnnnnnnnnnnnnnnnnnnnnnnnnnnnnnnggcacgagggtgtttgacaagtgttccgtacagagaagtggcaattgagctaaccttgaagaacgacttagtgttagacaggcagaagagatatcagggagtaggaataagaatgggaaaatagcagctaaactgcaaaagagcttagaacaggaaggcaggagataagaccagataggtaagtctggagaccttgaaagaaaaggagtttaggttttacctatacaagatgaggaaccacaaaaccattttaccaagattattccacaattaaaacttatattttagagaaatcatttcttgtgccagtgaatggcagagaaaaacagtaaaaaaaaaaaaaa

SEQ ID NO: 31401 - DNA, 433 bp, Homo sapiens
  misc_feature (1)...(433): n = a,t,c or g
tttganacccnntatgacttgaatnacnnnnnnnnnnnnnnnnnnnnnnnnnnnnnnnnnnnnnnnnnnnnnnnnnnggcacgagcacaattaacctgcagtttaagatccagcagctggccatttctggactcaaggtgaatcgtctggatatgtatggagaaaagtacaaaccctttaagggcataaaatacatgaccaaagctgggaagttccaagttcgaacctgaagggagcatttgctgagggaatagtcttgcacattttttcatttcttacttgtctaaaagtaaaaaaaaatatcagcctgtctcctaagtcagtcccctcctggacccacccgctcccttttttccttagccttcagagccatggaactaatcaagggaggaaaaggtcaccagggagaactggacagaactgaaacacagcg

SEQ ID NO: 31402 - DNA, 436 bp, Homo sapiens
  misc_feature (1)...(436): n = a,t,c or g
acctttgtgaaccgtnnnnnnnnnnnnnnnnnnnnnnnnnnnnnnnnnnnnnnnnnnnnnnnnnnnnnnnnnnnnnnnnnggcacgagcannnnnnnnnnnnnnnnnnnnnnnnnnnnnnnnnnnnnnnnnnnnnnnnnnnnnnnnnnnnnnnnnnnnnnnnnnnnnnnnnnnnnnnnnnnnnnnnnnnnnnnnngtctcttgcacgtnnnnnnnnnnnnnnnnnnnnnnnnnnnnnnnnnnnnnnnnnnnnnnnnnnnnnnnnnnnnnnnnnnnnnnnnnnnnnnnnnnnnnnnnnnnnnnnnnnnnnnnnnnnnnnnnnnnnnnnnnnnnnnnnnnnnnnnnnnnnnnnnnnnnnnnnnnnnnnnnnnnnnnnnnnnnnnnncaactggtagggatctgtgggccaagtgttgaggaccctgttctaagggata

SEQ ID NO: 31403 - DNA, 429 bp, Homo sapiens
  misc_feature (1)...(429): n = a,t,c or g
tttggaaatccgtnnnnnnnnnnnnnnnnnnnnnnnnnnnnnnnnnnnnnnnnnnnnnnnnnnnnnnnnnnnnnnnnnggcacgaggacagactctccaagccggagaagaagtgacccgtggaagtcagggtcggcggccctaaagagccccagtgtgggtacctcatgctgtagttccaaggcctggtgagtctccttaaggtgaatcacctttggtccttccttctgacaccaagtattgatatggctatgatgactggaagaacactagtgtccttaatcttgcaccgaattagataaaacgacttggacatacgtggagtggttttaaggagaggagagtttaataagcaagaaagaaggaagaagaaaacagctcccttgtagagacagagggaggagggatttaaacanagagaaaacccct

SEQ ID NO: 31404 - DNA, 448 bp, Homo sapiens
  misc_feature (1)...(448): n = a,t,c or g
gnnnnnnnntnnnnnntntgaaanctttganagttccgacnnnnnnnnnnnnnnnnnnnnnnnnnnnnnnnnnnnnnnnnnnnnnnnnnnnnnnnnnnggcacgagaccaacnnnnnnnnnnnnnnnnnnnnnnnnnnnnnnnnnnnnnnnnnnnnnnnnnnnnnnnnnnnnnnnnnnnnnnnnnnnnnnnnnnnnnnnnnnnnnnnnnnnnnnnnnnnnnnnnnnnnnnnnnnnnnnnnnnnnnnnnnnnnnnnnnnnnnnnnnnnnnnnnnnnnnnnnnnnnnnnnnnnnnnnnnnnnnnnnnnnnnnnnaaagaaaaaaagaaagactctgtttgcaaagatgtgggagaaatgcagggaaaccataaggggtagttcagtgtcttgaggcaaaatgtaccttgttacccgcctcccccacaccgcccccaagccataaaaaggt

SEQ ID NO: 31405 - DNA, 424 bp, Homo sapiens
  misc_feature (1)...(424): n = a,t,c or g
ttgganaccngntttgannnnnnnnnnnnnnnnnnnnnnnnnnnnnnnnnnnnnnnnnnnnnnnnnnnnnnnnnnnnggcacgagcttgnnnnnnnnnnnnnnnnnnnnnnnnnnnnnnnnnnnnnnnnnnnnnnnnnnnnnnnnnnnnnnnnnnnnnnnnnnnnnnnncctgggtacatttttaaatagtatcgaagacatttattaggggatggtgtgcttctagtccacaaggtttcaaccttgtgcaagttgttcaatgccttcctaactttgctattccttgtgggaaatattcaagacctgtgtgcttgttatccctttatttggggtttttaataggaattcctgtctcctttattaatagggtaattgtggctgcaaaaattagaaagaagncctgaganttcntcttnctntggt

SEQ ID NO: 31406 - DNA, 428 bp, Homo sapiens
  misc_feature (1)...(428): n = a,t,c or g
anacnnnnnnnnnnnnnnnnnnnnnnnnnnnnnnnnnnnnnnnnnnnnnnnnnnnnnnnnnnnnnnnnnnnnnggcacgagcccataccttctggttgcttcagacctgacaccgtccctcagtgatacgtacagccaaaaaggaccaactggcttctgtgcactagcctgtgattaacttgcttagtatggttctcagatcttgacagtatatttgaaactgtaaatatgtttgtgccttaaaaggagagaagaaagtgtagatagttaaaagactgcagctgctgaagttctgagccgggcaagtcgagagggctgttggacagctgcttgtgggcccagagtaatcaggcagccttcataggcggtcatgtgtgcatgtgaagcacatgccgtatattgtgccgtctctnnttnttcctnacccc

SEQ ID NO: 31407 - DNA, 425 bp, Homo sapiens
  misc_feature (1)...(425): n = a,t,c or g
accnntttggannnnnnnnnnnnnnnnnnnnnnnnnnnnnnnnnnnnnnnnnnnnnnnnnnnnnnnnnnnnnnnnnnnnnnnnggcacgagctggggatcttataataaactctcaaaatcccagattgagacaagggaagggatgctcagtcgtatgtaattaggaaaaagagagggattttgaacccacccctgcatcatctaagtcaaatagagccagtgtaactgttgggaccgttgcaggtagggtgtgctaggtaccaagccgcagttaggtaaccaatgacttttacaagcttattttcatctcagtacaccacatgcttcatgtgccacgtgcatgtatgtaagttacacatctaagattatattattgggttacactaccatgaattatctaaggnaaacngaatgnacatnattg

SEQ ID NO: 31408 - DNA, 424 bp, Homo sapiens
  misc_feature (1)...(424): n = a,t,c or g
accnntttgacnnnnnnnnnnnnnnnnnnnnnnnnnnnnnnnnnnnnnnnnnnnnnnnnnnnnnnnnnnnnnnnnnnnnnnnggcacgagacgacatttgcatagacttgtaccatataattgccccctcagttcccatttatacatgtactgtgcagatgccaaaggacgtaaacatggggcccagctagcacaatgacacagcctcctgaattgagccagcatattcctcttggctggatgtccactgctggctaatgcagcctttcagatgctggtttcagagttttcaggagctgtgggtcgggcacagcaggagttaaggggataatactggtaatattttctctgctcatttggtataagttatgtctccctgacgtcctctggtcatgaaatcctggtggatactccttnaagttcc

SEQ ID NO: 31409 - DNA, 425 bp, Homo sapiens
  misc_feature (1)...(425): n = a,t,c or g
ttgccnnnnnnnnnnnnnnnnnnnnnnnnnnnnnnnnnnnnnnnnnnnnnnnnnnnnnnnnnnnnnnnnnnnnnnggcacgagatcaattgtaagttgatagaaaatatttttaaaagaaaataatgtctgcatatagaaataaaggttaaaatgtaagaattgtcaatcagttgtaataaactcgagctgtttctttggagacagaagacaatgaattttaaaaatctgattattgaaaaaaaaaacttgtgaccacatatcaacaagaataggagtaagaaatgctgtgtagacataagatattaagtttaaatgaatgttatacagagcagaatggattgtgaatgggttacaatttctgtgtaactggtaaataaattcaagagttctttgtgaagtataaaagcacaataaacttagaaa

SEQ ID NO: 31410 - DNA, 479 bp, Homo sapiens
  misc_feature (1)...(479): n = a,t,c or g
gagcnncnttgntaccgctntttggagatccttaagannnnnnnnnnnnnnnnnnnnnnnnnnnnnnnnnnnnnnnnnnnnnggcacgagcgacagagggctcaggaatggatggaggctctgaagatagctgccaatgtggcgaggagttcagagcaaaacctgcaagtcacactgaggaacaaacccaaggatcaaatgggtgggcatgaactcaggaagaacaaacgccaatctgtgactaccagcttcctgagcattttgacgactttgtctttggaacgaggactcactgctcagagtttcaaatgtgcaggtatgaagcagattttcagcctatagctcattaaagaacaatcctgaaccccacaattggaattcactttaaaaatccccttaataggctagtcacagctatctcctgtttataaaaagtatctctcctcgagaagcttactgtattaaaacatcctatatta

SEQ ID NO: 31411 - DNA, 484 bp, Homo sapiens
  misc_feature (1)...(484): n = a,t,c or g
gnnnnnntttgnnncccnnctttggnnnnnnnnnnnnnnnnnnnnnnnnnnnnnnnnnnnnnnnnnnnnnnnnnnnnnnnnnnnnnnnnnnnnnnnnnggcacgagaactggacaacagaaagacaaaggaaaattataaagtcagactatctcaaaatgcacagaagactgtgtatatttacctctttaaaatatattctacaatattgctacatcaaaattttcattaaaattgtaatgacattcatatggaatagaatccctctgaaagtatttccaaacttgtgtgggaagacatcaaactccaaaaaatcttaggactttagggactttagagatcatttgannnnnnnnnnnnnnnnnnnnnnnnnnnnnnnnnnnnnnnnnnnnnnnnnnnnnnnnnnnnnnnnnnnngcaggagttcaaggccagcctgggcagaactggcgagaaccccatctctaaaaatatgaaaaaataaag

SEQ ID NO: 31412 - DNA, 465 bp, Homo sapiens
  misc_feature (1)...(465): n = a,t,c or g
tnnnngcnnnnctttggannnnnnnnnnnnnnnnnnnnnnnnnnnnnnnnnnnnnnnnnnnnnnnnnnnnnnnnnnnnnnnnnnnnnnnnggcacgagccggctcggtgatgtgactccccacccccagccgggtgctccgagccatggccgacaccatcttcggcagcgggaatgatcagtgggtttgccccaatgaccggcagcttgcccttcgagccaagctgcagacgggctggtccgtgcacacctaccagacggagaagcagaggaggaagcagcacctcagcccggcggaggtggaggccatcctgcaggtcatccagagggcagagcggctcgacgtcctggagcagcagagaatcgggcggctggtggagcggctggagaccatgaggcggaatgtgatggggaacggcctgtcccagtgtctgctctgcggggaggtgctgggcttctggcagct

SEQ ID NO: 31413 - DNA, 469 bp, Homo sapiens
  misc_feature (1)...(469): n = a,t,c or g
gngtcncctttncaccgctatttnnnnnnnnnnnnnnnnnnnnnnnnnnnnnnnnnnnnnnnnnnnnnnnnnnnnnnnnnnnggcacgaggactctgaagcccggggacacgattatcgagccgacatccgggaacaccgggatcgggctggccctggctgcggcagtgaggggctatcgctgcatcatcgtgatgccagagaagatgagctccgagaaggtggacgtgctgcgggcactgggggctgagattgtgaggacgcccaccaatgccaggttcgactccccggagtcacacgtgggggtggcctggcggttgaagaacgaaatccccaattctcacatcctagaccagtaccgtaacgccagcaaccccctggctcactacgacaccaccgctgatganatcctgcancagtgtgatgggaagctggacatgctggtggcttcantgggcacgggccggacc

SEQ ID NO: 31414 - DNA, 473 bp, Homo sapiens
  misc_feature (1)...(473): n = a,t,c or g
agnnnnngttnnnncccccctttggnnaccgnnnnnnnnnnnnnnnnnnnnnnnnnnnnnnnnnnnnnnnnnnnnnnnnnnnnnnnnnnnnnnnnnnggcacgagcggcacgagcacacccacacagggagtgaattttcttgcttccatagcagcagacatttaaacgttaccattcaaactctgagggaaggaaaataggaaaaacaaaatgaaaaagaatgacagaaaacacaggtggaagaaataagctcttctagttcattaatcataataatccaaatggttcaaacttactttcattgtattaaaggaactatcagaatggataaaaaacaaaatattgctcaataagaaacctacctaaaatgaaagggcaatctctttaacagtaacacgatagtattgtcacaactaagaaaattaacaatagattttttttgaggtatttcaaaagcattaattttattttg

SEQ ID NO: 31415 - DNA, 470 bp, Homo sapiens
  misc_feature (1)...(470): n = a,t,c or g
gngccccccttgnaancnnnnnnnnnnnnnnnnnnnnnnnnnnnnnnnnnnnnnnnnnnnnnnnnnnnnnnnnnnnnnnnnnnnggcacgagaataattattattactataatacatgttcattgtaaaaaaaaactagacaatacagaaatgtgtaaatagaataagttaaaaaccctttcatttttctctcctcagacataacaattttaacagcttacaatgtattcttccagactttttttatgcatatttctgtaaatatacatatacactcatatatttttattaaaaaaataaaaatatagacgtgtatatatagttttttcttttcactaagcagtatatatgaacatctcatgtcaacacatgaagatctacctaatccttttttgattagctggatttttaaaagaaannnnnnnnnnnnnnnnnnnnnnnnnnnnnnnnnnnnnnnnnnnnnnnnnnnn

SEQ ID NO: 31416 - DNA, 472 bp, Homo sapiens
  misc_feature (1)...(472): n = a,t,c or g
ggtgnncnccnttggnaccnnnnnnnnnnnnnnnnnnnnnnnnnnnnnnnnnnnnnnnnnnnnnnnnnnnnnnnnnnnnnnnnnnnggcacgagcatcttacatcttttgtattgtgttctttgagatacatctagccttgcaatcttgtaatatttaccgaatgctactattttgcacacatttataaaaatgaagaatatagttgttacgaatccctccgcaaaacctctgattagatttggcagaaaaatatggagagattgaacaaaagagatactaggtctgagatgtatgtatgttgtagatccgtatggtttattcaggaacttcagcagaatgactcgaagaggaaaacaaagaaggagatgattacagatgctccagagacactgtctttccgtaacttctgttgtcacctgtgttaagtgtgtgctggtgcgggctcgctctcctgtgctctagctctctca

SEQ ID NO: 31417 - DNA, 463 bp, Homo sapiens
  misc_feature (1)...(463): n = a,t,c or g
gtgcncnccnttnnnnnnnnnnnnnnnnnnnnnnnnnnnnnnnnnnnnnnnnnnnnnnnnnnnnnnnnnnnnnnnnnnnnnnnnnggcacgaggtctttggagaacttctggagctggccaacgtgcaggaggtannnnnnnnnnnnnnnnnnnnnnnnnnnnnnnnnnnnnnnnnnnnnnnnnnnnnnnnnnnnnnnnnnnnnnnnnnnnnnnnnnnnnnnnnnnnnnnnnnnnnnnnnnnnnnnnnnnnnnnnnnnnnnnnnnngggnttttaagnatntgnaaaaggatnngnatttttttnttttttncntttttttannaaaannngaccncttgnncnccaggcnttnttntagnccattgggttnttacnnnnccnaggnaagtaanttttnaanggatccntatgggtntggncnnaaanaacntcccccaaanntttngggttaaaaacnattt

SEQ ID NO: 31418 - DNA, 470 bp, Homo sapiens
  misc_feature (1)...(470): n = a,t,c or g
ngtgccccccttgnnnnnnnnnnnnnnnnnnnnnnnnnnnnnnnnnnnnnnnnnnnnnnnnnnnnnnnnnnnnnnnnnnnnnnnnnnggcacgaggtgtgtgtgtgtgagagagagagagagagagagatctctaaaaggggctttttaccctgcagtattccatttgtttcttttctttctcttctctcttctttctttcttttttctttctttctttctcttttccttccttccttccttctttttttctctttctttcttttccttccttccccttccccttcccctccccttctttacattacttttcttctttccaatggggtcttgcttgcccaagctggtcttgaactcccatccttcagcaannnnnnnnnnnnnnnnnnnnnnnnnnnnnnnnnnnnnnnnagatggagccactgtgcctggctctacttctgcttactttgattatcttggtacatgggg

SEQ ID NO: 31419 - DNA, 467 bp, Homo sapiens
  misc_feature (1)...(467): n = a,t,c or g
gngnnnnnntttgannccttttgaannnnnnnnnnnnnnnnnnnnnnnnnnnnnnnnnnnnnnnnnnnnnnnnnnnnnnnnnnnnnnnnnnnnnnnnggcacgagtgcaacagcagttaatttatcaacaaaggttgaactaatagttaaggtaacgagccaggaacctatgtttttatgccacgcaattgtacattctcattgcccctgacggtatgcctccctttgtatcttagaaacataggtgctgtttcagaccaggttgcttataatgagagatttgatgtatgaccttttttttttgaaaccaatgtgtcactctgtcacctaagctggagtgcacnnnnnnnnnnnnnnnnnnnnnnnnnnnnnnnnnncaatcnnnnnnnnnnnnnnnnnnnnnnnnnnnnnnnnnnnnnnnnnnnnnnnnnnnnnnnnnnnnnnnnnnnnnnnnnnnncaatgagga

SEQ ID NO: 31420 - DNA, 461 bp, Homo sapiens
  misc_feature (1)...(461): n = a,t,c or g
ggtgnntnnnnnnttgganaccnttatgacnnnnnnnnnnnnnnnnnnnnnnnnnnnnnnnnnnnnnnnnnnnnnnnnnnnnnnnnnnggcacgagcggcacgagtacctgctccagttgctcagtgcagaatggccacaagtgacccacgaggaccactgagggggctgggtgcacctctgcaggtgttggggcgactggcccattcaccaaacctcaatgaggccaagtttcttcatctgcagaaggggacgccactcacctcggggggcagtcatgaaatgcgattaaacgtcaacctctgagtagtgtctctgtggtatcccatgacaaagtacgacaggaagaagccctcctgctgcatactgcagtggaatggcgccatgaagagaaacgctcgcgtgagcattcatgcaaagcctggtgcttcatgaaaaacacccaagggtatctggtaccag

SEQ ID NO: 31421 - DNA, 450 bp, Homo sapiens
  misc_feature (1)...(450): n = a,t,c or g
ntttgaaaatcgntatgacatgattacgaatttaatacnnnnnnnnnnnnnnnnnnnnnnnnnnnnnnnnnnnnnnnnnggcacgagggacagataaaattgctgaaaattgcctggtttctgttttctctagagagaaaaccctgaaagatttttagctaatggcattagaccagtttcgatcactgtaagattctctggctttagttctataaccctccagaagtctagatctttttgatattaaagaaaacatgcacactttgagtgagctactgagttccatcgaattgtttccattttacagagactaaggacaggggaccactgggaaggcacataaggaaacaaaagggactttgacccagagactggaccctgagtctatatgaaataggaggtggggccaaagttaatggagaacctggactaacagccttaccaccttgg

SEQ ID NO: 31422 - DNA, 463 bp, Homo sapiens
  misc_feature (1)...(463): n = a,t,c or g
ttganaccnttttnnnnnnnnnnnnnnnnnnnnnnnnnnnnnnnnnnnnnnnnnnnnnnnnnnnnnnnnnnnnnggcacgagggaattaatcctctctcctgtgagagtctcatcttgaggacagagccatccgttactagcatacagtcggtgctcaaaaattgcttgcttagtccaagcccagtcctggcagttttaaggggcctgtttgagttacaaccgttggatctgccttcctttttcagtatttcagcagggccatcgtggacccagaagaactccatgacctgctgctggcgcggacactccaggactcagcctttggctttccatagtggtgacataagagaagcagctacgtgtgtgtttattccagatgccaattgaagcctagaacaggagttgcatcttgcaggtcccctcagtggatgggccgggccccgagggtgagggctgncacag

SEQ ID NO: 31423 - DNA, 462 bp, Homo sapiens
  misc_feature (1)...(462): n = a,t,c or g
annccctnttnnnnnnnnnnnnnnnnnnnnnnnnnnnnnnnnnnnnnnnnnnnnnnnnnnnnnnnnnnnnnnnnnnnnnnnnnnggcacgagacaagctcattcagaggaggatgaagaccattttggaggaagaaaagcacccttattaagaattgcagcaagtaagccaacaaggtcttttcaggatgattttcttatatcaagtggtacatttcattttatttacttcagtttctggtgaatgtgtgactcagttgttgaaggacacctgctttgaaggaggggacattactacggtcttcacaccaagcgccaagtactgccaggtagtctgcacttaccacccaagatgtttactcttcactttcacggcggaatcaccatctgaggatcccacccgatggtttacttgtgtcctgaaagacagtgttacagaaacactgccaagagtgaataggac

SEQ ID NO: 31424 - DNA, 468 bp, Homo sapiens
  misc_feature (1)...(468): n = a,t,c or g
ttggnnncccntttgganaccgttatgacnnnnnnnnnnnnnnnnnnnnnnnnnnnnnnnnnnnnnnnnnnnnnnnnnnnnnnnnnnggcacgagctgnnnnnnnnnnnnnnnnnnnnnnnnnnnnnnnnnnnnnnnnnnnnnnnnnnnnnnnnnnnnnnnnnnnnnnnnnnnnnnnnnnnnnnnnnnnnncagcaagggtggtaagtgcagtaatggtgagatatattttatggtataggactaaataggaaggcagcatttgactcaaactgggcctagggtacgcttcccagaaggggaaagagttaaatttgaaagaaaaattagtattgagaaaggtgcataggaaaagtaagggcatgtttgaagatggagagaaagaatgtagcatagtcaaagaatcaacaagtaggtgttatgtcagaagcaaggagtttttgtgagaaaaagtacaggggcactgtgc

SEQ ID NO: 31425 - DNA, 461 bp, Homo sapiens
  misc_feature (1)...(461): n = a,t,c or g
nccctnttnnnnnnnnnnnnnnnnnnnnnnnnnnnnnnnnnnnnnnnnnnnnnnnnnnnnnnnnnnnnnnnnnnnnnnnnnnggcacgaggacacttcagtctttccatagactacttagaagcttctagtataggatgatggtgcttggtgccaaaatagcgatttgtaagttcagcagtcagtaataaattatttgattctaaataatttcaacttccctcttgtgatgtggatgagtcctccctagacaggtggttgcaggaacctgtacatatatactgatgttcatttggacattttataaaccttgcccattcaggaaaagggcagttcattttgttgaagaatcaaagccccgaaagacctttaaacagcccaaagtggcttgtttatcttgctgctaatgctagttgattcattttctaggtaatttatatgtgtgtgttttctttcttaagc

SEQ ID NO: 31426 - DNA, 462 bp, Homo sapiens
  misc_feature (1)...(462): n = a,t,c or g
nccctnttgganacccgntatgacatgattacgaatttaatacnnnnnnnnnnnnnnnnnnnnnnnnnnnnnnnnnnnnnnnnnggcacgagctttttgtggaaaatggctggtttctcttttataaaaatagtagtttaagagtatccggcatacacatatctcttttaacattttattgctttgcagttttgttcctggtatattagaacaaatagacaacaacaaaataacattgaacaattcaggtttttagtcttgttcttttctagttctttgaatgtcccaggatcttgtaattatttcatcactttttcataagccaagcaaaatatattctcatcttgcaaatgaaaagcaagatacccagcagcttgagcattaccccgaatttctccagaagagtacaaatatccaagtagactataaacccttgtttaattctgtttattaaatcaacaa

SEQ ID NO: 31427 - DNA, 478 bp, Homo sapiens
  misc_feature (1)...(478): n = a,t,c or g
gnnngntnnntnnnnnnttgaaaccnntatgactgacnnnnnnnnnnnnnnnnnnnnnnnnnnnnnnnnnnnnnnnnnnnnnnnnnnnnnggcacgagttgagagctacagagttctttgaccttgccttcgtgttatccacttggctctgaattgtaccatttcatcatgggcaagtctctggagagaaagcatgaaatgttcaacttgtttaatctcaacaattcggaaatatgctgtatatgttgaaaataaannnnnnnnnnnnnnnnnnnnnnnnnnnnnnnnnnnnnnnnnnnnnnnnnnnnnnnnnnnnnnnnnnnnnnnnnnnnnnnnnnnnnnnnnnnnnnnnnnnnnnnnnnnnnnnnnnnnnnnnnnnnnnnnnnnnnnnnnnnnnnnnnnnnnnnnnnnnnnnnnnnnnnnnnnnnnnnnnnnnnnnnnnnnnnnnnnnnnnnnnnnnnnnnnnnnnnnnnnnnnn

SEQ ID NO: 31428 - DNA, 463 bp, Homo sapiens
  misc_feature (1)...(463): n = a,t,c or g
ttgnanaaccgntatgacatgacnnnnnnnnnnnnnnnnnnnnnnnnnnnnnnnnnnnnnnnnnnnnnnnnnnnnnggcacgagcttagattcagtgaaatacagtaattcattcaattatgatagtatctttacagacattttaaaaataagttatttttatatgctaatattctatgttcaagtggaatttggagacactatgttctaattttaagaactgtttcagtgttattagattagtagtagggctgtagatggggtctttcgaggtcctttgcctacctcagtaacagaggctgggtctgagccttgctcgagattagctcttcaccaggtctgtgtggtaatcatatcgtagttaccgtaggtcacgctgcaagtgtaatttacagtgaggcatagtcttttccagtgattggaatacttgtgtcaccgatccagggtttctctttcctgagtc

SEQ ID NO: 31429 - DNA, 476 bp, Homo sapiens
  misc_feature (1)...(476): n = a,t,c or g
ggnngntnnntnnnnnnttgganancnttatgacnnnnnnnnnnnnnnnnnnnnnnnnnnnnnnnnnnnnnnnnnnnnnnnnnnnnnnnnnnggcacgagaacgatacttctgtatctgaagaggggtcagtagtgaggggacgtgccaggccagggctgaactgcctgcttggtgcttttctaactgaaaggtgagtccacactagccaagatctagttccaaagggaacacttttgagagtggaagaggacactagtgactatgctgggacagcaggagtgagccgggcctggccatggtccctcacgcttacttgcttctggtccttccgggtgagcctagcttcagacccaccggaggtgctgtgtaatagtcactttttatcctggaggcttcaaaagtcaacataaactaccctaatcaacagtgggagtgatgggggtggggcatgaggttaggggccgggagcttaaa

SEQ ID NO: 31430 - DNA, 461 bp, Homo sapiens
  misc_feature (1)...(461): n = a,t,c or g
nccnctttnnnnnnnnnnnnnnnnnnnnnnnnnnnnnnnnnnnnnnnnnnnnnnnnnnnnnnnnnnnnnnnnnnnnnnnnnnggcacgagcaactggcaggaatgagtatgtaggtattccagaaagtaacccactagtccaaagcatttaactgtccttgagcattagcaatatatttattagaagggaatgaaaagtgttggttctggagagtccattagaaggagagcagttaatgcacagttaatgctcatatgctaggatgaccaacactgtgcatatttcataactttcttcttccatcatttatccatttcataaatgtttattgatattctggacagtgccagacactatgctaggccctgaagaggcatagcttaatgaagaggaggaaactgatgtataaacaaggtgaagagtctggaagaaagaaggaagaaagtaggagagcaaatcc

SEQ ID NO: 31431 - DNA, 469 bp, Homo sapiens
  misc_feature (1)...(469): n = a,t,c or g
tttgaannccctnttgganaccnttatgacnnnnnnnnnnnnnnnnnnnnnnnnnnnnnnnnnnnnnnnnnnnnnnnnnnnnnnnnnnggcacgaggtagtttaatcatctagtttttcttcttggttttagtagaaatcagctttcttgaaggataagagattgattagaaaaggaatggagacatttttaaaggtctgggcagattgagagttagggcagatcctgctgtgatgccgtggtgggagaggctgacagcaatgggatcctttctagcatggacaggaggaagcggaaagatgccagggattaaattttctcagaaaaggagaagaaatgatcctcttcttccttcttttcttccctactcctgtgctgtttggtgtttaaactcttagcactcagtgaaatgggaaaggttcccttgtccccctcgcagggccgtgtgatgtgtgtgtggctcacttct

SEQ ID NO: 31432 - DNA, 483 bp, Homo sapiens
  misc_feature (1)...(483): n = a,t,c or g
gnnnnngnnnnnnnnttgganacccnnttgganacccgnnnnnnnnnnnnnnnnnnnnnnnnnnnnnnnnnnnnnnnnnnnnnnnnnnnnnnnnnnnnnnnnnnggcacgagggaattcctgcttgcttttttcagtttacaatttatcatttgtctctgaggtcttgcagttgctaaatgtttaaccatattttcagaccttttcccgggaggttataaggaaactaaagaagtaggattggcacattgaaaaagaagggttctatccagaccctcttcctttctaccagaaggaaacactattttctgaacatggagtaactgcaattttctggattgactcttttcaggataataattgggaatagtaaacttgatcctgaacaacataaaaaaatctctcgactatcgaaaagcctcattaaaattccaacccacttgccatcctactctattctggtggacagagaaagagaggagca

SEQ ID NO: 31433 - DNA, 483 bp, Homo sapiens
  misc_feature (1)...(483): n = a,t,c or g
ggggnnnnncttggaaaccttnnnnnnnnnnnnnnnnnnnnnnnnnnnnnnnnnnnnnnnnnnnnnnnnnnnnnnnnnnnnnnnnggcacgaggtttgttttatatagcttgtggcttgatttatttgatgattaagttcctgaaaaatgataatatggaaacaaccaccatttttcttacttaaaactatggccaatccatttcattttaataaaatatgccaatatggaatatgatgacttaaattttttctttttgaaataaaaaaagtaattcagttataatatccaacttgcaaatggcattagcttgtaattattgtatctactctagtatgggagttcttctgaagtctttgttaaacccagtgatggctgataaaggcactttctaatcatcgttcttgacttagctgcataatgaagatgccctcgtgtcagggcaactaatggctttgattttactctgatggtgagagcctt

SEQ ID NO: 31434 - DNA, 483 bp, Homo sapiens
  misc_feature (1)...(483): n = a,t,c or g
ggtgnnnnnnntttgaaaaccttnnnnnnnnnnnnnnnnnnnnnnnnnnnnnnnnnnnnnnnnnnnnnnnnnnnnnnnnnnnnnnnnnggcacgagggatctttctcgtgtattttttttgccatttcgcatctgtgtgaataggtgactcagtgccctgtttgtcaggcaagtggtgacatctttttgaatgtcggaggtggcaacaggatgtggaggaagactgtggactttggagccagataaaactgttcaggcctggcttctccccggcagtgtgcagtaggcatcgagtataaaatgcccacttctcagggtccttgtggtcaaatgagtgcatttggggacacccacacaatgccagcattcagtgaatcttcctgctttccctactagagaagaatttgaaacagaacttttacagttggtgnataaacagaagtaagaataacatctatttttgaaggaagtgcatttatcttt

SEQ ID NO: 31435 - DNA, 482 bp, Homo sapiens
  misc_feature (1)...(482): n = a,t,c or g
ggtgnntnnntttgannctttgaaaacnnnnnnnnnnnnnnnnnnnnnnnnnnnnnnnnnnnnnnnnnnnnnnnnnnnnnnnnnnnnnnnnnnnggcacgaggccaagtgtgtggcagtgtcacaacttaagagccagtgtaattgnnnnnnnnnnnnnnnnnnnnnnnnnnnnnnnnnnnnnnnnnnnnnnnnnnnnnnnnnnnnnnnnnnnnnnnnnnnnttaggtnnnnnnnnnnnnnnnnnnnnnnnnnnnnnnnnnnnnnnnnnnnnnnnnnnnnnnnnnnnnnnnnnnnnnnnnnnnnnnnnnnnnnnnnnnnnnnnnnnnnnnnnnnnnnnnnnnnnnnnnnnnnnnnnnnnnnnnnnnnnnnnnnnnnnnnnnnnnnnnnnnnnnnnnnnnnnnnnnnnnnnnnnnnnnnnnnnnnnnnnnnnnnnnnnnnnnnnnnnnnnnnnnnnnnnnnnnnnnnnnnnnnnnnnnnnnnn

SEQ ID NO: 31436 - DNA, 480 bp, Homo sapiens
  misc_feature (1)...(480): n = a,t,c or g
ggtgnnnnnnnntttggaaancntnnnnnnnnnnnnnnnnnnnnnnnnnnnnnnnnnnnnnnnnnnnnnnnnnnnnnnnnnnnnnnnnnggcacnnnnnnnnnnnnnnnnnnnnnnnnnnnnnnnnnnnnnnnnnnnnnnnnnnnnnnnnnnnnnnnnnnnnnnnnnnnnnnnnnnnnnnnnnnnnnnnnnnnnnnnnnnnnnnnnnnnnnnnnnnnnnnnnnnnnnnnnnnnnnnnnnnnnnnnnnnnnnnnnnnnnnnnnnnnnnnnnnnnnnnnnnnnnnnnnnnnnnnnnnnnnnnnnnnnnnnnnnnnnnnnnnnnnnnnnnnnnnnnnnnnnnnnnnnnnngcaaaaacaggagggtaattaagaaccaaactagatactttatgtgtcttaagtatgtcctaccacccagtgcagctctgagaaataaaagggactggcaagagatgaagctctagttattgctctcacagtt

SEQ ID NO: 31437 - DNA, 260 bp, Homo sapiens
  misc_feature (1)...(260): n = a,t,c or g
ggggnnntnnnntttgaanntttganaccnnnnnnnnnnnnnnnnnnnnnnnnnnnnnnnnnnnnnnnnnnnnnnnnnnnnnnnnnnnnnnnnnnggcacgagggattgaagtgcgtctctnnnnnnnnnnnnnnnnnnnnnnnnnnnnnnnnnnnnnnnnnnnnnnnnnnatcagccctttaagatggtaagtaagtttaaataagatcacaagagtggagccttaatccaaaaggactggtgtctttttttttttttt

SEQ ID NO: 31438 - DNA, 479 bp, Homo sapiens
  misc_feature (1)...(479): n = a,t,c or g
ggtgntnnnnnatttggaaacccttnnnnnnnnnnnnnnnnnnnnnnnnnnnnnnnnnnnnnnnnnnnnnnnnnnnnnnnnnnnnnnnggcacgagagagctagcacctgagcttgttgagttactatccttttggttttggggtaactgagtagactagctgtcctagtaggtagcatagaacaaagagtgttccnnnnnnnnnnnnnnnnnnnnnnnnnnnnnnnnnnnnnnnnnnnnnnnnnnnnnnnnnnnnnnnnnnnnnnnnnnnnnnnnnnnnnnnnnnnnntcatggcacatgctttcataatggttgttttgctctactaacataaaaggaacccaaaacagggtttttctaagtcaagatggccttaaattctatggattagtctcctatggtattaatagctaaaaatgacaatttctacttgtgtatttttggtgaaaactaaatgatgactactttcttttttttt

SEQ ID NO: 31439 - DNA, 477 bp, Homo sapiens
  misc_feature (1)...(477): n = a,t,c or g
ggnggtntnnnttgnanntttganaccctttgactgattacgaatttaatacgactcnnnnnnnnnnnnnnnnnnnnnnnnnnnnnnnnnnggcacgagaaagacacaggtacagttcagaggtatggaaatacagagatgaataaagagctgtacctaacagtacttgatgtttagagcttttatatcaaagatgggaccaactttctcatcatccaagcatttattgagcattactgtttgctcagcatatgttaggcattacctgggggataacaaagaagtttaaagcatgttttctcccttgaagcatttataatgtcattgagaagatgactaatacatgtgaaaaaattagtgagaagtatggtacaaaatagatattttgatagtttgtgtggtccagactcagtgccgtctaggagttcaggaggaataagagaggaagattaagtacagtggaacttaagccagacc

SEQ ID NO: 31440 - DNA, 484 bp, Homo sapiens
  misc_feature (1)...(484): n = a,t,c or g
ggtgnttnnnnntttgaaaacctnnnnnnnnnnnnnnnnnnnnnnnnnnnnnnnnnnnnnnnnnnnnnnnnnnnnnnnnnnnnnnnnnggcacgagaactggaagagagaatcggcaagctctaaagaaactaaagtaaaataaggataatgaaaacagtagaaaatagaaaagaggtgctaagaaatatagagattacagtgagatggtcaaacatcatgtaattggagtcccagaaaacaagagaatgcagcaaaaacaagtttgaagagataatgcagagaattggaaggcatgaagccactaattcaagaaacttccaaactctgtaagttaaaaaagaaatctgcacttacatatatcataaggtgctgaaaatcaaaggcacatgggaagatttaagggatgcccaagaaaaaacaggtcctttgagggtttggaggcctctgtctcagtacggataacatgtgccagtggacaaggg

SEQ ID NO: 31441 - DNA, 484 bp, Homo sapiens
  misc_feature (1)...(484): n = a,t,c or g
ggtgnntntntnntttggaaantnttgagaacnnnnnnnnnnnnnnnnnnnnnnnnnnnnnnnnnnnnnnnnnnnnnnnnnnnnnnnnnnnnnnnnnnnggcacgaggaaaaaaagaaaaaggtgagaagatgagggtcagacaggttcaccggaaagaatactgacagggtggggggaaattgtacaactttattgatttatgcatctccaaactgcagtcttcaacctcagctggacttttccttcctttttttctctttcattcaaccaatcccaaagtgcttcctctgtgctgggcagtgcaggtggcgaaatggtaaataatgcggccatgcatggtcctggccctctgtggcgggaggcagggggctcgctgcagcataatgaacacataaacagtcacaggtttggaaaggcttgtgaagggcacagcgaataacagaatgctgggctccttcatataccgtggccagctgaacctc

SEQ ID NO: 31442 - DNA, 484 bp, Homo sapiens
  misc_feature (1)...(484): n = a,t,c or g
ggtgnnnnnnnnntttgaaanctttgaaaancctatgacnnnnnnnnnnnnnnnnnnnnnnnnnnnnnnnnnnnnnnnnnnnnnnnnnnnnnnnnnnggcacgagagagtcatttggtacctgtgaaaggcatctcctggcttcccaggctctcaacccagcttattggtcacattgctttacaagaggggctgctggctcaccttgtcagcgccttggtataacttgggccaccagtaggacaagagttaaatgggttcaatcaagtcttaagccattctctccatgtgccactgaagaatcaagtccccttgtcagcactgtcccccctgctaagctctgtctatattttccttgatttgaacaaatgaaacctcattttcatgtgttcagtcctgcttagtggaggactattcacacatgaagttgcttattttttgcttannnnnnnnnnnnnnnnnnnnnnnnnnnnnnnnnnnnnnnn

SEQ ID NO: 31443 - DNA, 477 bp, Homo sapiens
  misc_feature (1)...(477): n = a,t,c or g
tttggaaanttttgaagancctnnnnnnnnnnnnnnnnnnnnnnnnnnnnnnnnnnnnnnnnnnnnnnnnnnnnnnnnnnnnnnnnnggcacgagggagagaaggaaggtcctggaggaggaagagcagaggaggaagcaggaggaagccgatcgaaaactcagagaggaggaagagaagaggaggctaaaggaagagattgaaaggcgaagagcagaagctgctgagaaacgccagaagatgccagaagatggcttgtcagatgacaagaaaccattcaagtgtttcactcctaaaggttcatctctcaagatagaagagcgagcagaatttttgaataagtctgtgcagaaaagtggtgtcaaatcgacccatcaagcagcaatagtctccaagattgacagcagactggagcagtataccagtgcaattgagggaacaaaaagcgcaaaacctacaaagccggcagcctcggat

SEQ ID NO: 31444 - DNA, 460 bp, Homo sapiens
  misc_feature (1)...(460): n = a,t,c or g
ggnnttnnnttnaaaatnnggaaaccctnnnnnnnnnnnnnnnnnnnnnnnnnnnnnnnnnnnnnnnnnnnnnnnnnnnnnnnnnnnnnnnnnggcacgagtaaattattccatgagatgctcaaaaaatactggttgcggccatttttgcgtgtaatcatgctgttttcaaagctgttacaggttttattactgagataacttggaaaacatcttcttgtctcattctattattcttaggtgattgagcaggaaatgtttatgcagcttttataatggtgacttcttggctgagtatgtgtgcctgctgctgtctttggcatttgaataatgaattaacatgtaagtggccatgggaagggaatgttatgaatggactttgcctatgctttttttggtagcaaattatatttgctataagattgctgtgccataccattatttcttcaactattaaaag

SEQ ID NO: 31445 - DNA, 462 bp, Homo sapiens
  misc_feature (1)...(462): n = a,t,c or g
gnnnnnnnntnnnnnnttggantttgganaccntnnnnnnnnnnnnnnnnnnnnnnnnnnnnnnnnnnnnnnnnnnnnnnnnnnnnnnnnnnnnnnnnnggcacgagataccctggaagtacattctaagtaccaattttcaggattcattcatttttttgttcaagccaggatagccaggaggcagaccctaggtataaataagaaagacaaatcccgagatgaaaagcaaagaccattgcctggccactctgcagctgcaggtccatggagcaggtaaataaccgaagatagggccagtaccacaaggtgagcgggagtcagactcaagaaaagcaatgcgtaggaccatcactagagccacggcaaaatgtgcccaccctgaagtggctgctaaaggacaatcaatctccaaatcttcaacttcaactagaacaggtctgcctgggagtctccttcctt

SEQ ID NO: 31446 - DNA, 457 bp, Homo sapiens
  misc_feature (1)...(457): n = a,t,c or g
gnngtnnnntnnnnnnttggaatctgaanaccgtttgacnnnnnnnnnnnnnnnnnnnnnnnnnnnnnnnnnnnnnnnnnnnnnnnnnnnnnnnnnnggcacgagctgggcaaagtaagggtgttagttttatggaggaactattatcattcctgcttcaaagtcaaaccataaactaaattcctcccaaggttagcctggcctatgcccaggaacgagtgaggacagccagcctgagactagatgccagatggactcagacatgctagtttgctgtcactgctgtaatctttgcactgactcaccagggtgtcagaggctggacaggcctgcagtccccaaagcacatggactcatttctcctgtatcacttgggactccatcctcaacctgctatgcagctcacattctcctgtcacttcctagagacttctggcttcctgtcaggcatataaca

SEQ ID NO: 31447 - DNA, 456 bp, Homo sapiens
  misc_feature (1)...(456): n = a,t,c or g
gnngnnnnnttnnnnnttggantctganaccgntnnnnnnnnnnnnnnnnnnnnnnnnnnnnnnnnnnnnnnnnnnnnnnnnnnnnnnnnnnnnnnnggcacgaggacatatgtcaagattaagattatcttgcctgtgtcaacaatgtttcnnnnnnnnnnnnnnnnnnnnnnnnnnnnnnnnnnnnnnnnnnnnnnnnnnnnnnnnnnnnnnnnnnnnnnnnnnnnnnnnnnnnnnnnnnnnnnnnnnnnnnnnnnnnnnnnnnnnnnnnnnnnnnnnnnnnnnnnnnnnnnnnnnnnnnnnnnnnnnnnnnnnnnnnnnnnnnnnnnnnnntctcatgttcttaagatgcagcagtccaggtatcctgatttcacaggtagaagtacaaaggcaggaaggagcacgtccctgtcttggtctccttttgaanagtatcggggaanactttgcca

SEQ ID NO: 31448 - DNA, 452 bp, Homo sapiens
  misc_feature (1)...(452): n = a,t,c or g
ggngtnnnttnnnnatctgaaatncgttgccnnnnnnnnnnnnnnnnnnnnnnnnnnnnnnnnnnnnnnnnnnnnnnnnnnnnnnnnnnggcacgagcccaagccagtagcacgagatgagtgcagcctgccaggccgagtgggctcagcgggcctgagcaaagcttaggcaaaggcgccactgaccacagaggtttctgctggtgaagcgaccccagggatcctgtaacaatatcatggtacaaaattgatggctccttgtttgttagtgttttccaagaagcagaggtcaagactagactggaggagcaagcgatgaggggaatgctgttggaggatagaggcgggagctggagaaggcagagagcatcatcagaccatgtcatagctctgacacctctgcagaaaggggaattttgtttggagaatctcagactatagggcaggtccaa

SEQ ID NO: 31449 - DNA, 456 bp, Homo sapiens
  misc_feature (1)...(456): n = a,t,c or g
ggnnntnnnnnnnnnnnttgnaatccnnnnnnnnnnnnnnnnnnnnnnnnnnnnnnnnnnnnnnnnnnnnnnnnnnnnnnnnnnnnnnnnnnnggcacgagaaagagggggaaaaatatgctgacttctgaaaaatgggaagggggttacattggcttgattgaaaccagttgaaggaggttttttgtgtttttcccccaagtttttcttgactaatgattgttcaggtctttaaatcagtgttgtccaactgtccccaaagactacataaggcacagttgaaatctgtattgtcccttgctgttactgcctctccactgcccttaactcacaggatgaggtattataggttatagaatcccttgctttttattcctttatcacagatggatgaagtgctcaaatctgaatcattaaaccgacttcttttgtacctctcagactgttcactgattt

SEQ ID NO: 31450 - DNA, 461 bp, Homo sapiens
  misc_feature (1)...(461): n = a,t,c or g
ggnggtnnnnttnnnntntttggaatcnnnnnnnnnnnnnnnnnnnnnnnnnnnnnnnnnnnnnnnnnnnnnnnnnnnnnnnnnnnnnnnnnnnnnnnnnnnggcacgagctaaaaggcaccttataatttctcttctcttttgttctttctctgtcttaagacacttagaacctgtgatttttaagcatttttgaatatttacctataccatataccatctgcataaaatataaaccatttaccttagactctggttatctcaaaatcaactccattggagtcactgatgagagcagacttagccaggactcagagttagctttcagtgttagaatgactggctattcagactttatcaaaatccttcacatataaccaacaaagtagtgaaaannnnnnnnnnnnnnnnnnnnnnnnnnnnnnnnnnnnnnnnnnnnnnnnnnnnnnnnnnnagatcat

SEQ ID NO: 31451 - DNA, 461 bp, Homo sapiens
  misc_feature (1)...(461): n = a,t,c or g
ggnggtnnnnntnnnntntttggaatacgggataccctnnnnnnnnnnnnnnnnnnnnnnnnnnnnnnnnnnnnnnnnnnnnnnnnnnnnnnnnnnnnnnnnnggcacgagcggcacgaggtatgaccaaagaattaatgttgaaaattagcttaagttggtgttaattctggaggggaggtaagcactgcttttattaaggttaaggcaatacgttgagaaactgactagatttttcctacgccggatgtgtcctttcacctgcttcctgaaatttacatattttcattaatcaaccggtaaattgcctagccaaccatccttcgtagattaaaataaagaaaagagcctcgttgggtgcagtggattacaggtgtgagccacagtgccaggccccttttctgcttttaacccttttgattacctgtcaattttagattcttcctttaccctttcttgtg

SEQ ID NO: 31452 - DNA, 450 bp, Homo sapiens
  misc_feature (1)...(450): n = a,t,c or g
ggnntnnnntnnnnnttgganancgcttgacnnnnnnnnnnnnnnnnnnnnnnnnnnnnnnnnnnnnnnnnnnnnnnnnnnnnnnnnnnggcacgaggttttaggtaaaagccaaaccacccttttacaaatatactttcctatcagagtgtgttctagaattttagagttaaattctctgaaatcttttaaaacttgtgtatccttttgggggaacatctccttatgattttaatcctattcactcgttttttcattatttttctcacttttcttcattgcttcctnnnnnnnnnnnnnnnnnnnnnnnnnnnnnnnnnnnnnnnnnnnnnnnnnnnnnnnnnnnnnnnnnnnnnnnnnnnnnnnnnnnnnnnnnnnnnnnnnnnnnnnnnnnnnnnnnnnnnnnnnnnnnnnnnnnnnnnnnnnnnnnnnnnnnnnnnnnnnnagcag

SEQ ID NO: 31453 - DNA, 459 bp, Homo sapiens
  misc_feature (1)...(459): n = a,t,c or g
gnnggnnnnnttnnnnnnttggaatntggaaanccgnnnnnnnnnnnnnnnnnnnnnnnnnnnnnnnnnnnnnnnnnnnnnnnnnnnnnnnnnnnnnnnnnnggcacgagcaatattccaataactgtttttgcaaagaatttttatagttctgtctctgcttgagtacttcccaagtcactgctggacagcacttgtgggaaaattatttcctcctaaaacactcactcgatgaatctagtccatgaaatatttcttaaacaattcaaggatcaatcaggatgcttttcagtgaagcccgaattgttttcggcaatctttgtttttaggcaactaattataaccttatttacttttttgcagaattcaaattaaattatggacacattctctattgccagatcatttaaaccaggataattatgcaggttgtatttctgccagctactagactataaa

SEQ ID NO: 31454 - DNA, 453 bp, Homo sapiens
  misc_feature (1)...(453): n = a,t,c or g
ggagttgngttntagaacantagaannctnnnnnnnnnnnnnnnnnnnnnnnnnnnnnnnnnnnnnnnnnnnnnnnnnnnnnnnnnnnnnnnnnggcacgaggatctctgaaacaaaacaaaacatgttttccttgggaattacacattttcccaagaagctggaggacattttaaggggtttttgctttccattttccattggctataaggtatgtttatacattgctttccctaattgatgtcttcagggcagaggagaccctcaggaaatcacttggggcagcctgggcctccagtggctcctatgttctaagaaactcagagtctggtctagtggcccagactctgggctggtagtattcccttctgggaaataggtgtctatttctaggcctgatcgtgtctgacagcagaaaaataccagtatagattttgtgcgggactgaactat

SEQ ID NO: 31455 - DNA, 458 bp, Homo sapiens
  misc_feature (1)...(458): n = a,t,c or g
gnggnnnnntnnnntnttggaatntgntatccgntatgacnnnnnnnnnnnnnnnnnnnnnnnnnnnnnnnnnnnnnnnnnnnnnnnnnnnnnnnnnnggcacgaggggcactccttccacgaagagggaaagtgcacttacatttcaatcgaccaagttccaaggacctatgccataatgataagcagacccgcctggctctggggagcagaaatgggagccaatgaacatggagtgtgcatagccaatgaagccatcaacaccagagagccagctgccgagatagaagccttgctggggatggatctggtcaggcttggtttagaaagaggggaaacagctaaagaagccttagatgtcattgtctccttgttggaagaacatggacaaggtgggaattactttgaagatgcaaactcctgccacagcttccaaagtgcatatctgattgtggatc

SEQ ID NO: 31456 - DNA, 333 bp, Homo sapiens
  misc_feature (1)...(333): n = a,t,c or g
gngnnnnnnnnnnnnnnnttgganatccgctatgacnnnnnnnnnnnnnnnnnnnnnnnnnnnnnnnnnnnnnnnnnnnnnnnnnnnnnnnnnnggcacgagctgtggaatgggggttttcttgtgccttgcttgctttcatagccttccattttattggcatggctgccttgatgtaacataattctctgtccccaagatttagaaaattcctcttcgttcaccttggctcatggtcttccagggtttttatcctggctgtctatgaactagggttttctcctgccttaggaaaaatactgcatcttctggaatctagaaaaaaaaaaaaaa

SEQ ID NO: 31457 - DNA, 463 bp, Homo sapiens
  misc_feature (1)...(463): n = a,t,c or g
ggnggnnnnnttnnnnnnttggantntggnnaccgnnnnnnnnnnnnnnnnnnnnnnnnnnnnnnnnnnnnnnnnnnnnnnnnnnnnnnnnnnnnnnnnnnggcacgagaggaactctaacaaatcaccaagaaagannnnnnnnnnnnnnnnnnnnnnnnnnnnnnnnnnnnnnnnnnnnnnnnnnnnnnnnnnnnnnnnnnnnnnnnaaaacnnnnnnnnnnnnnnnnnnnnnnnnnnnnnnnnnnnnnnnnnnnnnnnnnnnnnngagataccacctaaccccgcaagtatgggcattattaaagtttaaaaaacaaaagctgttggtgtgggtggggnnnnnnnnnnnnnnnnnnnnnnnnnnnnnnnnnnnnnnnnnnnnnnnnnnnnnnnnnnnnnnnnnnnnnnnnnnnnnnnnnnnnnnnnnnnnnnnnnnnnnnnnnnnnnnnnnnnnnnnncc

SEQ ID NO: 31458 - DNA, 459 bp, Homo sapiens
  misc_feature (1)...(459): n = a,t,c or g
gnnnntnnnnnnnnnnnnttgganatncnnnnnnnnnnnnnnnnnnnnnnnnnnnnnnnnnnnnnnnnnnnnnnnnnnnnnnnnnnnnnnnnnnnggcacgagggtaaaataaggttgtttgtgaatttttgttgatttagaggccaacttaaaggttttaagtgtgacttcctagttctgagccttccagcctgaccctggaatctgtgtttaaagggggatgttgggtctttgcccacaaatgctaggaatggattgacaggcagaatgcacactgcagtcccattaggggaggaatatgtgtctcccacttgatcttactccagggctactgcctggtgtcccaggtacaggcccgtaggggtgttttcctcttcaccaggtacagtggcattagctgccagcatttagatgagatgcagtgttgtaaaaatcaccatgtctgttgttggcagcac

SEQ ID NO: 31459 - DNA, 460 bp, Homo sapiens
  misc_feature (1)...(460): n = a,t,c or g
gnnggnnnnnttnnnntnttggaatnnnnnnnnnnnnnnnnnnnnnnnnnnnnnnnnnnnnnnnnnnnnnnnnnnnnnnnnnnnnnnnnnnnnnnnnnnnnggcacgagcttagccttaagtaatgcagataaatgggacaccagatggaattcatgtagtgaaattcatgcagatactgtattttatgatatgccttctttcagggtttaatgatcatgccgccttatacttttataatgcttcgtaagtttaacaagtacagcagatattgctgatttcccacccactgcccattctccccttctttcttattcgtagaaccttgattttgttcagggaggcaatatgctcagctaaaaatatttcccagtttcccttgtaggtaggaatgatcatgtgacagccaatgagatgtaaatggaattctgctggggatatctgggtaagttttatatatc

SEQ ID NO: 31460 - DNA, 456 bp, Homo sapiens
  misc_feature (1)...(456): n = a,t,c or g
ggnnntnnnnnnnnnnattgganatccnnnnnnnnnnnnnnnnnnnnnnnnnnnnnnnnnnnnnnnnnnnnnnnnnnnnnnnnnnnnnnnnnnnggcacgaggatctctcctaagtgcaccatctctggtggtataagatactgtgtctactttttcttgttttgaaactttttcttcctttaacttctaggatgttcctctcccacttacctttaattatttcctattctcctgcatcttgtatctcttctttctttcttgcctttaagtaactttgttcctctctctcctgcctgtcttaactttcctaagcaagattgcacggtcatggtggttgctctggcctttgcaaatgtgaccttcatctctgtgtctctgtcccctgcttagagcacctgccccctgacctggcatttcctcttgcctgtagagatctctgccgaggtgcctctgac

SEQ ID NO: 31461 - DNA, 458 bp, Homo sapiens
  misc_feature (1)...(458): n = a,t,c or g
nnnnnnnngnnnnngnnnnnnnnnnnntttgganatttggnnnnnnnnnnnnnnnnnnnnnnnnnnnnnnnnnnnnnnnnnnnnnnnnnnnnnnnnnnnnnnnnnnnnnnnnnggcacgagttaatatatggtctctgtgcttgaagagacgctaattttctgtggttgaagagatgctgtgaattgtgtgatagtggcagctctcaaaaggacaaggaagagggaaacatattcctagaagctgaaattttattacccaattgcaaagactttttgtcactacttattcttaggaataaccataaagtgtttattttattctgtatggaactttgtactttaaaaaaatatgttttgtatcatctggtgtttttgtataaaggaactgttggtttgaaaagaaggtaaacatcatttatattccttaccttgttttgggatgtatctctacagtgag

SEQ ID NO: 31462 - DNA, 457 bp, Homo sapiens
  misc_feature (1)...(457): n = a,t,c or g
gnnnnnnngnnnnngnnnnnntnnnntttgganatntgnannaccngtnnnnnnnnnnnnnnnnnnnnnnnnnnnnnnnnnnnnnnnnnnnnnnnnnnnnnnnnnnnnnnnnnggcacgagctggaagaatttgtgaagcagaagaaatctgaaaccacagacactggatctgatctgaggcctatgttagaaccaaagggagggatcctggaggccggttctcctagttaaagtgatgggagctcggcagacggcatggagcactcaagggcaagcagcaatcctgcttggctacttccaaaaacatccactgcctacagcattagccatggggcactgatgcctaaggataacctgtatcaacatccacctgcccaaatagctaatgatgagacacattcaactacctgttttagccctggtaggcctgtttggggcaaaggtgaattgaatgtt

SEQ ID NO: 31463 - DNA, 443 bp, Homo sapiens
  misc_feature (1)...(443): n = a,t,c or g
tnnnnnnnnnnnatttggaananntgnnnnnnnnnnnnnnnnnnnnnnnnnnnnnnnnnnnnnnnnnnnnnnnnnnnnnnnnnnnnnnnnnnggcacgagctggaagagtgagagaatattgagacatgagctgggctgtgaaagggggtgaaagttataaaagagaaaggggtggccatttcagatttggtggggatgttcagggtgtgtggtactaaggagaggcaagggaggtggcagaaggaaactgaggtgcagagaaaaacacctagtaaatggatgagctggtaaatgaatgaatggataagctgcaactggaatccaggtctccaaatatcaaaaactcttttatgctactctgctccttctaaatggtcttcctgcctccattctagcatgcttttccaagaaattctccaaagtacttttttttctgaaaccc

SEQ ID NO: 31464 - DNA, 447 bp, Homo sapiens
  misc_feature (1)...(447): n = a,t,c or g
gnnnnngnnnnnntnnnntttgganatntgannaccgtnnnnnnnnnnnnnnnnnnnnnnnnnnnnnnnnnnnnnnnnnnnnnnnnnnnnnnnnnnnnnnnnnggcacgagcaacacaaaaggcaccatttcaaactcattcactttatgggccccagttaagtgatgaagctctgtctgtattggggttttgattaccgtgggctcccagaaaggagggcacactacagatgtaccattaagaaaaagcaaaatcacacctcatggtgttgggccagctctcaccacagaggccacttccctgttaataattccttggtgcttgggagttgataagggactttaatggagattatctgggaaaggatcagagcctgggcaagggtggaatctgtacatgacagacagtgagagggaggcttggggaggtgacctgcccagtgtcac

SEQ ID NO: 31465 - DNA, 457 bp, Homo sapiens
  misc_feature (1)...(457): n = a,t,c or g
gnnnnnnngnnnnngnnnnnttnnnnttttganatntgnatnnnnnnnnnnnnnnnnnnnnnnnnnnnnnnnnnnnnnnnnnnnnnnnnnnnnnnnnnnnnnnnnnnnnnnnggcacgagcaagagcgaaactccatctcaaaaaaaaataagtgaatatataaaaaataaaaataatcttggaagaccaggtgttgggagccagctggccctgggtttgaataatgaataagctgctttctcagctctggggcaagtggtatcacctttctgagactcagtttccccctctgtacattggggagtactcatagttcctaccccatagggctgtgtgtcttggtggggagagcgcatgtgccacgtgcctggcgctgggagcactccatgagtgctgtgttgctgttgccacggttgttgtggtttgttatggttttgacttcgggcggagagccca

SEQ ID NO: 31466 - DNA, 450 bp, Homo sapiens
  misc_feature (1)...(450): n = a,t,c or g
gnnnnnggnnnntnnnttnnnnatntganancgtttnnnnnnnnnnnnnnnnnnnnnnnnnnnnnnnnnnnnnnnnnnnnnnnnnnnnnnnnnnnnnnggcacgaggagaggagaaaaatgaaaccctccagagggtaactgtgaatcagcatcaggagactggggttggaaacagttctgctacttcctagacaggtgaccttggataggtcgcttcagctcagctccctgtgccctcagcgccttctgctgtgaaacaccattgccatcaggtagctgtggtgctgtgaaaatgccaggggagcccctaatcactctagaattgcagaggactaggcagggaaagatcttcacctgggttttagtggcaaggttccatggctgccctagataaacaaggcattctagagcagtgtatcactgggagaangaaggttgaaagagaactc

SEQ ID NO: 31467 - DNA, 446 bp, Homo sapiens
  misc_feature (1)...(446): n = a,t,c or g
gnnnnggnnnnntnnnntttgganattgnanacngctatgacnnnnnnnnnnnnnnnnnnnnnnnnnnnnnnnnnnnnnnnnnnnnnnnnnnnnnnnnnnggcacgaggaaccacttgaaaatgaattttcattacgattttaggagggctgagagtagatgaggtaagagatctgcctagggggcaggatcgaaggaggctgtcactctcagatttgtgcaagtgacttgtgttnnnnnnnnnnnnnnnnnnnnnnnnnnnnnnnnnnnnnnnnnnnnnnnnnnnnnnnnnnnnnnnnnnnnnnnnnnnnnnnnnnnnnnnnnnnnnnnnnnnnnnnnnnnnnnnnnnnnnnnnnnnnnnnnnnnnnnnnnnnnnnnnnnnnnnnnnnnnnnnnnnnnntataccataggcttctgtgcacagagatgaccatgtgaagtggcag

SEQ ID NO: 31468 - DNA, 455 bp, Homo sapiens
  misc_feature (1)...(455): n = a,t,c or g
gnnnnnnngnnnnntnnnnnnnnnnnntttganancnnnnnnnnnnnnnnnnnnnnnnnnnnnnnnnnnnnnnnnnnnnnnnnnnnnnnnnnnnnnnnnnnnnggcacgaggcgaggctggttctgctgtccgctctccccagggtcccgccacgagggtggcgtggcatggggcacatcgcccggacttcctgtccctcttgggtttaggaatgggatggtgaggcctccctggcagcttgttaggaggagtaaaccaagcgagccgaccagctcccagcagggtcccggcacacagtaggtgctcagcaaacgaagctgtgacctgagggtggagagtcttatggcagggagggagggaggatgtgacaccccttgagtctcctcaattcctgaggatgnnnnnnnnnnnnnnnnnnnnnnnnnnnnnnnnnnnnnnnnnnnnnnnnnnncgg

SEQ ID NO: 31469 - DNA, 453 bp, Homo sapiens
  misc_feature (1)...(453): n = a,t,c or g
gnnnnngnnnnnntnnnnntttgganatntgnannaccngnnnnnnnnnnnnnnnnnnnnnnnnnnnnnnnnnnnnnnnnnnnnnnnnnnnnnnnnnnnnnnnnnnggcacgaggacaagagctagccaggtgatttgcagttttagtagggtaaggtacagcactatgaaccatttctataacaaaaaggaaatgtatcatgtcaaaagagtaaacaaagttttttagagaagaggaaaacaaatcttgaatttgttatttgtacaaatatacatagaaggctatcagggctgtctgagttttctttcatgtgtgagaatgaaggtaaaacttgctccaggtgcttagataagacttgaaggaaacacaggcatttatttggtttattgttagatcaatatagagttgtacggcaatcttttacattttccactctcaagacctagaaatgc

SEQ ID NO: 31470 - DNA, 453 bp, Homo sapiens
  misc_feature (1)...(453): n = a,t,c or g
gnnnnnngnnnnntnnnnnnnnnnnnttgganatcnnnnnnnnnnnnnnnnnnnnnnnnnnnnnnnnnnnnnnnnnnnnnnnnnnnnnnnnnnnnnnnnnnnggcacgagcttcattttcccagctgagggaacattttctcactgcaatgtatctaagagggtttttacctttctgttgcagggagcttcaggtcaacttagtacgctcacattcttcaggtgttgggaaaccactaagtcctgagaggtgtcggatgctcttggctttaaggatcaatgtcttagccaaaggatacagtggcatttccctggagaccctcaaacaagtcatagaaatgtttaatgcctcctgcctgccctatgtcccagagaaaggaaccgttggtgccagtggagaccttgccccactctctcatcttgctcttgggctagttggagaagggaagatgtg

SEQ ID NO: 31471 - DNA, 437 bp, Homo sapiens
  misc_feature (1)...(437): n = a,t,c or g
ttgganacttggatgaccntttgangaaccnnnnnnnnnnnnnnnnnnnnnnnnnnnnnnnnnnnnnnnnnnnnnggcacgagagaaatatagaaaacattggcctaaggaattgcatttgttgattcatgttaatggttgtttttagctattcttccctactagtgaatcatctataatacagtttgaagtttggtacttagccttttacacccatatttcttcggtagcagaaattagaatgaataatttgtgtgcatttttcaatgtccatacaaatgcaatgcagaaaaaaactcctcttttgcaaacattgtcgctcttcctcaggtgaccctgttagggtcatattttcttttatcttgtatctttaaaggaaagcggtaagtgcagctctaatttcatccacttggtaagcattgatttgtgggcctgta

SEQ ID NO: 31472 - DNA, 432 bp, Homo sapiens
  misc_feature (1)...(432): n = a,t,c or g
atntggataccgttatgactgactacgaatttnnnnnnnnnnnnnnnnnnnnnnnnnnnnnnnnnnnnnnnnnnnnggcacgagttatacaccagcacgtancataggatgaagttcatattcaaatagagtgaggacagaattgcttaacatgtaacacctgctccagctataccccattcatcctctgatgaatctcctanaaactgcagacgtctgaacatgctcaattctagtggtaagagatggagccgaagatgcagagccacccccaggctcaaatccattgatttagaattgaaagtggatctacattagtgattaaacaaacttcatttccctttctcctgggtgagagcacatggctgatttaggaaatagaaggaggctgtggcggggagttgagaatggtcccaatgaacctgaggagtc

SEQ ID NO: 31473 - DNA, 433 bp, Homo sapiens
  misc_feature (1)...(433): n = a,t,c or g
aactggnnnnnnnnnnnnnnnnnnnnnnnnnnnnnnnnnnnnnnnnnnnnnnnnnnnnnnnnnnnnnnnnggcacgagaaaatactaggtatcagaggtaagactaagcaaagtatattttaggtattggaaaagcaatgtacttaaaccaataacaccaccaatttaaatttattactcttttgttctcaagtatatgaaactatgagtcattcaagcttccatttgaaaataacattcaaaaaaacctttgcgagcaccctagaatcagtaataaaacctattctaattatatctagagaaagcattgatttacaatacaccaaaacttagaaaaggtgacccagatatatgagtacttaaaatttcaatgtcattgtttcctggaagtaatcacagtctaaggaggaaatggggacacagggggcacaca

SEQ ID NO: 31474 - DNA, 437 bp, Homo sapiens
  misc_feature (1)...(437): n = a,t,c or g
tttggataaccgtnnnnnnnnnnnnnnnnnnnnnnnnnnnnnnnnnnnnnnnnnnnnnnnnnnnnnnnnnnnnnnnnnggcacgagaactggatgtcaatatcagaaaaaataaaagagaggctgcggcagtagctcatggctgtaatctccacaatttggagccannnnnnnnnnnnnnnnnnnnnnnnnnnnnnnnnnnnnnnnnnnnnnnnnnnnnnnnnnnnagtctctacaaaaaatttttaaaataaaaacagaagagagagaagcttggtttgtatcctataaaaatgtataggatccaaaatagatcatattgcttgagcccaggatttaagacctgcctgggtcacataacgaaatctcannnnnnnnnnnnnnnnnnnnnnnnnnnnnnnnnnnnnnnnnnnnnnnnnnnnnnnnnnnnnnggggag

SEQ ID NO: 31475 - DNA, 433 bp, Homo sapiens
  misc_feature (1)...(433): n = a,t,c or g
tggnatancngnnnnnnnnnnnnnnnnnnnnnnnnnnnnnnnnnnnnnnnnnnnnnnnnnnnnnnnnnnnnnnnnnnggcacgagcccgttaccaagctccaacagctccctacatggcccctcgtgtgtcctgcccacactgcgccaacaccagagcatgctgacgcgtatttcagcatgtatccctgaaagaaaaggtgtcctgcctccctgcgtatcaaacacatgtgtagctgtgtgtctgtccgtatgtgcctctgtgcgtatgtgtattatacatagagaaaccgatctgtacctgtcatgtggacagagactcagaggcttggtaacaacacccactgtggacaggtaaccgctcacaccgggcgtcgtggggacatgaacaggcgcatctctggagggtggtttggcagtggccgcaacagttta

SEQ ID NO: 31476 - DNA, 443 bp, Homo sapiens
  misc_feature (1)...(443): n = a,t,c or g
tnnnntttganatntgataccgtttgacnnnnnnnnnnnnnnnnnnnnnnnnnnnnnnnnnnnnnnnnnnnnnnnnnnnnnnnnnnggcacgagatgatgttcacaaaagtacaagaacttacctaaggtcacgacgttgtgagtggaggtgactttgggataggccatggcacagaaagaaggctgtggcctccctgaactacccagggctcaagggtgagagggaaggagatgtggagttggcttctcagggtcgaaagtgaagccccgcccacaggcctcatcagggctcctggctctaatccacggagaccccagcagcactggctcaaaggtgcttcttccaatgttctgctgtgcccatttagcagatcccactctaggcatggccttggctgaacagtctgtagatgggaagccaggtccttgtctcctctcattc

SEQ ID NO: 31477 - DNA, 442 bp, Homo sapiens
  misc_feature (1)...(442): n = a,t,c or g
tttgggnacntggntancngctatgacnnnnnnnnnnnnnnnnnnnnnnnnnnnnnnnnnnnnnnnnnnnnnnnnnnnnnnnnnnggcacgaggagagagctttgttagggttatagggaagagaatgaaaggatcacatttttatttcagaaaaatgactctacaacatgaaaacagactgcaggaagagaccaaaattgaagcgggaagagggagagattataaacatcacccaagtaaaagacagcattaacttgagttagaatgaatggtgttagcgggaacttgcataaaggatgagtggacatatctggtatctagcaggactgggcatctacagggtagagttaaagctaacacatactttgcttttttttcttttaaagannnnnnnnnnnnnnnnnnnnnnnnnnnnnnnnnnnnnnnnnnnnnnnnnnnnnn

SEQ ID NO: 31478 - DNA, 433 bp, Homo sapiens
  misc_feature (1)...(433): n = a,t,c or g
anacttggatacccnnnnnnnnnnnnnnnnnnnnnnnnnnnnnnnnnnnnnnnnnnnnnnnnnnnnnnnnnnnnnnnnnnnggcacgagctcaaactcttggaattttgatgtttttgaacatgtaacttaatggatcctccttcatattattgtagtttctcttaatactaaagtagatattattgccttggtgtattttacttttaagtttaaaaaatttttgatttaatgatactcttgaggattttagtttgggatattaccactgtcaaagctggcaggttcttcacttgattaagtcttatttccactcaacaccatttaagtagtttgagactnnnnataatgagcattggtacaggactggcccctcttttcagtcaaggtcagttggcaacagctatacactggtgctttattttggaaaggtt

SEQ ID NO: 31479 - DNA, 441 bp, Homo sapiens
  misc_feature (1)...(441): n = a,t,c or g
gganacttgggannnnnnnnnnnnnnnnnnnnnnnnnnnnnnnnnnnnnnnnnnnnnnnnnnnnnnnnnnnnnnnnnnnnnnnnggcacgagacatgcatttaataggcattccagaagtagaaactagaaaaaatggagagaggccgtattcaaagtgatcatggctgacagtatttttcacagttgtgaaagacgagttatgtgttagaagcataaaccaaaaggaaagtaagttatacctcatacccgtgcacatctttttgaaaaatcagagcaccaacaacaaagagaatattttaatagcagcttaaaacaccacctagactggcagcagatttctccccagaaatctttgtaattctgtcaaattttgcttcatgtattttgaggctacgttgcttgtacataagtgtcacagttattatatattaccagtgaa

SEQ ID NO: 31480 - DNA, 437 bp, Homo sapiens
  misc_feature (1)...(437): n = a,t,c or g
tgggnacctnnnnnnnnnnnnnnnnnnnnnnnnnnnnnnnnnnnnnnnnnnnnnnnnnnnnnnnnnnnnnnnnnnggcacgagattaggaagggaaaagagcaagcaatgatgtggtctcagttacagtctaggcttggtctaatccttggagcatttcatgggccgctgaagcataattgcactgcagagttgtctcttcttgacgcagagatggggcaatgaaggtggaagttacttcctgggccaagtggctctcatcagcctgggtaattctccacagaaggaggcatctctgtatagttaggagctgtcttaatcggttaggactgctataacaaaataccatcaactgagtggcttgnnnnnnnnnnnnnnnnnnnnnnnnnnnnnnnnnnnnnnnnnnnnnnnnnngtgctagcagattttgtatttggg

SEQ ID NO: 31481 - DNA, 451 bp, Homo sapiens
  misc_feature (1)...(451): n = a,t,c or g
tnnnnnnnnnnntttgganacntngttgacnnnnnnnnnnnnnnnnnnnnnnnnnnnnnnnnnnnnnnnnnnnnnnnnnnnnnnnnnnggcacgagcccagaggagaaactctgaagccgaagattcccagaggagtggccagggggcctggcccaccccataacaccacaacaggccgcttcctcccctggaatgcaaaagtgcctccggacatcagcttcgttttctgtccctaaaaggactcattctcccatcaaagtggtcctgactggttccagttagccaaaggtgtcattggaggagtaaggcctggcgtcagttctgccgcacagtgtcacttagaatctaaagcagtaactatgtgggctcacccttggaataaatgggatggcatgtagctaatttattttacctaggctgatattccaatttttttgtataaaactatac

SEQ ID NO: 31482 - DNA, 457 bp, Homo sapiens
  misc_feature (1)...(457): n = a,t,c or g
gnngnnnnnnntnnnnnnnnnnntntggnnnnnnnnnnnnnnnnnnnnnnnnnnnnnnnnnnnnnnnnnnnnnnnnnnnnnnnnnnnnnnnnnnnnnnnnggcacgaggggatctctttagctgtggaatgaaagctggatagcacccacagtgccttccctggcctagttcttttacacagctcagcagcctctctggagatattgtctcagtgccagacacttagctaagcactcgagagacagagcaacaggacaaggtcctttccccaaagaaaggtatctataactggataaaaaaggtctgtaaccatggagaccacagcaatggagtgtcatggaaggttcaggagtagcagaaggtgagatgagaggtgggggagggggaaaccttcttggtttgggattttaccatgagaggaaagctgggggaaatttaaagcaacagaaagcaagg

SEQ ID NO: 31483 - DNA, 462 bp, Homo sapiens
  misc_feature (1)...(462): n = a,t,c or g
gnngnnnnnnnngnnnnngnnnnntttggnnacccnnnnntttgnnnnnnnnnnnnnnnnnnnnnnnnnnnnnnnnnnnnnnnnnnnnnnnnnnnnnnnnnnnnnnnnnnnnnnnnnnggcacgaggcattggatagacattcagagatacagatatgttgattggaagataagataattcttgtcagattattccttatttccttttgtgataagaaacaagctaagatgggtgagagggccaggtgttaggaagtttgagaaggaagaaggtatgaagtggtcatctgagaattggaaagtgaaatgtgagatgtagaattgcagcagtactgggtgcctgcttgaataattagcacagttgtgttttttctccagctacctttagctgctgggcacacatgcaaacttcaatcttctgtttcctggtggaaagttcccaagtcctttttggtctggttc

SEQ ID NO: 31484 - DNA, 455 bp, Homo sapiens
  misc_feature (1)...(455): n = a,t,c or g
gngnnnnnnnngnnnnngnnnnttgganaccgttantttgggaaccgntatgacnnnnnnnnnnnnnnnnnnnnnnnnnnnnnnnnnnnnnnnnnnnnnnnnnnnnnnnnnnggcacgagggaaccagagaagtgatgggaagacaatgcccaggaaagtggggtgagtagagatggggccttagaaaatggtctgtgccttcctgagagaatcctaatatacttatcagagagttaggaggctctgtgctttggcatttgagataggaagagacaggttagaggtggctgatcttcatggcagagaataggacttaacatgaaatctaatgtctagtacttttctgtgatgatgtactatgtgaagtctccgcagttttacctttcatggtatccccagccttctaggcagctcacgcaattgcctgctnacacattattttattatttattta

SEQ ID NO: 31485 - DNA, 457 bp, Homo sapiens
  misc_feature (1)...(457): n = a,t,c or g
gnngnnnnnnnngnnnnngnnnnntttggnnacccnntnntttgnnnnnnnnnnnnnnnnnnnnnnnnnnnnnnnnnnnnnnnnnnnnnnnnnnnnnnnnnnnnnnnnnnnnnnnnnnggcacgagcccaatcttcctgatgatccattcaaaaacaggtttttggaagaccactttcgataggcaatcctataatcaaagtacatttttaaaatcaggttgtaaaatggcaaaggtaaagaaaaattactgacatttcttctatgattggagtttagtttatgttggccagctacaaccccttttaatcctcagacagtttgggataaaagagtgcctttggttaatggttagcaagctccaggataagcgctgcgtgcctcttgtattcagctctacctttctgctaagagtgcgggtcatttgtgtgtggctttgcgttccaggctgnggggct

SEQ ID NO: 31486 - DNA, 454 bp, Homo sapiens
  misc_feature (1)...(454): n = a,t,c or g
gnngnnnnnnngnnnnngnnnnnttggnnaccgnnnnttgggaacagctatgacnnnnnnnnnnnnnnnnnnnnnnnnnnnnnnnnnnnnnnnnnnnnnnnnnnnnnnnnnnggcacgagcctatggaagtacgagtgtgtgtgtttcctttctgcctccttagagtgttttacaaccattgttttacacttgcctttatccccttaataatgtatcttgaaaatcattccatgttgttccaaatgacttctaccgcattcttgcaaatagcattctattggataaatttatcataatatgtattatctgttctcttttgatggatttgtaaccaaattgcagctattacatgcaacactgcaatgaccattttttcatatgttagagaagtggggagtagaaaatgcaatccctgtgtgtctgaaatggntttttgctatcaaggccanaagg

SEQ ID NO: 31487 - DNA, 458 bp, Homo sapiens
  misc_feature (1)...(458): n = a,t,c or g
gnngnnnnnnnngnnnnnnnnnnntttggnnacccgntnnttggnnnnnnnnnnnnnnnnnnnnnnnnnnnnnnnnnnnnnnnnnnnnnnnnnnnnnnnnnnnnnnnnnnnnnnnnnnggcacgaggcatagggctcggcgnnnnnnnnnnnnnnnnnnnnnnnnnnnnnnnnnnnnnnnnnnnnnnnnnnnnnnnnnnnnnnnnnnagctcaaggttaaaacaggggggtatgattgcactccctatgattccagcctgggtaagagaccaagaccatctcttcaaaaaaaaacacacaaaaaagaaagagcgcactgaaacttccagagggcagaaaacttgcgctgatacatcccaaacgccaaaaccagtgcccagcccacgcattgcactcaaaaaattgtgttcaaagaagattgatgtctgcctctactacactggattaacccatgactg

SEQ ID NO: 31488 - DNA, 453 bp, Homo sapiens
  misc_feature (1)...(453): n = a,t,c or g
gnngnnnnnnntnnnnnnnnnnattgnnnnnnnnnnnnnnnnnnnnnnnnnnnnnnnnnnnnnnnnnnnnnnnnnnnnnnnnnnnnnnnnnnnnnnnnnnggcacgaggtaggggttggaggaataaggagtggcctacaatgtgtacgagctttattttgaaggtgatgaaaatgttctagattttttagtggtgatagttgcacaaacttctgaatatacttaaaagctactgaattctttactttaaaaaggtgaatttacttcccataatgttatgtggtaatattttatctcaataaaatttttaagaagttttctcccaccctagacacccaatctcattcctcaaagacaaacactgtttataatttctttatattctttcaaagattgttaggcatataattagcatataaatacactgnatttggggnggttctagccacaggt

SEQ ID NO: 31489 - DNA, 459 bp, Homo sapiens
  misc_feature (1)...(459): n = a,t,c or g
gnngnnnnnnngnnnnnngnnnntttggnnaccnntnntttgggnacnnnnnnnnnnnnnnnnnnnnnnnnnnnnnnnnnnnnnnnnnnnnnnnnnnnnnnnnnnnnnnnnnnnnnggcacgaggatgggagtgggtgagagagattctctgtagctcaagggtggtggggatggaaccattggatggggtgaagagagtaacatgtctggtggagggaggaaagaggaaggggaagaaacagctagaggcttgagagagaatggtgagggccaaagctacaccctgaatgagttctggtggagctagtagcatttcttagtgtgaataatccattttccctgaaagtagattttcctgggaaaggagtgagcagaaagaagggctcagctacagtggcccttcaggcaaaagaaaggaactagaattgccngcatgncaaaaaagggcttccgaaggt

SEQ ID NO: 31490 - DNA, 450 bp, Homo sapiens
  misc_feature (1)...(450): n = a,t,c or g
gnnnngnnnnnnttnnnntnnnnnnttgganaccgttnnnnnnnnnnnnnnnnnnnnnnnnnnnnnnnnnnnnnnnnnnnnnnnnnnnnnnnnnnnnnnnnggcacgagcaacagatcaccgtctaagtgcgtcgcttgggcgccccaccccgtctgcgtcctgcatccatctccctgttacagtggcccgcatcatgattaaagaatgtggatccctctgtctggggtgggatgccttactttgcacttaatttaataagggcattctcggaggagtagacgtttaatacgaagtggcggcatagccctgccgagatgtcggtgatggcctggatgctgtaaccacaacctgtggctaaaaattttattttctatcctttacccgtcattatcattagttgctatgattctttctgnattttcgggtaactattantttccaagacttg

SEQ ID NO: 31491 - DNA, 460 bp, Homo sapiens
  misc_feature (1)...(460): n = a,t,c or g
gnnnnnnnnnngnnnnngnnnnnntntttggnnacccttatgganacnnnnnnnnnnnnnnnnnnnnnnnnnnnnnnnnnnnnnnnnnnnnnnnnnnnnnnnnnnnnnnnnnnnnnggcacgagggagatggcgtcccagccgccacctccccccaaaccctgggagacccgccgaattccgggagccggaccgggaccaggaccgggccccactttccaatctgctgatttgggtcctactttaatgacaagacctggacaaccagcacttaccagagtgcccccacctattcttccaaggccatcacagcagacaggaagtagcagtgtgaacacttttagacctgcttacagttcattttcttctggatatggtgcctatggaaattcattttatggaggctatagtccttatagttatggatataatgggctgggctnnaaccggcttcgngtaaa

SEQ ID NO: 31492 - DNA, 458 bp, Homo sapiens
  misc_feature (1)...(458): n = a,t,c or g
nnnnnnnnnnngnnnnngnnnnnnnnttgggnnaccnntttggannnnnnnnnnnnnnnnnnnnnnnnnnnnnnnnnnnnnnnnnnnnnnnnnnnnnnnnnnnnnnnnnnnnnnnnggcacgagcctgggaaatgtcttaaacatgcagaccctgaggttctacctttcttcccatcccctaaacttcttcattattatatctgggcagggcctggaaatctgtattttaaataagtgcctccagtgagttttgcttttatgcactttgggaacccaaggacagatcctgggactctgaggccaagccctgggcttagtttctcctggcactgtctctgtctgcctggatgatctcctggtcacgaaggttcttcgtgtctcagggttatcaggtgtgagtgtctgatgaaatgatgaatgcgagtcccatctttggggggacnctggaaatggaagg

SEQ ID NO: 31493 - DNA, 446 bp, Homo sapiens
  misc_feature (1)...(446): n = a,t,c or g
gnnnnngnnnnnntnttgggnnaccnnttgganacnnnnnnnnnnnnnnnnnnnnnnnnnnnnnnnnnnnnnnnnnnnnnnnnnnnnnnnnnnnnnnnnnnnnnggcacgagttttcagtttgggagaaaggagatgcagatgtaagactgagaagatttagtaaaaactccattgtcctgaatttaaaatataacttctgatgctttttatcttgaaaatacaaaatgatagctacgtcactataattatcactatatatgtacatatatttacatacatatacagttgattctctttatgatttgtatttgtgaattctcttacttgctaaaatttatttgtaattcaaaaaaatcaatattcatgacacttctgtggtcatcgatggatgtattcagagtggcaaaatatttgaggtaccagacccnttagttccagtttgag

SEQ ID NO: 31494 - DNA, 456 bp, Homo sapiens
  misc_feature (1)...(456): n = a,t,c or g
gnnnnnnnnngntnnggnnnnntntttgnnnaccttntggacacnnnnnnnnnnnnnnnnnnnnnnnnnnnnnnnnnnnnnnnnnnnnnnnnnnnnnnnnnnnnnnnnnnnnnggcacgaggagaaggttttgcctgtttgtatttcatcttctctcatcaagtcctcagaaaccacagtgctgtctgcagggtgctgtggatctggcatggcccatacaggcaacatgactgagtagaaaggacacacagctctggatgtccttgggccccacagcaactgcccttgaaacatttagtccttgtgagcatttgatgatttacttgccttcaattttccatggacctaatactctttataaagggaaatattttaaacctatgaatcattgtggagaatggcatgggaaatacccatgtatgcaccacccagnttaacnaaagctcttctggcatt

SEQ ID NO: 31495 - DNA, 450 bp, Homo sapiens
  misc_feature (1)...(450): n = a,t,c or g
gnnnngnnnngntnnnttnnnnntctgganaccngttttgacnnnnnnnnnnnnnnnnnnnnnnnnnnnnnnnnnnnnnnnnnnnnnnnnnnnnnnnnnnggcacgagcattgttattgttactgttgttgttatcctactaacttgccttaattcaagtttaactgtttgtgtcaaaggtaatcagaagttcttattggttctcgggagtggggagacacgtggcccacacagccaccctttgacctctgtattagattcacttcctccgtgtgttgctgcagactccctgttataacaaagatcccactgcatgccctcccccatctcctcccaaagaagcagtggcccacacaagatcaatattcatgcctctcgtgttggggtcagtggtgggtgctttcgggtagacgagcagctgtgctccgtgaagctgtccggggcccaggt

SEQ ID NO: 31496 - DNA, 448 bp, Homo sapiens
  misc_feature (1)...(448): n = a,t,c or g
gnnngnnnnnntnnnttnnnnntnntganaccgttttgacnnnnnnnnnnnnnnnnnnnnnnnnnnnnnnnnnnnnnnnnnnnnnnnnnnnnnnnnnnggcacgagctcggaaaagaattacctaataaccagatttaagggcataaggaagggatgtagttctgcctccatcctcctgcttcctagtggtctataatgagtatcctgcattatatggctcttgcttaaatctgaaccaaccacgtatcccaccactcttccttttcttcctcaaacatgccctatctcagggcctttgcacctgctgtttcttctgcctggagtgctcttcctattccttttcatgagtggttccttcttgtcaaattttggctcaaatattttatcctaagtgaacttctccttgaccacattannnnnnnnnnnnnnnnnnnnnnnnnnnnnnnn

SEQ ID NO: 31497 - DNA, 458 bp, Homo sapiens
  misc_feature (1)...(458): n = a,t,c or g
gngnnnnttnnnnntttgnnnttcgctatcacnnnnnnnnnnnnnnnnnnnnnnnnnnnnnnnnnnnnnnnnnnnnnnnnnnnnnnnnnnggcacgagagctactattatgccaccacgcttgctaacttaatggtatcacttttaagaaatactgcaggttttttaaaaataccagttggaatgcctcattctaggatattctcatttacttttaaaaacgtcatttanagctttttgctttctggggttttttggtacttttttttcaacctttgtatggtgtgctttctccataatatatgaatatttatttttatttgaaaaatgttttccctcaaacccaataattgatgctggaggaaggtgtgttacgtctctcctgtggcatcatgtactgttactgcgtgccttagtacccacctgtttaagaggcacaggacctgatgattctattgt

SEQ ID NO: 31498 - DNA, 442 bp, Homo sapiens
  misc_feature (1)...(442): n = a,t,c or g
ctttgnataccgtnnnnnnnnnnnnnnnnnnnnnnnnnnnnnnnnnnnnnnnnnnnnnnnnnnnnnnnnnnnnnnnnggcacgagtgcctctttactcttactttttcatttgacaaaaatggaagataaataagatgaaataaataatttttgtttggagaataaaactaaaatatttccatttgcagtcgaccctctgtatccagagattcaagcaactgcgatggaaaatagtctttaaaaaagcaacaacaaaaaaatacaaatttttaaaaataaagtataataacttttnnnnnnnnnnnnnnnnnnnnnnnnnnnnnnnnnnnnnnnnngtaatgtagaggaaaaaataacaaagtaggatataggccttgcagagaaatttagtgtattggtaccttagacttacctgactgatttgacaaatttatttgttgc

SEQ ID NO: 31499 - DNA, 437 bp, Homo sapiens
  misc_feature (1)...(437): n = a,t,c or g
natccnnnnnnnnnnnnnnnnnnnnnnnnnnnnnnnnnnnnnnnnnnnnnnnnnnnnnnnnnnnnnnnnnnggcacgagacccaagtgaggtcagaaactttgtatagtttattttacaactgttattcttactcagcacctattctgtgccagtcactattctagaaactgagaatattgtgacaaatagaagacaggaattctttccctcatggaatttatattctaccacaagtggggtatgtggcatggggacaggcaataaaccggcaaatcagtacaatacatagtatatcagatggtagggaggacagtggaaaaatataaaagaagtattgggacagtggaaaaatataaactggagttggaggttgggtggtacagttttacaaaaatatgttggtcatggaagacctatctgaaaagataatatttg

SEQ ID NO: 31500 - DNA, 460 bp, Homo sapiens
  misc_feature (1)...(460): n = a,t,c or g
gngnnnnntnnnnnntttgnntttgganacccgnnnnnnnnnnnnnnnnnnnnnnnnnnnnnnnnnnnnnnnnnnnnnnnnnnnnnnnnnnnnnnnnnnggcacgagaattttaaaatgagtttatccattggcaactcatttgaaaaaaatgtagcccctttttttttcaggttctttagacctctcacttgtaaagatttcatagacatggatctttatttttaaagtacatttttccaccatttttatctccttttcattaacttctggaaacacatttttgtaatgtaggagagaagaaagaatttctcatgtgtttacagattttttaaaaatctgctaatatgtatttgtgagataagtatttctcttgctcatgctgtctgcaaatcagtgacccaacactttcctttcacatccattttcccagcttgattctagaatctaaaactattgct

SEQ ID NO: 31501 - DNA, 461 bp, Homo sapiens
  misc_feature (1)...(461): n = a,t,c or g
gnngnnnnntnnnnnnnttggnnttggannnnnnnnnnnnnnnnnnnnnnnnnnnnnnnnnnnnnnnnnnnnnnnnnnnnnnnnnnnnnnnnnnnnnnnnggcacgaggcatactttccactctctccttgtatttggaagaagggacaatggagggatcattctctctatcaagaccaagggtcacaaatggaaaagagaggcccagcgggcatttaaatgaccaatacatgatttgggaagttacggtaaactggtgggaacatgccctgcctaaagcaggcaactgctactcagttccatctgagtgttgtcctttagaaatgtggacccagtgttagatctcctgacttttcaggagaagccccaaatccaaactttatgtgagatagtccagtttaaatattggaaaccaaatcaattacttaaaaatactgtgaagatcaaagaaacagatctgc

SEQ ID NO: 31502 - DNA, 459 bp, Homo sapiens
  misc_feature (1)...(459): n = a,t,c or g
gnngnnnnntnnnnnnttngntttgganacccgnnnnnnnnnnnnnnnnnnnnnnnnnnnnnnnnnnnnnnnnnnnnnnnnnnnnnnnnnnnnnnnnnnggcacgagcaagcagatgcataagtgatgtgatattggaatactagcttcaggattgaggaaaagaagcagatgcagagaactaaggggtggagttttagggaagaagtagcattgtgaccttgagtaaaatcagttggctctccttcagtctcatctaggtaaaattgcagagttatgccttacctacaagctagggcaggggggtttactctatgatttcttaagattcttcctctaaaatggaaatatctagaggtggcttaaaccagagttttgaaggatggaggaaatgaggccagggcatgaaaagaaagggggtgggggccgttaggaggttgtaacaataaagatcagactt

SEQ ID NO: 31503 - DNA, 437 bp, Homo sapiens
  misc_feature (1)...(437): n = a,t,c or g
atccnnnnnnnnnnnnnnnnnnnnnnnnnnnnnnnnnnnnnnnnnnnnnnnnnnnnnnnnnnnnnnnnnnnggcacgaggtaattgaaaggggaaaaaaaagattttagggagagtgtatgctgccctagacttctgctgacatctgtgatgagaaggcagaattctctaaatatatgggatgaacataatggaagatattataataatgatctgaaatggttggaaacctctatgtttaataatgtaaatcctatcttccaataaataaataaatcttctctaccttttgcaccatcaagcttcaaagacaggtgaaagttcctgagtgttatagagaatagtataagtaactcagtaaataaagtatagcattaatgcctctcttttttccttcttattcctttgcatctgattagtgcctttggcaatattatt

SEQ ID NO: 31504 - DNA, 465 bp, Homo sapiens
  misc_feature (1)...(465): n = a,t,c or g
gnnnnnnnnnnnnnnntttgnntttngnnnnnnnnnnnnnnnnnnnnnnnnnnnnnnnnnnnnnnnnnnnnnnnnnnnnnnnnnnnnnnnnnnnnnnnnnggcacgaggacaggtatcatactgttttttttccacaaacgaggactgtaacgttcagagaagctgaggaaagtgtgtagtgtcagagagctcctaggtagcagtgccagaattagagcccaagtttatatccatcacagtccagtcattctcaacagaggcgtgcaatagaatccctgggagcacaaagagtcccctgggattgctgaggcaggtgcatgtttagaaatcccccaggtannnnnnnnnnnnnnnnnnnnnnnnnnnnnnnnnnnnnnnnnnnnnnnnnnnnnnnnnnnnnnnnnnnnnnnnnnnnnnnnnnnnnnnnnnnnnnnnnnnnnnnnnnnnnnnnnnnnnnnnnnnnn

SEQ ID NO: 31505 - DNA, 453 bp, Homo sapiens
  misc_feature (1)...(453): n = a,t,c or g
gnntnnnttnnnnnttgantcgtttccnnnnnnnnnnnnnnnnnnnnnnnnnnnnnnnnnnnnnnnnnnnnnnnnnnnnnnnnnnggcacgaggtgagattttccgaatcctgatgaccccaagcatgtgaatttctgcttaagcacatgtagacttgctgttgtagagttagtgggagcggggcactttgtgagtggcggtgtggttgtgagcagtcacctcctttttgtctgtccattcagatgttccctgtgcagcgtgtttctctgtacttgtttttactgcagggagtattgctggccatcacaccatgtgaagactggtctctgtctctttgcaaatgtgtgtctggtaatatgatagagccaaatataaatattgtttggattagttatttatataatcagttggcccataaatgtgtttttatctctttccactattaacataaa

SEQ ID NO: 31506 - DNA, 441 bp, Homo sapiens
  misc_feature (1)...(441): n = a,t,c or g
ttganatcgnttnacnnnnnnnnnnnnnnnnnnnnnnnnnnnnnnnnnnnnnnnnnnnnnnnnnnnnnnnnnnggcacgagctggagaatcgcttgannnnnnnnnnnnnnnnnnnnnnnnnnnnnnnnnnnnnnnnnnnnnnnnnnnnnnnnnnnnnnnnnnnnnnnnnnnnnnnnnnnnnnnnnncttaacattttttgtttctggttgtttcacgtcaaggaagataattcataatttcagaatggaaaagctaaggcaccattctgataattcaaacatttatttgagcatcctacttactttagtgttcagatattctgatattagcttcatgttggctgtggccaggttccctgaggtctctaaagtagagggactctgtgcactaaacctctctttaagctttcctgagctatttgttatcccagtgtaggaag

SEQ ID NO: 31507 - DNA, 440 bp, Homo sapiens
  misc_feature (1)...(440): n = a,t,c or g
ntttggnnacngtnnnnnnnnnnnnnnnnnnnnnnnnnnnnnnnnnnnnnnnnnnnnnnnnnnnnnnnnnnnnnnnnnggcacgagactgggagaacacaattagtggttgatgggtaaaccaaaggtcagagatgaatcagccatcaattttaagttgtgaaacagaaaaggccaggagtcaaaaaggannnnnnnnnnnnnnnnnnnnnnnnnnnnnnnnnnnnnnnnnnnnnnnnnnnnnnnnnnnnnnnnnnnnnnnnnnnnnnnnnnnnnnnnnnnnnnnnnntaatatggcaagatcccatctcannnnnnnnnnnnnnnnnnnnnnnnnnnnnnnnnnnnnnnnngatgaacagatccctgaagttggatgcacaatggatccgaacaagggactgagaatagaggcagtaaatcatgtgtggataccagtat

SEQ ID NO: 31508 - DNA, 434 bp, Homo sapiens
  misc_feature (1)...(434): n = a,t,c or g
acccntttnaacnnnnnnnnnnnnnnnnnnnnnnnnnnnnnnnnnnnnnnnnnnnnnnnnnnnnnnnnnnnnnnnnnnnnnnggcacgagannnnnnnnnnnnnnnnnnnnnnnnnnnnnnnnnnnnnnggcttttcacccttgtagttattattatcctggttccccaaggtcagaaactaagtcataaaaggaactatctgtgtgtatatgcttcctgtgaccaatctttcatgattagcacatgagctatttgctgtgtaactcgaatatccacataattattaaagcatctaaatagagcacttgagtaactcatctccctattaggtttttgttattgttttactcaaaagaacattttccatcaaaatttcaaaggtctataccatgtgatccaggaattcttctaggaatttactttccaatttctc

SEQ ID NO: 31509 - DNA, 448 bp, Homo sapiens
  misc_feature (1)...(448): n = a,t,c or g
tnnnntnnnnnnatttgaanaccntnnnnnnnnnnnnnnnnnnnnnnnnnnnnnnnnnnnnnnnnnnnnnnnnnnnnnnnnnnnnnnnnnggcacgagtgacacccttgttggagaaggaggaggccagatgagtggtggccagaaacaaagggtagctatcgccagagccctcatccgaaatcccaagattctgcttttggacatggccacctcagctctggacaatgagagtgaagccatggtgcaagaagtgctgagtaagattcagcatgggcacacaatcatttcagttgctcatcgcttgtctacggtcagagctgcagataccatcattggttttgaacatggcactgcagtggaaagagggacccatgaagaattactggaaaggaaaggtgtttacttcactctagtgactttgcaaagccagggaaatcaagctctta

SEQ ID NO: 31510 - DNA, 446 bp, Homo sapiens
  misc_feature (1)...(446): n = a,t,c or g
tnnnntnnnnnatntganacccttttnnacacnnnnnnnnnnnnnnnnnnnnnnnnnnnnnnnnnnnnnnnnnnnnnnnnnnnnnnnnnggcacgagtacatatttttgtttcctttctaggagaaccctcacctaataataatgaatgtcagtgactgtatcccagatgctattgaagttgtaagcaagccagaagggacaaagatacagttcctaggcactaggaagtcactcacagaaaccgagttgactaagcctaactacctttatctccttccaacagaaaagaatcactctggccctggcccctgcatctgttttgagaacttgacctataaccaggcagcttctgactctggctcttgtggccatgttccagtatccccaaaagccccaagtatgctgggactaatgacctcacctgaaaatgtactaaaggcactag

SEQ ID NO: 31511 - DNA, 442 bp, Homo sapiens
  misc_feature (1)...(442): n = a,t,c or g
nnnntnnnnnatttganaccntttnnnnnnnnnnnnnnnnnnnnnnnnnnnnnnnnnnnnnnnnnnnnnnnnnnnnnnnnnnnnnnnggcacgagtgaagatttttaaggtttgctgttaccatttcttttttctctttttatcagtatcatataatttagattaaaactttattttgatatgaaaatgattcaccaattatcagtgccagtaagtttcttaaagatatatattatagataatgatatttgatcttagagtatctattgaacgttttaacggatattttaagtattgtgttttctttatatctggtatactgatgatctatgttttccagctgcattttctttgagacaacagtttgtgagaagtttgaaaaaagaaaataatatctaatcaatattaaaagcaatagatcaattcaatacagtttttgctg

SEQ ID NO: 31512 - DNA, 430 bp, Homo sapiens
  misc_feature (1)...(430): n = a,t,c or g
attgganaccgttatgacnnnnnnnnnnnnnnnnnnnnnnnnnnnnnnnnnnnnnnnnnnnnnnnnnnnnnnnnnnggcacgagctggaaggaaagataagggcttctctgtattatgtatctgttcttttgtaaagtctggtcaccataatacagggaaatccttaccttcttttttagttgaacatctcatatgctagttaatcctcatatcaatttcatacagtgatattatttttaggacacagaaagagaaactgaggcacagtatgtcaataagttggccaaagtcatacaggcactccgtgaaagagctgaggtttgtataaattctgtctaatgccaaaagtgataccttccactctgtgatagccactctgtgataccttccattcctttgccctttcctgtcctccagtttagctcttgg

SEQ ID NO: 31513 - DNA, 429 bp, Homo sapiens
  misc_feature (1)...(429): n = a,t,c or g
tttganaccntttnnnnnnnnnnnnnnnnnnnnnnnnnnnnnnnnnnnnnnnnnnnnnnnnnnnnnnnnnnnnnnnggcacgaggcagtgtgtgagcaagctgactcctgtcttgtcaagtaccaggtccactctgatgagcccctgtggacagcactgctgtaactccccaagcctgggctcaggaggtgggccctaagcgctgttcccagctcttcctccatgctgtcagctcttccaccattcttcctggcgtcattctaaggtcctgtcttcccccgccctcttccttcctggcttctacgctcagctcaagtagtagctgtttgggtacttttcacccagacttaggaaatgttatcagttggtcgtattcctgtcagccctcttactatggaactcaaataggacagattcagctgaattccc

SEQ ID NO: 31514 - DNA, 435 bp, Homo sapiens
  misc_feature (1)...(435): n = a,t,c or g
tntttggantaccntttgaanaccctnnnnnnnnnnnnnnnnnnnnnnnnnnnnnnnnnnnnnnnnnnnnnnnnnnnnnnnnnnnnnnnnnnggcacgagggttaaagacctatttgcatattgggcctagttaatatgttgcaggcatacaggagaaagagattcagagataaagacagattttgatttttctgggaatttcaattgggaaagtaggctaggagagagtttgagaggaattaagaccaagggcaagatatgaggaattgttttgtgctgagggctttgaaggaattggggatgtctttctaccctctctgctgtttccttttcttaaggtagcatcagggagactgtgttggagtcgacagtatcttggatgagtgggtggggactaatatgataacatgaggagggaaggttttttttttttt

SEQ ID NO: 31515 - DNA, 445 bp, Homo sapiens
  misc_feature (1)...(445): n = a,t,c or g
tnnnnnnnnnnnntttggaanaccngtnnnnnnnnnnnnnnnnnnnnnnnnnnnnnnnnnnnnnnnnnnnnnnnnnnnnnnnnnnnnnnnnnggcacgagactcattgtttgaaagtcagtactgttcaaggttagttctgcaatttaaaactcttcttaagtattccagctcattctgtttttctgttccttcaaactgaacttttcttggctgtgtgaaggttgtttatacaaattaggtcattcttgtcttacccaactaaatcagagtcaaggggccaggaggaaaaagcactcagggcacatagcactgtcgcacctgctccaaaatttacactttctataagcctagctgctgaaatggcctgctgtaacaccaagaccagttttagctagtagctgctgggaccacctactgtgactctaagactggttttacctgct

SEQ ID NO: 31516 - DNA, 424 bp, Homo sapiens
  misc_feature (1)...(424): n = a,t,c or g
accnttgganacagcttgacnnnnnnnnnnnnnnnnnnnnnnnnnnnnnnnnnnnnnnnnnnnnnnnnnnnnnnnnnnggcacgaggtgtgaggcgctgcggacggggttgcgggctcggtagcggcagcttcagggcgcgagcgcgggcggtgccgaccactgcaggtaacagaggcgctgcgagggcagccgcggccctgtggagatgaggaaattgaggcacagagattaactaatctgaaccagataatgccataagtagtagaactgcgatgcaaacttggacagtctgactccagagtctgcacacttaaccactccactattctggccttctacaagttccaaaagatgagtcgtggatattcagaaaacaacaatttcctgaacaataataaccaaatggtattggacatgatcct

SEQ ID NO: 31517 - DNA, 433 bp, Homo sapiens
  misc_feature (1)...(433): n = a,t,c or g
ttggaanaccntttnnnnnnnnnnnnnnnnnnnnnnnnnnnnnnnnnnnnnnnnnnnnnnnnnnnnnnnnnnnnnnnnggcacgagnnnnnnnnnnnnnnnnnnnnnnnnnnnnnnnnnnnnnnnnnnnnnnnnnnnnnnnnnnnnnnnnnnnnnnnnnnnnnnnnnnnnnnnnnnnnnnnnnnnnnnnnnnnnnnnnnnnnnnnnnnnnnnnnnnnnnnnnnnnnnnnnnnnnnnnnnnnnnnnnnnnnnnnnnnnnnnnnnnnnnnnnnnnnnnnnnnnnnnnnnnnnnnnnnnnnnnnnnnnnnnttctccccaaagggtaaacagatgaatcaggcagagcaacgctcttgaggacaccccacctctgcctctggtagactctgagttcttcgttttatttattctgtgactttattcgtatgcacccc

SEQ ID NO: 31518 - DNA, 428 bp, Homo sapiens
  misc_feature (1)...(428): n = a,t,c or g
ccntttggannacnnnnnnnnnnnnnnnnnnnnnnnnnnnnnnnnnnnnnnnnnnnnnnnnnnnnnnnnnnnnnnnnnnnnnggcacgagcctggatctgtacaggtctcgtctgggagtcttccactagaattcatgttcttttagcactgccaaagttatagtatgtctgctcctgagcccaatatatttcattcctcaaagttcaaggggtatcaagataaaaataccatagtagtatagcccaaaagttagttcagtcaaataaatgcctgagtttattatgacgtttgtagtaatttataaactaaaccaagatatgagcattaatctgttcaaaagaagttggtgtttcagggtcttttatattttagacctacagttgtcttaagtcatttgcagaaacttgttggtggaaggagctgata

SEQ ID NO: 31519 - DNA, 323 bp, Homo sapiens
  misc_feature (1)...(323): n = a,t,c or g
anaaccgtttgacatnattacgaatttaatacnnnnnnnnnnnnnnnnnnnnnnnnnnnnnnnnnnnnnnnnnggcacgagggacaaaattgttaaagaaaaatgaagcattgttagcgtagactttaacgttcctctggcatgtaatattcacgtagactcactagtgcaaagagaaagtgcatgtatctaagtaaaagtgcccatgggcatcttaaaatgattaggtagtaagcccacattctcaaaagagcagcagaagtcatggctaatatggaaccatctctctgattccatggaagtggtttctttttttttttttt

SEQ ID NO: 31520 - DNA, 436 bp, Homo sapiens
  misc_feature (1)...(436): n = a,t,c or g
tntttgannnccatntgaanacnntnnnnnnnnnnnnnnnnnnnnnnnnnnnnnnnnnnnnnnnnnnnnnnnnnnnnnnnnnnnnnnnnnggcacgagcggcacgannnnnnnnnnnnnnnnnnnnnnnnnnnnnnnnnnnnnnnnnnnnnnnnnnnnnnnnnnnnnnnnnnnnnnnnnnnnnnnnnnnnnnnnnnnnnnnnnnnnnnnnnnnnnnnnnnnnnnnnnnnnnnnnnnnnnnnnnnnnnnnnnnnnnnnnnnnnnnnnnnnnnnnnnnnnnnnnntatccagctcactctcctcaccacacttgtgctcatgttgttccctcggcctcaaatgcaccaacagacatgtaataggcaccccttatgtgccaagcatgatgtcaggagctgggaatacagggtgaatcagctaagccctgcttccaagag

SEQ ID NO: 31521 - DNA, 434 bp, Homo sapiens
  misc_feature (1)...(434): n = a,t,c or g
ttgaaanaccnnttttgacatcnnnnnnnnnnnnnnnnnnnnnnnnnnnnnnnnnnnnnnnnnnnnnnnnnnnnnnnnnggcacgnnnnnnnnnnnnnnnnnnnnnnnnnnnnnnnnnnnnnnnnnnnnnnnnnnnnnnnnnnnnnnnnnnnnnnnnnnnnnnnnnnnnnnnnnnnnnnnnnnnnnnnnnnnnnnnnnnnnnnnnnnnnnnnnnnnnnnnnnnnnnnnnnnnnnnnnnnnnnnnnnnnnnnnnnnnnnngacgaaaaatcctaatagaatgattaacaattccaagctctacccaggccctaacatacagtttaattgctttatatcttagggcatatcttcgatgtcttgagtttgtacaatagaaatgaaaccccccaaaaacagggcaaaattccatagggaataaaaccaatcaccagta

SEQ ID NO: 31522 - DNA, 439 bp, Homo sapiens
  misc_feature (1)...(439): n = a,t,c or g
nntttgnnnnnccnttggannaccatnnnnnnnnnnnnnnnnnnnnnnnnnnnnnnnnnnnnnnnnnnnnnnnnnnnnnnnnnnnnnnnnnnggcacgaggagatgtgtaagagactcaacagaatttggtgataaattgggatcagcaagagagaatgagttatgaatcaggcccagaaatctggtttaaacatctaggtttatggtgatagcttccacttagataaggaacagagaatagatatgagtttgaagggacagataatatcttcaaatcacagacttagtgagttgtccacgaggcagatcatggtcagacactcagcagaggcacccgagcttgagagtgaaatctgggaactatcagcacgtggcagttcaggccctggaggagagaatcagaagaggtgagagtctctaaaagagcaccagtactga

SEQ ID NO: 31523 - DNA, 429 bp, Homo sapiens
  misc_feature (1)...(429): n = a,t,c or g
nttgganacngtttgacnnnnnnnnnnnnnnnnnnnnnnnnnnnnnnnnnnnnnnnnnnnnnnnnnnnnnnnnnnggcacgagggcttacaccagttgctttgctccttgcggtgcctgctgctggcccctgagctctctactggagcagactcagccagaggggtgcccatctccaccttcaagcacacttgttcactaaggcctgactccactgcgctcacctctttaccccacacgccccctttcccgtttcctacactcaaactcagtctcccccgctgtgcagttctaaattgcgctcctttctgggctctgacttgccctcaatttccttttctcccaaccagcattgaaactcaagctggatgatgtgcttggggccagcacactcaggtcagtttgaatgtagttgtcaggaagatcgaag

SEQ ID NO: 31524 - DNA, 437 bp, Homo sapiens
  misc_feature (1)...(437): n = a,t,c or g
tntttgannnccntttggaanacntntnnnnnnnnnnnnnnnnnnnnnnnnnnnnnnnnnnnnnnnnnnnnnnnnnnnnnnnnnnnnnnnggcacgagggcgtggggggcagtcttgtgggactcagtnnnnnnnnnnnnnnnnnnnnnnnnnnnnnnnnnnnnnnnnnnnnnnnnnnnnnnnnnnnnnnnnnnnnnnnnnnnnnnnnnnntgggagaattgcttggcgtgttgggacaaatgcccacccatctggtgtcagaagaattatattgagtggcgtgtgagtagatgggaaaaaactcattctgttatggtgccccacgatgggacttgaattgctggagtaattcaaacactatagcaccacttactcaacatattatctataggagaagagattatttccactcaccctgtgtgtggaggtatataag

SEQ ID NO: 31525 - DNA, 424 bp, Homo sapiens
  misc_feature (1)...(424): n = a,t,c or g
ccntttgaanacngctatgacnnnnnnnnnnnnnnnnnnnnnnnnnnnnnnnnnnnnnnnnnnnnnnnnnnnnnnnnnnggcacgagcggcacgagccataccctcatcaacacctgctatcttttgattttttgagagtacctattctaactagagtgatgtgatatctcattatagttttgacttgcattttnnnnnnnnnnnnnnnnnnnnnnnnnnnnnnnnnnnnnnnnnnnnnnnnnnnnnnntcttttnnnnnnnnnnnnnnnnnnnnnnnnnnnnnnnnnnnnnnnnnnnnnnnnnnnnnnnngttattgagtgtttgagttctttatatttgggtattaaccctttatcagttgtgtagtttgtaaatgtgttctcccagtctatgactggcatccttgctctgttgattgttac

SEQ ID NO: 31526 - DNA, 420 bp, Homo sapiens
  misc_feature (1)...(420): n = a,t,c or g
nnnnnnnnnnnnnnnnnnnnnnnnnnnnnnnnnnnnnnnnnnnnnnnnnnnnnnnnnnnnnnnnnnnnggcacgagaacttgacatttgagatataaaaccaatgggataaagttctgataaaagttttttttatagatcaactagctttattatatgaatatgcagttatatactgttagtatttaataatgagcaacttacagaaattaaaaagatcagtagactagatagcaattctaatctgcaaaatgatgttcaaaaatactcttatttttctgtttaccttaagagcacaaaagatattttttgcaggaaatgaaaatttagcactgtagtgccttatcctaaaagattacagataggtggaaagtggatttaaatatttggaatattagtgtttctctccttgaacacagca

SEQ ID NO: 31527 - DNA, 425 bp, Homo sapiens
  misc_feature (1)...(425): n = a,t,c or g
ccntttgannnnnnnnnnnnnnnnnnnnnnnnnnnnnnnnnnnnnnnnnnnnnnnnnnnnnnnnnnnnnnnnnnnnnnnnggcacgagctggcgtgttcatcttccgtagtctgctttgcatttgcaagctttacagttgtgagaaactgttgattgtctctattctcttcactatctgtgtcactgtgatcatcattttgaggtgaccgatcaatgttagcattactaaactgctctggtaccagggttactgtttgaggttcactttccaaaagctgctccgtgtgtttcccttcattttgccacttacacattgctgcagtctgatgctggttcaaatactgtgtacttttttcagtgagtgacttatcaagacttagctgagaaacattttctaatttttctacattatgttggtaaaagt

SEQ ID NO: 31528 - DNA, 488 bp, Homo sapiens
  misc_feature (1)...(488): n = a,t,c or g
gganattgntttgttaccnttatgactgatcacgaattttnnnnnnnnnnnnnnnnnnnnnnnnnnnnnnnnnnnnnnnnnnnggcacgaggagcgtcaaaggatattagggacgggaagaacatccaggacattcctcatacgctcatccccactgctttcccaggggctcagagggtgagggctgcagccacattcacgttctgatgcctgcagagctgagagtcaccccgaaatccgtgactctggagcccccttgctctgtgaagccatacagtaaaatactgtgacatttagctgccagtttcaggccagctatgtgcccagagcttgtaccttaaattagaagagcctgacgggtgacgtatagggctttgccacctggacaactatgccatgattcctcctgcgcccttagagatggggagaaatagcaaccacctgccttgaaataggagcatctccctgtaccccacctgcttgctctg

SEQ ID NO: 31529 - DNA, 488 bp, Homo sapiens
  misc_feature (1)...(488): n = a,t,c or g
ggagnttgaatcgtatgacnnnnnnnnnnnnnnnnnnnnnnnnnnnnnnnnnnnnnnnnnnnnnnnnnnnnnnnnnnggcacgagcagaaccgctttgggaagccgaggcggaaggaccgctagagccttggagttcgaagccagcctgatctttacaaaagtaaaataactaaccgtgcctggcgtctcatnnnnnnnnnnnnnnnnnnnnnnnnnnnnnnnnnnnnnnnnnnnnnnnnnnnnnnnnnnnnnnnnnnnnnnnnnnnnnnnnnnnnnnnnnnnnnnnnnnnnnnnnnnnnnnnnnnnnnnnnnngtttcaaatgaacctagtgtcagatatttactttctgtattacagaggactgaaagctagctaaataatacttttcagtgtacctgggttccagagataaaattggtaaactaacctttgctccttacttgggcttttagtttatacttcataagaccatggaagcaaaattta

SEQ ID NO: 31530 - DNA, 486 bp, Homo sapiens
  misc_feature (1)...(486): n = a,t,c or g
gagnttgnaatcgtatgactgattacgaatttaatacnnnnnnnnnnnnnnnnnnnnnnnnnnnnnnnnnnnnnnnnnggcacgaggcaaagaaaggggtccctcctcaggcaaaggccccatgcgccctcattggtcagatccactctctgcagaccgttaagctacagacatcaccttacctccctacttgtatgtgcaagcctctggccttaggaaaatccccttcttatgataagtaacatttctgcaaataaccagttaagctcagattttttaatgtggttgttcaaagatttgtttaaacaatctagatcactttccttccactctctctccctttctgttccttgatagtatctaaagcagatgtctccctccccttcccttccccctgccagtcttttcaagaatagcttcaggagataatgttctatagagagctattttgtaattgaaactctagcattgttcgcatctacggga

SEQ ID NO: 31531 - DNA, 483 bp, Homo sapiens
  misc_feature (1)...(483): n = a,t,c or g
gtgtgnttgnnttggaaccctatgacnnnnnnnnnnnnnnnnnnnnnnnnnnnnnnnnnnnnnnnnnnnnnnnnnnnnnnnnnnggcacgagatcaaggcatataagagggtagaatttccactggctcatttctttgtaaacacaaaatcaattttggggtctacattttctggggatggaaacattttggtacagatgccaatttgtagccatcctgaagagatgtgctattgagctgtctctcaaagctctagaacaataattctcaaactttagaatgcatcagaattatcttgagggcatttaaaaacagattgctgagtttcatcccagagtttctgattcttcagaaggtatgggatggggtcaagaatgtgcatttctaatgtgctccanaggctatgctttgtgaccaatgactcttacccctggttgcanattggaatcacctggctaggaacccttaaaaacatanatatag

SEQ ID NO: 31532 - DNA, 484 bp, Homo sapiens
  misc_feature (1)...(484): n = a,t,c or g
ggngnttnnnttnnnacagctatgacnnnnnnnnnnnnnnnnnnnnnnnnnnnnnnnnnnnnnnnnnnnnnnnnnnnnnnnnnnggcacgagaaggaaactcaggatgccttgtgaatcacacagtgccccaccactgacactcataaccctttgaaggtgggctcatcagctcatcacttcccctttcccagaccattatgctgcgtaaattcaagacttctcgggttctgcccaccacgtgggggctgctgcttgaaggggacgttccccactgcagggagtctcttgtggactttaggccctgttctcgccacgcccgtgaggacgacggcaatgccagaattaggtttcttttctgtttctgctcttgtgtcattcttagagcacttagtaatattcgttaattggagggaaaatcacccttttgagatctggagcctcatatgtaaaacctggttgcccttgcccctctgtgcctgcat

SEQ ID NO: 31533 - DNA, 481 bp, Homo sapiens
  misc_feature (1)...(481): n = a,t,c or g
ggtgnttgacttganaccnctnnnnnnnnnnnnnnnnnnnnnnnnnnnnnnnnnnnnnnnnnnnnnnnnnnnnnnnnnnnnnnnggcacgagggcccgggcttctccagacacccccgaggcaacacgccatccctcagccttcttcgcggtggagacccctaccagcttctccagggagacgggactgccctgatgcctcctgtgcccccacatccaccccggggtgtttttggctcatggcaggattactacacatggcggggcctcagcttggactcccccatagccgtgcttctcacctacccgctgaccgtgtactacgtcatcacccacctggtgccccagtccttccctgagctcaacatccaaaacaaacagtcactgaagatccacgtggtggaggccgggaaggagtttgaccttgtcatggtgttttgggagcttttggtcctgctcccccatgtggccctggagctgca

SEQ ID NO: 31534 - DNA, 430 bp, Homo sapiens
  misc_feature (1)...(430): n = a,t,c or g
ggtcttgaaccctnnnnnnnnnnnnnnnnnnnnnnnnnnnnnnnnnnnnnnnnnnnnnnnnnnnnnnnnnnnnnnnggcacgagttcaggttaattacctgccagtgggtattttccaccatctattattaaataacacctatttgccctctgtgaaaatttttacagagacttcagttaactcattagagcaatatcaacacttgacaggctgatttttatgggggatgttaacagaaatgttagcaccaatgtaatcaggaggagaatagttattggcccttgtgattatgaagcagaagctcaatgatcccttgctttgtaaccaagtcatgtgagggacttggtgtttaattcacaaaatgaatatgtgatgagaaaagttctacaaacatcttggaactgcttaagaggatgcattctttttttt

SEQ ID NO: 31535 - DNA, 479 bp, Homo sapiens
  misc_feature (1)...(479): n = a,t,c or g
gggnttggnattggaaccctatgacnnnnnnnnnnnnnnnnnnnnnnnnnnnnnnnnnnnnnnnnnnnnnnnnnnnnnnnnnnggcacgagggagtcttggcaagtctagcaaatggcatatactattttgtttctcttccctcccctttcaagtgagaattgtgattgttttcttgtttttcctccactgttatacacaggggtgggttgctgagggggctacaatttcatttaacattaannnnnnnnnnnnnnnnnnnnnnnnnnnnnnnnnnnnnnnnnnnnnnnnnnnnnnnnnnnnnnnnnnnnnnnnnnnnnnnnnnnnnnnnnnnnnnnnnnnnnnnnnnnnnnnnnnnnnnnnnnnnnnnnnnnnnnnnnnnnnnnnnnnnnnnnnnnnnnnnnnnnnnnnnnnnnnnnnnnnnnnnnnnnnnnnnnnnnnnnnnnnnnnnnnnnnnnnnnnnnnnnnnnnnnnnnnntt

SEQ ID NO: 31536 - DNA, 479 bp, Homo sapiens
  misc_feature (1)...(479): n = a,t,c or g
ggtcttgaacccttgacnnnnnnnnnnnnnnnnnnnnnnnnnnnnnnnnnnnnnnnnnnnnnnnnnnnnnnnnnnggcacgaggccagattaagctgcaaccctggctttctcctgcaaggagtctcccctgagttaggcagccccagccacctggaagggagggtgggggaagaaataatctcatgaagtgggaggtgactgaaagaaaaaatgtccaaagaatcacacaggagacatgccaagaggaagcaagagtgagatcccaaaagatggtctttggggtgagaatcccatggaaggtccagcttgaacctctccaagatctcctcctccagactagagtgggggataatcttgagctccctgtagaatttaattgtgctgctcatactttcttgaatatttctggtttcctgtaaatgccagtgggtttaatttccatattgttggtcaactggggcattgctggccctccca

SEQ ID NO: 31537 - DNA, 480 bp, Homo sapiens
  misc_feature (1)...(480): n = a,t,c or g
ggngntnnnnntnnnnaacagctatgacnnnnnnnnnnnnnnnnnnnnnnnnnnnnnnnnnnnnnnnnnnnnnnnnnnnnnnnnnnggcacgagccaacaactgctcctgcctttccttatgttgctgcccattatctgtccagtctcagcccagacatcccctcctctaaggagccttccctgattcccttaggcttcatcatatttcatttctttctttgcctgtctgcctcctccaccagactgtgagctcctgggaaccaggacggtgtcttagtcatagtgatagttccatagcctagcaccgggcctgacatcaagcacaagaggcagtttgtctcagtggttagagcctagcctctggagccaggcttcttggttctcatcttagctcttcaattaactagctgtttgatcctggaaaagttacatgacctgctgttcctcagcattgctgccgtaaaacggaggtggagata

SEQ ID NO: 31538 - DNA, 485 bp, Homo sapiens
  misc_feature (1)...(485): n = a,t,c or g
ggtgnttggnnttnnnnnnnnnnnnnnnnnnnnnnnnnnnnnnnnnnnnnnnnnnnnnnnnnnnnnnnnnnnnnnnnnnnnnnnnnnggcacgagaagggacagtcaagaaccagaggaagaagagagacaagtgagatcctgttaagattaatccaagtgagagatgaaagtggtttggaataggatgagggagtagagatagagaaaagtggataaattctggatgtgttttgaacacgctagaaggtaaagtgtagagcatgaggggaaaagaagaaccatgttaagttgaggaagtatggatgcaaagcatgtttttatgggggatacgtggatttagaattaagaattttgtttaggtcatgttgagtttaggatgttaagcttgagatgaaatgattgctatttaataatatctgcccatcagactttaaaaggaaagcgaggaggatcaagaggaggcaaagaagggagggaagtttc

SEQ ID NO: 31539 - DNA, 481 bp, Homo sapiens
  misc_feature (1)...(481): n = a,t,c or g
gggnttgnntttgnnaccgcttgacnnnnnnnnnnnnnnnnnnnnnnnnnnnnnnnnnnnnnnnnnnnnnnnnnnnnnnnnnnggcacgagattattgagtaattgctatttgccaggcaccgttcggagtgcttacataaatgatctaatttaatctctccatctctcttgtaaggcaggtgctttgctgttagaaaaagtgagccacagattgggagatgacttgtgccaaatcacacagctagtgaggagtggagacagggctgcagcccgggcttacctgttctgtctgctctgcagggtagccccatgtgtgctttgtgggacacacctcattgatccgactcatgctggtggacattgtgttgtttctgcagttagccttgcatgtgccgtctagttctgactgcaggatatttctagaaatggaattgtgtgttaaagggtacttgttcctgtccgatagatgccaccaataaa

SEQ ID NO: 31540 - DNA, 426 bp, Homo sapiens
  misc_feature (1)...(426): n = a,t,c or g
ctnnnnnnnnnnnnnnnnnnnnnnnnnnnnnnnnnnnnnnnnnnnnnnnnnnnnnnnnnnnnnnnnnnnggcacgaggaagacannnnnnnnnnnnnnnnnnnnnnnnnnnnnnnnnnnnnnnnnnnnnnnnnnnnnnnnnnnnnnnnnnnnnnnnnnnnnnnnnnnnnnnnnnnnnnnnnnnnnnnnnnnnnnnnnnnnnnnnnnnnnnnnnnnnnacgttggctgaatgacaggaagcaggacaggaaatattctttctctttattcagatgaggattctaagactcggaaagacaaagtgaatgttctcacagtcaacagtgagccacccctctgaatttccagccctgagtttgggctgggatccactgtctccttcgcaaacaaaccattccagagaacctgagtctaagagggtttaaaa

SEQ ID NO: 31541 - DNA, 426 bp, Homo sapiens
  misc_feature (1)...(426): n = a,t,c or g
anaccttnnnnnnnnnnnnnnnnnnnnnnnnnnnnnnnnnnnnnnnnnnnnnnnnnnnnnnnnnnnnnnnnnnggcacgagtgtacctgcttactcgcagatcggctgcttggaaacctgtggcaccaggtcacgtgattgttgctatgagtgtggaggtgcatttctcttttctttcttccttcttctgtcctgattttgtttcttttaactggggaaatgttgcaggttcccaggtctttgcaggcccaagtctgaaaactttggactccctggcttatctttggatttctcttagggcaccacacctcctattgaggctgacactctggactcttctgacgcgcaaggaggtttggagcccagggtggagaaaactaggccggagcccacagaagtcctgcatgcctgcaagacccaggtggc

SEQ ID NO: 31542 - DNA, 427 bp, Homo sapiens
  misc_feature (1)...(427): n = a,t,c or g
actttgatnacagctatgacnnnnnnnnnnnnnnnnnnnnnnnnnnnnnnnnnnnnnnnnnnnnnnnnnnnnnnnnnnggcacgagattcaaaaggtccagttaaattgcactaaggtgaagagtaagcaaagtgagcccagcaagcactcagggttttctacctcagacaacagcatagccaacactccccaggattacagtgggaatatgaaatcatttccatcccggagcccttcacaaggcgatgaagattctgctctgattctaacccaagacaatctgaaaagttcagatccagatctgtcagccaacagtgaccaagagtccggggtggaggatttgagctgtcggtctccaagtggtggtgagcatgcaccgagtgaagatagtggcaaggaccgggattctgatgaagccgtgtttct

SEQ ID NO: 31543 - DNA, 426 bp, Homo sapiens
  misc_feature (1)...(426): n = a,t,c or g
nnacnnnnnnnnnnnnnnnnnnnnnnnnnnnnnnnnnnnnnnnnnnnnnnnnnnnnnnnnnnnnnnnnnnnnnggcacgagaaaattaatagcttctgtttaatctgatgaatgtggctttttttcccttcactttaatgttcaagaagttgtggctatttcatagatttcttctgatttattctgtgggtccctgttatctgttctttatgtaatctttcagtagattttcatcctttcatatccacattcttatgtggacttgctgaagaaacagaatatcagttcaaaacaaaaccnnnnnnnnnnnnnnnnnnnnnnnnnnnnnnnnnnnnnnnnnnnnnnnnnnnnnnnnnnnnnnnnnnnnnnnnnnnnnnnnnnnnnnnnnnnnnnnnnnnnnnnnnnnnnnnnnnnnnnnnnnnnnnt

SEQ ID NO: 31544 - DNA, 439 bp, Homo sapiens
  misc_feature (1)...(439): n = a,t,c or g
gnnnnnnnttgnnnacttggatacancttgacnnnnnnnnnnnnnnnnnnnnnnnnnnnnnnnnnnnnnnnnnnnnnnnnnnnnnnnnnnggcacgagnnnnnnnnnnnnnnnnnnnnnnnnnnnnnnnnnnnnnnnnnnnnnnnnnnnnnnnnnnnnnnnnnnnnnnnnnnnnnnnnnnnnactgtgcccatcttaatggtggatttcatttaacaagaaaaacaaaagatagataatttaataaagaggagagttgggtttttagagcaaaatagctccaaggacctaaaaaagaacattacccttgttaaatgtgaacctttgatccagggatgtgtgcatgttcctgggtttatgtttgtgagcatgagctagcgagaaactgagagaagcaaagcaaagatgtactggagatacttcaactaagagggcaaccg

SEQ ID NO: 31545 - DNA, 428 bp, Homo sapiens
  misc_feature (1)...(428): n = a,t,c or g
ttgganacttnttgacnnnnnnnnnnnnnnnnnnnnnnnnnnnnnnnnnnnnnnnnnnnnnnnnnnnnnnnnnnggcacgaggcaggatatatggtcatacttcttgtgtaacagaatattgaacagaaaaaaatatagctctactattggaaaggtgatattggagatgagccaaaggattggaatatactgaacttccggattcgtgtgatataccacctattaacatctgtttgcataggtacatatggctgttctgaagagacagctaacagttcatcttattcccccattccattgttgctcacatggaataacaaagtgaatttaacatgaccataacattaaatgcaannnnnnnnnnnnnnnnnnnnnnnnnnnnnnnnnnnnnnnnnnnnnnnnnnnnnnnnnnnnnnnnnnnnnnnnn

SEQ ID NO: 31546 - DNA, 423 bp, Homo sapiens
  misc_feature (1)...(423): n = a,t,c or g
nactnnnnnnnnnnnnnnnnnnnnnnnnnnnnnnnnnnnnnnnnnnnnnnnnnnnnnnnnnnnnnnnnnnnggcacgagctgattggcacatagcagattctcaaaattacattgattcataaaaataaatgtaaaggtaggatttttcataaagttagaaataagaaaattaattaccatataattcattaggatattccattttcataaataaaatcttcaataaataaattgtccttagaaaatacaggataaatgcaaaggcagcaaggtgtcatggaagagcaaagcgctttgcagtaagatagccaagggttgggctttgctctttctgtgactttaggtaagttaatcatcctgtcaaatatcagcttcttatgggtaaatatgtgtgtatgnngnangatntnntgangntccac

SEQ ID NO: 31547 - DNA, 422 bp, Homo sapiens
  misc_feature (1)...(422): n = a,t,c or g
cnnnnnnnnnnnnnnnnnnnnnnnnnnnnnnnnnnnnnnnnnnnnnnnnnnnnnnnnnnnnnnnnnnnnggcacgaggtagcatctagtgctcaataaatgcttgatgaatgaattaaatgaatggactatcactacatcatagttcggctgtaaatacatagaataaactgatttggcttacggaaaatgacttgattttattatctcaattttcaatacaactgaattgcccagtttctgggattctaagtagcaatggaatgagatgtatagaagtgatgagatgggtgggcttcattaatttgttagtgggattagtgtcataagtagatttttttttgtcagtacattttctgaaagtgtcttttcttacctttttctaaatctgaaatacatttccaacatctctgaatattcaag

SEQ ID NO: 31548 - DNA, 422 bp, Homo sapiens
  misc_feature (1)...(422): n = a,t,c or g
nnnnnnnnnnnnnnnnnnnnnnnnnnnnnnnnnnnnnnnnnnnnnnnnnnnnnnnnnnnnnnnnnnnnggcacgagcggtacgagcagggatgtcagaactggagattcacaggggtcccatatacagaatgcaagcctggaaggcagagatgaagctgcagcattcctctgccactgagaggccataagaacgtggacaagtcatttcccttttctggccctgaattgcctcatctgcaaaggggacttgggacaggacaaaagatggtatcctcccctccccagtaggcttctagggtcctcactcacaccacttccatgttctctatttctgaggcccagcgcctctggcttccaccaggctctgcttcaggacttctgtttcctctcttgtttcatgcggccatcgatcttttagtag

SEQ ID NO: 31549 - DNA, 421 bp, Homo sapiens
  misc_feature (1)...(421): n = a,t,c or g
gattacagccnnnnnnnnnnnnnnnnnnnnnnnnnnnnnnnnnnnnnnnnnnnnnnnnnnnnnnnnnnnnnnnggcacgagcccagcctttaagagcatgtagaatggagcagatttcagtttttactctccttcccttgacccacttgattttgaggtaccaacaataactgaagcaacataaaggaaataaaggagggggataaagacctgtttactgtccataaagtagaatgctggctcgtggtgatcaacgctgtgcctggagaggactggatgtgattcccagaagctcctttcactctctaggagctttttttccttttttggccttttttttcctttttttttnnnnnnnagggtnttgntttgccncccaggctgnagnncaagggcanggncttggntnantgnancctcc

SEQ ID NO: 31550 - DNA, 445 bp, Homo sapiens
  misc_feature (1)...(445): n = a,t,c or g
gnnnnnnnnnnntnnnnnnnnttnnttgcnnacagcttgacnnnnnnnnnnnnnnnnnnnnnnnnnnnnnnnnnnnnnnnnnnnnnnnnnnnnnnnnnnggcacgagcacagcttcagggagcgggtggtggaaggagacatggcctggcagcattctgaaggtgggaaatggcaggctgcagtgcagagggagtaaacagccaggacctgtggctttgtagcaaaaacagagtggctgatgatttgttatggtgctgtcagcacatccgttcttgttccttgtatacaataattgtgcatttggcaaattgtggcaagaacagagaatgactgttgagaacttttggattgctgtcaacggtcagactgtggttctgaagaaaagccataggttcaaacccagaaactgaggaggaacattgtgtttttcttttagttgttagt

SEQ ID NO: 31551 - DNA, 423 bp, Homo sapiens
  misc_feature (1)...(423): n = a,t,c or g
nattgcnnnnnnnnnnnnnnnnnnnnnnnnnnnnnnnnnnnnnnnnnnnnnnnnnnnnnnnnnnnnnnnnnnnnnnnnggcacgagcggcacgaggaacattcttcagcaggcgaggaaggataaatgcaaagtaaacgtataaggcttatgattactcatttgaagtgtgtaaaatgtaattaatatgatctgtgttgcagtgctgtctctcttgttttatttaagtgaacataaaatgtaatttatgaggacttccccaggttaactgccaatatcaattccttgaactgcgttttttccacagcgtcttaagtttctcagcaataaagttcttctactactgtgggggttttcagggacaatttatgctgaggtttggggtaggggctggtctcctttaccccagacactcacaccctcc

SEQ ID NO: 31552 - DNA, 418 bp, Homo sapiens
  misc_feature (1)...(418): n = a,t,c or g
nnnnnnnnnnnnnnnnnnnnnnnnnnnnnnnnnnnnnnnnnnnnnnnnnnnnnnnnnnnnnnnnnnnnggcacgaggagacggcttccttggacagacaaaatggactcccatggctgaagtgctcaaagttaaaacagaagcaggcagccaaggctgggtgaggaagtggtcacctattgtgttctcagaaagctgttgtaaaagtatgacaggacttccttttctacagccaagtcaaaccagttcctattgttggtgccaaaataaacagcagccagaatcccctcacccatcactcaccatttgaaagaaacacttgacagagacttctggttttatgcttgaaaaccaaccagtcagagctcacctgccctggtcaatcagggctcagctgtggttattcagctcaaactatg

SEQ ID NO: 31553 - DNA, 464 bp, Homo sapiens
  misc_feature (1)...(464): n = a,t,c or g
nnnnnnnnnnnnnnnnnnnnnnnnnnnnnnnnnnnnnnnnnnnnnnnnnnnnnnnnnnnnnnnnnnnggcacgagagtcaatttcttttgtgagatttgctgggcgtgttttttgatgagggcctgtgaacaaaaacgtaggcttaagcactgaagttcacaagacttcatctcaaaataataaataaataaatatactttttaagtttgcactggatttttaattctgtcaggtgtaaaaagggcagacgttaaaataacatccaaaagtactgaaactcnnnnnnnnnnnnnnnnnnnnnnnnnnnnnnnnnnnnnnnnnnnnnnnnnnnnnnnnnnnnnnnnnnnnnnnnnnnnnnnnnnnnnnnnnnnnnnnnnnnnnnnnnnnnnnnnnnnnnnnnnnnnnnnnnnnnnnnnnnnnnnnnnnnnnnnnnnnnnnnnnnnnnnnnnnnnnnnnnnnnnnn

SEQ ID NO: 31554 - DNA, 477 bp, Homo sapiens
  misc_feature (1)...(477): n = a,t,c or g
ggagccnccttnganatttgatgacnnnnnnnnnnnnnnnnnnnnnnnnnnnnnnnnnnnnnnnnnnnnnnnnnnnnnnnnnnggcacgaggcgtggtgggagaacacctggcaatggcaaccaagttctcccctggtacggccaagggtcagtatcagtaacagcagttctggctctgactggaccttgtcaggctccaggcgctgatcccagggattcaacctgtgcgaacttactccatccaccttggagttaggagctattctcatccccatttctcattcgaggaaactaaagtgcagaggctgctgaagggagcatggtcaggaagtcagggagcagctcagcgagaatgccagcctggtggtccagcctcctggcctgtgctccgacccaggaagaacacggtaacggcttggggcagggactgggtaagtcaccccttggggtctcggttcctgagactccacctaagg

SEQ ID NO: 31555 - DNA, 424 bp, Homo sapiens
  misc_feature (1)...(424): n = a,t,c or g
accnnnnnnnnnnnnnnnnnnnnnnnnnnnnnnnnnnnnnnnnnnnnnnnnnnnnnnnnnnnnnnnnnnnnggcacgagtcggcgtggagtggcaggtgcatctacttataatcgcacagacctaacccatctaatctcagtccccacatatgtaaacgaaaggagattcacaccagctgttagggttatgtgacatgcttagctctgagtttggcacagggtcggtgttctacggccactgggtgccccctccgcccccaccactgactgccctttccagctgtcccgactctaagcaggctaggcctgtctgggaagctcctggagggaatcttttggtaaaacagttcctggcagatgctctggaggcttactctgcagctgaaatctcaggaaattctactctgcccgttccaccactgt

SEQ ID NO: 31556 - DNA, 425 bp, Homo sapiens
  misc_feature (1)...(425): n = a,t,c or g
tttgnanacccgtnnnnnnnnnnnnnnnnnnnnnnnnnnnnnnnnnnnnnnnnnnnnnnnnnnnnnnnnnnnnnnnnnggcacgagccacaatgcccacagggaacacttcaggtctatgaaggcttttctctcctgtatgtacaaggaaataaaagagcccacggtcaagacttggggacggctggcagctgccttcgtcgctttagtaccatgcctttcatgttctgcaacatcaataatgtttgcaactttgcttcaagaaatgactattcttactggctctctaccccagaagccccatgccaatgagcatgcaacccctaaagggccagagcatccagccattcattagtcgatgtgcagtatgtgaagctccagctgtggtgatcgcagttcacagtcagacgatccagattncccatt

SEQ ID NO: 31557 - DNA, 416 bp, Homo sapiens
  misc_feature (1)...(416): n = a,t,c or g
anaccctntttgaanacagctnnnnnnnnnnnnnnnnnnnnnnnnnnnnnnnnnnnnnnnnnnnnnnnnnnnnnnnnnnnnnnnggcacnnnnnnnnnnnnnnnnnnnnnnnnnnnnnnnnnnnnnnnnnnnnnnnnnnnnnnnnnnnnnnnnnnnnnnnnnnnnnnnnnnnnnnnnnnnnnnnnnnnnaggtgaaattttttatttatctagagtgaaatgtacaaatcttaagtgtacagcttgataaatttgagctatgaatttggttctgcatttctgtgtctaaagacaaaaataatttcttagaggagattaaacttttcttagtgcttatttctgaaataaaatttttgaatgagacctcaatatagggaatattgagtcatgtagtgtaggagtccccaaccctgggg

SEQ ID NO: 31558 - DNA, 420 bp, Homo sapiens
  misc_feature (1)...(420): n = a,t,c or g
ttgganacccgttnnnnnnnnnnnnnnnnnnnnnnnnnnnnnnnnnnnnnnnnnnnnnnnnnnnnnnnnnnnnnnnnggcacgagctcaaactcctgtgcttaattgannnnnnnnnnnnnnnnnnnnnnnnnnnnnnnnnnnnnnnnnnnnnnnnnnnnnnnnnnnnnnnnnnnnnnnnnnnnnnnnnnnnnnnnnnnnnnnnnnnnnnnnnnnnnnnnnnnnnnnnnnnnnnnnnnnnnnnnnnnnnnnnnnnnnnnnnnnnnnnnnnnnnnnnnnnnnnnnnnnnnnnnnnnnnnacttcctcatataagtcttaaatgagcttcactaaacacctttgagtaagaatagattctttttttcagggagaaaaacatctgtaagtaaaattaatatatgcctgcctgtatgattgttt

SEQ ID NO: 31559 - DNA, 428 bp, Homo sapiens
  misc_feature (1)...(428): n = a,t,c or g
tttgnataccctctttgaatacccgttatgacnnnnnnnnnnnnnnnnnnnnnnnnnnnnnnnnnnnnnnnnnnnnnnnnnnnnnnnnnnggcacgagaaatccctcaaatcagtgaaacaaacgctgattccaaatgtagcatgcaggctctatagaataagacagctctaatctctcaaagaccaaagataaggccatctgacagctttgcaacgtcagagactttcagtcatttctttacacacatgtaaaacctttagacgttcttgagaaaataacctttatttcaaaaaatagctttgaagtttgaaaatcaaagcaggccagctgtttctcagcacagaaagaatttttcctaaactgctagaaagctaataaggatttcaaagggcagcgatcacttactctaatgcccacggtccagga

SEQ ID NO: 31560 - DNA, 420 bp, Homo sapiens
  misc_feature (1)...(420): n = a,t,c or g
ttganaccgnnttgaatgccnnnnnnnnnnnnnnnnnnnnnnnnnnnnnnnnnnnnnnnnnnnnnnnnnnnnnggcacgaggtaattcagagnnnnnnnnnnnnnnnnnnnnnnnnnnnnnnnnnnnnnnnnnnnnnnnnnnnnnnnnnnnnnnnnnnnnnnnnnnnnnnnnnnnnnnnatagtcaccctattgtgctgttggacactagaatttattctatctaactgtgtttttgtacctgttaacctttccctctttgtccctccctccctgctccccttcccagcctcttaaccatcattgagagagatgcctatgtaaatcttaagattttcaaaaggagcacacacatttggtaaagcactctaactgtaatgcacggtacacacaatgcgcattttctctttccttgctgtaa

SEQ ID NO: 31561 - DNA, 427 bp, Homo sapiens
  misc_feature (1)...(427): n = a,t,c or g
tttganacccgntttganatncctncnnnnnnnnnnnnnnnnnnnnnnnnnnnnnnnnnnnnnnnnnnnnnnnnnnnnnnnnnnnnnnnnnggcacgagagtgtttttaacctgttataattggaatgatagagatgtatttcagaattttgcatggtccaaatcaatgatttttctttttaatatgtaaagtatttcattaacagtgtagattctttctgatgtttggggagccatgtttaaaaatgtagtatggagcaattgaaaaaggggtctttttccctagcctaattcttactaatctcagaaaacacagatcaaatagactgtgaagttgaactagccctcttagtgtagtaaccaaatttaggaaagatcaggataatttaggaaggaaaagtaatcatttatttaattatttataatt

SEQ ID NO: 31562 - DNA, 429 bp, Homo sapiens
  misc_feature (1)...(429): n = a,t,c or g
tttgaanaccctntttganatacctacgaaacaagtacaacatcactataggnaattnggccctcgaggccaaccaattcggcacgaggaggaagctgaggcccagcaagggaaagtaactgatccagggtcacacagcaaatctatgccagggccgaggcttcaaccctctttccataagcttctgtcctctttgatcaggtcttggttaatgatcagctcttctcaatcttgcagggttagttcctggtgtcggcgtggctcctggagttggcgtggctcctggtgtcggtgtggctcctggagttggcttggctcctggagttggcgtggctcctggagttggtgtggctcctggcgttggcgtggctcccggcattggccctggtggagttgcaggtgagtttcatgagtcaatgagcctgaggg

SEQ ID NO: 31563 - DNA, 458 bp, Homo sapiens
  misc_feature (1)...(458): n = a,t,c or g
ttgaacaccttgattgattaccnatttaatacgactnnnnnnnnnnnnnnnnnnnnnnnnnnnnnnnnnnnggcacgagccagaacttctagggctgcaggtggggaaacgtacagccaggtcccaggaaaggctggggcggcaaggccgtgctgggaatcctattgctctctagcctgagacctctgctcctcatgggccacagtccctttgggatgtccctggcagctagagccttggggagcatcccctgggactggcagcagatagataggtatcttgctcctgcctgttggggctcgtccaactccctcttctacccgccccccagtcgctctccctgggtctccaagaggctccagggagggctagtttctgccagcctttaccttcttcatgtctgaggatgccatgtgcctttactctggcatagaagcctgacttcccttggcacatgt

SEQ ID NO: 31564 - DNA, 452 bp, Homo sapiens
  misc_feature (1)...(452): n = a,t,c or g
tttgaacaccttgacnnnnnnnnnnnnnnnnnnnnnnnnnnnnnnnnnnnnnnnnnnnnnnnnnnnnnnnnnnggcacgagaccacaggcctcagggtctcttcagtccgacgggtccagctgtcgataaaacctcccggggaaggagtaaaggacaaccaagaacctgaactgcaaaagtatgaaaaacatttcatttccctcgagttctccacactttaggtctgcagcgccttgggggtgactgatggccctccgtgagacgcggtggccatgtgcttctacaagtgaaaaggagcaagtgtggttagagcctggagtatggacgtcccggggaccgctggcccatggcctggcttggggccttacaggggagcgagctgagtgaatgcaggggagggcccgtctttctacagtgtgtatcttgtttttgagacagactcactctgtcg

SEQ ID NO: 31565 - DNA, 443 bp, Homo sapiens
  misc_feature (1)...(443): n = a,t,c or g
gnnnnnngnnnntnntttgannccttgaanaccnnnnnnnnnnnnnnnnnnnnnnnnnnnnnnnnnnnnnnnnnnnnnnnnnnnnnnnnnnnnnnnnnnnggcacgagcataggnnnnnnnnnnnnnnnnnnnnnnnnnnnnnnnnnnnnnnnnnnnnnnnnnnnnnnnnnnnnnnnnnnnnnnnnnnnnnnnnnnnnnnnnnnnnnnnnnnnnnnnnnnnnnnnnnnnnnnnnnnnnnnnnnnnnnnnnnnnnnnnnnnnnnnnnnnnnnnnnnnnnnnnnntagattgtatcattccatataaagtccaaaaagcaggcaaagctaatctatgacattagatcagctaaaggtcacctttggggaagaagagacagaaatagagggcacaggagccccctgagaatgtcctgtttcttgacctggatggtgattacatggg

SEQ ID NO: 31566 - DNA, 428 bp, Homo sapiens
  misc_feature (1)...(428): n = a,t,c or g
tttgaanacctttntgacccnnnnnnnnnnnnnnnnnnnnnnnnnnnnnnnnnnnnnnnnnnnnnnnnnnnnnnnnnggcacgagctggaataaacttagaagcataaataaagcacaacaaatgagcaagtaacattaaaagtagctgaatgagttccccacagggacagcatggaaggctagagaggttactatcaacaaaaatctataatctgttttcttattaatttatagcaaactaggacttcttcccctaccacttcctaaagcgtcaggataggaacaggctagaccaaaagaattctgattatgcatctttttttgatgtaatttatgcagacaagagtttcattcaaatatatgcaagtaagaaatgaattcctttattaaacctaggctatgtgtattatatttgtttgatatgtgc

SEQ ID NO: 31567 - DNA, 435 bp, Homo sapiens
  misc_feature (1)...(435): n = a,t,c or g
ggtgnnncctttganactgctnnnnnnnnnnnnnnnnnnnnnnnnnnnnnnnnnnnnnnnnnnnnnnnnnnnnnnnnnnnnnnnggcacgagaatataacagtgtaccatagtgtattgtgttgtagttcatagctcaattggacctttgtcatcagaacaagtttcaactcaaaaaatctctttagttttgtgagtgctaagatgttttttaaaaatgtattcaggtaatacttgtgcgtctgctgttaatgagatcaagtaataataggatggtcactgccagcaaggtgttggggtctgtgggagaacccacagacaaatgatggcaacacacgacaggaagcagcaaatgtcctgggcgaggggcagcagaaggtccaaaacagcagccatgacacctggcgcanganaaccncanggagacaaagaagaa

SEQ ID NO: 31568 - DNA, 451 bp, Homo sapiens
  misc_feature (1)...(451): n = a,t,c or g
tttgancaccntgnaaacncgntnnnnnnnnnnnnnnnnnnnnnnnnnnnnnnnnnnnnnnnnnnnnnnnnnnnnnnnnnnnnnnnggcacgagccagggccaaggccacacttggcttgcttcgctgatctctcttttacataaattccatttagcattttggctaccagataaatttctttccatttaaatataaaaagtcctatcagaggaatgaaggattgcaattttataaaaggtcataaggagaggttataacaatctttaacaggaatatgaaaaagcctgagttagggggaaattttctgaacctgaaaaaggaagaaacagtagccataaggggaaatggctttagaattttaacaaaatgaacttcgnatgtngctaaaaaatatganctgaaaatatactgctttttttccctgagttatacctatctcctgaaggacc

SEQ ID NO: 31569 - DNA, 454 bp, Homo sapiens
  misc_feature (1)...(454): n = a,t,c or g
gnnttnnaanctntngnaaaccctttnnnnnnnnnnnnnnnnnnnnnnnnnnnnnnnnnnnnnnnnnnnnnnnnnnnnnnnnnnnnnnnggcacgagtacagactttactcagatttcaccaattgtcccagtgatgtcttttcacaaaagagaaaacatttctgcttcaggatccactccaggcaaatgcattgtatttagtcatctttaattaggaacagctccttagccttcctttgtccttatgaatttgacatgttgtagagtatgagccagttattttataacatgtcccagattttgagtttttctgatgtttcctcgtggaatgaggttacgcacttttggcaggaatgccacagaagtaatgtgttctcagcgcatcgcagtacagatatgtaggggattttcactttcagggaaatctgaatcttgatatcagaaaacattttc

SEQ ID NO: 31570 - DNA, 435 bp, Homo sapiens
  misc_feature (1)...(435): n = a,t,c or g
tttgnnnnccnnnatttggaanacccgtnnnnnnnnnnnnnnnnnnnnnnnnnnnnnnnnnnnnnnnnnnnnnnnnnnnnnnnnnnnnnnnnnggcacgagagaagcaaggtggaggccatacttttgatgagtatgcttttttctgctcagattcacagtgctggagccatttggtttctctgaggcagtatcagccagagatgttgtcagttgggcaatactgattaaaatcttaacaagattttttaataaacctggaataatacttctgtattcaaatggaaaagcaaagatccaaaaatattcaagacaattctgataaagaagaacaaacagaagggacttgactttctagatataaaaacttatgaagctgtattattggtcagcagtagacaaatagatcaatagaacataacagatttgttaaaga

SEQ ID NO: 31571 - DNA, 466 bp, Homo sapiens
  misc_feature (1)...(466): n = a,t,c or g
aanncttggaanaccgntnnnnnnnnnnnnnnnnnnnnnnnnnnnnnnnnnnnnnnnnnnnnnnnnnnnnnnnnnnnnnnnggcacgagcagaaattttgaagtcagagagaaacggtcctttgttggcttctttgctttctcgtgggtcctttggcaggcctccctttggggagagggaggggagagaccacagccgggtgtgtgtctgcagcaccgtgggccctcaagctttcctgctgtcttctccctcctcctcctttcccctttctctttcctcatttcctagacgtacgtcaactgtatgtacataccggggctcctctcctaacatatatgtatatacacatccatatacatatattgtgtggtttcccctttctttcctttttttaagcaacaaaactatggaaataataccccaacagatgagcgaaaatgtattattgnaaagtttatttttttta

SEQ ID NO: 31572 - DNA, 454 bp, Homo sapiens
  misc_feature (1)...(454): n = a,t,c or g
ttttganaccttnnnnnnnnnnnnnnnnnnnnnnnnnnnnnnnnnnnnnnnnnnnnnnnnnnnnnnnnnnnnnnnnnggcacgagatgtatttagttaaatatcaccatttttgttgttattattgtgcttcctatagcttgttaatttcagtgacattatctaatttatagttgcataaatcttgcagagtcatgattttttattaaattttctctgtctctatgatagtctttttaaggccctactgttaaagtaaattttgcaaggtcttttttttttttttaaaatttttttttttnnntttaaaaaanncnntnnnggcccnggngggnttnaacntttggcccnaaannnnccnccccntttggccccccnaanggnntngnntnncgggctnnncccnttttncncncccaattttnnangggcttnacccntttnaaaaccccccc

SEQ ID NO: 31573 - DNA, 465 bp, Homo sapiens
  misc_feature (1)...(465): n = a,t,c or g
tttgaaaccnttatnacccnnnnnnnnnnnnnnnnnnnnnnnnnnnnnnnnnnnnnnnnnnnnnnnnnnnnnnnnnggcacgagggagattggggaattcttttaaactaggtggtcagcaaagtcatttaagctggggtctgaaaaacaagaatcatctatgttaagattgggctgggagagggggccactgacgaagagggaagagctcttgccaaggtcctggggcttgaaaggtctgggcatattggagcaacagaaagaaggccatcgtgactggaatatgaaagagtgaggaggaggagaggtcatagagctgggcaggggcacagaatatagttggtaagagcaaacttggtgtttcaagaagcagtcactgaggatatatattgttatggtagagaaatcangaacacacagtcaagttggtgaagagccatatctgagaatttgaggagtgaaaaa

SEQ ID NO: 31574 - DNA, 419 bp, Homo sapiens
  misc_feature (1)...(419): n = a,t,c or g
nnnnnnnnnnnnnnnnnnnnnnnnnnnnnnnnnnnnnnggcacgagtgacttgcagggcctgaggttctgtacgtctaaccagctcccagcccaggcccgagctccgaagccccaactgcactttgaggagcgagaaccccagctctgatctgtcttgcagtgggaggtagagctcgtcactgcctctctgggcctcagtttccctctctggaaaatcagctctggcagctcttggaggccttccccagctctgacaatctggaactgctgccactgctggtcccctgccccaggcacagcagtgcgttccctgcggggagccagcgcccaggtccaaccgggagagggtctgcctgatactggctttccagttctccctctcacaggcagcctgccagtgcctgcggggcttttaaat

SEQ ID NO: 31575 - DNA, 457 bp, Homo sapiens
  misc_feature (1)...(457): n = a,t,c or g
cacctnnnnnnnnnnnnnnnnnnnnnnnnnnnnnnnnnnnnnnnnnnnnnnnnnnnnnnnnnnnnnnnggcacgagctgttttctaaacaatagaaaattaaatctatttaaattacaaccgataattcggcaggaatgcccttccataattatttttaagcacttacatgaaaacttttacatgaagacctatacaaaaagcaaacaaaacccccatgtgctatccattatccagcttcaacaattagcaactgaaggtcaataatgtttcatctatttccacaatcatcaatgccactgcctggatgattatgaagcaaatacgagatgtaacatttcatttatattccactacacatatctaaaaataagggctcctaaaaatgacaaaccattacacatagctagttctttaatgcaatcaaatatccaatcagtattcatattctctattct

SEQ ID NO: 31576 - DNA, 461 bp, Homo sapiens
  misc_feature (1)...(461): n = a,t,c or g
tgaaatccctcctttgaacaccttgacnnnnnnnnnnnnnnnnnnnnnnnnnnnnnnnnnnnnnnnnnnnnnnnnnnnnnnnnnnggcacgagcatagggctcggcgtggaaaggctcacactgatgatggcctgctgcgcctcgttgttatgcacaagctttgctctctccagggccttctcaaaattgttcacggctgactcgaagtctctcagcttcactggagagcaaggggagaaggcacaacacaggtagagtgtgacaacgtgtggtgcatgatggagcctctggctactcgagcactgccagggcccatcagaagcttgtgtgagctgtagtcggacccaggccccagggaagcatcactgagctgctcagcaccatcctttccaccgtgttcctgggctatgtcaccatcgagaaccaggactgaggaacctgggcctcattcaaaggcgtt

SEQ ID NO: 31577 - DNA, 460 bp, Homo sapiens
  misc_feature (1)...(460): n = a,t,c or g
tttgaacaccttgacttgantaccnnnnnnnnnnnnnnnnnnnnnnnnnnnnnnnnnnnnnnnnnnnnnnnnnggcacgagaaacaagcctaggactgcaaagtgcaggggaagggaattgtgtttcatgcccacagcccctggggaccccataggaggctgagggagcagccactggtcccggccactcacagcccggccactagcagtgtctcatggacaatcctttttgtctttcctcatatggaaaaattgggccctgagtaacaggtgtcagcttcaggaaggttcagaagtaggtataaaaatgacaaacacaatcaagctcatattttcctgctgaagtctagacaaatgtgtgtttcattttgatgcacatataacatttaagagaactggactcatacacagagttaacagagtagtttttggattcagatttgaaatangtaatcgagta

SEQ ID NO: 31578 - DNA, 554 bp, Homo sapiens
  misc_feature (1)...(554): n = a,t,c or g
nnnnnnnnnnnnnannnnnnnnnnnnnnnnnnnnannnntcannnnnnnnnnnnnnnnnnnnnnannnnnnnnnnanngagnaggngtggantgnnnntntgaaacntnaatgactgantacgaannnnnnnnnnnnnnnnnnnnnnnnnnnnnnnnnnnnnnnnnnnnnnnggcacgagggagtggattcctaagtaggaggcgaggcaggtcatcagtgaggatcccagggagtggctgcagtgactgtgcccagcaaccctccttaaggccctgccctggtgcctgcggctctaggagattccctgggtagtcccagcacacgcaccctgttcagcctgatgttgcagcccaaagccattcctgtgtgccccgcctcctctgtgcctgggcgccctgcacatctgtggccggcgtaagcacctctgcgagctttctgagcacctgctgcccgagcgcctcctcaccacccctgtctgntttgttgctcctctctctggntgtgaaagtcacgcctgctcactggaggactgctggganatgcaggaaacga

SEQ ID NO: 31579 - DNA, 454 bp, Homo sapiens
  misc_feature (1)...(454): n = a,t,c or g
tttgaaancttgannnnnnnnnnnnnnnnnnnnnnnnnnnnnnnnnnnnnnnnnnnnnnnnnnnnnnnnnnnnnnnnggcacgaggagtctatgtaatgggcacccagcctctagggacccctcctccctttttccttgtccccacactcctacacctaactcacctaactcatactgtgctggagccactaactagagcagccctggagtcatgccaagcatttaatgtagccatgggaccaaacctagccccttagcccccacccacttccctgggcaaatgaatggctcactatggtgccaatggaacctcctttctcttctctgttccattgaatctgtatggctagaatatcctacttctccagcctagaggtactttccacttgattttgcaaatgcccttacacttactgntgcctatgggagtcaagtgtggagtaggttggaagc

SEQ ID NO: 31580 - DNA, 471 bp, Homo sapiens
  misc_feature (1)...(471): n = a,t,c or g
ggtngnngnngtgtntttggaantcnnatacccttttgacnnnnnnnnnnnnnnnnnnnnnnnnnnnnnnnnnnnnnnnnnnnnnnnnnnnnnnnnnnggcacgagctcattctttctcttttcatgtgcatgatctgaaatacccaaggggagtgtccttgatggtgcgtgttctgaatggaaaacctgaaagtgccggaaactgggagtgagcccttagaagggcttgtgcatcttctcttcatacacctattgcaatttgtaatcttactctttgtgttcacttgttttaacactgttcttctttgtcctgtactgtaatctacatgaatgcagaaaccatgcctgatttgtttcccctatgacccagtaccttgtgcagtgcctagcatatggcaagtacttcataaatccgccttgagtgaaggaaatcaataaatgaatgtgtgtgttctctctgagaggataca

SEQ ID NO: 31581 - DNA, 454 bp, Homo sapiens
  misc_feature (1)...(454): n = a,t,c or g
tttgaaacntnannnnnnnnnnnnnnnnnnnnnnnnnnnnnnnnnnnnnnnnnnnnnnnnnnnnnnnnnnnnnnnnggcacgagaattgtgctgctgagcaaaggaaagcttttgtgacttgaaagcacgttctgtgtatcatggaggctgggttattttcccagctttaggcgagtggcactaactacaagtttcatgttcttctgagtacacatgagtcggtactgcagtcagtatacttcttttcctgaaataagaaagtgatttacgaggtgtgggcccttacgtgaaagaaaacaaaaccagccgctctgtgggcctgtaaaattcctgtgccatctcagtggtgtgggttacaggaggagaagatggagagggctagctggccctcccttgctggggctcanctgccccaaatacttgtgatattgcaggttatttatgagctcgctg

SEQ ID NO: 31582 - DNA, 449 bp, Homo sapiens
  misc_feature (1)...(449): n = a,t,c or g
tgganntntgaatacccntatgacnnnnnnnnnnnnnnnnnnnnnnnnnnnnnnnnnnnnnnnnnnnnnnnnnnnnnnnnnnggcacgagatttattttatttttttgcttgcttccccagtaacttaaattctgattaatgcaggcttttctttggtactagtagctctgtagtggtgggaaaactgactaaaacctatataatacatggtaaataatggtttttatttttcaacttgtgcagtcatcttccttaagaatatagctacacaaagcttaaacaactacttatttatattggttcagtaaaataataaaaccttcaatttagagggcaaatgattaggtctcagtgtccatttcaatgattccttcactctttagctgacagtgcagaccatgatggtatcgactatgataggggatgctggctcctaaaaagcacgggt

SEQ ID NO: 31583 - DNA, 459 bp, Homo sapiens
  misc_feature (1)...(459): n = a,t,c or g
ggtgntnnnncctttgaaacccnnnnnnnnnnnnnnnnnnnnnnnnnnnnnnnnnnnnnnnnnnnnnnnnnnnnnnnnnnnnnnnnnnggcacgannnnnnnnnnnnnnnnnnnnnnnnnnnnnnnnnnnnnnnnnnnnnnnnnnnnnnnnnnnnnnnnnnnnnnnnnnnnnnnnnnnnnnnnnnnnnnnnnnnnnnnnnnnnnnnnnnnnnnnnnnnnnnnnnnnnnnnnnnnnnnnnnnnnnnnnnnnnnnnnnnnnnnnnnnnnnnnnnnnnnnnnnnnnnnnnnnnnnnnnnnnnnnnnnnnnnnnnnnnnnnnnnnnnnnnnnnnnnnnnnnctctagcctggcaacagaataagactctacctcaaaaaaacaaaacaagaaaaagcagttaaactaatacaaaaaatataaagctgcannnnnnnnnnnnnnnnnnnnnnnnnnnnnnnnta

SEQ ID NO: 31584 - DNA, 463 bp, Homo sapiens
  misc_feature (1)...(463): n = a,t,c or g
aggtgttttnngcctncnagagannnttgganattcccactgacttnnnnnnnnnnnnnnnnnnnnnnnnnnnnnnnnnnnnnnnnnnnnnnnnnnnnggcacgaggaagactacatcaatgcgaactatataaatatggaaattccttcttccagcattataaatcagtacattgcttgtcaagggccattaccacacacttgtacagatttttggcagatgacttgggaacaaggctcctctatggttgtaatgttgaccacacaagttgaacgtggcagagttaaatgtcaccaatattggccagaacccacaggcagttcatcttatggatgctaccaagttacctgccactctgaagaaggaaacactgcctatatcttcaggaagatgaccctatttaaccaagagaaaaatgaaagtcgtccactcactcagatccagtacatagcctggcctgac

SEQ ID NO: 31585 - DNA, 449 bp, Homo sapiens
  misc_feature (1)...(449): n = a,t,c or g
gttttntgccaaagagagtncnatggaattctcatnacntttnggataaactaccccggaanctggccctcgaggncaagaattcggcacgagcggcacgaggtcactgattcctgttgcggtgaatgtatggcccaggcttggaggcagacacagcacccctggcctgacttcctgatttgagctgtagagattggattggccagaccccccagctttagccaccacaccaagagtctggctgtggtttctccagcctcagtccattggagtcttccccttggagtgaggaagggagtagaagctgagatgagggtcctggggagccttcaaggtcaaggcaacacagatagaaccagcacttgctaaagcaggagttgaagagtagggggatggggcaggaaggcaagataaggaaagaggcagaagcanggtnctacactgtctgg

SEQ ID NO: 31586 - DNA, 454 bp, Homo sapiens
  misc_feature (1)...(454): n = a,t,c or g
tgntnnnnccttgaaantccgannnnnnnnnnnnnnnnnnnnnnnnnnnnnnnnnnnnnnnnnnnnnnnnnnnnnnnnnnnnnnnnggcacgaggtgttggcactgtctaaaatgtcactttcaatttctacatcaccaacagagtggaccttgtttatgtttgtactcacctgctcctaatttcattcttctggtttaagaaaaccacttacttctgagtttagggttattgtgggaggtcagtggttttgagaaactgacaatcatgtaataaaatcttctagactctacaaaattaagactcttctgtttctctcatcttctaattattctgttctttctcctttttttctcttatactacaatccataaagctcaaagtggcaaaggctttagcagaaggaacagtttgataactgaatttgaaccaaagtacattaggatatgagaaaa

SEQ ID NO: 31587 - DNA, 458 bp, Homo sapiens
  misc_feature (1)...(458): n = a,t,c or g
gggnntnnnncttggactttgannnnnnnnnnnnnnnnnnnnnnnnnnnnnnnnnnnnnnnnnnnnnnnnnnnnnnnnnnnnnnnnnnnnnnnnggcacgagcggcacgagtcaaaaactaaatgccattgaaagagagggaaattatgatttgatgggaagatggcagtggctttgtttttggaaattcacaagaggcagtcttatgaatttgagtataaagttagcctatatctccatcaaaaaacaaaaaaaaaagcaaaaaaccaaaantaatttttaaactcacancaaaaaactntgtctntgggagttcctacantancaatgagnggcccatgaaaaatcccaaaggaaaaattttatcttccaggcccagngctctgtttctttttagctcctgaatatgtncattctgacttttatgaaggttggttnaaagctctctggatgttttg

SEQ ID NO: 31588 - DNA, 457 bp, Homo sapiens
  misc_feature (1)...(457): n = a,t,c or g
ggngnnntnnnnnttggancttggannnnnnnnnnnnnnnnnnnnnnnnnnnnnnnnnnnnnnnnnnnnnnnnnnnnnnnnnnnnnnnnnnnnnnnnggcacgagatttttcttttcttcccttttttcctctctttcctcctcccctccttccctctcccttttcattcagagattgtcattactgtgatgtatcgtacccaatatgttttgtgtttaaaaactttccataaatgggactaaactgtacatatccttctgcagcttattttgtttgatcttagatttttcagatatggtcttgttggctcatgtaacatgtaatccttgtttatttatttccatcgttgtgtgactctgcataatttattccttctcatgttgactgatatttagattgtttttatatttttgcttttactaatcctgggctgtgaacactttcacacatgtgtcc

SEQ ID NO: 31589 - DNA, 180 bp, Homo sapiens
  misc_feature (1)...(180): n = a,t,c or g
ggtgnttccccctttgaaatngaatgccnnnnnnnnnnnnnnnnnnnnnnnnnnnnnnnnnnnnnnnnnnnnnnnnnnnnnnnnnnggcacgagagataaaatgatattaaattgatccatgcttttaaaagctagtcattttggagaaaggaaaaattatctctctttttttttttttt

SEQ ID NO: 31590 - DNA, 445 bp, Homo sapiens
  misc_feature (1)...(445): n = a,t,c or g
ggtgnnttnccccttgaacttcgaacacccgnnnnnnnnnnnnnnnnnnnnnnnnnnnnnnnnnnnnnnnnnnnnnnnnnnnnnnnnnnnnnnnnnnggcacgagggtatatatagatagttatgttgtgtgtgtggtggtgggggtagtgtttatgtgtgtgtgnnngtatatntatantnatanattnctaggccnntgcngcnacnncaaactaccnntatgtcaanccntaaaacagattcnntacnctcccgtangtcncantnngatgtttnnctgactgncccncctncctntgctcacagnctacctncatcctacaggcnctaagnnatctttattctcnccnnttccntntccgaacnntacctncnctgnagatcnnnnctcncctccactctcccanannccatctntcnnccatncngcccttntancctga

SEQ ID NO: 31591 - DNA, 452 bp, Homo sapiens
  misc_feature (1)...(452): n = a,t,c or g
ggtgnntnnnncctttgaaanccgtnnnnnnnnnnnnnnnnnnnnnnnnnnnnnnnnnnnnnnnnnnnnnnnnnnnnnnnnnnnnnnnnnggcacgagagcttaggctgacgttctgatgagtctctgcttgctgagctcatcactgtgggatggtgacctgcagagctgcagattggagcaagtggacagaggagggagccagctaagccaaatccgtcactgccacttggctggcaggccttataagagggcggatctgggcccgtttgcaggaggccattgcctaccctctccccacagtgagccagcagccatcagctgatcccacctgggaaaccttcatgcctctctgatggttactgcccacccttaccccacccctcagctcagcctggtatggaaagcaaggtgcacgttggtctttgattgttctgtcctcacagcagagcc

SEQ ID NO: 31592 - DNA, 451 bp, Homo sapiens
  misc_feature (1)...(451): n = a,t,c or g
ggnnnnntnccccctttganaccgtnnnnnnnnnnnnnnnnnnnnnnnnnnnnnnnnnnnnnnnnnnnnnnnnnnnnnnnnnnnnnnnnnggcacgaggtgtttgaatatctaattgtgggcagaaaggaaacagtatataagtgagattggggtaggtgtatattagaggtaacaaagtgtgcttttagaatttttaaataacagccccttttataatatgaaagaccaaaaataatttgtttttgtgctcagccaggtagtttgagatgagtgttcgaccactttgtcaacttggtgttcttttccacgtatcttagattttgattccagctctccatcagtgcgtgaatttgcactgctgtcttagagactatggcatcatccaaacagtggtaactatggttggactggtgtctatttctatgaccatcttctgattttcagaatgc

SEQ ID NO: 31593 - DNA, 447 bp, Homo sapiens
  misc_feature (1)...(447): n = a,t,c or g
ggtgnnttccccctttgataccgnnnnnnnnnnnnnnnnnnnnnnnnnnnnnnnnnnnnnnnnnnnnnnnnnnnnnnnnnnnnnnnnnnggcacgaggcagcaatgcttctcccaagaacaagggttaggcccagcttccagcagggaggcagctgaggatgtgactgagcgcctgagcgcctggagcccagctgaagaagctgattggtgggatggaatgctaccggtccctctggtatcctggatacggagagggtgggaatgtaaactgggcccagaggctgaattcttgaaatttcactgcagcctaggaggagcctgcagggaantgaacctgaccnttnangtnntagcctngattttttttcccctttaaaaaaaaaataagataaaaggtgcaatcatgcaacacattctttntgagggagctgtgaggtgagggcttt

SEQ ID NO: 31594 - DNA, 439 bp, Homo sapiens
  misc_feature (1)...(439): n = a,t,c or g
tttgacaccttnnnnnnnnnnnnnnnnnnnnnnnnnnnnnnnnnnnnnnnnnnnnnnnnnnnnnnnnnnnnnnnnggcacgaggaagagaaagaagggtagaatgaggagttacagatacaggctggcagataaagagacctcagcactttgtctgttttcctggtcagtctctgaggtgtggtgattgaacttgannnnnnnnnnnnnnnnnnnnnnnnnnnnnnnnnnnnnnnnnnnnnnnnnnnnnnnnnnnnnnnnnnnnnnnnnnnnnnnnnnnnnnnnnnnnnnnnnnnnnnnnnnnnnnnnnnnnnnnnnnnnnnnnnnnnnnnnnnnnnnnnnnnnnnnnnnnnnnnnnnnnnnnnnnnnnnnnnnnnnnnnnnnnnnnnnnnnnnnnnnnnnnnnnnnnnnnnnnnnnnnnctngaacgcctgacctcag

SEQ ID NO: 31595 - DNA, 448 bp, Homo sapiens
  misc_feature (1)...(448): n = a,t,c or g
tttgaacacccttnnnnnnnnnnnnnnnnnnnnnnnnnnnnnnnnnnnnnnnnnnnnnnnnnnnnnnnnnnnnnnnnnggcacgagcaactgccctgagctgtagataatcaaatctctcattttgcaagtcaagaaactgaggctcaaggaggttaggcaagagcttgtagcttgtaaactgaaaagctgaggtctggctctagagcccctaacatacgctttccatactctaccacattgttgctagaagttgagtgataaagaaaaaaaaattactgaaaaagttttcctagcttttctcctaccccacaggctgaactttctcagtcatcattgccaagtgtggtatgttggagggccccagggctcagccccagatgnnggggctgatacacacagtatcctattctctctacacgtaagngctggggaccatatttctagct

SEQ ID NO: 31596 - DNA, 444 bp, Homo sapiens
  misc_feature (1)...(444): n = a,t,c or g
ttgacanccttnnnnnnnnnnnnnnnnnnnnnnnnnnnnnnnnnnnnnnnnnnnnnnnnnnnnnnnnnnnnnnnnnggcacgaggaggacgggctcctgagcaacagccgcggctgctgggaggacacgcacggctggctggctctggaggcctgagtggaggcagccccgtgacacaggaggggccgcagaggaaaggaggggacttaggccgcataccgggagctgcagtcctggtccgccggtatcacagcatggctgggtctggaaggggaggtcacctgctgcagctgtgggtgtcccagggccatgttcggtcggcagctgttgtatcttgcctcctccacagacggttcaagatcttgtctcttcgctttagttaaatccacttcaagaggcaactanaaggaaagaagaaaaacaaattccttcactggctcttgc

SEQ ID NO: 31597 - DNA, 434 bp, Homo sapiens
  misc_feature (1)...(434): n = a,t,c or g
nnnnnnnnnnnnnnnnnnnnnnnnnnnnnnnnnnnnnnnnnnnnnnnnnnnnnnnnnnnnnnnnnggcacgaggagagagcaatcagtgcaaatctttgggctggataactggcggagctggtttgacctccggccgggtcactgagggattgttggggaggctgctgcacccctctgcacagacttccaacatatcccagaaccatagcaccagctctcttaagccagaggataatgttagttagtaaagagaatgatgctattggggtcgattacttccactagtagaatcttaatgatgtgtgggaaaccatgtctctggcaaagagctggagttcacctgagccttttttttttttcnggagngcannggngcnatctnggntnantgaaacctttgtntcccaggttcgagcgatnntcntgcctcacc

SEQ ID NO: 31598 - DNA, 470 bp, Homo sapiens
  misc_feature (1)...(470): n = a,t,c or g
ggngnnnntttgaatcgttgactgattacgaatttaatacgactcnnnnnnnnnnnnnnnnnnnnnnnnnnnnnnnnnnggcacgagggtaaagcccagaaattggcccgttatccattttttaatgtttggctgtcttaacatgccactggtactaaagatgattcttaaattattaaagtacaacatgctgaaattgctaaattgatattctttgcaatacttggaatacttttccccaccacctattttaagctagatttttggagggatatggtggggggtggtgatgtagttggatttatttaaacacacacatatataatgacaaaggaaataatagtatggctttttttctgtaaagtcaagcacttaccagtttttctctgctccttaattttatagagccagaatgaagaatggggaggttgtctgaggatatcttatgatnnagagcagctaaggcttta

SEQ ID NO: 31599 - DNA, 315 bp, Homo sapiens
  misc_feature (1)...(315): n = a,t,c or g
ggngnnnnntttgaattgganancnnnnnnnnnnnnnnnnnnnnnnnnnnnnnnnnnnnnnnnnnnnnnnnnnnnnnnnnnnnnnnnnnnnggcacgagcctctacgcatcactctcgttattaaagttcctgattctcattttgccttggagatgtgatagnnnnnnnnnnnnnnnnnnnnnnnnnnnnnnnnnnnnnnnnnnnnnnnnnnnnnnnnnnnnnnnnnnnnnnnnnnnnnnnnnnnnnnnnnnnnnnnnnnnnnnnnnnnnnnnnnnnnnnnntaacatacaaacatataaatttttttttttttt

SEQ ID NO: 31600 - DNA, 472 bp, Homo sapiens
  misc_feature (1)...(472): n = a,t,c or g
ggngnnnnntttgaatcgttgacnnnnnnnnnnnnnnnnnnnnnnnnnnnnnnnnnnnnnnnnnnnnnnnnnnnnnnnnnnggcacgaggagagctgcaccatgagcttcaataccctgtggcctcaattttctgagggatataaggaaagttgttgattttcagtttgtttagctttttccttatcctgtggcctcaattttctgagggatataagggaagttgctgattttcagtctgtttagctttttccttattgtgaggattcgagtggtgacttccaagctcctacatctctgaccagaaactgcaagagctttgttttcaatatttacataagtaagttgcattcttataaaattaaagtacattttacaatttactcagagctttagtgtatgtgatctaaacgataaggtaaatttcattaagtttgtagactctgttttaaaattcatgactgggcgcggtg

SEQ ID NO: 31601 - DNA, 474 bp, Homo sapiens
  misc_feature (1)...(474): n = a,t,c or g
gtggtnnnnntttgaattgaaanccttatgacnnnnnnnnnnnnnnnnnnnnnnnnnnnnnnnnnnnnnnnnnnnnnnnnnnnnnnnnnnggcacgagcttttttgctgactaatgtagcagcttttgcccttttcctgcttaatactgagcagatccaaggaaatgcatacacaggctagatcactgtaattattgtaaatatttaaaaacggtaaaacctcagtttttagaacctttggaaagttagttatgaaagctgtggatttatccctttaagcaccaaacccattttttaataacccgtttcatttttgtagtcctttcagacagtattctttcataggaagtcttttgatcttaacagcagagcagtcctgtaaggtgaggaggattgctgggattatccaacatcatttacagatcagtacactgaagctcagaaagatttgctcaaggtcacagaagttggact

SEQ ID NO: 31602 - DNA, 475 bp, Homo sapiens
  misc_feature (1)...(475): n = a,t,c or g
gcgtgnnanattggaatcnntatgacnnnnnnnnnnnnnnnnnnnnnnnnnnnnnnnnnnnnnnnnnnnnnnnnnnnnnnnnnnggcacgagcagaaaaaggacattagaaaaacataaggaaataaaaaaaaagtatggacttgagttaataaggcatcagtgttggtttgttaatgagtcatactaatgtaagatgagaaactggtaaggtttataagaactctgtagcatgtttgcaattttttggtaaatagaaaacttgtaaacaatagttctgttgtttaggtaaaaggagcaatcaaggccgtgcgtggtggctcgcgcctgtaannnnnnnnnnnnnnnnnnnnnnnnnnnnnnnnnnnnnnnnnnnnnnctctttattttttttagtccacaagttctacacattttctcttaaattcactgatttttagattattttctccctatggctttaaatagtacttaag

SEQ ID NO: 31603 - DNA, 477 bp, Homo sapiens
  misc_feature (1)...(477): n = a,t,c or g
gnggnnnnnntttggnattgganancnnnnnnnnnnnnnnnnnnnnnnnnnnnnnnnnnnnnnnnnnnnnnnnnnnnnnnnnnnnnnnnnnnnggcacgaggggctccgtggtttcctttgtaaagtaacaaagttgtttttttgttgttgttaacttatcttaaacttatttatacaagctgaaattctgccgtaactgctgcccttaaaggtatatctgtatatgaacaatcagatgtatacaaataaaatgtaataagcaacagaaattagataaaatgttagtgaatactactgtaattttgccttcccccaagaaagagtataatggaaaaattgttagtaccacttgtatcaatcatgtaacatttctaaaacagtttcttcattagtgaaagaggaataataccttgcaagtttatttgttcaggattttttaaattgtgtataaaatgtacagtatgctgacatatata

SEQ ID NO: 31604 - DNA, 471 bp, Homo sapiens
  misc_feature (1)...(471): n = a,t,c or g
ggngnnnnntttgaattgaaaacnntatgacnnnnnnnnnnnnnnnnnnnnnnnnnnnnnnnnnnnnnnnnnnnnnnnnnnnnnnnnnnggcacgagaggtacagttattttgagtgccactaagaggtgaatgatgtttccagagaccataacatgaacccacttggtctgtaggttaggggtggcctctctgtggtggggggaagggatgggggacaggggacacttaacccaggtcatgaaggataagtaggagttaccacagtgaagatggaggtagtgggagagaacaccccaagctgggagcaagttatgctaggatcagggtctttggggcttcattatttatttttagagacaatgtcttnnnnnnnnnnnnnnnnnnnnnnnnnnnnnnnnnnnnnnnnnnnnnnnnnnnnnnnnnnntcctcctgtcccannnnnnnnnnnnnnnnnnnnnnnnnnnnnnc

SEQ ID NO: 31605 - DNA, 472 bp, Homo sapiens
  misc_feature (1)...(472): n = a,t,c or g
ggtgnnnnnntttgaaacnnnnnnnnnnnnnnnnnnnnnnnnnnnnnnnnnnnnnnnnnnnnnnnnnnnnnnnnnnnnnnnnnnnggcacgagagtatttatcaaagtagacatcaaagatacaatgttgactaagtcacagtggtagcttgagggtaaagtggctgtgcaaatgtcagggtaagaacaaatcctacattaggaggatagaagaggggcagagtttcttctcagctgagtcataaaggatgcttaattgtgggtgtgaaattgagggatcaggtaagagagtggtgttttaaaaagagggaccnnnnnnnnnnnnnnnnnnnnnnnnnnnnnnnnnnnnnnnnnnnnnnnnnnnnnnnnnnnnnnnnnnnnnnnnnnnnnnnnnnnnnnnnnnnnnnnnnnnnnnnnnnnnnnnnnnnnnnnnnnnnnnnnnnnnnnnnnnnnnnnnnnnnnnnnnncatgc

SEQ ID NO: 31606 - DNA, 474 bp, Homo sapiens
  misc_feature (1)...(474): n = a,t,c or g
ggngnnnntntttgaatttgganancnntatgacnnnnnnnnnnnnnnnnnnnnnnnnnnnnnnnnnnnnnnnnnnnnnnnnnnnnnnnnnnggcacgaggtgaaagtaaacttaagtgcccaagtcatggagacttgaaaagggtaaacctgtttcacctcccaaatttatatattcaaagtatttacttaaaattcagaagccagaagttcatgtcatgattaccaggaagttcaggccagaatgaatccctagagaagccaggccaagcctggataattgcagctggatgaccctggcccgaaagtcacagttcagttgccttattcctagttcaggcttactatctagaacctcatgctagcttaggttgcatgtttacattgctgcagtgtctttactggaagcttanttggatcgaaatggacaccgagatggagatgcttctggctagatttcgcagaaccccaggg

SEQ ID NO: 31607 - DNA, 469 bp, Homo sapiens
  misc_feature (1)...(469): n = a,t,c or g
ggngnnnnntttgaattgaaaacnntatgacnnnnnnnnnnnnnnnnnnnnnnnnnnnnnnnnnnnnnnnnnnnnnnnnnnnnnnnnnnggcacgagnnnnnnnnnnnnnnnnnnnnnnnnnnnnnnnnnnnnnnnnnncttaagatactttatattattattannnnnnnnnnnnnnnnnnnnnnnnnnnnnnnnnnnnnnnnnnnnnnnnnnnnnnnnnnnnnnnnnnnnnnnnnnnnnnnnnnnnnnnnnnnnnnnnnnnnnnnnnnnnnnnnnnnnnnnnnnnnnnnnnnnnnnnnnnnnnnnnnnnnnnnnnnnnnnnnnnnnnnnnnnnnnnnnnnnnnnnnnnnnnnnnnnnnnnnnnnnnnnnnnnnnnnnnnnnnnnnnnnnnnnnnnnnnnnnnnnnnnnnnnnnnnntgtacccaagtcttcaaaatctcttgtgtgttttctagtatgtctcggttg

SEQ ID NO: 31608 - DNA, 470 bp, Homo sapiens
  misc_feature (1)...(470): n = a,t,c or g
gtgtgnnnnnnttggaancgctatgacnnnnnnnnnnnnnnnnnnnnnnnnnnnnnnnnnnnnnnnnnnnnnnnnnnnnnnnnnnggcacgaggaaattctgccaaggtatatcaagcttttggttgatggcagtttagatacttgtgcacttgtgagaaaatcaatgtttagatttatatttcaggataattattagaatgagcttattgagttttctggtgaaatcagaggaactcgtcttgatgaaagtatatttccatatggtataaataatagaaaaatgtgtctaaatcaatagtaatgtctagccagggaagacaaataaattgtattcaactttttattgaatgctgctcatgcatgattttacatttcctcaagaatannnnnnnnnnnnnnnnnnnnnnnnnnnnnnnnnnnnnnnnnnnnnnnnnnnnnnnnnnnnnnnnnnnnnnnnnnnnnnnnnnn

SEQ ID NO: 31609 - DNA, 472 bp, Homo sapiens
  misc_feature (1)...(472): n = a,t,c or g
ggngnnnnntttgnnancgctatgacnnnnnnnnnnnnnnnnnnnnnnnnnnnnnnnnnnnnnnnnnnnnnnnnnnnnnnnnnnggcacgagatcagatcatggatcctgatatgtcacaccttaaccattgtgccattggtctacaatttgcctgatcctaagaatcacctgagactcttgttaaaagagcaattcccaggccctgtctcagattcagattcagcccagctggggtggagcctggggagcagtggatgcaacgggcaccctggatgatactaggatctggcaagtttaagaaacgctatattgtgccttcctgcctgtaagttgtggctcatggttggccctcaagaaatgttagctgttagtattataatataaatgaattgaaaggacagcttattgtgaaagaatataccgtctttaaaaagcttattagtcctgacactagattttaaagatagagg

SEQ ID NO: 31610 - DNA, 470 bp, Homo sapiens
  misc_feature (1)...(470): n = a,t,c or g
ggngnnnnntttgaatcgtatgacnnnnnnnnnnnnnnnnnnnnnnnnnnnnnnnnnnnnnnnnnnnnnnnnnnnnnnnnnnggcacgannnnnnnnnnnnnnnnnnnnnnnnnnnnnnnnnnnnnnnnnnnnnnnnnnnnnnnnnnnnnnnnnnnnnnnnnnnnnnnnnnnnnnnnnnnnnnnnnnnnnnnnnnnnnnnnnnnnnnnnnnnnnnnnnnnnnnnnnnnnnnnnnnnnnnnnnnnnnnnnnnnnnnnnnnnnnnnnnnnnnnnnnnnnnnnnnnnnnnnnnnnnnnnnnnnnnnnnnnnnnnnnnnnnnnnnnnnnnnnnnnnnnnnnnnnnnnnnnnnnnnnnnnnnnnnnnnnnnnnnnnnnnnnnnnnnnnnnnnnnnnnnnnnnnnnnnnnnnnnnnnnnnnnnntttaaaaaaaagacccaagcagaagcagacacaatattttttacttgaatca

SEQ ID NO: 31611 - DNA, 473 bp, Homo sapiens
  misc_feature (1)...(473): n = a,t,c or g
ggngnnnnnnttgnnattgganancgctatgacnnnnnnnnnnnnnnnnnnnnnnnnnnnnnnnnnnnnnnnnnnnnnnnnnnnnnnnnnnggcacgagaaaaaatgaaataatgagtatataaccatggtcaccttgacatcactggaactctgtttctgtgtttgcaaagtggagtaagaatgtatactannnnnnnnnnnnnnnnnnnnnnnnnnnnnnnnnnnnnnnnnnnnnnnnnnnnnnnnnnnnnnnnnnnnnnnnnnnnnnnnnnnnnnnnnnnnnnnnnnnnnnnnnnnnnnnnnnnnnnnnnnnnnnnnnnnnnnnnnnnnnnnnnnnnnnnnnnnnnnnnnnnnnnnnnnnnnnnnnnnnnnnnnnnnnnnnnnnnnnnnnnnnnnnnnnnnnnnnnnnnnnnnnnnnnnnnnnnnnnnnnnnnnnnnnnnnnnnnnnnnnnnnnnnnnnnnnnnnnnntg

SEQ ID NO: 31612 - DNA, 470 bp, Homo sapiens
  misc_feature (1)...(470): n = a,t,c or g
ggngnnnnntttggnancctatgacnnnnnnnnnnnnnnnnnnnnnnnnnnnnnnnnnnnnnnnnnnnnnnnnnnnnnnnnnnnnnnnnnnnnnnnnnnnnnnnnnnnnnnnnnnnnnnnnnnnnnnnnnnnnnnnnnnnnnnnnnnnnnnnnnnnnnnnnnnnnnnnnnnnnnnnnnnnaagtggatgattgacttaacatttgggatggacagtgctaagtttgttgggatggattggaagggttataggctgggagtgtagttttgccattttctgtatatgtggttggttattctaaggcacaacgctgtccaagaaataaagtgctgtaatttataattattagctatgtagcaaacctttctcattggatcattaggattaagggctctgaagttcttgataaaagtttatgtgtagaaaatttaatggataattaaaagtaaaacagaaaacaagcctatggg

SEQ ID NO: 31613 - DNA, 470 bp, Homo sapiens
  misc_feature (1)...(470): n = a,t,c or g
ggngnnnnnttgaattgaaancnntatgacnnnnnnnnnnnnnnnnnnnnnnnnnnnnnnnnnnnnnnnnnnnnnnnnnnnnnnnnnnggcacgaggggggtgatgctccaaatattgaggctcccatctgtctgtcctgcactaggcagagccaggcttctccatggggcacaggagagagggcaccagatctgaggagcaaataggttcttggtctgagatctcgtgggatcaggttgccagccctgcaaacccccgctcaggtctagaggacatggagctgcctttcagggtgcatttgcttcctctacagactcggactctgtcctctgcctacttgggccgtcccgcactcgggaatgcgtcctacactgtagggcagagcccggcttgactcttcccggttcctaccctaaccaagcctctactttctgggatcaccctgttgggacttttgtccagcatctcc

SEQ ID NO: 31614 - DNA, 475 bp, Homo sapiens
  misc_feature (1)...(475): n = a,t,c or g
gtgnnnnnnntttgaatttgannnnnnnnnnnnnnnnnnnnnnnnnnnnnnnnnnnnnnnnnnnnnnnnnnnnnnnnnnnnnnnnnnnnnnnnggcacgagcctgaacgtcaccgataaggcggggacgccagcatctaatgggactgctgggaggattgagtcccatatctgaagtcccttgagataccggcatccctgccttatggttgaaggcactgagcctggtgaagggatgtgctcaaggctgtggagctcgcacgtggctgtctgtgctgcacgagctggcagtgcctggcaggtactgcacacctcaaataccctgggaagataagagatgagtgaatgtgtggcccctgcccttgggagctgatggcctcataggagtgagatgctgaaaggagtcactggagtgaagtgacagtgccactgcggcgagtacctgtagctggtgtggcaggagcagggctggatag

SEQ ID NO: 31615 - DNA, 440 bp, Homo sapiens
  misc_feature (1)...(440): n = a,t,c or g
tnnnnnnnnnnnnnnnnnnnnnnnnnnnnnnnnnnnnnnnnnnnnnnnnnnnnnnnnnnnnnnnnnnnnnnnnnnggcacgaggaaaagtggcagtcaaattagaatcaagcatgtgtagaagaaatagctgatggtggggatgttgacactgctcgtgatctgggaggagactctggataggccaacaggaacccagggaaggcagacttatcagcataaatgaggaatggggttttgacagaaaggacaaagatatcccataggaagtgatatcatcaaaaagctttacattaaaggagttctcagaaagcacaaaggataaaatgttggaagctgacccaaacttacaaagggcagttagccaaaccataaaaaagatgctcacgccatactgtatgctgtgtgatgagatgaagtcacacaccattcagactactc

SEQ ID NO: 31616 - DNA, 443 bp, Homo sapiens
  misc_feature (1)...(443): n = a,t,c or g
ganatttnnnnnnnnnnnnnnnnnnnnnnnnnnnnnnnnnnnnnnnnnnnnnnnnnnnnnnnnnnnnnnnnnnnnnnnnnnggcacgagggctagttagtgatttgttagctatgataatgtttttattagtgggaaaatgttattttatagagatgcatactgaagtatttaatggtggaatgtcatgatatatacaatttactgaaaataactgaattcggctttaaaataatctgacaaggatagctagtggccttgcacagtggcaggacagatctattaggagcagcaaagtacaggggaaaagcatgtacttttcagacagctatgagtctgaattttgttccaccatttaccagcttcaatttttctcttaaccagtgatgagattaaataatatacgtagagcccagggcctgggtcataagaactcgtcaacag

SEQ ID NO: 31617 - DNA, 445 bp, Homo sapiens
  misc_feature (1)...(445): n = a,t,c or g
tttgnanatntgnaatacnnnnnnnnnnnnnnnnnnnnnnnnnnnnnnnnnnnnnnnnnnnnnnnnnnnnnnnnnnnnnnnnnnnnnggcacgagattgtgtgcacattttttcgtctgttaaaaatgtggaaagctagatccgtatattttcctttgcctcttttatcatcacatgatcccatataactttggggaggattttagaatattatttggcctttggtttttggattttatttctcttactgttgttttatagggactagagtcttgtctggagcatactannttttatttatggaaacatttctggcctatctttacctcccatagttcccttatgtataaatggagaatctgcagagttgatttcagttccatcatgnngatattcctctcattcaggacatctgnaaacacnaataagaattgctcttgtagta

SEQ ID NO: 31618 - DNA, 440 bp, Homo sapiens
  misc_feature (1)...(440): n = a,t,c or g
ttgganactgttnnnnnnnnnnnnnnnnnnnnnnnnnnnnnnnnnnnnnnnnnnnnnnnnnnnnnnnnnnnnnnnggcacgagcggcgtggtaaacactggacaaccatatttttcaaaggatgagtttcaaaagtgtacatctttgcattcccaaaacaccttatgtactccctgaatacaggaagccttccataactacttcccaatttattttgtccgattgctagaaggccatgcgtgcattctttccaatggccacaccactgccacttcagcacagtgtatgtggtccttagctggaggtatctggtaatacaagggatagtttggtgggatgttctactggatgttccagtgcagaaaaggacagccttgcagaatgaagaactgtctcaccccaaatgccaacagttgccctgcagacattaaaataactga

SEQ ID NO: 31619 - DNA, 438 bp, Homo sapiens
  misc_feature (1)...(438): n = a,t,c or g
anacntnnnnnnnnnnnnnnnnnnnnnnnnnnnnnnnnnnnnnnnnnnnnnnnnnnnnnnnnnnnnnnnnnnnggcacgagccaaagatgaaatggaaagggagatgaatgagataagaaagaattataaagacgtaaaatggagtagctaaattacagtccccttaaggcagacagcaaataacaaaattgacactttaggagaattgagaaagtgatgcaaaggcaaatagggttaaactctcaggtgggtgatgtgttccttctgatatcatgtctggcatttttcccaattttcttaacatgcatttctctacttgaagatgatctatattaatacaaaaagtgaaattaatcaaaatgttcagtatttgtggaactgcttaataaataacaatctatcaatacgttatgaaatgttgaaattcaaaagtattt

SEQ ID NO: 31620 - DNA, 435 bp, Homo sapiens
  misc_feature (1)...(435): n = a,t,c or g
atttggaatnnnnnnnnnnnnnnnnnnnnnnnnnnnnnnnnnnnnnnnnnnnnnnnnnnnnnnnnnnnnnnnnnnnnnnggcacgaggcgtggaattcaaaggtgtttgtcttatggaaacccactaagctttatattggtttatgtgcttttttctatctatgctttcttttatagtaagacagtttagaaggaaagctgtcaggaggtgagtggggactctgctgagggttacgtggaacggaaggcaagacagtggagggtgcaggagtaggggaggcaaggacaaagtggggacaggacgtgcagacttgttcaggtccccctggctgaggactcagcggagagggaaggtggcagcagggggcgctggtggtcaagggtggttctgaaggagaggaggatggaattgcttctggagggtaggaggaaggc

SEQ ID NO: 31621 - DNA, 448 bp, Homo sapiens
  misc_feature (1)...(448): n = a,t,c or g
tnnnntttggnnntttgaaanacccgtnnnnnnnnnnnnnnnnnnnnnnnnnnnnnnnnnnnnnnnnnnnnnnnnnnnnnnnnnnnnnnnnnggcacgagccacagactcagagagaacccaccatggtgctgtctcctgccgacaagaccaacgtcaaggccgcctggggtaaggtcggcgcgcacgctggcgagtatggtgcggaggccctggagaggatgttcctgtccttccccaccaccaagacctacttcccgcacttcgacctgagccacggctctgcccaggttaagggccacggcaagaaggtggccgacgcgctgaccaacgccgtggcgcacgtggacgacatgcccaacgcgctgtccgccctgagcgacctgcacgcgcacaagcttcgggtggacccggtcaacttcaagctcctaagccactgcctgctggtg

SEQ ID NO: 31622 - DNA, 447 bp, Homo sapiens
  misc_feature (1)...(447): n = a,t,c or g
tnnnnntttgganatttgaanaccgtnnnnnnnnnnnnnnnnnnnnnnnnnnnnnnnnnnnnnnnnnnnnnnnnnnnnnnnnnnnnnnnnnggcacgagccaaaaagcatggcattcccattaatagctcatagatactcagttcagatggaagtgaccaggcagggatcatttttaccataagccgggttgtctaagaaacattgatgacactctgacacttatcaggtgacatggagaacagtgctagagttcaacttaaagttagattctcatgccttaggggcaggggtttgttaacctttacccataggcacaaaacaaaagccttgcccttaaagagggtacagtctacttgtgcagacaatatagacacccggagtccctgggaagaattgtacatcctgaaacctggtcttggacatgagagctggagttcatgatcct

SEQ ID NO: 31623 - DNA, 438 bp, Homo sapiens
  misc_feature (1)...(438): n = a,t,c or g
ttgganacntgtnnnnnnnnnnnnnnnnnnnnnnnnnnnnnnnnnnnnnnnnnnnnnnnnnnnnnnnnnnnnnnnnnggcacgagtgctgacgtttttagaaacttaagaatggtaaacagatcacatctaagaatgtagagtatgagagggagaggccttagtgggcttagctactaggtcctttggagtcggctttagaacttgggcgagcttttaaatttacagcctgtaatactccaagctgaagatcagaatatctaaatctttacgggaaaaaaaattagattttcataggtaacagttgttaataacccggtggttttatatgaaaactggaaggttcaaaataataattactcaaaaatgtagctctttcagtgactgatcttaggccacagtaattctcctaggcctcagtttcttcatctctcaactg

SEQ ID NO: 31624 - DNA, 434 bp, Homo sapiens
  misc_feature (1)...(434): n = a,t,c or g
ttnnnnnnnnnnnnnnnnnnnnnnnnnnnnnnnnnnnnnnnnnnnnnnnnnnnnnnnnnnnnnnnnnnnnnnnnnnggcacgagggataaaacagtggcaggtttttgaaacttgagccaatgtcaaacttgccacaggaattgatcttttctctctaccctcaagagtattttccgtactctctgagtcctgatttagaaaaatattttataaatccctgtttgtatccctaaagaggtttgaaatgattgcatctgttttggggggaagagagtagggagtggaggaagatgctttttnnnnnnnnnnnnnnnnnnnnnnnnnnnnnnntaagaaaaggaacacttgaaaatgtactttaagatttgccaggataaaaaatttagtatgaaagtgggaagataaagtcaagaaagtctcttagaaagtagag

SEQ ID NO: 31625 - DNA, 448 bp, Homo sapiens
  misc_feature (1)...(448): n = a,t,c or g
ttnnnnnnnnnnnnnnnnnnnnnnnnnnnnnnnnnnnnnnnnnnnnnnnnnnnnnnnnnnnnnnnnnnnnnnnnnnggcacgagggcaggtattgtctactcctctcttcttccccacccccagccttgatgggcaatacagtggaggcagagaatgggactttaatacaatccagcatgtcagaatattatttaaaatgccaaaagataatttggcttgtttattctaaatttggatgttctttgttttcacaacaaaacacccaatgttaaagaaaattaagtgtttaatctttcaaactagatgatgatatatacataatctgttgtatgatatttcttgtatatcatagagtataaaattttattaaatcctaattgatgatcactttgacttttagtactgctagtttgaaaagatggatatgtatgttttcaagaaatttac

SEQ ID NO: 31626 - DNA, 443 bp, Homo sapiens
  misc_feature (1)...(443): n = a,t,c or g
ttggannnnnnnnnnnnnnnnnnnnnnnnnnnnnnnnnnnnnnnnnnnnnnnnnnnnnnnnnnnnnnnnnnnnnnnnggcacgagatggcaggttcaatacttcaagattctttgtagccttccccctttctatgtttgtatgtaaatatcttccttaccattgataaatttggctttcatcatactcaatatattttcttaatctctttgtacactactcatctcctgaccagcctggttacctactcagcctttgatttttccctcccaaacttgctactcttttgatcttcccaatttcagtaatgacaactatattcttggaattactcaagctaaaagtattagtgtcatccttcttgccccactccaaacccctcattcatcccattaataattcctttaaatagaatgattttttggctgggcacagtggctcaca

SEQ ID NO: 31627 - DNA, 439 bp, Homo sapiens
  misc_feature (1)...(439): n = a,t,c or g
actnctnnnnnnnnnnnnnnnnnnnnnnnnnnnnnnnnnnnnnnnnnnnnnnnnnnnnnnnnnnnnnnnggcacgagagacagtcagaggtaaaaacaacctacattttttacaaaaagggtacttcagccctttcttttataaatatgtcacttgtgttagccctgtggttcttccatagagccatctacttgatacacttgagagtaggttttagggtaaaaagtttggacagggtaaatttctttacacaatccgtcagtaacattctagcagcaattctattgaaggaagagaggagtgaggaagatagcctatgtannnnnnnaagatccagttcccttaggagcacacaaaaaatgaccaccatttccatatgtcgttctaacttacagctcttatttctccagtgccttttgccagattgagaatgttcctc

SEQ ID NO: 31628 - DNA, 444 bp, Homo sapiens
  misc_feature (1)...(444): n = a,t,c or g
naacttctnnnnnnnnnnnnnnnnnnnnnnnnnnnnnnnnnnnnnnnnnnnnnnnnnnnnnnnnnnnnnnnggcacgagcctaattcttcagtaggtgataactgattaatacccatgtggaaaccagaagcaataaccaccagagagtagtaatgatttggcacaccaccccctttttgcaagttattatttgtgttttaaaaatcattcagtctggccaggcacagtggnnnnnnnnnnnnnnnnnnnnnnnnnnnnnnnnnnnnnnnnnnnnnnnnnnnnnnnnnnnnnnnnnnnnnnnnnnnnnnnnnnnnnnnnnnnnnnnnnnnnnnnnnnnnnnnnnnnnnnnnnnnnnnnnnnnnnnnnnnnnnnnnnnnnnnnnnnnnnnnnnnnnnnnnnnnnnnnnnnnnnnnnnnnnnnnnnnnnnnnnnnnnnnnnnnnnn

SEQ ID NO: 31629 - DNA, 447 bp, Homo sapiens
  misc_feature (1)...(447): n = a,t,c or g
tngnnatttgagaccnttnnnnnnnnnnnnnnnnnnnnnnnnnnnnnnnnnnnnnnnnnnnnnnnnnnnnnnnnnnnnnnnggcacgagaattaatttaataaacatttagtacatatctcctgggtgccatgcatgatgctgagcactgagaatatccaatctgaatgagcctgtctggtagaagagagaggtggatacgggggctgggtaggggattcggcagagctcagaagagaagccagtgcctctgttttcacacagaggaatctagggggatgcgtggactgcagggaacaggttgcacctgagcggcatcctgagttgcgatgggttttggagggagggactgttagnnnnnnnnacacaggcgagcatcctcngctgcaagtgcagcacacccagggcagccctgggcttcagagagcgcacactgctctgaggcgct

SEQ ID NO: 31630 - DNA, 466 bp, Homo sapiens
  misc_feature (1)...(466): n = a,t,c or g
gttgnagtcnntctttgaanaccttntganaatccctttggaaattaccnnnnnnnnnnnnnnnnnnnnnnnnnnnnnnnnnnnnnnnnnnggcacgaggtggaagaaaaaaaaaacagaattgcttttcaggcaagaataaagggaaggtatttcttgccatctggagccagcgacgatgctggggagagtgggttagtcatagctcaggggctgctagtatgagtgaaatattaaagagatcaagtcattctgcagcttgcgagcaattaaaatgaagtgaattggttgctttgccgtaagcatttaaagaaagtattgattatttttagaaagtgtatttgcaaagcagtaagtgccaccccttttgataccctgaaggcaacctgttagaggagttgcggagttgtttttttatttttttttttaaactccnaantttnaatccngctttttgnaaggaaca

SEQ ID NO: 31631 - DNA, 495 bp, Homo sapiens
  misc_feature (1)...(495): n = a,t,c or g
annnnnnnnnnnnnnnnnnnnnnncnnncnngagnngncngntgcgtccccctttgaaaccttttgactgcctacgaannnnnnnnnnnnnnnnnnnnnnnnnnnnnnnnnnnnnnnnnnnnnnnggcacgagggcacaacttatctgggtcctctaattcagcttctttcactggtttcagtcaagatgttagccaggactggatctcattcaaaggctcaactgggaaggatctgctttcaagctcacagaaacatggcagaattcagtcccttgagttgttgaactgaaggtttcagttcctagctggttcccattttcctaatcagtattctctccaatatagaagcttgcttcatcaaggcctgcagactgagaaggcaatataatctgcaaataagacagaatcacaagttgtataatccaatcatggcctgtgaatattgctatagnctactggttaaaaacaagtcactaagtctcttaacctagcg

SEQ ID NO: 31632 - DNA, 432 bp, Homo sapiens
  misc_feature (1)...(432): n = a,t,c or g
atncgnnnnnnnnnnnnnnnnnnnnnnnnnnnnnnnnnnnnnnnnnnnnnnnnnnnnnnnnnnnnnnnnnnggcacgagacaaccagtaagcacgtgaaaagatgcgcagcatctttcagcatcacagaaatgcagtcgtggtaccattcgcaccctctaggatagctaaaatagaaaagactgacgatcaatgttgaagaggatgtggtgcaactcagactctcgtgcgcaaagggatccaatctcttgagaaaactgtttcttgtgaagttaactacagaactactctgtgacccagcacttccttgtatttacccagaaaaataacttaagttctcaaaatttgaacaaaaacattcataacattcttattaatagcatttttattatacgaaacctccaaactggaaataacccgaatgtccatcgaa

SEQ ID NO: 31633 - DNA, 424 bp, Homo sapiens
  misc_feature (1)...(424): n = a,t,c or g
anatcgnnnnnnnnnnnnnnnnnnnnnnnnnnnnnnnnnnnnnnnnnnnnnnnnnnnnnnnnnnnnnnnnnnggcacgagggaaggaggagtaataaagggatttttgactgagctcttatggaacagagtctctctaggcccctgtcatatctgcccttctgggccctggggaaaagttggcatccccagttgtggtgctctccaggtgccctcaggctgtggtggagggagcttcccattctctccttcagccccactcaattcagaggctaagggctgaaannnnnnnnntntacaactggctggtcactgggagggtaagggatgaccatccanccnggctttcttaagacatggaaggcctaagntttaccttgggtaatccttgaantanngacnggtctttaacccnttagggggga

SEQ ID NO: 31634 - DNA, 411 bp, Homo sapiens
  misc_feature (1)...(411): n = a,t,c or g
atttgataccgttatgacnnnnnnnnnnnnnnnnnnnnnnnnnnnnnnnnnnnnnnnnnnnnnnnnnnnnnnnnnnggcacgaggaggcatttctgcttctcagtgttgtgtggctaggtagcacgggcaacaatgtcttgctggtgaatcataaaccatctggctaatgggatggagaggctggagtgacagtatttcagagtcatactctccctgccttcttatttgcctgtgaaagtttcaagcagacattgtcaattaaaaaaaatgagctaggcacagtnnnnnnnnnnnnnnnnnnnnnnnnnnnnnnnnnnnnnnnnnnnnnnnnnnnnnnnnnnnnnnnnnnnnnnnnnntttatactccagcctgcatgacagaggangaagaccttgnctcttaaaacaat

SEQ ID NO: 31635 - DNA, 425 bp, Homo sapiens
  misc_feature (1)...(425): n = a,t,c or g
ntttganaaccgctnnnnnnnnnnnnnnnnnnnnnnnnnnnnnnnnnnnnnnnnnnnnnnnnnnnnnnnnnnnnnnnggcacgaggttatttgcaggagggcacaggtgacctggaatttgtattctaaacagatcacttagacgtattgattatggggacttcagaaagaggcagtagcttttttaaaaaaattggtttgcactttgccaaaaagtatactggagtgaaaatagactgatccagggtcttagactgggctgtggtatgaaagctagatataaacatgcctggcctatgtcaaagagaagcctagaaggtcagattcaaaatatttgaccactggtatgttaaccttttggaattccctgtgtcgatactcgtgctaaatgagattgtgtgctcacctgtctcagtcttgagcct

SEQ ID NO: 31636 - DNA, 427 bp, Homo sapiens
  misc_feature (1)...(427): n = a,t,c or g
accnnttgacatgttggngaaccnnnnnnnnnnnnnnnnnnnnnnnnnnnnnnnnnnnnnnnnnnnnnnggcacgagctaggcttggaaggtgcaaagagtctgttgtaatctcttggccaaagccagtcaaaaggccagcccagattcaaaagatggaaaactagattccacctcttcttatttttaaatgggccacaaaaattctctataaagactgacttatttaatgcttacaacaacttgaggtggttgaggtaggttcctctattattcccactgttcagatgaggaaggtgaggcatagnnnnnnnnnnnnnnnnnnnnnnnnnnnnnnnnnnnnntggggcaatacaccatggtaagtcctttggaagttgctgctcattatttttgccttacagccactataggaccaacttattatt

SEQ ID NO: 31637 - DNA, 427 bp, Homo sapiens
  misc_feature (1)...(427): n = a,t,c or g
tttgagaccgnnnnnnnnnnnnnnnnnnnnnnnnnnnnnnnnnnnnnnnnnnnnnnnnnnnnnnnnnnnnnnnnnggcacgagtaagaatgaggtatgaagtgtgcttagtttgctaagtcaccagttatacgactttgtccacttttaatctcatcgtgtcttagtttctccaggggaaaatgctttttattagttttcctataacaggactcaaggcaaaaaacgcttttatgaagacgtaagaatattctggttaataatacactatggtttggcatgcttggaaagggcagcagaagaaatggcaacctggtgtggatgctgactggtctctccatctctctgcttgtctgaagcactgcagcaaagtcgctgggaggtcctgtgctctaggagtggagccttgagtgatttgagtgtgtatt

SEQ ID NO: 31638 - DNA, 416 bp, Homo sapiens
  misc_feature (1)...(416): n = a,t,c or g
tccnnnnccnnnattgnanacngcttgacnnnnnnnnnnnnnnnnnnnnnnnnnnnnnnnnnnnnnnnnnnnnnnnnnnnnnnnnnnggcacgaggattaggttcactgtaaaagaaaaggtgagacagaaacctggannnnnnnnnnnnnnnnnnnnnnnnnnnnnnnnnnnnnnnnnnnnnnnnnnnnnnnnnnnnnnnnnnnnnnnnnnnnnnnnnnnnnnnnccccgcaaaaaaaaaaaggattccaccaaancaaagcantnacctttgttgagnnantanatnncaaanggngtgnanggncnggcccacnttttttngntntttaaanangatntnccnaatantanngnnctanagtnatttngngtgngnnatttganagccangtttagggtctnataagggtttt

SEQ ID NO: 31639 - DNA, 476 bp, Homo sapiens
  misc_feature (1)...(476): n = a,t,c or g
ggaggnctttgatnnacnnnaaccctttgacatgannnnnnnnnnnnnnnnnnnnnnnnnnnnnnnnnnnnnnnnnnnnnnnnnnnnnnggcacgagggcgtggactttaattctagctcagcagcataccatatgctgggtattccacaggattatcagtagggattctgtgggacttactggctttcagacagactcaaacaagcttcctgaccacggcatctctctgagccttcaaatgctgtaagcgctttggcaatctcattatgaggcttttccccagtttgaccaaggaccaccccccacccacctcctattaaatcctggttctgagagaatacagaatttggaaaagactcttgagtcaatcagggttctgcttcagaaagtctctttgatatatcataaatatagaaaatatgttactctactgactaaaactgctaactgatatttccaaataggaactccgagg

SEQ ID NO: 31640 - DNA, 459 bp, Homo sapiens
  misc_feature (1)...(459): n = a,t,c or g
gngagtncctctgaaacccttnnnnnnnnnnnnnnnnnnnnnnnnnnnnnnnnnnnnnnnnnnnnnnnnnnnnnnnnnnnnnnnggcacgaggaatttattgcctctttcacattgaaacccaggagtggataacactggcttcaggcaaagcttgaatcaggactcaatctacaggccagcacctttctcttggccggatgtcctcagggctggcagatgcagtagactgcagtggacagtccccaccttgttactgctactacactttgctcctctggcccaaggcatgaggagagaggctgtgtcagaaactgaagctgttctcaggatcactgggctcttcttggcagaggggatgtctggcttgcctgaagggagtggctctgtaaggacgccttgatgctttcttcattaagattttgagcatttttacgtacttgagctttttttttttttt

SEQ ID NO: 31641 - DNA, 472 bp, Homo sapiens
  misc_feature (1)...(472): n = a,t,c or g
gngtgtncctttgaaaccttnnnnnnnnnnnnnnnnnnnnnnnnnnnnnnnnnnnnnnnnnnnnnnnnnnnnnnnnnnnnnnnggcacgagagttcaagtccttcatttttgcggtggaaaaaaaagtgactgaagagaagataggaggcttgtctaagatccccgcgctgcttggatgtgctgctgaaactgcatccctggtatctcaatatccatgcaaatgttctttctgctttccccactaactgtgtgattccaagaaggaaaccaaagagctggagtttgcagccctttctagttctgaacccaggcgttgcaaatgtggcttgatgcacgtcttgggctgacaagctggcttggatttctgaatgagggtacaataaggagcatcaatattggtcttaataaaaagcacacctgccccagctcaggtgctgctcctagatgaagttccctcgtccacccttactc

SEQ ID NO: 31642 - DNA, 475 bp, Homo sapiens
  misc_feature (1)...(475): n = a,t,c or g
ggagtnnntttganctctgaaaaacctnnnnnnnnnnnnnnnnnnnnnnnnnnnnnnnnnnnnnnnnnnnnnnnnnnnnnnnnnnnnnnnnnggcacgagaaacaaagaaactgaggtcacacaactagaaagctacagaactaggatttgtacccacatctatcagactccagagcccacatacttaaccatcctgctaccaacagcagccaggcccagagtctggctcacccaaagctctccacaagcccaacctgctgggaaacagatttgatatctatccttaaagtatggaggtgtcatggtgggcactgaggactgggctgctggagaccttcccccagatctgccgctgacccactgcgtgatcctgggcctgtgtctacccctctctgagcccagtttcacccttgtttcagtgatacaatcagcaaactttaagaagactcttagccaagatattctaggattctg

SEQ ID NO: 31643 - DNA, 490 bp, Homo sapiens
  misc_feature (1)...(490): n = a,t,c or g
gnnnnngnnnnntnnnnttnnnnnntctgaaannncgnnnnnnnnnnnnnnnnnnnnnnnnnnnnnnnnnnnnnnnnnnnnnnnnnnnnnnnnnnnnnnnnnggcacgagcatgtaagcaacagtggaatattaatgagatatttacattctctttttcatatgaagcctttgaaatccagtgtgtgacttattctgagggcatgtctcagttccagctgtgtttcaggtgctctgaagccacagtacgaaccattttctgcaccacggtgtttacgacgccttctgtgttcctcatccttagttcctgtgggagcctgtgtctgtgtggcttagtggggctggtgctgactccggggctggtgctgactctagggctggacagcgccatctgaatcctgcaccgcctctgggtggtttgggattctttgaatctcagccacgtgcttccctactttttctcttacaaccttcacagttctgcagtgggc

SEQ ID NO: 31644 - DNA, 492 bp, Homo sapiens
  misc_feature (1)...(492): n = a,t,c or g
gnnnnngnnnnnnnnnnnntnnnnntttgactnctgaatacctnnnnnnnnnnnnnnnnnnnnnnnnnnnnnnnnnnnnnnnnnnnnnnnnnnnnnnnnnnnnnnnnnggcacgaggaatagagcattcagagaaaaaattgattttcagcatgctcatgggttacaagaattggaatttattcgaggacattctgatacagaagcagcaagactgtgtgtggaccagtggctaaaaatgccaggactcaaaacaggcacaattaattgtggaacaaaaagttcattccgaagaggaggccacacgtgggtgtctgggaaaccaattttatgtcctataatgcactgtaacaaggagtttgacaatgggcaccttctcttaggacannnnnnnnnnnnnnnnnnnnnnnnnnnnnnnnnnnnnnnnnnnnnnnnnnnnnnnnnnnnnnnnnnnnnnnnnnnnnnnnctcccatctcagcctcctgagtgctg

SEQ ID NO: 31645 - DNA, 462 bp, Homo sapiens
  misc_feature (1)...(462): n = a,t,c or g
tttgaaanncgtatgncttacnnnnnnnnnnnnnnnnnnnnnnnnnnnnnnnnnnnnnnnnnnnnnnnnnnnnnggcacgagagcacaagcattttaagtttattgattctttctgtggaaagacatatnnnnnnnnnnnnnnnnnnnnnnnnnnnnnnnnnnnnnnnnnnnnnnnnnnnnnnnnnnnnnnnnnnnnnnnnnnnnnnnnnnnnnnnnnnnnnnnnnnnnnnnnnnnnnnnnnnnnnnnnnnnnnnnnnnnnnnnnnnnnnnnnnntatgggcagactgcggactggagtatgtgtggatttgggcatgctcagggggtcctggaaccgatgacccacgtataccaaaggatgactgtaattgttagttgtgtgctgccagcaaatactaaatacaaataagtaaacacttgagctgcctttcaagatgaangtgaggcttatcagtaaatgg

SEQ ID NO: 31646 - DNA, 470 bp, Homo sapiens
  misc_feature (1)...(470): n = a,t,c or g
tttgaantcctgaaaccctnnnnnnnnnnnnnnnnnnnnnnnnnnnnnnnnnnnnnnnnnnnnnnnnnnnnnnnnnnnnnnnnnggcacgagcaccaagatccctcggccagcctgtagaaccgtacctatgactctggcatcagattcctggcaccccagtcccactagctgtggtcccaagaatgaacctgcattttaacaagattcaaaaccattgcagnnnnnnnnnnnnnnnnnnnnnnnnnnnnnnnnnnnnnnnnnnnnnnnnnnnnnnnnnnnnnnnnnnnnnnnnnnnnnnnnnnnnnnnnnnnnnnnnnnnnnnnnnnnnnnnnnnnnnnnnnnnnnnnnnnnnnnnnnnnnnnnnnnnnnnnnnnnnnnnnnnnnnnnnnnnnnnnnnnnnnnnnnnnnnnnnnnnnnnnnnnnnnnnnnnnnnnnnnnnnnnnnnnnnnnnntgattgtgccactgcg

SEQ ID NO: 31647 - DNA, 481 bp, Homo sapiens
  misc_feature (1)...(481): n = a,t,c or g
ggnnngngnntnnttnnnnntntgaaactcgtatgactgacacgaatttaatacgactcnnnnnnnnnnnnnnnnnnnnnnnnnnnnnnnnnnggcacgagcggcacgagtgtatgttgatcaaggatatcagtctgtagttttctttttgtggtgtgtccttgtctggttttgctctccaagtaatgctgatagcaaattatcttgttgtttgtcactcacagaatgagttagagtgaaattttttgaaataatttttaggagggttgatattagttcatctttctacatttggtagaatttggcagtgaatccatctgggcctgggttttttttattgttgttggaanatgtatttttaattctgattcaatgtcactactcattattagtctctttttgttttttgtttgttttgtttgtttgtttttttctatttcttcctgactcacttttggtgggttatattcttccaagaatt

SEQ ID NO: 31648 - DNA, 491 bp, Homo sapiens
  misc_feature (1)...(491): n = a,t,c or g
gnnnnngnnnnntnnnnttnngnnntactgagactctnnnnnnnnnnnnnnnnnnnnnnnnnnnnnnnnnnnnnnnnnnnnnnnnnnnnnnnnnnnnnnnnnggcacgagttttttttttacaacttttataacttttataaaggagccgacacctttttctgatattgtcagaacaattgctgaccagtgctatgggctggctgaggttggcaaccaagaatctgttatctcagtctacacagcgtggagttagaagattggattgctgttggttagaattttgtccagagagttagaagatagaagaaaagggagggctgaggacataaacatccaaattttacaaagaagaaagttcagtgctcctgtctatattgaaatagttaagagggaaatgattgggtctggggaatgcttcaaaataatatgatcatagggaaagtaagtgtantgtggatgaaacaaggttggccttgagctgataattta

SEQ ID NO: 31649 - DNA, 445 bp, Homo sapiens
  misc_feature (1)...(445): n = a,t,c or g
ntttgaacaccttttctgattnnnnnnnnnnnnnnnnnnnnnnnnnnnnnnnnnnnnnnnnnnnnnnnnnnnnggcacgagggaatgttcaaagtaatatttcttgttttgtaaagttaatgtctcttctttaacacagtggtcacaaagaaaatattttcattttgtctctgcctttaattatttctttaaacttaggttctaaggttctaagacagcctacatttatctcacaaattaattaggactatctttatgttccagtcatttgctcaaaatcctacactggttttgtctgggagcttgagacttgagaggactggtctagatctgcactatccaacttgatagccactagccacatgtnnnnnnnnnnnnnnnnnnnnnnnnnnnnnnnnnnnnnnnnnnnnnnnnnnnnnnnnnnnnnnnnnnnnnnccatgatgg

SEQ ID NO: 31650 - DNA, 443 bp, Homo sapiens
  misc_feature (1)...(443): n = a,t,c or g
ttttgaacacctttttnnnnnnnnnnnnnnnnnnnnnnnnnnnnnnnnnnnnnnnnnnnnnnnnnnnnnnnnnnnggcacgagggtgcctgccctgggccgggacccccctccccaccccccacctaggctttttgggttttgttcaaggaaggtaaagtgagaggtttaggtcagtgtttttaagtttttgttttttttttaaagcaaatcctgtatatgtatctacatgggagacaggtagacactacttatttgttacattttgtactacacgtttgtgttccaggtttcagcttccctcgctcctgttgttaaaaagcgtccctgtcagcacaggtgtgcattgaggaaggggccccagggccttcgttccctcacactggggtggaggcggcaggaaggggcggcccttacctggcaggtctgggccgcacctttagc

SEQ ID NO: 31651 - DNA, 442 bp, Homo sapiens
  misc_feature (1)...(442): n = a,t,c or g
tttgaacacctttttnnnnnnnnnnnnnnnnnnnnnnnnnnnnnnnnnnnnnnnnnnnnnnnnnnnnnnnnnnnggcacgagatcttttttatactggtttttctaattagcccaattcaagggtaatgtaaagtccaagttccaaagctaaacatcccaatatttaggaaattaaagccttatactttcacagtgatggctaaaactggtaacagatttggggtttttcagtctgtacccaccagtatgctacctgcataatgaactctcactcattttctgctatctggatgatttgagaagtcagaacctccgaccagaaggctgactgcatgcatctactcattattcctgcctgttgccacacataaggtagcacatgccctcgagcccttcagatgatactcacatacaaaaaattagctgggccgtggtggtggc

SEQ ID NO: 31652 - DNA, 442 bp, Homo sapiens
  misc_feature (1)...(442): n = a,t,c or g
ttttgaacccctttttnnnnnnnnnnnnnnnnnnnnnnnnnnnnnnnnnnnnnnnnnnnnnnnnnnnnnnnnnnnggcacgagagaaggaagggaggggagataatgggggtggggagaagcaaaaaactaaaatagaagctcacagttttacccaattggaaatctaaaattatctttaaaaacttatataacaaaaagattaatggacactgattggctgtttgtttctttaaaaaaaaaactttttaaagtatacaattcagtggtgttaaataaacatcaccactatccatttcagaagttaaaaaagaaattccaaattgaaactactcattaaacaataactctccatgccttctcccccaagcctctggtaaccacaattctacttatcgtctgtataaatttgcctgttctaacacctcatatatgtggaatta

SEQ ID NO: 31653 - DNA, 437 bp, Homo sapiens
  misc_feature (1)...(437): n = a,t,c or g
gganncccntttggaacaccttgacnnnnnnnnnnnnnnnnnnnnnnnnnnnnnnnnnnnnnnnnnnnnnnnnnnnnnnnnnnggcacgaggggaattgtaattccccagctcctgtctctattatttgtttacctgaaggagtaattttttttggtgtaatagaaaactaggaatagagggcttaaattacagccaaaatgtcaaagagtgtgattttatatatttgaatatctatatgtaggaaagagaaatacagtttttctgtgaagatacctgttttacaaggttgcagtttggggctctttgtctcctgctgcagttaagattggacctacatcatactatatagctgtcgggacatcaaggagagagttaaatgtagaggaacaagctctgttttcatttctttgcctaaagtagtttaattttgttctt

SEQ ID NO: 31654 - DNA, 437 bp, Homo sapiens
  misc_feature (1)...(437): n = a,t,c or g
tttnaacancttttnnnnnnnnnnnnnnnnnnnnnnnnnnnnnnnnnnnnnnnnnnnnnnnnnnnnnnnnnnnnggcacgagatttgtaattaaaggaaaatcttttagttttaaggaagttattaatttgaaacatctatttaaaagcccaatttttttattgatatctttttcaagatagggacaattgaaatagagaaggaagagctcagtatcaatacaaactccctgtttgtttacccaatatttgagaaccaattttaaagttgctagtttcagaaaaatataaatttaagtaagttattaatccagatgtgttaggctgggtcattggagaagcaaatgccaagacaggattaaacatgcaaacgttttagtaagagaaacacctgagagagaaatgggacaggaggggcaaggacaggagggagatgca

SEQ ID NO: 31655 - DNA, 437 bp, Homo sapiens
  misc_feature (1)...(437): n = a,t,c or g
ttgaaacactttngacatccntacgaatttaatacnnnnnnnnnnnnnnnnnnnnnnnnnnnnnnnnnnnnnnnnnggcacgaggtagaattactagaagagaagactgtgcatttaaatttttatggtttctgccaaatacctctccaaggagaatatatcccaatttttatccccatcagcagtggattaaaatgctggttttcccaaacccttgccaacagttttaatcttggtcagacttttaagtgagaagtcatgtcattattttatagtttcaaaactgtgaatgagtttgcatacttctgtatgtttacttttgtgttttttgttctttgttcatgtcttctgattttttttgtaatttttctgtttttcactgatttgttatacctcttggattattctttttcatatgtgttgcaaatgttttcacg

SEQ ID NO: 31656 - DNA, 445 bp, Homo sapiens
  misc_feature (1)...(445): n = a,t,c or g
tnnnnnnntttgaacacctttgacnnnnnnnnnnnnnnnnnnnnnnnnnnnnnnnnnnnnnnnnnnnnnnnnnnnnnnnnnnggcacgaggtgagaccagtcagctcacttgggcagtagcattcacttgagttccagcacaaagtaggtagatagggtttgtcaagggtcaatgtttggccagcaagtagaaaggaggaagacagggatgaaggcattaaaaattaggtannnnnnnnnnnnnnnnnnnnnnnnnnnnnnnnnnnnnnnnnnnnnnnnnnnnnnnnnnnnnnnnnnnnnnnnnnnnnnnnnnnnnnnnnnnnnnnnnnnnnnnnnnnnnnnnnnnnnnnnnnnnnnnnnnnnnnnnnnnnnnnnnnnnnnnnnnnnnnnnnnnnnnnnnnnnnnnnnnnnnnnnnnnnnnnnnnnnnnnnnnnnnnnnnnnnnn

SEQ ID NO: 31657 - DNA, 466 bp, Homo sapiens
  misc_feature (1)...(466): n = a,t,c or g
tnnnntnnnnnnttganaccgtttgacnnnnnnnnnnnnnnnnnnnnnnnnnnnnnnnnnnnnnnnnnnnnnnnnnnnnnnnnnnggcacgnnnnnnnnnnnnnnnnnnnnnnnnnnnnnnnnnnnnnnnnnnnnnnnnnnnnnnnnnnnnnnnnnnnnnnnnnnnnnnnnnnnnnnnnnnnnnnnnnnnnnnnnnnnnnnnnnnnnnnnnnnnnnnnnnnnnnnnnnnccaggttnnnnnnnnnnnnnnnnnnnnnnnnnnnnnnnnnnnnnnnnnnnnnnnnnnnnnnnnnnnnnnnnnnnntttatctttcttaagcttggagtcatctttttaaaacagccacaatgaggtataattgatatacaatacnnnnnnnnnnnnnnnnnnnnnnnnnnnnnnnnnnnnnnnnnnnnnnnnnnnnnnnnnnnnnnnnnnnnnnnnnnnncagggggatcatatcca

SEQ ID NO: 31658 - DNA, 456 bp, Homo sapiens
  misc_feature (1)...(456): n = a,t,c or g
tttgananccgtttgaatcccnnnnnnnnnnnnnnnnnnnnnnnnnnnnnnnnnnnnnnnnnnnnnnnnnnnnnnggcacgagtgctgcagaaagtctcctgagtgattcagatgcctgttggtgctcctggaattgcatccagatgccctaccttagtattaaagtctcactcaactctaagatcaatgagtggggagggtgagggctagattttcattgaccctggtgttgccagcccctgctggacatcaatctggcacaaagcagacaatgttaattttttttttccttgaaggagtaaacccaggtctctctccagtgtcttatcagcctcccaaaggcggggaatcccactggggtccctgatcaccttccagagccacctctctgcaatcagctgcattttgctanaatcggccttgctgtccaccttccccatcagcgtcctcatggg

SEQ ID NO: 31659 - DNA, 459 bp, Homo sapiens
  misc_feature (1)...(459): n = a,t,c or g
tttgaannccctttnnnnnnnnnnnnnnnnnnnnnnnnnnnnnnnnnnnnnnnnnnnnnnnnnnnnnnnnnnnnnnnnnnnnnnnnnnggcacgagcctgattacagcttattatcatctcacatatatcaaatgaccttgctttgtgactcaagaaatcacagactcataatactctgtggctggaaagcatctcagagatcccagagagagggcgactgagaactggccaagttaaatactatttcaaagacacttggctgattagtagcagaagactcaggcaagtaagcccaggcctctgcatcttccatcaaaccgactgctggtttcctgatcatctttacaaagctcttctaggggcaatatgcaaaaggtaaatagcataatttgtcactgggcaaaggccagaatggggctgagccttggcacgagtgaactggcacgatttcaggacta

SEQ ID NO: 31660 - DNA, 382 bp, Homo sapiens
  misc_feature (1)...(382): n = a,t,c or g
tnnnttngngnntttgaaacccgtttgactgcnnnnnnnnnnnnnnnnnnnnnnnnnnnnnnnnnnnnnnnnnnnnnnnnnnnnnnnggcacgagcgttggtgtaggatcatagttatttacctctgaacctatttatcagacaattaaaacataaagttttttttattataaacctgttgtttcctgaaaactagtcagaaaatcttaacatctcctttatatgtggtataacattgctctcagtttcctaataaattattaatataatttttggtttagtagagacattattctcttctaaaacctttttataattatgaggaaaccaagatatctagaagcttcaattactgaactatgaaaccgtttttttttttttt

SEQ ID NO: 31661 - DNA, 455 bp, Homo sapiens
  misc_feature (1)...(455): n = a,t,c or g
tttgaanacccttttganaccgnnnnnnnnnnnnnnnnnnnnnnnnnnnnnnnnnnnnnnnnnnnnnnnnnnnnnnnnnnnnnnnnnnggcacgagctgcaccacacttgccatgttttttttttaagatttaaactagtaattgatttgccatatgccgtcaagctgcacgtactttatgcatttaggaacttggggagtttggaattgtgatttccttcatcttccagtggcagctttttttttcccttgtccaatgcacagggattngnnnnnnnnnnnnnnnnnnnnnnnnnnnnnnnnnnnnnncgcatgcacgcncntgcatncttgtgtgnatgtgancccatgaggaaaccccattctacngncanccngntaggggggattnccntgcgngnntnaangggncttgntgaatntatatgaancananntntgcanctctacctatg

SEQ ID NO: 31662 - DNA, 455 bp, Homo sapiens
  misc_feature (1)...(455): n = a,t,c or g
ttganaaccgnttnnnnnnnnnnnnnnnnnnnnnnnnnnnnnnnnnnnnnnnnnnnnnnnnnnnnnnnnnnnnnnnggcacgaggagggtgcagaggccacattgttctccatcacctaaacccagatatgatactcattacttcaactcacatgccttggcaagatctagatgcaggaggttctggcaactgttgccctgacaagccaacatatagcaacagctgtaccccaaaaagaaaaactccttgaaagaaatagtccaaactacttcaacttccagtttttccttaattcactgcaactgaggtttcatctccacatcttccatcttgctaaattttatgatcccccagattagttatgcatcaacggcacccgagctaagtgatgaccggcgctatgacttcttctctcgcgtggtgccacccgattccttccaagcccaggccatgg

SEQ ID NO: 31663 - DNA, 464 bp, Homo sapiens
  misc_feature (1)...(464): n = a,t,c or g
tnnnnttntgcntctgaaacccntntgacnnnnnnnnnnnnnnnnnnnnnnnnnnnnnnnnnnnnnnnnnnnnnnnnnnnnnnnnnnggcacgaggaatattccaagctgaataaagagcttagaaggctaaggagatggctgaggcattggagggaaggagtatggatagtcaagggagggtaatagagagagctatgtgagtttgaggagcaccaaagtagaccagaatagagatcctaagaggagagtgacgagaaatgaggtcacattgttaggcgtagtcagatcacatgaggtattgttgaatttgaatttttgggaataagaaggattagaaccaatgatgtaattgttttcaaggcatttttaaaaacattagacagattcagagaacaacatataacacatgagtagcttactgagtcttacaagttaaacaatcatgtcaccacagccgtgtca

SEQ ID NO: 31664 - DNA, 434 bp, Homo sapiens
  misc_feature (1)...(434): n = a,t,c or g
natttgaaacacctnnnnnnnnnnnnnnnnnnnnnnnnnnnnnnnnnnnnnnnnnnnnnnnnnnnnnnnnnnnnnnnggcacgaggatcacataactaaaaggccagatagcagagtgttagagatctacctcaacattcattctctcttccttcttaataacagaaccttgatttttttcctgaggtattgcctctctgtataaagacacattttgtagtctccctagtagctagataagtaactaagttcttccaataagactaagtgaaaatgttatgtggaacttttgtaaagtctccttaaaagaaaaggggtgtgccattgttacatttctccttccttctgtgtagaatgtccatataatggctatagctacagtgggccatcttggaccatgaagtataaggtccacatgctgaagatagtggagc

SEQ ID NO: 31665 - DNA, 438 bp, Homo sapiens
  misc_feature (1)...(438): n = a,t,c or g
ttgaacacctnnnnnnnnnnnnnnnnnnnnnnnnnnnnnnnnnnnnnnnnnnnnnnnnnnnnnnnnnnnnnnnggcacgagactagcatgcttttgctgttgagggtgtatcaccatacctttgatgctaagagagctggtttgttgatagatccacaagcaagcacctccactggaagacattgcagatgactgcagtccagggatgagagagctgatagaagcttccctggagagaaaccccaatcaccgcccaagagccgcagacctactaaaacatgaggccctgaacccgcccagagaggatcagccacgctgtcagagtctggactctgccctcttggagcgcaagaggctgctgagtaggaaggagctggaacttcctgagaacattgctgattcttcgtgcacaggaagcaccgaggaatctgagatgct

SEQ ID NO: 31666 - DNA, 440 bp, Homo sapiens
  misc_feature (1)...(440): n = a,t,c or g
tttgaacacctnnnnnnnnnnnnnnnnnnnnnnnnnnnnnnnnnnnnnnnnnnnnnnnnnnnnnnnnnnnnnnnggcacgagccgagagtttatcctccagaagatttattccttcaggaaacccatgaccaactatcagatcccccagacggccctgctgaagtacaggttcttctatcagtttctgttgggcaatgaacgagcaacagcaaaggagatcagggatgaatatgtggagacgctgagcaagatttacctgtcttactaccgctcttacctggggcggctcatgaaggtgcagtatgaggaagtcgctgagaaagatgatctaatgggtgtggaagatacagcaaagaaaggattcttctcaaagccatcgctccgcagcaggaacaccattttcaccctaggaacccgcggctctgtcatctcccccact

SEQ ID NO: 31667 - DNA, 440 bp, Homo sapiens
  misc_feature (1)...(440): n = a,t,c or g
tttgnaacagctnnnnnnnnnnnnnnnnnnnnnnnnnnnnnnnnnnnnnnnnnnnnnnnnnnnnnnnnnnnnnnnggcacgagactggnnnnnnnnnnnnnnnnnnnnnnnnnnnnnnnnnnnnnnnnnnnnnnnnnnnnnnnnnnnnnnnnnnnnnnnnnnnnnnnnnnnnnnnnnnnnnnnnnnnnnnagaggacctgcatgataagataccatgtggagagagagaagccacgtggaagactatcaagataccaagcaaatgagtgaaaccttcttagaccttctaacctagcccaaccaccagctgaaagcagacgcacaaagcacaactgatgttacacaggggagaaggaccatccagacaagtcctgcccaaattcctaacctgagtaattatgagacaaaataaatctttattgttttaagccccaattttg

SEQ ID NO: 31668 - DNA, 423 bp, Homo sapiens
  misc_feature (1)...(423): n = a,t,c or g
ttgaacaccttgacnnnnnnnnnnnnnnnnnnnnnnnnnnnnnnnnnnnnnnnnnnnnnnnnnnnnnnnnnnggcacgaggtatggaggagtggacagtgacaaagactcctaatctgttgcctttttcattttccaatacgacactgaaatatgtgaagtggctatttctttatatttatccactactccgtgaaggcttctctgttctacccgttccaaaagccaatggctgcagtccgtgtggatccaatgttagagacttttttttagtacacttttatgagcttccaaggggcaaatttttattttttagtgcatccagttaaccaagtcagcccaacaggcaggtgccggaggggaggacagggaacagtatttccacttgttctcagggcagcgtgcccgcttccgctgtcctggt

SEQ ID NO: 31669 - DNA, 432 bp, Homo sapiens
  misc_feature (1)...(432): n = a,t,c or g
canctnnnnnnnnnnnnnnnnnnnnnnnnnnnnnnnnnnnnnnnnnnnnnnnnnnnnnnnnnnnnnnnggcacgagcctcaataaaaagaatttggatctaggtggccgtcttctttgtggtttaattccctaatttcannnnnnnnnnnnnnnnnnnnnnnnnnnnnnnnnnnnnnnnnnnnnnnnnnnnnnnnnnnnnnnnnnnnnnnnnnnnnnnnnnnnnnnnnnnnnnnnnnnnnnnnnnnnnnnnnnnnnnnnnnnnnnnnnnnnnnnnnnnnnnnnnnnnnnnnnnnnnnnnnnnnnnnnnnnnnnnnnnnnnnnnnnnnnnnnnnnnnnnnnnnnnnnnnnnnnnnnnnnnnnnnnnnnnnnnnnnnnnnnnnnnnnnnnnnnnnnnnnnnnnnnnnnnnnnnnnnnnnnnnnnnnnnnnnnnn

SEQ ID NO: 31670 - DNA, 441 bp, Homo sapiens
  misc_feature (1)...(441): n = a,t,c or g
ttaaacanctnnnnnnnnnnnnnnnnnnnnnnnnnnnnnnnnnnnnnnnnnnnnnnnnnnnnnnnnnnnnnnnggcacgaggaggcttacatggtgatgcctgtgaccttggaggtggaggagaatgatgggcgtacagaggagtgaagaaaggctgggaggaatagagatgtgggagaggaggtgaggcaaagaaaaaagaaaggaggaaggggtgttggagcagattgtagttgatccacagcaaagagcatcaccaaagccattccaggaggaactagatccaccacttcctctgctgggcatgctccaaaaatggttgtggcctccagagaggactccaaaagaaagcacaaaaactagacagtgggagggcatacccaaaagccctgagtttctgaaaaaatattgaaagtttctatggtgaaataggaagttaat

SEQ ID NO: 31671 - DNA, 474 bp, Homo sapiens
  misc_feature (1)...(474): n = a,t,c or g
nntttggaaaaccgntnnnnnnnnnnnnnnnnnnnnnnnnnnnnnnnnnnnnnnnnnnnnnnnnnnnnnnnnnnnnnnnggcacgannnnnnnnnnnnnnnnnnnnnnnnnnnnnnnnnnnnnnnnnnnnnnnnnnnnnnnnnnnnnnnnnnnnnnnnnnnnnnnnnnnnnnnnnnnnnnnnnnnnnnnnnnnnnnnnnnnnnnnnnnnnnnnnnnnnnnnnnnntttgtaagcctagctatcaattttcaggtcacaagcagtaaatactgagtanctgcntttgactgaactggaaagttttgtaaaggaattttgancaagggtaaatatttaatgattggagcccaaatcacgtaagcagaaaattactgtagtcatcagtgtattctctnttggactttcactcattctatccatttgagtgctttctatatgttagccactgcnatgttataaagataaatcagaaac

SEQ ID NO: 31672 - DNA, 476 bp, Homo sapiens
  misc_feature (1)...(476): n = a,t,c or g
ttganaccttnnnnnnnnnnnnnnnnnnnnnnnnnnnnnnnnnnnnnnnnnnnnnnnnnnnnnnnnnnnnnnnnnggcacgaggtgccaccggactgcagcttggacgatagaaaaatacataaataaaatgctcttctcttgaggatgattgtataaatgcatttttacaaattttagaaccttgcatggctttgtcttgaggtgtgaactctcttcttatcaatctatagcatacaatgttacagctgatgaaggaggcaggctgctataatggaatcacatccagggatgattttcctgtgactgaagtgctgaaccaggtttgcccttccacatggcgaggtgcctgcaagacggcggtgcagctgctgtttggccaggctggactggtggtggttgacacagcacagattgagaataaagaagcctatgccccccagatcagtttagaaggctctagaatcgtggttcaag

SEQ ID NO: 31673 - DNA, 478 bp, Homo sapiens
  misc_feature (1)...(478): n = a,t,c or g
ttgannntttganaacnnnnnnnnnnnnnnnnnnnnnnnnnnnnnnnnnnnnnnnnnnnnnnnnnnnnnnnnnnnnnnnnnnnggcacgagnnnnnnnnnnnnnnnnnnnnnnnnnnnnnnnnnnnnnnnnnnnnnnnnnnnnnnnnnnnnnnnnnnnnnnnnnnnnnnnnnnnnnnnnnnnnnnnnnnnnnnnnnnnnnnnnnnnnnnnnnnnnnnnnnnnnnnnnnnnnnnnnnnnnnnnnnnnnnnnnnnnnnnnnnnnnnnnnnnnnnnnnnnnnnnnnnnnnnnnnnnnnnnnnnnnnnnnnnnnnnnnnnnnnnnnnnnnnnnnnnnnnnnnnnnaataaaaagaactacctgaaagtgggtcttttatgaagaagcaaagaggtttatttggtgcacaattccgcaggcttaacaggaagcatgactnnnnnnnnnnnnnnnnnnnnnnnnnnnnnnnnnnnnnnnnnagg

SEQ ID NO: 31674 - DNA, 462 bp, Homo sapiens
  misc_feature (1)...(462): n = a,t,c or g
nnnnnnnnnnnnnnnnnnnnnnnnnnnnnnnnnnnnnnnnnnnnnnnnnnnnnnnnnnnnnnnnnnnggcacgagggactctgtcaccaataaataactgtttaacttgaaaaaatatatttaaaaaaaatcagtgtttctggatagtgtcctaggggcacacagcaaagggagaaatattcaagaaatcttctaaatctcaggaagaacagcaagagtcagtggcatttgaaccacaagctgtcccactccaagctctattttatgaaaactactcaaaggaattctaatccatgtgggtgtggtctagaagatgggggctccctcatcccctagctcattgtctagagctatggttttacctgggaggagcaggcctctggcttttctcatctcctctccagttctgttttgtagaagctctattccaggcagatccacgaagactgggtctctcttctc

SEQ ID NO: 31675 - DNA, 472 bp, Homo sapiens
  misc_feature (1)...(472): n = a,t,c or g
aaaccttnnnnnnnnnnnnnnnnnnnnnnnnnnnnnnnnnnnnnnnnnnnnnnnnnnnnnnnnnnnnnnnnggcacgaggaaatactgtgcctggcctggggaccaggtgcattttaaggttccttggtgttcaaaaaccacgttcttagcctagattgagcttagattgcctctctagacaactaccccttagttataattctgtgtcccctctgcatgcccttaaacattggacagtgaggtcacagtccacccaccctctctctgatctcccccttcctaagacttctcttttgcacatctagtgaggtgaaaatttggtctatgccaggcccatttcctgcttttgtgtaaggaaggtgctcacataggaagtttttatttggttagagacaggtttccctgtaggaagatgatggctcatttacactcagctgctctgcaagcagaaactttacaacctgatgtcat

SEQ ID NO: 31676 - DNA, 457 bp, Homo sapiens
  misc_feature (1)...(457): n = a,t,c or g
nnnnnnnnnnnnnnnnnnnnnnnnnnnnnnnnnnnnnnnnnnnnnnnnnnnnnnnnnnnnnnnnnnggcacgagggaatgtcagcagctgcagcctgaaacttcagtgggctgggctgggctgggcacactccctgctcctctcctgtgacagaagatgtaccaggccacagtgtggccccgaggctgcagcctatcccaagaagtgcaaggaggctatagaggtgggagaaaagagatggttggttggttgattggttccttcttaagtaaaatagcattgttccaaattgacttctatagtaaaacatattttttataatttnnnnnnnnnnnnnnnnnnnnnnnnnnnnnnnnnnnnnnnnnnnnnnnnnnnnnnnnnnnnnnnnnnnnnnnnnnnnnnnnnnnnnnnnnnnnnnnnnnnnnnnnnnnnnnnnnnnnnnnnnnnnnnnnnnnnn

SEQ ID NO: 31677 - DNA, 462 bp, Homo sapiens
  misc_feature (1)...(462): n = a,t,c or g
tgaanacctnnnnnnnnnnnnnnnnnnnnnnnnnnnnnnnnnnnnnnnnnnnnnnnnnnnnnnnnnnnnnnnnnnggcacgagcaagcagagaacgctgggtaatgattgcccagagttgagagtgtgcttttggctggataaagtatcaaaacaaggatatgcatcatcagaggggtaatttgggtgtaggtattagaaatacctaggaatctactatgatgtagttcatgttaagccattttatctacactgaagtctttttttttctttcttttttttttttnnnaanaaaccntnantttntncccggttggagtnannttncacttnannntanntgnatnnnngnccngggnntaancnaanccannnnctcnannnannnantaannnnnntnnnctttncctttananncccnnananannanngagnnnttnntggannntgggnananaaat

SEQ ID NO: 31678 - DNA, 476 bp, Homo sapiens
  misc_feature (1)...(476): n = a,t,c or g
ntttggannnnnnnnnnnnnnnnnnnnnnnnnnnnnnnnnnnnnnnnnnnnnnnnnnnnnnnnnnnnnnnnnnnnnnnnggcacgagggttcatagtactccccaccaaggcagccacatgacaatagagccccgcaggcatccactaagtaagtgtgggttgatctggggattgggggaaggggaggtatctctaaaccagttttgcaggcaacttcttggaggacagccaataaggaactggcaaaagaagaaaaaagtgctccaagtttacatttgataaaatctcactgggaatattatttatttgagatgttcttgacatttcacttcaattttattcaaattagttggccctgcagcccaagtaaagtggaaaagcaccaggcagggttgaagtnnntgtgtcctttccctttccagccccagagatacgaaggagctcttcctggagtttggggagcanaactcaactg

SEQ ID NO: 31679 - DNA, 459 bp, Homo sapiens
  misc_feature (1)...(459): n = a,t,c or g
tttgannntttganaacgctatgacnnnnnnnnnnnnnnnnnnnnnnnnnnnnnnnnnnnnnnnnnnnnnnnnnnnnnnnnnnggcacgagcagtaaatgaacatcagaggcaagtcagataacacagcagaaatagagaagaagggtatgtttgtcagggaaggatatgtctgtggtggggtgaggtatggggtccggggtgggggatgggggtgattgnnnnggtacatgatggttgncttcncntaatgcgaanatccnntattccctncttcccgtntgntancatcnnttttcangaatttnangtnatacnntcncntcgtntanatcctgnttctnntgtcnnnnantatncntatantttnatnantgtntntttgttnatctngcanttctagtcccntttctntttnnttantatcngtanncatcccttgactgnnttnatgntccta

SEQ ID NO: 31680 - DNA, 466 bp, Homo sapiens
  misc_feature (1)...(466): n = a,t,c or g
gngntgnntnnnnnatttggaanccntnnnnnnnnnnnnnnnnnnnnnnnnnnnnnnnnnnnnnnnnnnnnnnnnnnnnnnnnnnnnnnnggcacgagagttctcatattttatgttctaatatataattacctttgctacagtaattgtatacgtaaataccaacctataatttgtgatacatattttaaatatttttatagcatcagaaaatttgactatgcaagtacatatttttatgtaactaattgttgatggatttaaatataccacagaattttctttaatactaaaaaaatacatatttcagagttctatagaattttaagaaagcattttggcctatggttgatttttcaaagtttgtaaacctgtggtattttataggaaagacatttttaactgccattttagtaaacaacttctaaaggttgagaaaataattttagggtttataaaaattgag

SEQ ID NO: 31681 - DNA, 463 bp, Homo sapiens
  misc_feature (1)...(463): n = a,t,c or g
tngacacccnnnnnnnnnnnnnnnnnnnnnnnnnnnnnnnnnnnnnnnnnnnnnnnnnnnnnnnnnnnnnnnnnnggcacgagagaatatatgattgatctgcatagcttaaatatcctgtaatgtcaaactgatcattaatattggaagtattttgttttcaatcctgcatgtaaccaatttttaggcttcacaccctccctgacttggaatctttgtttcgactctcccaccttctctagcattttgtgcttctgctaatgggcatcttttctgcctttttcctcatatctttagactgagaatcctgaacacacaattcacctgcagattcccatcagaatcaagccaaaaagaatagaaaggaaaggcagaacatattaaatttgttttctgccatctgcatgctctacatgagggcccaccctaatttcaggcatgggcatgtgagccggntttaaca

SEQ ID NO: 31682 - DNA, 456 bp, Homo sapiens
  misc_feature (1)...(456): n = a,t,c or g
cccccccttgacanccnnnnnnnnnnnnnnnnnnnnnnnnnnnnnnnnnnnnnnnnnnnnnnnnnnnnnnnnnnnnnnnnnnggcacgagctggatttagaattcaggtcatttgactcttattccaatgatctttctactgtgcccaaacagaacatttctagagtatttgctctatttggatattggatactaggcagcattgagctccttgttaaagggttttgacctcgtctggggttaatggcaagctgctggaaggttttatgccagggaatgctatgtttcagttaatgcttaatggaaacaaatctggcagtgaggtgtatgatgtgtcagcagaacagacacctggaggagggggggttagaaaatgaggacaattagcttcaaacagaaacncaacttttgatacgcattcaatcacatgctgagaaagtgatttcccttcaggtc

SEQ ID NO: 31683 - DNA, 467 bp, Homo sapiens
  misc_feature (1)...(467): n = a,t,c or g
ggtgtnnnnntttganatcgantgacctgatacgaatttaatacgactcnnnnnnnnnnnnnnnnnnnnnnnnnnnnnnnnnnggcacgagaagcattacttcttcagaatactatccatttgtttttattataaatatttcatcctccgatgttgataacccagttgcagagaaaagctcatgttagttgataagtttttactgaaactggtacttagaatattttgttccctcataaaaatgataaaacccatattacaatttaaaaaaaataaactagtaagatgtcttagaaaaaggatgtaaaacagttttgggaggggattttgtgtttaatttatctatgcaatatacctgctaattgcaagaattcctttgggaaaaagaagacatgatcatagaaactttctagcaagtttcataatttgntgatttatctttcaattatgtctctcaaaaatgtttg

SEQ ID NO: 31684 - DNA, 460 bp, Homo sapiens
  misc_feature (1)...(460): n = a,t,c or g
ggtgnnnnnnnntttganatcnnnnnnnnnnnnnnnnnnnnnnnnnnnnnnnnnnnnnnnnnnnnnnnnnnnnnnnnnnnnnnnnnnnggcacgagggagcgaatagaacctcagttctccagggcgacacggacaccttatgttccgagcccctccgcctgccctgccctggaagccagactgcagaatgtagcccacgctgtgtctgtgggaaacacctgttggcctgcccccttcctggctcccctgggagttctggagggctgcatctcacctgcctcagtttccctcatactgaggtgcagccagtgagcaccccattccagaaggtgagtcacatggcacaagcaaagcctcttctctgtgtgcagatgcaggacctgcaggacattttgcctcggctacaacccgctggctgacggtcaccaccattcgtaccctgactggtgggtttcctgg

SEQ ID NO: 31685 - DNA, 463 bp, Homo sapiens
  misc_feature (1)...(463): n = a,t,c or g
ggtgntnnnnnattggananccnnnnnnnnnnnnnnnnnnnnnnnnnnnnnnnnnnnnnnnnnnnnnnnnnnnnnnnnnnnnnnnnnnnnggcacgaggaagaggaggcagtagttaaaattgcttcctcttaatgactctgaatgtattgcctgtgattccaaagttgtacataattgttcagacctcctccatccttttaaattgcctgctgcagtaaataactagtttgagtagaactagatcctgtctatctatttggcacatgttctgctgcctggggagtaagcaagctaaagggatgagaaagaccacctccccctaccctggaaattgcactgcaaggcagggcgagaatggggtagctggcagacctggcctccttgttcccagtcttagtttttcttgagagattcagtattcagtaaagaatagcattcaattagtcaaaaaatatatatat

SEQ ID NO: 31686 - DNA, 465 bp, Homo sapiens
  misc_feature (1)...(465): n = a,t,c or g
ggngnnnnnnnnttgnnatttgaanaccnnnnnnnnnnnnnnnnnnnnnnnnnnnnnnnnnnnnnnnnnnnnnnnnnnnnnnnnnnnnnnnnnnnggcacgagcaccatgagcttcaataccctgtaaaacactgctgcctttggtaagagatataagggagactcttcacctataatcaaaataaaataaagatcttctggtagtcaggattcctaattcctatagaagacatttttcttttaaatgtattatnnnnnnnnnnnnnnnnnnnnnnnnnnnnnnnnnnnnnnnnnnnnnnnnnnnnnnnnnnnnnnnnnnnnnnnnnnnnnnnnnnnnnnnnnnnnnnnnnnnnnnnnnnnnnnnnnnnnnnnnnnnnnnnnnnnnnnnnnnnnnnnnnnnnnnnnnnnnnnnnnnnnnnnnnnnnnnnnnnnnnnnnnnnnnnnnnnnnnnnnnnnnnnnnnnn

SEQ ID NO: 31687 - DNA, 482 bp, Homo sapiens
  misc_feature (1)...(482): n = a,t,c or g
ggngnnnnttngnattnnnnaccgctatgacnnnnnnnnnnnnnnnnnnnnnnnnnnnnnnnnnnnnnnnnnnnnnnnnnnnnnnnnnnggcacgagctaaatccaaaaagagttacaatacgagatgttgaagagaatttagagaaactagagtttgtgtatacttttagtgtgtaaagtagaaatatgttttgaaaaacagtttggcattgtgttccaaatttgaatgtaaggatatacccttaaatgcgaccatataacatcattatttgaaatagcccagaattaagcaactcaaatgtctgtctacaagaatacatgaataaaccatgctatactggttaagtgtcagaaatacttgggaccagaagtcatttggatttcagatttcttcagattttggaatatttgcattatacttcagaaatttaaaatgtttcagtgagcatttcctttgagtgtcatatctgtgctcaaaaag

SEQ ID NO: 31688 - DNA, 476 bp, Homo sapiens
  misc_feature (1)...(476): n = a,t,c or g
ggagnnnatttgaaaccgttgacnnnnnnnnnnnnnnnnnnnnnnnnnnnnnnnnnnnnnnnnnnnnnnnnnnnnnnnnnnggcacgagcgtggcgattttctgccccttactttccagaccttcctggaaattactgcctgccagtttaggctttgaccttggcctgtgctcctcgctcatggaccctgcttagtttcatctgttgcatttccattgtcaaggccttacccaggcctagtctctgtttctgggacatcttctggaatggcactcctggcactgcgagtataccgcatcttctagtgcttgctgtatgaatgtaaactccatcttccacttcgcgtttggaggtccctgtcagccaagggcccttatctttgttgagaactctgtgtgtgctcaatgctcaaatgcctgcaaagtagaattgtagttcttattttgtaggctacaaaagaaggctcagagaagttc

SEQ ID NO: 31689 - DNA, 455 bp, Homo sapiens
  misc_feature (1)...(455): n = a,t,c or g
ggagnnctttgaatccntnnnnnnnnnnnnnnnnnnnnnnnnnnnnnnnnnnnnnnnnnnnnnnnnnnnnnnnnnnnnnnnggcacgagctggaagagannnnnnnnnnnnnnnnnnnnnnnnnnnnnnnnnnnnnnnnnnnnnnnnnnnnnnnnnnnnnnnnnnnnnnnnnnnnnnnnnnnnnnntcctngccctntngnngaaacnctatcattantntgattattaanancngatncntctgagcctnttnnttncacctgttgcccatctttttnattgctctccttncnatnctttcnttcctaggccttttcanntnntcncantntannntncttctatcanctcnncacccnnnanctncttgntacacccctgnttncatatttntctcacttncnctatntttattgcttnactnatcncttnnnttcttttcctacctgcagca

SEQ ID NO: 31690 - DNA, 482 bp, Homo sapiens
  misc_feature (1)...(482): n = a,t,c or g
ggngnnnnttgnnacngcnnnnnnnnnnnnnnnnnnnnnnnnnnnnnnnnnnnnnnnnnnnnnnnnnnnnnnnnnnnnnnnnggcacgagccctgtccctggcctccatcccacaatgtaaataaacttactttcaacttttgaaattagtgatagaggaccactaagtatttcaaaatcagtgaccacgtttcagataaggaagtcagccatcccgtccctatttcctccatcatctcctgaaatcctacgccattctacaaacaaaataattgcaatttcccttcccccatgatcaacaatcctattctgaaagtgttttacttagtctcagatacatgaggaacaaggtaatgggtccttgccaacaataagcttctatacttttattaattacacatgattgtatcacacctgctttaaactcctaaaggtccagggcctccctgagcaggtaaacatccacctctgatgtgctgtgc

SEQ ID NO: 31691 - DNA, 484 bp, Homo sapiens
  misc_feature (1)...(484): n = a,t,c or g
ggngnnnnttnnnatcgnnaccgctatgacnnnnnnnnnnnnnnnnnnnnnnnnnnnnnnnnnnnnnnnnnnnnnnnnnnnnnnnnnnggcacgagaaatgtacttttttagctaccatgatgtatttggagtcaaaagaattctacctgtcactctacttgttagttatgtgactctaaacagattactcaagcctggtttgttcagactataggctgggatcataatacttgcagagctacactgaaattgnnnnnnnnnnnnnnnnnnnnnnnnnnnnnnnnnnnnnnnnnnnnnnnnnnnnnnnnnnnnnnnnnnnnnnnnnnnnnnnnnnnnnnnnnnnnnnnnnnnnnnnnnnnnnnnnnnnnnnnnnnnnnnnnnnnnnnnnnnnnnnnnnnnnnnnnnnnnnnnnnnnnnnnnnnnnnnnnngtaccagttatatatccttattcaaaatgcctaggacacccagaagtggttcag

SEQ ID NO: 31692 - DNA, 473 bp, Homo sapiens
  misc_feature (1)...(473): n = a,t,c or g
ggagnntnnttganacngnttgacnnnnnnnnnnnnnnnnnnnnnnnnnnnnnnnnnnnnnnnnnnnnnnnnnnnnnnnnnnggcacgaggccaagtggagttaaaaggtcggcctctctacttggcctctctacatctgtgagggagaagcagcttcttgttattgctgagtggatatgggagttctggctcctttctggacattagctgataccaccctgactagaggagtaggagttccttatactgttccccacataatctctactgacaccaaatgattcttcttcagtggatagagaaaatgttcttagtactattattacataaataaaaattatttaaaatagtgtttcttttattctttaaaattacttgcatgttttgtaattacatactatatgttcataattcattagttaaataaataggtgggagtccatgccttactattttactgataaagagaccc

SEQ ID NO: 31693 - DNA, 477 bp, Homo sapiens
  misc_feature (1)...(477): n = a,t,c or g
ggnnnnnnnnnnnnnctttgaananccgnnnnnnnnnnnnnnnnnnnnnnnnnnnnnnnnnnnnnnnnnnnnnnnnnnnnnnnnnnnnnnnnnnggcacgagaaacagaaaaatcccttggtttgttaagctacagaacagacttttgtcatcaagaggctgtatatttgggcaagtagtaaggagccatgtaacatgttcagtgcctctgtggtgctaggtagtagccctgatccctgacccctgccttctagaggttagctctttgagaatagcatacataaatcccaaggggaacattcttccagtaactgatcaaggactttggtcactaaatttcctaagggagaaatgtggacagctaaaatctgaagccttactgagaagatagagaccattgttcatgacctacagctttgaagagagtagtcatgttgantggggaagccaatattgctagaaatacngaagntacct

SEQ ID NO: 31694 - DNA, 477 bp, Homo sapiens
  misc_feature (1)...(477): n = a,t,c or g
gnngnnnnnnttnnnnntttgnnnnnnnnnnnnnnnnnnnnnnnnnnnnnnnnnnnnnnnnnnnnnnnnnnnnnnnnnnnnnnnnnnnnnnnnnggcacgagacctcacctctgaaaacttcagtatgcatctagcaaaaacaggaacatcttccaacaaacaccgagctatcatctatctaagaaatcaatactacttatgtaatactacacagtatgtagtccatactatataccaaatttccccgcttttccaaaatgttttatatagatgagttttcccccttttcacataggatccaaccgaggttcacacattgtaattgttatgtctctgtagtgtccttagaatgctcctctttccctcagcaggctcactctgtcctttgtgactttgaatgctttaaataggccaggtcagttgtcctgaaggatgtcccatatactagattcttctgntattagggnttagtacaa

SEQ ID NO: 31695 - DNA, 462 bp, Homo sapiens
  misc_feature (1)...(462): n = a,t,c or g
tnnnnacnttgnngaccgattacgaatttantacgactcnnnnnnnnnnnnnnnnnnnnnnnnnnnnnnnnnnggcacgaggctgataataagctgcccagtatttcacacaaaaatctttttttgcatattttaattagatattacagtaaagagaacaatctcctaaaaagatatgtatagtatgtgcatattttgtattaaaggagcatctggagctaataccatcatggacacattaatttcagtggttacaatcaatcaacatatttaattacattaattttcttttatgtaaaatgtaataataccactatttctattagatataattaggattcttgtagaaattcttgaaaaattgaaactcattaattgatttgatacataaaatgtattacattccaaaaaatttaaaaatcatgannnnnnnnnnnnnnnnnnnnnnnnnnnnnnnnnnnn

SEQ ID NO: 31696 - DNA, 449 bp, Homo sapiens
  misc_feature (1)...(449): n = a,t,c or g
acccgntnnnnnnnnnnnnnnnnnnnnnnnnnnnnnnnnnnnnnnnnnnnnnnnnnnnnnnnnnnnnnnggcacgaggtagggtgctctttggatttccataattatttatattttaaatattttacattggaaaagtaaatagtatgcatcaaagaaaattactaatgagtttcttaagctttatcacgtgtgccctgtaattctgctttttcttcactgccttctgttccattagcaacagtaatgttcagacttgctgatgtggctgccaggttatttaatttgactaaaagtgatgtgtgataattgtgtttatttaagattttgttcagaatgtttttaaaaaggtcactatgttacttttgcattatatatagtatgactgtaaaattaacttatctagaagaattacttgtatacactaaaagttttggagacttttgagat

SEQ ID NO: 31697 - DNA, 460 bp, Homo sapiens
  misc_feature (1)...(460): n = a,t,c or g
tnnnnacntnnnnnncgnnncannnnntacgactcnnnnnnnnnnnnnnnnnnnnnnnnnnnnnnnnnnggcacgaggcataggctcggcgtggaggggtaacaaagacaaactcccattccttcacaattttgctgggatcagctccattttcttggtttggaggtgagatggggtggggagagagaattctgggaaagtagactctgattttggccatgggtagaattcctcccaagaggaaccagtactcacgatggtatgctaggcaggaaatggttccataaaatggacattacttaccactcagcactgtgaggatcaaatgagataatattttacactacttaccatactattaggcacatatggcctgataagtgtttactattatttcactgatatgtaccaacaatgatgaaaataagcttccaaagaaatttgctcacagaccattaga

SEQ ID NO: 31698 - DNA, 428 bp, Homo sapiens
  misc_feature (1)...(428): n = a,t,c or g
ancnnnnnnnnnnnnnnnnnnnnnnnnnnnnnnnnnnnnnnnnnnnnnnnnnnnnnnnnnnnnnnnnnnnggcacgaggaaatgtaagaagtagagacaattttacatttcagaaaggactgattaagtgttatcaggatgtactggtggtatagtgtattaaaatggaaatgtaacaatatggcaataataaagctgttttaccgtgtattagaaaatatttaaataaaactgatggacaacctaagaaacaatcttactaattagcattacaaaatggtcactttatatagttaacactaatagtcctttaatgtgtactgtgtatttaggttatagtttgaaaccctgaatattctaaatgctgtctttctgtttgtttaaatgtcatttcccttagctaaaagtcaaccatctggcttctattc

SEQ ID NO: 31699 - DNA, 453 bp, Homo sapiens
  misc_feature (1)...(453): n = a,t,c or g
tttgnaaacccnnnnnnnnnnnnnnnnnnnnnnnnnnnnnnnnnnnnnnnnnnnnnnnnnnnnnnnnnnnnnnnnnnggcacgaggatgagaaaaagcgaagactgatgggacttcccagtttccttactgaggttgcccgcaaggagctggagaatctggactcccgtattccttcatgcagtgtcatctacatccctctgattggcttccttctttctattccccgcctgccttccatggtagaggccagtgactttgagattaatggactggacttcatgtttctctcagaggagaagctgcactatcgtagtgcccgaaccaaggagctggatgcattgctgggggacctgcactgcgagatccgggaccaggagacgctgctgatgtaccagctacagtgccaggtgctggcacgagcagctgcttaacccgagtattggaccttgcc

SEQ ID NO: 31700 - DNA, 453 bp, Homo sapiens
  misc_feature (1)...(453): n = a,t,c or g
tttgnanaccnctatgatnnnnnnnnnnnnnnnnnnnnnnnnnnnnnnnnnnnnnnnnnnnnnnnnnnnnnnnnnnggcacgagcgcggaccctgagcgcaagagccaagccgccagcgctgcgatgtgggccacgctgccgctgctctgcgccggggcctggctcctgggagtccccgtctgcggtgccgccgaactgtgcgtgaactccttagagaagtttcacttcaagtcatggatgtctaagcaccgtaagacctacagtacggaggagtaccaccacaggctgcagacgtttgccagcaactggaggaagataaacgcccacaacaatgggaaccacacatttaaaatggcactgaaccaattttcagacatgagctttgctgaaataaaacacaagtatctctggtcagagcctcanaattgctcagccaccaaaagtactacctt

SEQ ID NO: 31701 - DNA, 458 bp, Homo sapiens
  misc_feature (1)...(458): n = a,t,c or g
tttgnnnnnnnnnnnnnnnnnnnnnnnnnnnnnnnnnnnnnnnnnnnnnnnnnnnnnnnnnnnnnnnnnnnnnnnnnggcacgagcagcccagcgccaaactcttcgagctgttcgaccagctttacgtcctgagtcaaggacaatgtgtgtaccggggaaaagtctgcaatcttgtgccatatttgagggatttgggtctgaactgcccaacctaccacaacccagcagattttgtcatggaggttgcatccggcgagtacggtgatcagaacagtcggctggtgagagcggttcgggagggcatgtgtgactcagaccacaagagagacctcgggggtgatgccgaggtgaacccttttctttggcaccggccctctgaagaggtaaagcagacaaaacgattaaaggggttgagaaaggtaatgcaaatcccgaaccccctgggggaggcttgac

SEQ ID NO: 31702 - DNA, 467 bp, Homo sapiens
  misc_feature (1)...(467): n = a,t,c or g
nnnnnnnnnnnntttggnaaccnnnnnnnnnnnnnnnnnnnnnnnnnnnnnnnnnnnnnnnnnnnnnnnnnnnnnnnnnnnnnnnnnnggcacgaggaaaaactttcaattctttatgtactatgtgtatgtatatatgataaaatgtttagatattactaaatatacacttaaaacattttttcataatttgttaatatttttatcattattcaatactttgaataatttattgtcttttgtccaggttgaagattgtaaaaatttcttttaagtgcaaacagttttttattcaacttagaaaagaattggtgagtacggatttaataattattgacataaatgaagccttttaagaaatacccattcatgacagaacttttctattattagtacaagtgaaagtgcaattaatactgtggataactgcccgctgaggtaatgaatcacttggtataacaaaatgg

SEQ ID NO: 31703 - DNA, 455 bp, Homo sapiens
  misc_feature (1)...(455): n = a,t,c or g
gnnnttgncctttgaaacctttgtttgagaccctttaatacgactcnnnnnnnnnnnnnnnnnnnnnnnnnnnnnnnnnnggcacgagacgatggcacctgctgcaagatgttgagagataaatgaggaagccgctcagacagccagaaagacaggaaacccttggctgcctcgagagaggaaataggagcagggaggcaggggtgtgggagggggtttggcncannnncantntgatccccatccnngtncccccaangtggattacagctttctgntccatcnnggctntnatctgnttnnngctggtgaccancaanacntggataatgncnatncatgggctcntgggcatntttngtactgtctcactcttntntggctnncnatgccanntcagctntntctnnntacttatttgcaancttcntataagtcctagacnatgctnctta

SEQ ID NO: 31704 - DNA, 462 bp, Homo sapiens
  misc_feature (1)...(462): n = a,t,c or g
gnnttnnngcctttgagaccgtttgacatgcntacgaatttaatacnnnnnnnnnnnnnnnnnnnnnnnnnnnnnnnnnnnnnnnnnggcacgagagagttacaaaacttcaaacttagcaataaaggcaaaacagcactgggactatttctttcccaccaattgcttgctcctgacgaggtccgagccagcaggcccaactggccttccctgcagtgagttaccaaccagaagcacacaggcccctgcccacccctgggctctgagctgctctgcttccctaacctggcaaatgccagacctggggccctaccctagtgccacctccccctcaccaccctagtctgcctccttgagaccaggatccatcagttcctctcatctctgtatctcctcttctacccaaggcctggccagaagtaggaggtccttcaggttggaacaaccaaagataaatggaac

SEQ ID NO: 31705 - DNA, 459 bp, Homo sapiens
  misc_feature (1)...(459): n = a,t,c or g
tgnnnnnnngctttganacccntttgacnnnnnnnnnnnnnnnnnnnnnnnnnnnnnnnnnnnnnnnnnnnnnnnnnnnnnnnnnnggcacgagtgatttttaaagatatattcacaagttatttgatgcttctctcccaaagagatggagctacattccccttttcttagtgtgggctggacataaggactcagatagatctggcagaaaggatgaaatgtcacttttgagattaggttattgaaagactgtggcttctgtcttgggaggtgcgtgctcactttttcactcttaaactcctcactcggagaagccagctgccatgccgtgaggcagcctgtggagaggcccacgtagtgaggaactgaggactgctggcagccgtggcagtgagtgcagaagcaaatccttccccagttgaggctgcagatgactacagccctggcaaacaccttgac

SEQ ID NO: 31706 - DNA, 457 bp, Homo sapiens
  misc_feature (1)...(457): n = a,t,c or g
gnntnnngcctttganaccgttnnnnnnnnnnnnnnnnnnnnnnnnnnnnnnnnnnnnnnnnnnnnnnnnnnnnnnnnnnnnnnnggcacgagaaacaagttaaactttaatcaccatgtaatgtgaaactaccaaaagaggatcgtgagctttcattatttttttgagacgcagtttcactcnnnnnnnnnnnnnnnnnnnnnnnnnnnnnnnnnnnnnnnnnnnnnnnnnnnnnnnnnnnnnnnnnnnnnnnnnnnnnnnnnnnnnnnnnnnnnnnnnnnnnnnnnnnnnnnnnnnnnnnnnnnnnnnnnnnnnnnnnnnnnnnnnnnnnnnnnnnnnnnnnnttcnnnnnnnnnnnnnnnnnnnnnnnnnnnnnnnnnnnnnnnnnnnnnnnnnnnnnnnnnnnnnnnnnnnnnnnnnnnnnnnnnnnntgagctttttttttttttngccccc

SEQ ID NO: 31707 - DNA, 467 bp, Homo sapiens
  misc_feature (1)...(467): n = a,t,c or g
ggnnnnnnnnnnnnttgganncccnttgganannnnnnnnnnnnnnnnnnnnnnnnnnnnnnnnnnnnnnnnnnnnnnnnnnnnnnnnnnnnnnnnnnnnnggcacgagcggcacgagagggggaaagggagggttttcagagtcatgagcagaccaggagtgagaagctatggctgtagctttttctgcctcctataaaaggaattctaggagtcagtgggtggaagaaggggtatttgggagagcaaggagctccctcttgctgtccccaacttcacggctgtgggaactcacccagatcctctgcattggttatgtgctggattccaccccaagatgcccccattacctcactagaatgaaggtgagcaaagttgctgtttggtgagactagtgcaggtctttctggtctccttagacacaaaaatgtgaactttaaaatctccttgccaagtttctaccagga

SEQ ID NO: 31708 - DNA, 462 bp, Homo sapiens
  misc_feature (1)...(462): n = a,t,c or g
ggnnnntnnnnnctttganacccntttgacatgantacgaatttaatacnnnnnnnnnnnnnnnnnnnnnnnnnnnnnnnnnnnnnnnnnggcacgagagaaggcaacatgagtgagaatgaggaagaggaaatttctcagcaagaaggcagtggggactatgaagtcgaagagataccatttgggcttgaaccccagagccctgggtttgagccacaaagcccagagtttgaaccccaaagccccagatttgagcctgaaagcccggggtttgagtcccgaagccctgggcttgtgcccccaagccctgagtttgcacccagaagccctgaatcagattctcagagccctgagtttgaatcccagagccctaggtattaaaccccaaagcctggctatgaacctcggagccccgggtatgaaccccggagccctggctatgaatctgagagctctagatat

SEQ ID NO: 31709 - DNA, 442 bp, Homo sapiens
  misc_feature (1)...(442): n = a,t,c or g
nttnnnnnnnnnnnnnnnnnnnnnnnnnnnnnnnnnnnnnnnnnnnnnnnnnnnnnnnnnnnnnnnnnnnnnnnnnnggcacgagtttaaagtggttattcaaattttcatttttttcttcttgcaagttgaatttacttaataaagattattggaatttacttgaaatttatatttaatttaaaaacatttccttgcagagagggtaaggacaagaaaatagagaaacttgaaaaatagttcatctagtttgagttttgtacacttgacacatcaagcgtcttaactgtttctcccattttatttagtgttatcagccaaccgcaagtcaggcacatgtgcatcatgatagtaatgacagtagtactcatgtttaattgaaactcacnnnnnnnnnnnnnnnnnnnnnnnnnnnnnnnnnnnnnnnnnnnnnnnnnnnnnn

SEQ ID NO: 31710 - DNA, 425 bp, Homo sapiens
  misc_feature (1)...(425): n = a,t,c or g
attggntacatttgacnnnnnnnnnnnnnnnnnnnnnnnnnnnnnnnnnnnnnnnnnnnnnnnnnnnnnnnnnnggcacgagggtagcaacagcgagcgtgccggtcgctagtcgcgggtccccgagtgagcacgccagggagcaggagaccaaacgacgggggtcggagtcagagtcgcagtgggagtccccggaccggagcacgagcctgagcgggagagcgccgctcgcacgcccgtcgccacccgcgtacccggcgcagccagagccaccagcgcagcgctgccatggagcccagcagcaagaagctgacgggtcgcctcatgctggccgtgggaggagcagtgcttggctccctgcagtttggctacaacactggagtcatcaatgccccccagaaggtgagtactgtgccatcgttggc

SEQ ID NO: 31711 - DNA, 440 bp, Homo sapiens
  misc_feature (1)...(440): n = a,t,c or g
nnnnntttggnnnnttgnanaccnnnnnnnnnnnnnnnnnnnnnnnnnnnnnnnnnnnnnnnnnnnnnnnnnnnnnnnnnnnnnnnnnnnggcacgagnnnnnnnnnnnnnnnnnnnnnnnnnnnnnnnnnnnnnnnnnnnnnnnnnnnnnnnnnnnnnnnnnnnnnnnnnnnnnnnnnnnnnnnnnnnnnnnnnnnnnnnnnnnnnnnnnnnnnnnnnnnnnnnnnnnnnnnnnnnnnnnnnnnnnnnnnnnnnnnnnnnnnnnnnnnnnnnnnnnnnnnnnnnnnnnnnnnnnnnnnnnnnnnnnnnnnnnnnnnnnnnnnnnnnnnnnnnnnnnnnnnnnnnnnnnnnnnnnnnnnnnncgagactccatctcagaaaaacaaaacaaaaaatttacatccttcatgtagcctctacttttcctacctcattcttaa

SEQ ID NO: 31712 - DNA, 425 bp, Homo sapiens
  misc_feature (1)...(425): n = a,t,c or g
nttgganacngctatgacnnnnnnnnnnnnnnnnnnnnnnnnnnnnnnnnnnnnnnnnnnnnnnnnnnnnnnnnnnggcacgaggactcaactaaagaaacgcatctcactttttccccatcccatcttgactgtgctattccaaacgccaccttggtctaacacagggctcaccatttcagataggagcgtgttgcatgcacacatgcagcaccaaggccaatgcgtagcacacagtaggtaatcaccccagccagaagccatctttcccgtggtgtctctagtctctgctagtcaggttacgcttgtcagcactgccctgtgatatttccatgtatagacatatttatctcctcaactagataggaagtaagctttggggcaaagaagccatgactaatacattttgtttccccacagtatct

SEQ ID NO: 31713 - DNA, 431 bp, Homo sapiens
  misc_feature (1)...(431): n = a,t,c or g
tttgganacttnnnnnnnnnnnnnnnnnnnnnnnnnnnnnnnnnnnnnnnnnnnnnnnnnnnnnnnnnnnnnnnnnnnggcacgaggtcacgctgtcccctccttgtgggtggaggctgactggatagcagactgtcaggtgtggaggctgggtggctgctggatgagtgggccgctcagccattccttccagtcctgcccagtgcctggggcttcatgtcgaagccaggaccacgcccgagtctagggtccatgggagagaaagctgagaggagctggtcctgtcctcccggcaggggtagaggctcgtggctgatgccttgtcatggtcttcttgcacagggcctcatcctggcacctctgccaccgtgggctctctgttgtgtgggggtgtcccgtgcattgcaggacattcagcagcatccccgcct

SEQ ID NO: 31714 - DNA, 314 bp, Homo sapiens
  misc_feature (1)...(314): n = a,t,c or g
gtgnnccccccttgnanaccgntatgacnnnnnnnnnnnnnnnnnnnnnnnnnnnnnnnnnnnnnnnnnnnnnnnnnnnnnnnnnnggcacgagggagtgtgcattgtttgtacttattatgtcttttaagtcttttttcagtctaagacaatctctctcgtgacattgatttgctgaagagactgagcctgaactgactttcctggagaatttactaccgagatttgtctggtttcttccttgtggtgcagactagaagttagatttaaaggttggatttgattgaagttagaaaagtgtttttttttttttt

SEQ ID NO: 31715 - DNA, 459 bp, Homo sapiens
  misc_feature (1)...(459): n = a,t,c or g
gnggnnnnnnctttggnacttgtatnnctnnnnnnnnnnnnnnnnnnnnnnnnnnnnnnnnnnnnnnnnnnnnnnnnnnnnnnnnnggcacgagnnnnnnnnnnnnnnnnnnnnnnnnnnnnnnnnnnnnnnnnnnnnnnnnnnnnnnnnnnnnnnnnnnnnnnnnnnnnnnnnnnnnnnnnnnnnnnnnnnnnnnnnnnnnnnnnnnnnnnnnnnnnnnnnnnagtttggccaacttttaaactttgttttctcttatgagttttatttaatcatgaatttctgagaattgctatgagagactgcttagagtttgtttagggaaaacaaaatatgaataggagtataaacttaccattcttatttatgtcatgtaaataatgttggttgttcttctcgaggctatttagttcagtgaattagaacatagtgccaagcagaaagccaaaggtctcagct

SEQ ID NO: 31716 - DNA, 468 bp, Homo sapiens
  misc_feature (1)...(468): n = a,t,c or g
ggngnnnnnnnnntttnnncntttgganaccngnnnnnnnnnnnnnnnnnnnnnnnnnnnnnnnnnnnnnnnnnnnnnnnnnnnnnnnnnnnnnnnnnnggcacgaggggaaccggaatatccaaagagtggtttgaaggagaaagaagcattgtggctttatatcctctgggcctgggtttcctgaagtcaccacacatagaggagagagaaaatggctgagttaaagtacatttctggatttgggaatgagtgttcttcagaggatcctcgctgcccaggttccctgccagaaggacagaataatcctcaggtctgcccctacaatctctatgctgagcagctctcaggatcggctttcacttgtccacggagcaccaataagagaagctggctgtataggattctaccttcagtttctcacaagccctttgaatccattgacgaaggccatgtcactcacaactg

SEQ ID NO: 31717 - DNA, 461 bp, Homo sapiens
  misc_feature (1)...(461): n = a,t,c or g
gnnnnnnnctttgnnactttnnnnnnnnnnnnnnnnnnnnnnnnnnnnnnnnnnnnnnnnnnnnnnnnnnnnnnnnnnnnnnnnnnnnnnnnggcacgagggttgtacacatgttcaatggttatgaaatacacaaatactacgataaatatgacattttgactttaaaaagacctgaagtttatttgtgaatgagggctttagagggctgcagcttgtgagttactgtgaaaaggtgggagcaaagctatgggactcccaggaaggctgttaacaccaggtatcaatgggtgtggcttacaacacaggcagtgaactgagatggttgctggatgttttaaagtgtgtgcacaggtgtgttttgtttgttgttgcatggcttggttcacctgggagtcttcagttactgtttctttcagaggaaacacactaaataaacatgaaatttgtgttatgctcaa

SEQ ID NO: 31718 - DNA, 459 bp, Homo sapiens
  misc_feature (1)...(459): n = a,t,c or g
ggnnnnnnnnncnttganaccgctnnnnnnnnnnnnnnnnnnnnnnnnnnnnnnnnnnnnnnnnnnnnnnnnnnnnnnnnnnnnnnnggcacgagatatgttgttgtttaactttatttctttaaattattaataagtttgaacaccttttaatgtatttatgggccagtgatatttattttcatgtgagcttaactgttcatgtgcttggttcatttttttttttaatttgttgttttttttcctcnnnnnnnnnnnnnnnnnnnnnnnnnnnnnnnnnnnnnnnnnnnnnnnnnnnnnnnnnnnnnnnnnnnnnnnnnnnnnnnnnnnnnnnnnnnnnnnnnnnntctgcattgatttttaagggcttcttataccttaagatattcctttgttgaacgtgttgaaaatatttttcctagtttgtcattttgtctttgactttttttgngcttcatt

SEQ ID NO: 31719 - DNA, 467 bp, Homo sapiens
  misc_feature (1)...(467): n = a,t,c or g
gnngnnnnnnntttgaaanccntnnnnntttggannnnnnnnnnnnnnnnnnnnnnnnnnnnnnnnnnnnnnnnnnnnnnnnnnnnnnnnnnnnnnnnnnnnnnnnggcacgaggatgggtatatgctggaaggcagtccccagagccagtgccaatcggatcaccaatggaaccctcccctggcggtttgcagatcccgttcacttgctcctgtcctttgtggtattgctgcaggtttgatacttcttaccttcttgattgtcattaccttatacgtgatatcaaaacacagagaacgcaattattatacagatacaagccagaaagaagcttttcatttagaagcacgagaagtatattctgttgatccatacaacccagccagctgatcagaagacaaactggtgtgtgcctcattgcttggaattcagcggaatattgattagaaagaaactgctctaatatc

SEQ ID NO: 31720 - DNA, 444 bp, Homo sapiens
  misc_feature (1)...(444): n = a,t,c or g
ttgganacctnnnnnnnnnnnnnnnnnnnnnnnnnnnnnnnnnnnnnnnnnnnnnnnnnnnnnnnnnnnnnnnnnnggcacgaggtgaaatccaggacacccaattaagtttgaatctcagataaatcacaaataatggtttagtataagtatgttccaaatattaaatgggaggtatttatacttacagtaaaacattatttgttgtctatatgagactcaaattttactgagtgtcctggatttttatttgctacatctggccaccccgcctattacacacatggtctcaaagacccctgcttgctcccctgctgtcatttcttccacggccacatttttctccctctcctcctacttcacatctgtgcatcattcagaactccttccatttcctcgtcaaagcctccattacttccaatctaatttgaatgcttctctatg

SEQ ID NO: 31721 - DNA, 438 bp, Homo sapiens
  misc_feature (1)...(438): n = a,t,c or g
gaaaacctnnnnnnnnnnnnnnnnnnnnnnnnnnnnnnnnnnnnnnnnnnnnnnnnnnnnnnnnnnnnnnnnnnggcacgagcgaatacctgtcaactcgctcaggaaagttcagtctcctccgactgcagtgttttccctggggtcctggccagatctctcccctggggtcattttatttcctgcccttctggatctgtgaactgtgttcccagcccctggctgccccagatgtcatactgcctgacaccaatgactggctggcctccaaacccacccctcgctattttcccagaagaagggatccttacctatttctcttctcagtccccatctttttttctctttcctcacttcctgttagatggcttttgttctggtgcttttctgccagccagaatgtgacttttaccctcttctgaagactttttctctcca

SEQ ID NO: 31722 - DNA, 430 bp, Homo sapiens
  misc_feature (1)...(430): n = a,t,c or g
annnnnnnnnnnnnnnnnnnnnnnnnnnnnnnnnnnnnnnnnnnnnnnnnnnnnnnnnnnnnnnnnnnnnnnnggcacgagaatttgaaatcttaccaattacatttttatgaacatctttctagcacctgtatctgtcatatgtatacatactacccatgctgttttggagtttgtttttacatccatagtgtatcatggagaattgttcatgtttatgaatatagatatacatttgtcttatttgaaggcattctgttataagaatatgccataatttttatgtacagccccctattgatgagttaggtaggttgtttaccatttaactattatgaacaatgttatatacatcatgttagatttagcatatttactgggattacaggcatcagcccctgcgcctggccttttttcccaatattttatc

SEQ ID NO: 31723 - DNA, 426 bp, Homo sapiens
  misc_feature (1)...(426): n = a,t,c or g
nnnnnnnnnnnnnnnnnnnnnnnnnnnnnnnnnnnnnnnnnnnnnnnnnnnnnnnnnnnnnnnnnnnnggcacgaggtgttactcttttgctgttgtgccaaaccccaattaacctcaatnnnnnnnnnnnnnnnnnnnnnnnnnnnnnnnnnnnnnnnnnnnnnnnnnnnnnnnnnnnnnnnnnnnnnnnnnnnnnnnnnnnnnnnnnnnnnnnnnnnnnnnnnnnnnnnnnnnnnnnnnnnnnnnnnnnnnnnnnnnnnnttcttggctaatttttttttttnnnnaaanaaggnnttgctgngttgcccaggntggtntnaaaccccnggcctcaaaangctaggattnttccnccttannttcccaaagggctaggattacnggggngaggcacagncnaggcccccttggtaaattnggtt

SEQ ID NO: 31724 - DNA, 441 bp, Homo sapiens
  misc_feature (1)...(441): n = a,t,c or g
tttgannancgnnnnnnnnnnnnnnnnnnnnnnnnnnnnnnnnnnnnnnnnnnnnnnnnnnnnnnnnnnnnnnnnnnggcacgagcgtagatatttgccaggaatcaaagacaacaacccttatcgtaaagctcacgctgagcgtcaagctatcaacacaatagtccaaggatcagcagctgatattgtcaaaatagccacagttaacattcagaagcaattagagaccttccactcaaccttcaaatcccatggtcatcgagagggtatgctccaaagtgaccgaacaggattgtcacgaaagagaaaactgcaagggatgttctgcccaatcataggaggnnnnntcatccttgaactgcatgaaganctccnatttnnantggnctaaaannaagttganntgacagtgaacattataagncagggcnccttccagtg

SEQ ID NO: 31725 - DNA, 455 bp, Homo sapiens
  misc_feature (1)...(455): n = a,t,c or g
ggngnngnnnntnnttganatntgangacctttnnnnnnnnnnnnnnnnnnnnnnnnnnnnnnnnnnnnnnnnnnnnnnnnnnnnggcacgagaaaacattctctcattaggcaaaagattgtccaaacttattttagacctctcactaaatgacagttgataggacttctaggtttaactagatattgcatacaaattttctgagattgtgatatccttttatgaattgactcagacctcaggaagagactttttcttctgggaacccaaacttggaataggctttctgcaacctgaagaaagttcttcaacagcttctttcactggtcatctttaactacaaaaatccctttggtctattcatgtataaactatatggataagcccttggggttttaatacaacttgataggaaccatcaaaactcatgacttactatatatagccttacctt

SEQ ID NO: 31726 - DNA, 465 bp, Homo sapiens
  misc_feature (1)...(465): n = a,t,c or g
gggnggnnnnntnnngtttgnncctnagtgaactnctggaaatgaccnnnnnnnnnnnnnnnnnnnnnnnnnnnnnnnnnnnnnnnnnnnnnnnnnnnnnggcacgaggagactgcatagggctcggcgtgggttgagtttcatattttgcaaaccaagaaggtaggtagcctttcagaaagggtatgggacaatgcaaagtccaggttagcccttgaccaggtaaggtggaagcttggtaattacctgcttgtcttggccaatcttgaaagattaatgataatttacaaagataaaatatatcttataatgaactctttttccttattgttaatagaaataacagggtatctcctaatgttttgggtcattttgtacctgtagataatcaaagagcaaccaaactgatgataaaatgtgtcctttactgcatacatacaagtttcaaacttttgtgaacaaccc

SEQ ID NO: 31727 - DNA, 430 bp, Homo sapiens
  misc_feature (1)...(430): n = a,t,c or g
atttgnnnnnnnnnnnnnnnnnnnnnnnnnnnnnnnnnnnnnnnnnnnnnnnnnnnnnnnnnnnnnnnnnnnnnnnnggcacgagatagcaagatgctgcctcnnnnnnnnnnnnnnnnnnnnnnnnnnnnnnnnnnnnnnnnnnnnnnnnnnnnnnnnnnnnnnnnnnnnnnnnnnnnnnnnnnnnnnnnnnnnnnnnnnnnnnnnnnnnnnnnnnnnnnnnnnnnnnnnnnnnnnnnnnnnnnnnnnnnnnnnnnnnnnnnnnnnnnnnnnttacttacatttgaacagaaaaaggaaatgggacattgaattgggataaataagcaaacatcagggaaaatgtggccccttgctttttaaattccttattgttattttggtatacaacctcctccgtgagttgagactccaatactgcttcttcaca

SEQ ID NO: 31728 - DNA, 426 bp, Homo sapiens
  misc_feature (1)...(426): n = a,t,c or g
tanctatgacatgattacgaatttaatacnnnnnnnnnnnnnnnnnnnnnnnnnnnnnnnnnnnngaattcggcacgagtctgagtgtgtactaagtgtcttaatttttaagttgtattttattcttttaagttcctgaaaattccaacacttatatccaaacaagaacctgcatttgttttaagagagcagtaacataacacaaaaacaaaaattgtgatgtttaacgataattttatgtgattcattataatatatgattaaaattcagttgcagttaaaattactgtataaaatcttaggtttccccaaagtatcacgaaaattaagatattgtacttattttggtgnnnngtaaaacattgtttggaaagtaggtggtgctgtgtgtgtgtttgtacatatgtcatacattttttttttttt

SEQ ID NO: 31729 - DNA, 427 bp, Homo sapiens
  misc_feature (1)...(427): n = a,t,c or g
gatttgngnnnnnnnnnnnnnnnnnnnnnnnnnnnnnnnnnnnnnnnnnnnnnnnnnnnnnnnnnnnnnnnnnnnnnnggcacgagggcattgctagaagaaattatacagttgctataggttagcatctacctgggtatagatgtgggtccatcaacattgcaggcaaactagtcctcacaagagctatttacaagagcttaccattctccctaccccaccacttcccagctacttaacagagaaaacagatgccatcagacaggaacttccttaacttcttgtgctctctccttgccacctgcaaacttatctgcatccttcctttccttccggcttcctgtctcaggggattgggcaggattcctttgcttcaagacnagttcttccacctacttccttcaggatctccctcctcctgactctt

SEQ ID NO: 31730 - DNA, 414 bp, Homo sapiens
  misc_feature (1)...(414): n = a,t,c or g
ctnnnnnnnnnnnnnnnnnnnnnnnnnnnnnnnnnnnnnnnnnnnnnnnnnnnnnnnnnnnnnnnggcacnnnnnnnnnnnnnnnnnnnnnnnnnnnnnnnnnnnnnnnnnnnnnnnnnnnnnnnnnnnnnnnnnnnnnnnnnnnnnnnnnnnnnnnnnnnnnnnnnnnnaaattttgaggtgctgtctcaccatgttgcccaggctggcctcagactcctnnnnnnnnnnnnnnnnnnnnnnnnnnnnnnnnnnnnnnnnnnnnnnnnnnnnnnnnnnnnnnnnnnnnnnnnnntctgtcccctttttactgatgtgttagctgaggctctaaatggacaagacagttgtccaggatcagttaggagcactgtaacctcagaattgactttggccctgagcctcagtttctct

SEQ ID NO: 31731 - DNA, 445 bp, Homo sapiens
  misc_feature (1)...(445): n = a,t,c or g
nnnnnnnnnnnnnnnnnnnnnnnnnnnnnnnnnnnnnnnnnnnnnnnnnnnnnnnnnnnnnnnnnnggcacgannnnnnnnnnnnnnnnnnnnnnnnnnnnnnnnnnnnnnnnnnnnnnnnnnnnnnnnnnnnnnnnnnnnnnnnnnnnnnnnnnnnnnnnnnnnnnnnnnnnnnnnnnnnnnnnnnnnnnnnnnnnnnnnnnnnnnnnnnnnnnnnnnnnnnnnnnnnnagaatgatctgagaagtgttaaaaatatggattcttgagttctacttgtacacaatctaattcagaagatctgcagagaagcctagaaatgtgtattttaaccaagtacacagacaattccaatgagcaatcaaatctgaaaaacacaggtctgaattattcatacaaagcctaaaatatcattattcaatttagggaaaatattaaaatcagtc

SEQ ID NO: 31732 - DNA, 449 bp, Homo sapiens
  misc_feature (1)...(449): n = a,t,c or g
tcnctatnacatgattacgaatttaataccgactcnnnnnnnnnnnnnnnnnnnnnnnnnnnnnnnnnnggcacgaggggacgtaccgatatgatgaaatatgggtatactatctgtttttgatgtttgagaaatttttcaaattgccagctttgaagcattcacatgggccatgctgaagaatgaaatgaggtatgtgactgtaagtaagcacatttttttctaaaatatccttttcagtttaattttaaaatatttccttttgtataaactttcttgtcagtgatttgaagctcaaaaatgtctttacattctgattattctaaagttgttaacttgtgggggccatggctacatttcattatgaccaggagaaggaggaaaactgagttactgtccagaaaatattgtactccttgatggaaaatgttggtgaagatgcttagagg

SEQ ID NO: 31733 - DNA, 445 bp, Homo sapiens
  misc_feature (1)...(445): n = a,t,c or g
ntttgganaaccgnttgacnnnnnnnnnnnnnnnnnnnnnnnnnnnnnnnnnnnnnnnnnnnnnnnnnnnnnnnnnnggcacgagatttaaattccgaataaattctagtggaaattttctaatttctcccctctcctgcctaccctctccaattggctaatattctttgttgaaagatccattttcatgtaaataattgactgactaggatgaaacagtagacatatctgctttttcccagttgttactgagaagctcactgttcattgaaaacagtagtctttgcagtctttccttaatgttgtatctctattttggtatattcccttattttcttgatgtgttctcccctcctcactctaactcccagttttacaacaaattgccctaaaatcttaaagatttttcattcatactgattgtggcattttgctctaaatattg

SEQ ID NO: 31734 - DNA, 471 bp, Homo sapiens
  misc_feature (1)...(471): n = a,t,c or g
gnnnnnnnnnnntnnnnnnttggnntntgananccgtttgacnnnnnnnnnnnnnnnnnnnnnnnnnnnnnnnnnnnnnnnnnnnnnnnnnnnnnnnnnnggcacgagggagtttgaccagagatgcaaggggtgaaggagcgcttcctaccgttagggaactctggggacagagcgccccggccgcctgatggccgaggcagggtgcgacccaggacccaggacggcgtcgggaaccataccatggcccggatccccaagaccctaaagttcgtcgtcgtcatcgtcgcggtcctgctgccagtcctagcttactctgccaccactgcccggcaggaggaagttccccagcagacagtggccccacagcaacagaggcacagcttcaagggggaggagtgtccagcaggatctcatagatcagaacatactggagcctgtaacccgtgcacagagggtgtggattacacc

SEQ ID NO: 31735 - DNA, 463 bp, Homo sapiens
  misc_feature (1)...(463): n = a,t,c or g
tnnnnnnntttggantttggatacccgtnnnnnnnnnnnnnnnnnnnnnnnnnnnnnnnnnnnnnnnnnnnnnnnnnnnnnnnnnnnnnnnnnggcacgagcggcacgagcctgtccccaacagtgttaagggcatcctgtttttgttactaggacattttatatcatcactgaagcagctatgtattgaaactggagttaaatgcccatatctcctatcagcttatgagggactcaaagtcaaaagccttttcattattggatctcatctaccagactgcttttgcacaaactacttgttcactgtgttgataacatggtttgacgggaagaggggatgtaggttttggaatccaaagacctgaatatgaacataggctctgccacttattagctgtgtgccagtctgaaaaccatataacctttgtgattctagttctttctatttggcataaaagtcatt

SEQ ID NO: 31736 - DNA, 450 bp, Homo sapiens
  misc_feature (1)...(450): n = a,t,c or g
nattcgannnnnnnnnnnnnnnnnnnnnnnnnnnnnnnnnnnnnnnnnnnnnnnnnnnnnnnnnnnnnnnnnnnnnnnnggcacgaggagcttcaataccctgatctcaaggagtagcatgtaaggcaacttcttagaaaagacctttttccaatgattaaaaaataatnnnnnnnnnnnnnnnnnnnnnnnnnnnnnnnnnnnnnnnnnnnnnnnnnnnnnnnnnnnnnnnnnnnnnnntctcannnnnnnnnnnnnnnnnnnnnnnnnnnnnnnnnnnnnnnnnnnnatcctgtacaatttagcacctttactggagataaatgcattataaatttccactgtttttttggaatactgaaaatttagaataattgttttagtgtcagtagcttgtccttgaataaaactactacctctagaggaaatacattaacggacaatcaaaat

SEQ ID NO: 31737 - DNA, 444 bp, Homo sapiens
  misc_feature (1)...(444): n = a,t,c or g
nttggataccgntnnnnnnnnnnnnnnnnnnnnnnnnnnnnnnnnnnnnnnnnnnnnnnnnnnnnnnnnnnnnnnnggcacgagaattactgtaccagtcacatgaaggcaaccttttcaggctaaagtcaccatggtgtaccttctttataaactctcaggggactgatttttttttttcctttttnnnnnccttatnccaanananaaggggactgaattctttcagnatttnnggatngccttgnaatgaagtaaatgaatctgtttngnatctnggnctaaaaatattaaaaanaatgggttacnctacaaaanacncaggctttttgtcacatggaggctttttgtcacatgggtctggatcctaangctaggngtgccgntnactgnatgactngtccaagttacttgaaagcctcattttcttcaggncaaaatgaa

SEQ ID NO: 31738 - DNA, 451 bp, Homo sapiens
  misc_feature (1)...(451): n = a,t,c or g
tgganatccgnnnnnnnnnnnnnnnnnnnnnnnnnnnnnnnnnnnnnnnnnnnnnnnnnnnnnnnnnnnnnnnnnnggcacgagacttgcttaaagaggaatcacttaaaaggtaggcatatctaagatgctcatagaagaggaagaatgggacatggccccatgcttatttttgtttacaacgtaacatggcatgagagagggcagagaaactaagttgctggggaaagttagaggaactgaaagtttgggaataggctgaccacatattatgccagtgaccagtatgacaggagatggggccctgctgccagtcatctccactgaataaagaataatgctcctctttcagggtaataaagtggggaaaaggaacgtcttctcaatgcaagaacataagctttctcgtatatacctgtatgctacagtttttcacatggaattccgtttc

SEQ ID NO: 31739 - DNA, 451 bp, Homo sapiens
  misc_feature (1)...(451): n = a,t,c or g
ttgnanatccgatancngntatgacnnnnnnnnnnnnnnnnnnnnnnnnnnnnnnnnnnnnnnnnnnnnnnnnnnnnnnnnnnggcacgagccaaagtacagttctggaggtcagaagtccaacaacagaggtcccatggacttaaaatcaagatatcggcagggctgcattccttgaggaggcaggagcaaacatttactaagtgttgttgtatacttgtgctaggtgctttaaatggattatcatttaatcctaacaatggttttttaaaaaattcattatataaatttaatcaagattagaaatttactcacacaaatgccattcagaggtaatttaaatcaaagagtcaatacacataatttcttttctttttaannnnnnnnnnnnnnnnnnnnnnnnnnnnnnnnnnnnnnnnnnnnnnnnnnnnnnnnnnnnnnnnnnnnnnnc

SEQ ID NO: 31740 - DNA, 450 bp, Homo sapiens
  misc_feature (1)...(450): n = a,t,c or g
ttganaccgttatgacnnnnnnnnnnnnnnnnnnnnnnnnnnnnnnnnnnnnnnnnnnnnnnnnnnnnnnnnnnggcacgagggggaccatactttgagaaccattggttcagaacatgaggctgcagcgcgccaaggtttttgcattgttttctattaaggaatagcctataagaaataggtttctagctttttaattttgttaccagcctagactctatgattgacagggtgaccagctgtcccagtttgccctggggcacaggattattcgtgctgaaaatgagaaagtcctgggcaacctgggatgaattggccaccttcactattgatccaacttcccaaatgctttgctacattgctggtatctggctcggaggaagccctgtgggaaaggctgtgantgtgttgcccaggttcacaggaccttagagtttgggggaccctgcc

SEQ ID NO: 31741 - DNA, 393 bp, Homo sapiens
  misc_feature (1)...(393): n = a,t,c or g
tttgaaanacccnnnnnnnnnnnnnnnnnnnnnnnnnnnnnnnnnnnnnnnnnnnnnnnnnnnnnnnnnnnnnnnnnnnggcacgaggtacaatacaacttctttttgccccaaactgagctatggtaacttcacttgaaatgtatgtgnnnnnnnnnnnnnnnnnnnnnnnnnnnnnnnnnnnnnnnnnnnnnnnnnnnnnnnnnnnnnnnnnnnnnnnnnnnnnnnnnnnnnnnnnnnnnnnnnnnnnnnnnnnnnnnnnnnnnnnnnnnnnnnnnnnnnnnnnnnnnnnnnnnnnnnnnngntnacctgaantcctanntacccnggaggctgaggtggtaagattgcttnancccnnanngncgnngtannatnaancatnantntgca

SEQ ID NO: 31742 - DNA, 453 bp, Homo sapiens
  misc_feature (1)...(453): n = a,t,c or g
aannatttgaanaccgtnnnnnnnnnnnnnnnnnnnnnnnnnnnnnnnnnnnnnnnnnnnnnnnnnnnnnnnnnnnnnnnnnggcacgagaagatatttttactatatgattttaaaatgttcatttggttcattgacagccacaacgtcattgtatttaatttacatttgtaataggcggttaccttcaaagagaatagattattgttctgggtaactggtctttctaaactttgtttaggaatttcagagtcctcattttggggcataaagtcctctgtcccttactctgatatctgttaatatcagatattcatattagttaagtaacatttttctcttatttagaggtagactttttccaagaaatttttagaaaaaaatatgaaaacatgattaactgtaacttaaaaagagtgcttatttgttgcaatttaccttgtttttgttttt

SEQ ID NO: 31743 - DNA, 467 bp, Homo sapiens
  misc_feature (1)...(467): n = a,t,c or g
gggnnnngnnnnnttnnnntttgganntanggnaatacncgtnnnnnnnnnnnnnnnnnnnnnnnnnnnnnnnnnnnnnnnnnnnnnnnnnnnnnnnnnnnnnnnnnggcacgaggggacaaatttaagtgcaacctgatatacataaacaatattgaacatactaatttatactaattaaggctctataaggaattttgtatcatgttgcctttaaatttgaggtaagttaggtatatatatatctgtatctatatctgtttagatatattttatatatgtatataaaatttgtttggagtgctcttgaatgcctttagtttctatatttntttttaaaaataattatntttttattgacnannngttgnttntactnnnggnngtnannnanngtntgnngcnnaanncntatnntgtnnnnanntngnnnnnnnnnnntncntnntnntaanattnntnttgcc

SEQ ID NO: 31744 - DNA, 446 bp, Homo sapiens
  misc_feature (1)...(446): n = a,t,c or g
atttgataccgttatgacnnnnnnnnnnnnnnnnnnnnnnnnnnnnnnnnnnnnnnnnnnnnnnnnnnnnnnnnnnggcacgagtnnnnnnnnnnnnnnnnnnnnnnnnnnnnnnnnnnnnnnnnnnnnnnnnnnnnnnnnnnnnnnnnnnnnnnnnnnnnnnnnnnnnnnnnnnnnnnnnnnnnnnnnnnnnnnnnnnnnnnnnnnnnnnnnnnnnnnnnnnnnnnnnnagnnnnnnnnnnnnnnnnnnnnnnnnnnnnnnnnnnnnnnnnnnnnnnnnnnnnnnnnnnnnnnnnnnnnnnnnnnnnnnnnnnnnnnnnnnnnnnnnnnnnnnnnnnnnnnnnnnnnnnnnnnnnnnnnnnnnnnnnnnnnnnnnnnnnnnnnnnnntcnagcagccaccaccctgaacgatcancagccatnaacnctnagngcaagaccctcc

SEQ ID NO: 31745 - DNA, 446 bp, Homo sapiens
  misc_feature (1)...(446): n = a,t,c or g
atnnnnnnnnnnnnnnnnnnnnnnnnnnnnnnnnnnnnnnnnnnnnnnnnnnnnnnnnnnnnnnnnnnnnnnnggcacgagaacaaagtaaaggtaacttatttttgtaaactagggactggcaaactttttctttataaaaggccagaaagtaaatattaatatattaggcattataggccaaatgtagtttctgttgcatattcgtgtgcatatgtgtgttgtttgccgccctnnnnnnnnnnnnnnnnnnnnnnnnnnnnnnnnnnnnnnnnnnnnnnnnnnnnnnnnnnnnnnnnnnnnnnnnnnnnnnnnnnnnnnnnnnnnnnnnnnnnnnnnnnnnnnnnnnnnnnnnnnnnnnnnnnnnnnnnnnnnnnnnnnnnnnnnnnnnnnnnnnnnnnnnnnnnnnnnnnnnnnnnnnnnnnnnnnnnnnnnnnnnnnnnnna

SEQ ID NO: 31746 - DNA, 449 bp, Homo sapiens
  misc_feature (1)...(449): n = a,t,c or g
gggnnnntnnttganacctntganaccgtttgacnnnnnnnnnnnnnnnnnnnnnnnnnnnnnnnnnnnnnnnnnnnnnnnnnnnnnnnnnnggcacgagctgtctgactctctctctatctatctgtttctgnnnnnnnnnnnnnnnnnnnnnnnnnnnnnnnnnnnnnnnnnnnnnnnnnnnnnnnnnnnnnnnnnnnnnnnnnnnnnnnnnnnnnnnnnnnnnnnnnnnnnnnnnnnnnnnnnnnnnnnnnnnnaattctttgttttaatcctcttaagatcctcaggaggtcatcattatccacaactttcagatgaagaaactaaggtttagaagggtttgctcatttattgaaggtctcaaatagggatgggaatgggatttgaacttagatctgcntataactccaaagtccaggnttttccccactaagccaagggcatgg

SEQ ID NO: 31747 - DNA, 447 bp, Homo sapiens
  misc_feature (1)...(447): n = a,t,c or g
gngtgnnnnnnttganacngttngactcnnnnnnnnnnnnnnnnnnnnnnnnnnnnnnnnnnnnnnnnnnnnnnnnnnnnnnnnnggcacgagattttttctgcttagtcctctattttggaggacttttagagttaaaaaatgatgacatttctgggatttcagaccacactgacagatgccttggtctaacatatgcaggaatgttgaatgttcttgcactgattatttttcttattaaaggatttcattcagtcttattttaatttctgatccggtaacatcttcctttgtaaattttcatgttgttcgtttaggagattctgtgaatctttgatgtacttcattatttgactgttaactccaaagattatgatttctgcttacaaccttctgattgtaaacaagcagaatactatgccattactcagtagttggcttttacca

SEQ ID NO: 31748 - DNA, 448 bp, Homo sapiens
  misc_feature (1)...(448): n = a,t,c or g
gnngtgnnnnncttganaccgttnnnnnnnnnnnnnnnnnnnnnnnnnnnnnnnnnnnnnnnnnnnnnnnnnnnnnnnnnnnnnnnggcacgagcatttatctatagcccttgtgtgatattttgatatgatttcagcaattaaggaaatattcactatactgtaatcctttgtaaaatagcaatttaaagctatctttctctgtttcgaactctgaatctgagttttgtgtagtgatagtatgtggtttttaaaaaacgtgtgtcaatatttgggtttttttcttcagttacctgttaacagaaactaaggaatttgtgatctgattgttttgattttaaaagcaggaacttttcgatgagtgtgaatgtaaaatggtgcagtcattttcaaagacagtttggcagttccccaagtggttaaacagagttactatatgatccagcaa

SEQ ID NO: 31749 - DNA, 447 bp, Homo sapiens
  misc_feature (1)...(447): n = a,t,c or g
gggnnnntnnttganncctntganaccattnnnnnnnnnnnnnnnnnnnnnnnnnnnnnnnnnnnnnnnnnnnnnnnnnnnnnnnnnnnnnnnggcacgagccaccatggtgctgtctcctgccgacaagaccaacgtcaaggccgcctggggtaaggtcggcgcgcacgctggcgagtatggtgcggaggccctggagaggatgttcctgtccttccccaccaccaagacctacttcccgcacttcgacctgagccacggctctgcccaggttaagggccacggcaagaaggtggccgacgcgctgaccaacgccgtggcgcacgtggacgacatgcccaacgcgctgtccgccctgagcgacctgcacgcgcacaagcttcgggtggacccggtcaacttcaagctcctaagccactgcctgctggtgaccctggccgccacctc

SEQ ID NO: 31750 - DNA, 476 bp, Homo sapiens
  misc_feature (1)...(476): n = a,t,c or g
ggtgnnnnncttngacttcganancnnnnnnnnnnnnnnnnnnnnnnnnnnnnnnnnnnnnnnnnnnnnnnnnnnnnnnnnnnnnnnnnnnnggcacgagagctagcagagtgtgtttgccagccagcttcagggcgccaggtggccatgggtgggacttcacccctccagacagctgcccatcaccagtgctgcaaaataccaggtgctgatcaagttctgtagttctaggctaagttggatgatctgctttctctcttgtgaatgtccatactgcttccacagtgagcttggggccagggatgcaaaatgccacagggccaacaacctctccatcaggtggaagttcctggactccattccttctccaagtagcaaccagctcttttgcatgtgtgcttgatagtgaagcttaacacagaagacctgagtcctgtttcaccttgactagctgtgtgactgaccaggcagccctg

SEQ ID NO: 31751 - DNA, 473 bp, Homo sapiens
  misc_feature (1)...(473): n = a,t,c or g
gntgtnnnnnttggacttcgatanccttatgacnnnnnnnnnnnnnnnnnnnnnnnnnnnnnnnnnnnnnnnnnnnnnnnnnnnnnnnnnnggcacgagaatttctaacagcctgggactcctggggaaaagcagaggaggagccacagactccattttggaaaaacttctgatttcctcatggaaccccaagaagtgaaagtggatgtatccctctcaaaatctaaggctttgactggaatggcatgctttcacatataaacatcctgctctaaggaatcaaagttgacttatagagctaataaaagccccttggaaaaactagcttcataccttgcctatgcattccctgtacaggattcttgacctgtgaggtgaacacttaaccatgagtagaagctctggagatgaaaaagtattagaaaaacacagataacaaagaatcaacagagcgcttggatatttatgttcat

SEQ ID NO: 31752 - DNA, 475 bp, Homo sapiens
  misc_feature (1)...(475): n = a,t,c or g
ggtgtnnnnnnttgganttcganancnnnnnnnnnnnnnnnnnnnnnnnnnnnnnnnnnnnnnnnnnnnnnnnnnnnnnnnnnnnnnnnnnnnggcacgaggggtgtcttttgggggatcattatttagcctatcacagctattattatattactactagcactgcccctctttaccaaagaggtaacaagagcaggcctggagagagggaggttgggtttgctgctctttttcttaaattctctgcctggaagggagtgaaggtcctggaggtcacctgatctagttggactccttgcccaggcttgcttccctcctctacttcaacccagaaaggctgatgtggtcggccttccccccagtaacttagaccagtatgaagaggggccctcggaggcttcagagaacaggcatttaacttcatttttgagagttgagaagaaagagcaagggcatcgggcttagctcatcagaa

SEQ ID NO: 31753 - DNA, 468 bp, Homo sapiens
  misc_feature (1)...(468): n = a,t,c or g
gngccccctttgacaccntatgntttgacaccaatttaatacgactcnnnnnnnnnnnnnnnnnnnnnnnnnnnnnnnnnnggcacgannnnnnnnnnnnnnnnnnnnnnnnnnnnnnnnnnnnnnnnnnnnnnnnnnnnnnnnnnnnnnnnnnnnagagtgagactcnnnnnnnnnnnnnnnnnnnnnnnnnnnnnnnnnnnnnnnnnnnnnnnnnngatacatnnnnnnnnnnnnnnnnnnnnnnnnnnnnnnnnnnnnnnnnnnnnnnnnnnntctcatcaggactgccagaaaataactcacatgaagtttaactttaatgtcagttttttacgtgtggcctaagaaagcagacttaccttatacaaacatgaaaagaaaattaatcaacagagtagaattttctactgttaaaattaaaagctngattgtgcagatttaaagaggtggaacccaactgnatct

SEQ ID NO: 31754 - DNA, 485 bp, Homo sapiens
  misc_feature (1)...(485): n = a,t,c or g
nnnngnnnnnnnnnnnnnnttgaannnnnnnnnnnnnnnnnnnnnnnnnnnnnnnnnnnnnnnnnnnnnnnnnnnnnnnnnnnnnnnnnnnnnnnnggcacgagctgattctagaacattttcatcacctcagaagcccctacccattaggagtcactcctcttttccccatccccagcccctgtcaaccacggctnnnnnnnnnnnnnnnnnnnnnnnnnnnnnnnnnnnnnnnnnnnnnnnnnnnnnnnncgcctgtgctcctttgtgtctgccttcttccnnnnnnnnnnnnnnnnnnnnnnnnnnnnnnnnnnnnnnnnnnnnnnnnnnnnnnnnnnnnnnnnnnnnnnnnnnnnnnnnnnnnnnnnnnnnnnnnnnnnnnnnnnnnngtctattggtggacatttggttgtttctcttgttaannnnnnnnnnnnnnnnnnnnnnnnnnnnnnnnnnnnnnnnnnnnnnnnnnnnnnnnn

SEQ ID NO: 31755 - DNA, 431 bp, Homo sapiens
  misc_feature (1)...(431): n = a,t,c or g
tttganaccttgnnnnnnnnnnnnnnnnnnnnnnnnnnnnnnnnnnnnnnnnnnnnnnnnnnnnnnnnnnnnnnnnggcacgaggttggctgttatctgtccccctgggaggaggactgttttgctcccttgttttgatgttaaacagtagcttaaaggctttcccccccataccaactcacagccaaatgacaaagaaccgtggggtttcaacagattctacaaacatgcattttcccttcccactaatgggcactgcagggaaagcccattggcatttgaccatggagctgatgcagtgccaaagatgagctctttcaactgatggcattttagcccctgaggctcccagcggatcccccagcctgggctgcaggctgagccaaggctgtgcagggtccatattggtcaggccaagtggagtggaagaa

SEQ ID NO: 31756 - DNA, 480 bp, Homo sapiens
  misc_feature (1)...(480): n = a,t,c or g
gnnnnnggnnnnnnttnnnnttnntttgatacngnagacnctnnnnnnnnnnnnnnnnnnnnnnnnnnnnnnnnnnnnnnnnnnnnnnnnnnnnnnnnnnnnnnnnnggcacgagagaactgagaccccatctagtcattatttggtatttctccacacctttgttagtgagctgactcaagtactttataatatagaaaaataaaactaaaggtcaacaatcaacatacagtaggtgtgcagtaaggatatgaatatgtaataaaaatgattgtaaatttatgcctaattattgtcttacagtgaaggccgtgaatggccagagaaactacttaaaacatttgagtttctgaaactacaggcatcctcagagggttaatgcatgctcttagtagaactcaaatgtctctaattaggaagatcttaatcctttattcttccaacagttgctgactttgctggggagttgttcgtatatat

SEQ ID NO: 31757 - DNA, 450 bp, Homo sapiens
  misc_feature (1)...(450): n = a,t,c or g
gggtgtnnntntttganaccnttgganacngctatgacnnnnnnnnnnnnnnnnnnnnnnnnnnnnnnnnnnnnnnnnnnnnnnnnnnnnnnnnnnggcacgagaagtacacatgagtagggagagaagtgggctagaagaaaaaaattaactatggaaaaacataagcatatccacaaagtaggattttggtttctcaatctataatattatttcatttccagattgtgaacaggtggcacacactgtttctttagctcttttgtggccaaccacacatagctatttctccatacctactcatatgtcacctaagaaactacctaaattgatctcaaatggatctaatgagaaagacatgcctggcatctttgtaaaaataatatctatacagcaggcaaagttgctttaaagtgtntatttggggagcaatgcaaagtattaaagcat

SEQ ID NO: 31758 - DNA, 454 bp, Homo sapiens
  misc_feature (1)...(454): n = a,t,c or g
ttgganntcgnttcnnnnnnnnnnnnnnnnnnnnnnnnnnnnnnnnnnnnnnnnnnnnnnnnnnnnnnnnnnnnggcacgagtcttatattggcagtgtgtcatgattaaagttatcctccctctttctctccctcccacatatatattttcgtgtcagtatatgtatatgtgatttgtgctatttgtgtgtgtgtaggtaaatgaaagtggcatcaagagaatctcacattaaaaaaaatttgagatagtacaattcttatgcatcatatgttgcataacgtttgactattaagaaatttgcatcacacgtctacttatttcattaaacatgttacagtcaattaattcacttacaccctccatttccttcttccccctctctcgttctcctgctgcagggtcattatacgttcctactcacaaaatgccttggtttttcccttactcctgca

SEQ ID NO: 31759 - DNA, 453 bp, Homo sapiens
  misc_feature (1)...(453): n = a,t,c or g
anttcgataccgntatgacnnnnnnnnnnnnnnnnnnnnnnnnnnnnnnnnnnnnnnnnnnnnnnnnnnnnnnnnnnggcacgagtaatatctttgtatgtatatcttggccatagtctcatcatttccttgataaattcccacaagtaaaattaccaggtcaaaggttttggatgttttaaattattttgttgcgtgtactgccaactggccttctgggaaggtcgtgcacattttcagtcccaccagtgacatgcatttctctgggttatggcattttttgatatattgagttgtttttatgtagtttagttggtcctttcttgcatagtttctgcttttaaagtgatgtttaaaggtgccttccaattctcaagattatgtaaatattcagttttatttttatgaattgattgttttatgtttaagtatttgatacatctaaaattaatt

SEQ ID NO: 31760 - DNA, 454 bp, Homo sapiens
  misc_feature (1)...(454): n = a,t,c or g
ttgaaatccnnnnnnnnnnnnnnnnnnnnnnnnnnnnnnnnnnnnnnnnnnnnnnnnnnnnnnnnnnnnnnnnnnnggcacgaggtgaaagtttgtttatgctggcttagcaaccttcttttttcccccagctacagtgaaaaagcaaacttttggccagacttttagactataaatagagttatcatgtctcagtcaatgagggttaaaatgttctttttaaaaaaagaaaactttggaaattccaagaaggggcagtcacttttaatcattttgtaatcttggagactgctgtctacgggatggaagagatgttagcagaagggagggggcaaactgtgcagaaacagcttcagaaatgcagtcccccactttcttccctgctgctttaaggaacagcagtgtggtggccaacatctcagcagcccagagtggtaatcctattaataataat

SEQ ID NO: 31761 - DNA, 450 bp, Homo sapiens
  misc_feature (1)...(450): n = a,t,c or g
anttcgataccgnttgacnnnnnnnnnnnnnnnnnnnnnnnnnnnnnnnnnnnnnnnnnnnnnnnnnnnnnnnnnnggcacgagcagaaacttgcagagctagaaaaaatactagaaagtaacaaggagaaaataaagaatcaaaagacccaaattaagctccacttgtcagctaaggcgaataatgctcagaatatagaaaggatgaaggttgtatgggaaacctcttctcacttcctggataccctgtgaggatgtagtcagtcaatggtgtctagggaagacaggttttagaaccctaccagccccatgtattctctgggaattatagccagttgtctttggggagacttttcagtggagtcactgctgtgtaaatgtttgatttctcatttgctgccagtgtcacattccggctccctatctgtcccttccgtgttgattgnactg

SEQ ID NO: 31762 - DNA, 447 bp, Homo sapiens
  misc_feature (1)...(447): n = a,t,c or g
tttganatccnnnnnnnnnnnnnnnnnnnnnnnnnnnnnnnnnnnnnnnnnnnnnnnnnnnnnnnnnnnnnnnnnnnggcacgagcggcacgagnnnnnnnnnnnnnnnnnnnnnnnnnnnnnnnnnnnnnnnnnnnnnnnnnnnnnnnnnnnnnnnnnnnnnnnnnnnnnnnnnnnnnnnnnnnnnnnnnnnnnnnnnnnnnnnnnnnnnnnnnnnnnnnnnnnnnnnnnnnnnnnnnnnnnnnnnnnnnnnnnnnnnnnnnnnnnnnnnnnnnnnnnnnnnnnnnnnnnnnnnnnnnnnnnnnnnnnnnnnnnnnnnnnnnnnnnnnnnnnnnnnnnnnnnnnnnnnnnnnnnnnnnnnnnnnnnnnnnnnnnnnnnnnnnnnnnnnnnnangaaaatgtgaaataaatgcagaaaaaaaaangagcaanttagatgagaaatac

SEQ ID NO: 31763 - DNA, 452 bp, Homo sapiens
  misc_feature (1)...(452): n = a,t,c or g
tgnanatccnnnnnnnnnnnnnnnnnnnnnnnnnnnnnnnnnnnnnnnnnnnnnnnnnnnnnnnnnnnnnnnnnnnggcacgagcaccatgagcttcaataccctgggtttaatattgcacaattttgcataacattatttttaagaacgtgtatgcaatatgacagcaaaactgactgtacgaagataaaaacagtagttgtaaaatacggaattagcagataccaaactctatattctacaaaccccaccttttcaaacaccagtagaagcttcatcaacattgatcacacattaagtaacaaaaaaaaaaaanttcaaaaatctntaaanantaaaangtntncnggccagggacaggggntnatgcctgggatcccaaaactttggnaggctgaggcaggngttcaanagttcaanaccanagttcanggcaggtgtnaggagttcaa

SEQ ID NO: 31764 - DNA, 453 bp, Homo sapiens
  misc_feature (1)...(453): n = a,t,c or g
ttgnanatccnnnnnnnnnnnnnnnnnnnnnnnnnnnnnnnnnnnnnnnnnnnnnnnnnnnnnnnnnnnnnnnnnnggcacgagggggatgaagggagaactaatcctgtccatcctggtttattggagagggagaaaaaaaaaagtgaggagatggggaatggtgcggaaatctaagtaaccacagaaaagaaaaacaaaaggattaaaggagcagagagcagggcttaaaagtaaaggttaaaggagtcattaagcctggaaaggagaaaactgagggataattgtgagctgtgacttttctcaaatatacaaaaggttatttttaaaacaggcaactgaagaagaaatgaacaggcttggcttacgaagaaagagcttgaggaagtataagggaaagtccctgaggggaggcttgacgggatcccaacccgagtggccgatgagactatt

SEQ ID NO: 31765 - DNA, 472 bp, Homo sapiens
  misc_feature (1)...(472): n = a,t,c or g
ggagnnnnntttganaccgctatgacnnnnnnnnnnnnnnnnnnnnnnnnnnnnnnnnnnnnnnnnnnnnnnnnnnnnnnnnnnggcacgaggatttttttactttaactgcaatatgtagcagtttgtgagggataaaataaaacccccttttccttctgtttaaatatatggaatgtcagcaaaagcctcctgttagcagtagctgaatctaagaaatgaaccttttatacattggcttacactattttgtccaaagccaaaaatggataatgaaggaggaaaatgacaaatgttctttcctaaagagaagcatccaagtgtagagaagaccacaagtgactataaaacgaggaagccccgtagctaagggattcacaggtaagcccaggacatgtggactgtggaaggccattaatgtgacatgctctgtggtattcagataccttgctgcatgctgggttcggctcta

SEQ ID NO: 31766 - DNA, 475 bp, Homo sapiens
  misc_feature (1)...(475): n = a,t,c or g
ggnnnnnnntttggnatttggannnnnnnnnnnnnnnnnnnnnnnnnnnnnnnnnnnnnnnnnnnnnnnnnnnnnnnnnnnnnnnnnnnnnnnnggcacgagactgatccgttcattatatattatgggaaaaatcaaagaaagttttttatagagatatgaagatattatttagagagatatttattatgacattttttaaaaacatatttttctattttcaaaatattatttctaggctatatttttattggtgctgtgcaaatgattttgcagttttgaaaatgataaaactagattgtaagtggggttcagtgaggacattcatcagacacgtaagaggtgctgcaatcagggtgatgcccatcttactcatccttggctgcccttggtccgacacctctctatacaagactggttctcagtattttaaatggtcagaattctttttaaaaagtagagagattttgaaaag

SEQ ID NO: 31767 - DNA, 475 bp, Homo sapiens
  misc_feature (1)...(475): n = a,t,c or g
ggtnnnnntttganatttgaanaccnnnnnnnnnnnnnnnnnnnnnnnnnnnnnnnnnnnnnnnnnnnnnnnnnnnnnnnnnnnnnnnnnnnggcacgaggcagaggggtgtagacctggcaggacccagacccctcacggctgcagcatctcaggggttgtggggccggcatgagtcataggctctcctgccgagcccaggcttgtgggaccccggcagcaacacagggccaggggcaatagggttgctgggggcaggggacagagtgctagggccctcccacctgggcccagagtcctgtacttggctcacttgaggtggaccaggtgtcagcctcagatccatcactgtgtgtccttagcccctcccttgctctctctgagctggggaaacggcatcttcatttgagtgggtgcgggaaggacctcattttggaaccacaggcctccctggactgctccaggagtctggggc

SEQ ID NO: 31768 - DNA, 476 bp, Homo sapiens
  misc_feature (1)...(476): n = a,t,c or g
ggngnnnntttgannttnnnnnnnnnnnnnnnnnnnnnnnnnnnnnnnnnnnnnnnnnnnnnnnnnnnnnnnnnnnnnnnnnnnnnnnnnnggcacgaggtcccatttctgctgcttcttagctgtgagatgttagtttttgtgagactgcatttccttctccgtaagacaggataaggcctgtctcgcaggaatgacatgcagtatgaagtgagatgatgtgggaagcgcaggtgaaggcctttgctgctcagcgtggtctgtggaccagtggcaccagcaccatctgggagcttcttagaaatacagaatcccaggccctgcctgctggatcaggtcttccttttaacggtatagccaagtcattgttatgcacattgcattttgaaaagcactgctctcgacaaactgaactgccctgagttctaaatgggcaccttaaaacagctctggcgaggatactttatgaattgctg

SEQ ID NO: 31769 - DNA, 472 bp, Homo sapiens
  misc_feature (1)...(472): n = a,t,c or g
gnnnnnnttnnnnnnnnnnnnnnnnnnnnnnnnnnnnnnnnnnnnnnnnnnnnnnnnnnnnnnnnnnnnnnnnnnnnnnnnnnggcacgagcggcacgagnnnnnnnnnnnnnnnnnnnnnnnnnnnnnnnnnnnnnnnnnnnnncagaactggtctaacttctaagagatgacactacaaattcaatagactaaaaagaagacccattcagctatcagaactaggtaagagagacatgaataaaagactttttttaatacttggtatccacatttttactattcaagcatgaccttaaagaaataatttataaaagggatgagataatgcctacctcatagtgttcttacctgacatagttcagtaattttcatatagcataatagttaagaacaaagactctctaggttcaaatcccagttccttagtctacctggtatttctatattattcaacttctcngagnttggc

SEQ ID NO: 31770 - DNA, 456 bp, Homo sapiens
  misc_feature (1)...(456): n = a,t,c or g
anaaccgctttgacatgnttacgaatttaatacnnnnnnnnnnnnnnnnnnnnnnnnnnnnnnnnnnnnnnnnnggcacgagaagaaatatgactctggaccaatgccttaagctacagagaaaaacttcctaggtataataccaggcaaggccaagctgcacatggggactagccattacggagctcgatgccaagtcctgtactgagggctggacctcttctatctcattggatattccttctcagagggccactgcatattcctcacaaacctacctggaggcaggggtcaggccggccatggaggtgggaaagcaaatcttttaaaagatacctttccgtactctctcctccatgaaatagcattttacattattaaatagaataccacactggagcagatcttgcagaaagataaaatagagagtggactcagccctatcacagaaggatc

SEQ ID NO: 31771 - DNA, 454 bp, Homo sapiens
  misc_feature (1)...(454): n = a,t,c or g
ttnnnntttggnnaacagctatgacnnnnnnnnnnnnnnnnnnnnnnnnnnnnnnnnnnnnnnnnnnnnnnnnnnnnnnnnnnggcacgagnnnnnnnnnnnnnnnnnnnnnnnnnnnnnnnnnnnnnnnnnnnnnnnnnnnnnnnnnnnnnnnnnnnnnnnnnnnnnnnnnnnnnnnnnnnnnnnnnnnnnnnnnnnnnnnnnnnnnnnncacaggtggcacatgcctgtagtctcnnnnnnnnnnnnnnnnnnnnnnnnnnnnnnnnnnnnnnnnnnnnnnnnnnnnnnnnnnnnnnnnnnnnnnnnnnnnnnnnnnnnnnnnnnnnnnnnnnnnnnnnnnnnnnnnnnnnnnnnnnnnatattttgaaaattagcttgatcgtttagagcactgcttctcattcttgaattccagaatgtttcttgccatgaagaatttcacagtagttgg

SEQ ID NO: 31772 - DNA, 437 bp, Homo sapiens
  misc_feature (1)...(437): n = a,t,c or g
nnnnnnnnnnnnnnnnnnnnnnnnnnnnnnnnnnnnnnnnnnnnnnnnnnnnnnnnnnnnnnnnnnnnggcacgaggagctaggctgatttgctagagataattgcaaggcacgtggcactaaaagtcatttttcttctgtggatccataagaggaacatttcctcagtgtagcctaacaatgcagcccccaatctgttcctttttttttnnnnangggcatctcngccncccaggttgaagtgccanggncccntntgggntnanngaaacctcngcntcctgacctaangnnancctccnncntaanccncccaggggtgtggggancnncaattccaccttncnangccnaggnaacgtnntntttcntagaganggnanttnnccntngtgnccgggctnanntctatnnccnntgtnngnncnnncntcccc

SEQ ID NO: 31773 - DNA, 448 bp, Homo sapiens
  misc_feature (1)...(448): n = a,t,c or g
nnnnnnnnnnnnnnnnnnnnnnnnnnnnnnnnnnnnnnnnnnnnnnnnnnnnnnnnnnnnnnnnnggcacgagctggttttcttgggatcactaggggatcatttctcttttcttcccccaagctgttagtactctacatctgtatttcaatggtttgagttatcaagtaggagaagggtggtgcatgatgagcagtgaaaaatatagctgctgcttgctaaatacgatccgagtaaaatgcaaacttacaaaattaagcatcttaggattctttacaatattatatacttgctgaaatgagtaccttagtatgagtagcatgacctttccaggtagtcaactggtctgcctgttcaaatttgttttatccccaaaactaccccaatgcagtattctctgttggcaatgacaccaatttttataatggtagataaagaaaatgttaat

SEQ ID NO: 31774 - DNA, 412 bp, Homo sapiens
  misc_feature (1)...(412): n = a,t,c or g
nnnnnnnnnnnnnnnnnnnnnnnnnnnnnnnnnnnnnnnnnnnnnnnnnnnnnnnnnnnnnnnnnnnggcacgagatcacagccattgatggggaaaatactagcaataacaataataataataataaaattattaatccctgtgttgttgactggggcatcacgttccagcagatgaccaggttggcaggaaaagctctgccctacatgtattctcatctctaggtgactcatcagaaggtagatttgggttttttgcaagagccagacacactaaccactcattttgcagtcagggtaagaagcagagaaatgagaattattgatactnnncagaattaacgagtagaaaatgtgtaggtagttaatagaaatgaaaacaggtggcctancatctgacattgggatagaa

SEQ ID NO: 31775 - DNA, 467 bp, Homo sapiens
  misc_feature (1)...(467): n = a,t,c or g
ctttgannnnnnnnnnnnnnnnnnnnnnnnnnnnnnnnnnnnnnnnnnnnnnnnnnnnnnnnnnnnnnnnnnnnnnnnggcacgagccctcccggcccaccctcgttcccacatcctctcattttctcttcccaccccgttcctcgatgggaacgcagccacggccgccccgctgaaagccccggctggtttattcctgagaagtcggtgtgaggggccagggccggccctaacctccctggggtcctgactgggaatttctgccgttccccggctgcctcgtcccttgcgcagccggccctactctgaggccccggggacaccacgctgaggagaaacggctccgagcttgggatcggggagacctggttctgagacccggtcctaccagtagccaatcgttgtgaccttgggcctcagtccccgtgacgttttggtccctgggggttcctggcagcaaagcacga

SEQ ID NO: 31776 - DNA, 466 bp, Homo sapiens
  misc_feature (1)...(466): n = a,t,c or g
ttgganaaccgctatgacnnnnnnnnnnnnnnnnnnnnnnnnnnnnnnnnnnnnnnnnnnnnnnnnnnnnnnnnnnggcacgaggtnnnnnnnnnnnnnnnnnnnnnnnnnnnnnnnnnnnnnnnnnnnnnnnnnnnnnnnnnnnnnnnnnnnnnnnnnnnnnnnnnnnnnnngnnnnnnnnnnnnnnnnnnnnnnnnnnnnnnnnnnnnnnnnnnnnnnnnnnnnnnnnnnnnnnntgtaccaaaatatttcgtataccccgtaaatatatatatgcttactatgtacccgcaaaaattaaaaaataaaaaaaactactgtatccattttttcatttccaaaagcactgaatgtaggtcattaaaagaatttaaaacaatagtaaaaggctcttttaaaattaccttttattgtacttttttcatcacacattcagttaagtctactgaaaaacatggcatgatc

SEQ ID NO: 31777 - DNA, 470 bp, Homo sapiens
  misc_feature (1)...(470): n = a,t,c or g
tttgaaaaccctnnnnnnnnnnnnnnnnnnnnnnnnnnnnnnnnnnnnnnnnnnnnnnnnnnnnnnnnnnnnnnnnnggcacgagagtgagctcatgtatataagcaatcagcaaatagtaactaatgttattgagtgcttgcctaactataatacaaggggaatgatcatccaagaatgaggatttcatgctgtttctgtttgcatccttaaagattagcctgcaatctgttatgttccactggcactgaggaactgagtttttaatacatcaaacatgaggcaacagcattagagaaagaagggtagaatacccatgagggtgcttgccgagggacacaagagaaagcttcctatggaaatttgcatgatgcttagacctaaagaacgggtggaattcagactggcagaaaggtagaattcagagttgcagcaagatgcaagacatagtctctgtcaactccactaat

SEQ ID NO: 31778 - DNA, 467 bp, Homo sapiens
  misc_feature (1)...(467): n = a,t,c or g
cnccccttganancnnnnnnnnnnnnnnnnnnnnnnnnnnnnnnnnnnnnnnnnnnnnnnnnnnnnnnnnnnnnnnnnnnnggcacgagctatatggcaaatgcctgctgttacagaatctttccccaaagtggatcaaagatggagtatcatcagtatcatcgcatgaaatgtcaagtctggcataagagtatgaaaggggcagctttgggctgtccccatggcggtctttgggcacacatcaggggcttatggtggggagtgggtgttgacctgtctctggcagtagtcccagcctggcgcactttttggggctcagtaaatagttgtttatatattggaaaggccctggtgggatggagggatttgtgaattatgtgcgttcaccacattgctgaatccacgagggagagtggtggggaagcaggcttcagcttaatgtgcagtcccaggtgacccaaaccagg

SEQ ID NO: 31779 - DNA, 457 bp, Homo sapiens
  misc_feature (1)...(457): n = a,t,c or g
accnnnnnnnnnnnnnnnnnnnnnnnnnnnnnnnnnnnnnnnnnnnnnnnnnnnnnnnnnnnnnnnnnnnggcacgagaataattgtccagattactttgcttctctcactcctgctcctcctccttcacccctcccttgcctctcttgcctctttttctaacaacctagccttccttttctacctctctcgcttttaattctcacccctttctttccttttgtagaggaggggcttaaacttttaagaaattgctttgtttgctgtactctctcaaaagcttggtttgagcagccaaccctgtttgcataaaatgaaagttagaaaactaaaagttttgtgaaccaagggtggaggaaaaggttatgcattttatcacacagttcatcatcctatcagccaagaaatgagggtccgtttttctgagtaatccctcacctacccacatcctatattg

SEQ ID NO: 31780 - DNA, 462 bp, Homo sapiens
  misc_feature (1)...(462): n = a,t,c or g
ancnnnnnnnnnnnnnnnnnnnnnnnnnnnnnnnnnnnnnnnnnnnnnnnnnnnnnnnnnnnnnnnnnnnggcacgagcaaataatttgtattatgagttcatttccatctgaaataattatgatttgagtgtctactcatactcaacattttgaaaagattcattaggaatgcaaaagtaaaaaactcttatcccnnnnnnnnnnnnnnnnnnnnnnnnnnnnnnnnnnnnnnnnnnnnnnnnnnnnnnnnnnnnnnnnnnnnnnnnnnnnnnnnnnnnnnnnnnnnnnnnnncatagcaagactctgttnnnnnnnnnnnnnnnnnnnnnnnnnnnnnnnnnnnnnnnnnnnnnnnnnnnnnnnnnnnnnnnnnnnnnnnnnnnnnnnnnnnnnnnnnnnnnnnnnnnnnnnnnnnnnnnnnnnnnnnnnnnnnnnnnnnnnnnnnnnnnnnnnnnnngg

SEQ ID NO: 31781 - DNA, 467 bp, Homo sapiens
  misc_feature (1)...(467): n = a,t,c or g
annttgataancnnnnnnnnnnnnnnnnnnnnnnnnnnnnnnnnnnnnnnnnnnnnnnnnnnnnnnnnnnnnnnnnnnnnggcacgagcaaaatgtaaataactctgttcataactaaaatatattcctagaggcattctcatagctagattcagtcttctaaactttctcaactgtaaaatgggaatgaagcttacagggttattcctgtaattatctaacttacgtttatagaaacatgagggataaagcaaatcattgtaaaataaatcctgttatctccatagaaacattactttaggattgctttcttgaacatggactcaaaaaaaaactgtgcaatcaaaagcatgttatgaaaacaacgtccaaagaatcctaagtctaaaagtaacacaagcgtgatctgtgcctataatatgggtataccctgcagctctacacaatgcaaatgttttgctaataag

SEQ ID NO: 31782 - DNA, 462 bp, Homo sapiens
  misc_feature (1)...(462): n = a,t,c or g
ancnnnnnnnnnnnnnnnnnnnnnnnnnnnnnnnnnnnnnnnnnnnnnnnnnnnnnnnnnnnnnnnnnnnggcacgaggttgtagtcatcatgaggaaactacctttcattcagctgggggaattttcaggtgttgtagatggtgtgaatttgaacttcatgacaacagtattaataggataccctccattgtaaactttctctttcacctcatccaaaacccaggcagagaaaacctttgtgatctccctgtgctggtgggtagattttttttccctactccatcctttcacttgcggatgcatagtacagcttaagtcaagtctcaagaatttctagccattatgtagtagaagctttcaggttttatcatgtataatatttccataatgaaattgctggacctgatatattctaaccaagaaaattaccttttattctatggttttaaaaatacatatt

SEQ ID NO: 31783 - DNA, 458 bp, Homo sapiens
  misc_feature (1)...(458): n = a,t,c or g
ccnnnnnnnnnnnnnnnnnnnnnnnnnnnnnnnnnnnnnnnnnnnnnnnnnnnnnnnnnnnnnnnnnnnggcacgagctggctcacagttctgcagactgtacgggaagcacagcagcttctnnnnnnnnnnnnnnnnnnnnnnnnnnnnnnnnnnnnnnnnnnnnnnnnaaataggcatcttacatggcaggagcaagagagaatgagggagannnnnnnnnnnnnnnnnnnnnnnnnnnnnnnnnnnnnnnnnnnnnatctcaaggacagtaccannnnnnnnnnnnnnnnnnnnnnnnnnnnnnnnnnnnnnnnnnnnnnnnnnnnnnnnnnnnnnnnnnnnnnnnnnnnnnnnnnnnnnnnnnnnnnnnnnnnnnnnnnnncggggacacagatccaaaccatatcaggtgccctatccaaaccagctcttaaaatgtttatcttacttgctag

SEQ ID NO: 31784 - DNA, 463 bp, Homo sapiens
  misc_feature (1)...(463): n = a,t,c or g
nnnnnnnnnnnnnnnnnnnnnnnnnnnnnnnnnnnnnnnnnnnnnnnnnnnnnnnnnnnnnnnnnnnnnnggcacgagnnnnnnnnnnnnnnnnnnnnnnnnnnnnnnnnnnnnnnnnnnnnnnnnnnnnnnnnnnnnnnnnnnnnnnnnnnnnnnnnnnnnnnnnnnnnnnnnnnnnnnnnnnnnnnnnnnnnnnnnnnnnnnnnnnnnnnnnnnnnnnnnnnnnnnnnnnnnnnnnnnnnnnnnnnnnnnnnnnnnnnnnnnnnnnnnnnnnnnnnnnnnnnnnnnnnnnnnnnnnnnnnnnnnnnnnnnnnntgtaatctatttacatttaaagtaattactgataagaacttctgttgtattgctatttgttctccatatggcttactgcttttttgccctcatttcctgcattactgtcttttgtgtttagttgntttgnagtgaaacatttaaattc

SEQ ID NO: 31785 - DNA, 486 bp, Homo sapiens
  misc_feature (1)...(486): n = a,t,c or g
gttggncacngaatnnctttgccatgacnnnnnnnnnnnnnnnnnnnnnnnnnnnnnnnnnnnnnnnnnnnnnnnnnnnnnggcacgagggcctggtgcaaacacattgctagagacatgttaaagagttccaggtgaatcaagcctgagggagacaacagcaaaacgatatgtgtcacaaagatgtctacacggaactgccagggaatggactcagtgatcaaacccctggacacaattcctgaggataaaaaagtcagagttcagaggacacagagcacttttgacccatttgagaaaccagctaatcaagtaaagagggtgcattctgagaacaatgcttgcattaactttaagacctcctccactggcaaagagtcacctaaagttaggcggcactccagccccagctcgccaacaagtcccaaatttggaaaagctgactcatatgaaaagctggaaaaactaggggaaggatcttatgct

SEQ ID NO: 31786 - DNA, 487 bp, Homo sapiens
  misc_feature (1)...(487): n = a,t,c or g
ggtggtctttgattnctttgnnnnnnnnnnnnnnnnnnnnnnnnnnnnnnnnnnnnnnnnnnnnnnnnnnnnnnnnnnnnnggcacgagtaagaaacaagctcagatccagttggaaattaggaaggccatggaatctgctgaacaaaaggaacaaggtttatcaagggatgtcacaaccgtgtggaagttgcgtattgtaagctattcaaaaaaagaaaaagattcagttatactgagtatttggcgtccatcatcagatttatattctctgttaacagaaggaaagagatacagaatttatcatcttgcaacttcaaaatctaaaagtaaatctgaaagagctaacatacagttagcagcgacaaaaaaaactcagtatcaacaactaccggtttcagatgaaattttatttcagatttaccagcccgggagccccttcacttcagcaaatttttagatccagactttcagcctcttgntctgag

SEQ ID NO: 31787 - DNA, 482 bp, Homo sapiens
  misc_feature (1)...(482): n = a,t,c or g
ggtggtcnttgnattcnnttccnnnnnnnnnnnnnnnnnnnnnnnnnnnnnnnnnnnnnnnnnnnnnnnnnnnnnnnnnnggcacgaggcgtggaaggaataacatttctgattctggcaaggattaccaactggtggtaaaccattaccatttatatacaatttatatctgtatgtttgtgtgtatacccatgttcacagagagaaaataagacacctagtgtaaagagtagtgattgtggaaatgggatacttttctttttctagtctgaattttctacaatgcatatgtactgcttctgtaacaataaaataaaaggttactttactaattgtttttaaagacagtaataatgctaattagcaactgctgaccacaaaaatagtagtttctggttttgaattttttttttatgtngnattcttgctcctcatatgacatccttggggaactggnaccagtaagaaataaacccctactt

SEQ ID NO: 31788 - DNA, 476 bp, Homo sapiens
  misc_feature (1)...(476): n = a,t,c or g
gngtnnnnttgaanctttggaaancctnnnnnnnnnnnnnnnnnnnnnnnnnnnnnnnnnnnnnnnnnnnnnnnnnnnnnnnnnnnnnnnnnggcacgagtagtgactatctctccaacagactgagttccatgagtcattccctgcttcatctccagctcctagcatacagcaggagctcaatgaatgcctcttgaatgaatgaacatatgaatgcaagagatcagttggatttgcaaactcttgctctcccggcagatgcgtggcaaccagcatgaaccaacctcccccgccccctgggccgtcctaccttccgcacagtcctgtatgtcagagtcttgaagcccaactgcagggccaaaccctggcaggagccttcctcaaaacagctgcgcccactccaggtccctcactgcccaggcaacggctgggaacccccctcattgggccccttccaccagtcctcccataagaac

SEQ ID NO: 31789 - DNA, 470 bp, Homo sapiens
  misc_feature (1)...(470): n = a,t,c or g
gtggccctttgaanccttgaacannnnnnnnnnnnnnnnnnnnnnnnnnnnnnnnnnnnnnnnnnnnnnnnnnnnnnnnnnggcacgaggattgctgtgcaaccattaagtgggatccctctctggactttttcaccatcccaaactgaaactgtacccattaaaaaacagctccccattccctttggtcaccactgctctactttgatnnnnnnnnnnnnnnnnnnnnnnnnnnnnnnnnnnnnnnnnnnnnnnnnnnnnnnnnnnnnnnnnnnnnnnnnnnnnnnnnnacaggtttcttataagggtctgttgcataatgctagggtttgggctacatggtactcattatttttgtttcgtcaatatccattccccatttttctggtaataacacctggaattactcttgcaagaaagactagcatgtctatttccatccttgtacttgtttagacctgagaaaatca

SEQ ID NO: 31790 - DNA, 451 bp, Homo sapiens
  misc_feature (1)...(451): n = a,t,c or g
ttnnntttgaanctcttgaanacctnnnnnnnnnnnnnnnnnnnnnnnnnnnnnnnnnnnnnnnnnnnnnnnnnnnnnnnnnnnnnnnggcacgaggggtcnnnnnnnnnnnnnnnnnnnnnnnnnnnnnnnnnnnnnnnnnnnnnnnnnnnnnnnnnnnnnnnnnnnnnnnnnnnnnnnnnnnnnnnnnnnnnnnnnnnnnnnnnnnnnnnnnnnnnnnnnnnnnnnnnnnnnnnnnnnnnnnnnnnnnnnnnnnnnnnnnnnnnnnnnnnnnnnnnnnnnnnnnnnnnnnnnnnnnnnnnnnnnnnnnnnnnnnnnnnnnaaaaaaaaaaanatntttattcagtngtancntttntccatacaacacttttnttggaattntcaaaaaaaggtttttttttanaagcttttaangcctaggaaattntnatnatnngcnttcaggcta

SEQ ID NO: 31791 - DNA, 436 bp, Homo sapiens
  misc_feature (1)...(436): n = a,t,c or g
tnnnntnnnttntttgaacccttgactgattcgaatttaatacgactcnnnnnnnnnnnnnnnnnnnnnnnnnnnnnnnnnnggcacgagcctaaattaggttgtagttcaccacttgtagaggcagcttcaggccaaatttaatttaatttaataaactaatgaaataaataagggagagtctgattcagttgaattgtatttggagttagaaatgtttattttaaagttcaccagaggatttaaatatacactgaagtttaagaatcattgctgtacaaaggtgaaaaataacatgctcttttaattttgtagtctgtcaagaactacaccaaatgtcatgtgagaaatgagcagatttgtaacaaacttaccagctgtaaaagctgttcactaaacttgaattgccagtgggatcagagacagcaagaatgcc

SEQ ID NO: 31792 - DNA, 416 bp, Homo sapiens
  misc_feature (1)...(416): n = a,t,c or g
acccnnttggannnnnnnnnnnnnnnnnnnnnnnnnnnnnnnnnnnnnnnnnnnnnnnnnnnnnnnnnnnnnnnnnnnnnnnnggcacgagctcctgtgagctgtggctcacatagtgataatttagcacatggagcttatggccacgtgtcgatgcttgattttcttttttttgttaaaaaattaaactnnnnnnnnnnnnnnnnnnnnnnnnnnnnnnnnnnnnnnnnnnnnnnnnnnnnnnnnnnnnnnnnnnnnnnnnnnnnnnnnnnnnnnnnnnnnnnnnnnnnnnnnnnnnnnnnnngaaagtcacaatcatatcgacattgatacagtaaagattacagaattgttctgtcacctgcagaagaattcacctgctgggcactgatcactttctgccaatagttaatacc

SEQ ID NO: 31793 - DNA, 406 bp, Homo sapiens
  misc_feature (1)...(406): n = a,t,c or g
acnacngcttgacnnnnnnnnnnnnnnnnnnnnnnnnnnnnnnnnnnnnnnnnnnnnnnnnnnnnnnnnnnggcacgagagaaggtaaagatctaaaatatgacatgaaaatacccagagaagtgtgcctaaattagcattagggtttgagggatcctaaggatgacaaaaagggactcttctattgaattcgtggttgatgctcagcgatagtaacaatcctgcctcccctaacatcttcctccccttccagcagcttcacagaacatggttgatgaggtaacttaggggatgcacagggtgtggccagaagacccctttccctatagaccactatgagccctgaaagatttatgaggtaatgttcacttcatcctgtgcttnttttcctagatgtgaactatga

SEQ ID NO: 31794 - DNA, 442 bp, Homo sapiens
  misc_feature (1)...(442): n = a,t,c or g
annnccnttgaaanacctnnnnnnnnnnnnnnnnnnnnnnnnnnnnnnnnnnnnnnnnnnnnnnnnnnnnnnnnnnnnnnnggcacgagccaccatggtgctgtctcctgccgacaagaccaacgtcaaggccgcctggggtaaggtcggcgcgcacgctggcgagtatggtgcggaggccctggagaggatgttcctgtccttccccaccaccaagacctacttcccgcacttcgacctgagccacggctctgcccaggttaagggccacggcaagaaggtggccgacgcgctgaccaacgccgtggcgcacgtggacgacatgcccaacgcgctgtccgccctgagcgacctgcacgcgcacaagcttcgggtggacccggtcaacttcaagctcctaagccactgcctgctggtgaccctggccgccacctccccgccg

SEQ ID NO: 31795 - DNA, 463 bp, Homo sapiens
  misc_feature (1)...(463): n = a,t,c or g
ttgaaactttnagaccnttcncnaatgtntnnnnnnnnnnnnnnnnnnnnnnnnnnnnnnnnnnnnnnnnnnggcacgagatcagtattttaaatacactttaaaatacaaaatcagacatgcttttaggaaaaccatatatgtaaaaaaatatatacaaatttgtgttttagctaaatgttttttgctttaagtgataacggtgtttggcttgaaatttgcgtaaaaatattttcccaatagccattaagcttgttgacctgaaagtgactttccttaattcttgattaatatgtttctgttgagtttggaaaataatgtaacccaatcattatacatatagggacaaaaatctgagaaaagttacatacaatttactaatagattatgttccttctanatgcagcatttctgtctatatttttgtaggatatatattaaacatatttttataaggcaaaat

SEQ ID NO: 31796 - DNA, 421 bp, Homo sapiens
  misc_feature (1)...(421): n = a,t,c or g
nttttganaacnnttnnnnnnnnnnnnnnnnnnnnnnnnnnnnnnnnnnnnnnnnnnnnnnnnnnnnnnnnnnnnnnnggcacgagtgggtggctggagttctgccagccccgggagtctgagcagtatcagaaggaggtatcccatctgaatgccctggaggagcgcttctcgcgcctctggacgcagtgccagcgctgccagggcagcctgcacgaggacgtcatctgcaccagccgggactgccccatcttctacatgcgcaagaaggtgcggaaggacctggaagaccaggagcagctcctgcggcgcttcggaccccctggacctgaggcctggtgaccttgcaagcatcccatggggcgggggcgggaccagggagaattaaaaagttctggacttttgctaaaaaaaaaaaaaa

SEQ ID NO: 31797 - DNA, 447 bp, Homo sapiens
  misc_feature (1)...(447): n = a,t,c or g
ttggaaaccctttgaaacctacgaanttaatacgactcnnnnnnnnnnnnnnnnnnnnnnnnnnnnnnnnnnggcacgagattatagcttctattactacatcacacttgagaattttacatttaaatacatatgatatacattaataaagtaaatgaaaggtcattttagagattgggaattgattacctctctccaaatatatctagagatatatttcctttagtgaaatttatttctattatttatcagatctataattagtatctttaaagtaagataactacccatttatctaaaatctaacatcttgaaagttgattttttctcttatttaaaaatatagatttgtctttaataattactgttagataaatgatatttgatgtttatttaggtagaaaaattccaaacnnnnnnnnnnnnnnnnnnnnnnnnnnnnnnnnn

SEQ ID NO: 31798 - DNA, 455 bp, Homo sapiens
  misc_feature (1)...(455): n = a,t,c or g
gganttcnctatcncnnnnnnnnnnnnnnnnnnnnnnnnnnnnnnnnnnnnnnnnnnnnnnnnnnnnnnnnnnggcacgagcggcacgagatacacatgaagagagagaaaggaattgtcatggacacaaggagatgccgccaaacaccctccattcatagcacggagatatgtgattaggttagaatcacttacctcttccccagtgcattaaagtaggaataggtcaggcctggagaaaggaatgacatcttgatgaaactcagctttctcagaggcctaacaaggatggcaatacagatagagctagaatcttctcactggcccttttgtatcaaattagtgaattcctgtatttccagactgaaatgttttccagtaagcaagagagaaaaggcttctggaggcagtggaaatgactttcgttcttctatggttaagagtcatgggctttg

SEQ ID NO: 31799 - DNA, 458 bp, Homo sapiens
  misc_feature (1)...(458): n = a,t,c or g
anancntnnnnnnnnnnnnnnnnnnnnnnnnnnnnnnnnnnnnnnnnnnnnnnnnnnnnnnnnnnnnnnnnnggcacgaggggaaagcagggagtttcagacacacagtgaggagagccgggtgcacactgtgaacacagggtgggaagagctgcacacacacaccgggtcccatctccctacctctcccacgtactccatgacgaagctgttcttgcgaatcttctccagggtgcggacgccccagccacgcccatcatccgtgcggaagatgcagaggtcatatcggatacccttctgtaccacacgatttgggcagtcatagccgcagcggcagcgggagttgcactcgtagatgggcagcccggctcgaagccgcacctggcctggtcattgtaggcaaacttgtgcagtgacgcccccggcagcagcctccagtgggtgcccacagacagtcc

SEQ ID NO: 31800 - DNA, 467 bp, Homo sapiens
  misc_feature (1)...(467): n = a,t,c or g
nttganattcgattgnnnnnnnnnnnnnnnnnnnnnnnnnnnnnnnnnnnnnnnnnnnnnnnnnnnnnnnnnnnnnggcacgagnnnnnnnnnnnnnnnnnnnnnnnnnnnnnnnnnnnnnnnnnnnnnnnnntctcttttcttacacagacttcctgctcaaatgtgtgagccttgtgcctaggtaggaaatataatcagtgtatagagtttgtagagagaagatttattcatcaatggtagaaaattgtaaaatgcaggagcagaagcttctttttcttctactcactaacccaatactgctctgtgctcactcttttggaaagcagtggattggcacagtggtaaaccttacctaagttccaatcaggtgtttcgaaggatttgaaggatgttgttgacacaggataacacttgttgnggtagtgatttgaaaaagagttgaaatataggagtacctcaaagag

SEQ ID NO: 31801 - DNA, 470 bp, Homo sapiens
  misc_feature (1)...(470): n = a,t,c or g
tttggaaacctttntgacncgattacgaatttaatacnnnnnnnnnnnnnnnnnnnnnnnnnnnnnnnnnnnnnnnnnggcacgagcatacactcattccctggcattctgagataattgaacatttaacataaatgatttttctagatgtaatcagagtttgcaccgtaaacccaaaatattttaaaaatcccttgcctcagtaaacactacagtgtatgaaaatccttaaccttttctgacattgtatctggctgtctttgtgaatattggttcaaccagcccatgtgccactgtaataaagaggtgtctacaagagcttcaagttgctatacctgcctgcccttcctcagatcgcctcagactccatgcttttgaacactcctatctgaggttccttttctccccattgcctttgggatcctganggncaaaagacagtctagtttagggttaaaancncancgccc

SEQ ID NO: 31802 - DNA, 465 bp, Homo sapiens
  misc_feature (1)...(465): n = a,t,c or g
tggaaaaccttnnnnnnnnnnnnnnnnnnnnnnnnnnnnnnnnnnnnnnnnnnnnnnnnnnnnnnnnnnnnnnnnggcacgagggtgtaggatttgctcttctaacatgaatggaacatttgatttaggatcagtaattacaggttttagaactggagtttgaagtatctgtgacacatctctctttgacagtcatgtgggtactgatccctgattgcactttcaccccttttcttcttcttgttctcgttttgtgtgtgccttgtgaacaaggacctggcacgtgcgtcttcaaacgtttcagcgcatctagagtagtgcttcacccagcaggccctcagttaacaggcatatggattcgactggtgtttgtgtttttctgtaaaaaaggttatgccatgtctcaaaaaatgaatggctaatgttctaggtanatncanttacaaagacgtcccaaataaatta

SEQ ID NO: 31803 - DNA, 487 bp, Homo sapiens
  misc_feature (1)...(487): n = a,t,c or g
gtagnntnntnttnttactnacagnnctncntaggacctccactgantnnnnnnnnnnnnnnnnnnnnnnnnnnnnnnnnnnnnnnnnnnnnnnnnnnnnggcacgagggttacttgagatggcctcctctctctcactcctggtttgggaaggccttgcttcctctgaaagcttgtgagcagagggctgatctgatcagatttgctcttctgagtggtgctctagaagccacgtggagcatggatggtgtggggtgtgtgctggatgaggcaagcctggggttctggaggacctttgggtggctgtcacagttagagggtaagaggtattgaagccaaaactgagattgaggtagctgggaaggaggaaaggagagagtttaaaagctttaggtaggagcagacctgataggacatggnggnagtcttcaaannatgggtaanggatggnatggaaaaaaaancccggnttttnactttacactcc

SEQ ID NO: 31804 - DNA, 484 bp, Homo sapiens
  misc_feature (1)...(484): n = a,t,c or g
tttgatanctgatacccntnnnnnnnnnnnnnnnnnnnnnnnnnnnnnnnnnnnnnnnnnnnnnnnnnnnnnnnnnnnnnnnggcacgagnnnnnnnnnnnnnnnnnnnnnnnnnnnnnnnnnnnnnnnnnncnnnnnnnnnnnnnnnnnnnnnnnnnnnnnnnnnnnnnnnnnnnnnnnnnnnnnnnnnnnnnnnnnnnnnnnnnnnnnnnnnnnnnnnnnnnnnnnnnnnnnnnnnnnnnnnnnnnnnnnnnnnnnnnnnnnnnnnnnnnnnnnnnnnnnnnnnnnnnnnnnnnnnnnnnnnnnnnnnnnnnnnnnnnnnnnnnnnnnnnnnnnnnnnnnnnnnnnnnnnnnnnttatgctattcttgatgtgcatggataactgaaagcagactactttctaaaaatattacttgagttgatttttttgtgtgttttgatttttagtaccaagtatactaatatttttccatttaagcctt

SEQ ID NO: 31805 - DNA, 471 bp, Homo sapiens
  misc_feature (1)...(471): n = a,t,c or g
ttgnaaacctnnnnnnnnnnnnnnnnnnnnnnnnnnnnnnnnnnnnnnnnnnnnnnnnnnnnnnnnnnnnnnnnnnggcacgnnnnnnnnnnnnnnnnnnnnnnnnnnnnnnnnnnnnnnnnnnnnnnnnnnnnnnnnnnnnnnnnnnnnnnnnnnntaataataaagaatatataaataacatctaccatataatagaaaaacagacaacccagtagaaaaatagacaaaggagagtattttttttcagaaataactagcagatgccacaagactggataaacaaatcagaatgtatttataaaatggaatgttgcttagcatggggatgataaactatacattcaggtggctaatactgaggaggaaggggacaaaggaggcttcaactatacttaatgctttattacttaaatttgaaataaatgtcaacatagaaagatttgataaagctggagggtgggtaacgag

SEQ ID NO: 31806 - DNA, 536 bp, Homo sapiens
  misc_feature (1)...(536): n = a,t,c or g
gnnncnnnannnnnnnnnnnnnnnnnnngnnnnnnngnnnnnntcnnnnnnnnnnnnncnnnaggggtgnnttnccttgaaacttgagaccgacacgaannnnnnnnnnnnnnnnnnnnnnnnnnnnnnnnnnnnnnnnnnnnnnnggcacgagcattatagatgtttttatttgtttgtgtttttttgtgnnnnnnnnnnnnnnnnnnnnnnnnnnnnnnnnnnnnnnnnnnnnnnnnnnnnnnnnnnnnnnnnnnnnnnnnnnnnnnnnnnnnnnnnnnnnnnnnnnnnnnnnnnnnnnnnnnnnnnnnnnnnnnnnnnnnnnnnnnnnnnnnnnnnnnnnnnnnnnnnnnnnnnnnnnnnnnnnnttatttaggtcctttcagctcacagagcaaggaaatgtgcatatctataaatatttgtctatgtagccatctgtacctatattaagggaaacatgattttactgatgtcttcaactcttatctacttccacatggatcattctaagncaccaggaaggaatattttaa

SEQ ID NO: 31807 - DNA, 462 bp, Homo sapiens
  misc_feature (1)...(462): n = a,t,c or g
ttgnaanctttnnnnnnnnnnnnnnnnnnnnnnnnnnnnnnnnnnnnnnnnnnnnnnnnnnnnnnnnnnnnnnnggcacgaggtaaatgtttaaggagtgatatgcagtcgattggtttgcatacaaatattaagttttttaatgtgaacatttagcaaatgacattcatgtatttgcatgtgtgtgtgcttgcacatgtgcacatgcatgtctgtctgcagggaaaatatattcatgccttttgaaaatttttaaataatgtgttatatttatagaaagatttggaaccttttctctgaagaagttaaagaacagatgtcattgattcatattaagcaagaccctataaatcttatttctaggtctcatgtatttattaagcaactccacaccttaagcaggctttctacatagaagaggaagaagatagagatggtttccatattattttcatattccca

SEQ ID NO: 31808 - DNA, 475 bp, Homo sapiens
  misc_feature (1)...(475): n = a,t,c or g
ggnngnnnntgnntttganntttgataccttatgacnnnnnnnnnnnnnnnnnnnnnnnnnnnnnnnnnnnnnnnnnnnnnnnnnnnnnnnnnnggcacgagcactcactatgttgatgaaatcctattttagtttgggttgccctagagacatgattcatgtccccctgtgacatggattcaagtgcaagtagtttatctgggaggtgatcctaacaaacacctgtagaggagtggagaagtgagacagggaagggaaggagccagcatcgggttcagtgtcaattaagttaccactataggcaacaggagcttaagttgctgagtaactcggggagccagcgtaggagtcatgtttcagagttatcccactggannnnnngaagggaaatgggatttatagaccaactcctcagtcgttggaagacagctgctgaaaagtgagggagtgtgaatcagattttttccacttggc

SEQ ID NO: 31809 - DNA, 518 bp, Homo sapiens
  misc_feature (1)...(518): n = a,t,c or g
nnnnnnnncnnnnnnnnnnnnnnnnnnnnnnnnnnnannnnnnannnnnnnnnngnnnnnggggtgnntcccttgaacntgagaccgatcgaattaaacgatcnnnnnnnnnnnnnnnnnnnnnnnnnnnnnnnnnnggcacgaggaacatggtaggaaaagctttaaatttttagtttatcttattgaaactataagtaatatgttctcatttcatacattttctttgatatattttactttgttttctcattatatggaaaaaaactttcatagtcctggagataaatttccccatagtgtttctttactctcattttttactaaaatagtgtctagagctgggaggtaacctgatgaattttgtattatagataacaaaactgagacccagtgaggaaagtgacttttgcaaggccatacagttgattagcatagttgagactggaactatttagttcttctgacaagccagtccagaactgnttttattcggattgctcagatgnattacatac

SEQ ID NO: 31810 - DNA, 458 bp, Homo sapiens
  misc_feature (1)...(458): n = a,t,c or g
ctttgaaaaccgctatgacnnnnnnnnnnnnnnnnnnnnnnnnnnnnnnnnnnnnnnnnnnnnnnnnnnnnnnnnnnggcacgaggacagcaccactgtgctcaccccggctgggttcagcgtctctgcagactgagcctcagtgcttggcactttggacagaaagtgacgcgtatctgaggatagacatatttggaggatttgaggcatattttatttgatttgagccatatttggaggaaagcataggagcttgccagggagggaggaaagtaagggcatcccaggcagagggaacagcatgaacaaagaccctgaggcctggagccccgaagttaatagagtaggagtgatggaggggagccgggaggggtagagaggacccgctggggaggagcctaggaaggtgcatcaggccttgaccatctgactcagaacttgngattctctccagtaga

SEQ ID NO: 31811 - DNA, 458 bp, Homo sapiens
  misc_feature (1)...(458): n = a,t,c or g
aaacctctnnnnnnnnnnnnnnnnnnnnnnnnnnnnnnnnnnnnnnnnnnnnnnnnnnnnnnnnnnnnnnnggcacgagtgccttttcctttctaaaatttcatttctcctatccctctttatctacttgcctagaaatatacatcttcagtagctcaactgagcctcaaatctattccgtggtacgttttttggggtgggtcaggggaggcagggaagttagtttgtttttcatacgactccagcgaagcagaatccaacatgactgcttttgggttatgtctttgtttccgtgccagctttgccagtgatgtcagtgggaactcacacagttgtagcatggtggggatcatctgtgggccaggacgatagctctcatgatggtttggggtatgtcctgccaaagcacagccgatttcatgtttcttttattaaaacactcattcccaaactgatca

SEQ ID NO: 31812 - DNA, 476 bp, Homo sapiens
  misc_feature (1)...(476): n = a,t,c or g
ggngnngnntgncttgaantatnnatacccttatgactgacnnnnnnnnnnnnnnnnnnnnnnnnnnnnnnnnnnnnnnnnnnnnnnnnnnnnnggcacgaggcacaggattatgtaatatggaactgctcaagcaaataactagtcatcacaacagcagttctttgtaataactgaaaaagaatattgtttctcggagaaggatgtcaaaagatcggcccagctcagggagcagtttgccctactagctcctccgacagctgtaaagaagagtctctggctctttagaatactgatcccattgaagataccacgctgcatgtgtccttagtagtcatgtctccttaggctcctcttggacattctgagcatgtgagacctgaggactgcaaacagctataagaggctccaaattaatcatatctttccctttgagaatctggccaagctccagctaatctacttggatgggttgc

SEQ ID NO: 31813 - DNA, 534 bp, Homo sapiens
  misc_feature (1)...(534): n = a,t,c or g
cnnannntcnnngannancgacnncggnnannntnnnnatcnnatcccccncnncanatgtnngngggtgagatgcnttgaancttgaaaccntngaagacacgaattaatacgannnnnnnnnnnnnnnnnnnnnnnnnnnnnnnnnnnnnggcacgagtggccaagcgcattgggaaagaccttagcaacacatttgccaagctggagaagctgacaatcttggcaaagcgcaagcccctctttgatgataaagcagcggaaattgaagagctaacatatatcatcaaacaggacatcaatagcctcaacaaacaaatnnnnnnnctccaggatntcgtgagagccaagggcagccanagtggccggcaccngcagacccactccaacaccatngnggnctccttgcagacgaaactggcttctatgtccaangacttcaaatcggttttanaagngaggacagagaacctgaagcagcanagganccgnagagagcagttntcccgggcaccngtgtcagcccntgccccc

SEQ ID NO: 31814 - DNA, 462 bp, Homo sapiens
  misc_feature (1)...(462): n = a,t,c or g
tttganaccttnnnnnnnnnnnnnnnnnnnnnnnnnnnnnnnnnnnnnnnnnnnnnnnnnnnnnnnnnnnnnnnnggcacgagtggactgtgacgagaactccatctgggcttgctggctttgaagatggaggaagagggccaccagctgaggaatacaagtggcttctgcaaatnnnnnnnnnnnnnnnnnnnnnnnnnnnnnnnnnnnnnnnnnngggaaagctgccaccttgactggagctcagtgagattatcgtcagacttctaacctacagagctataggtgtatccgcacagcactcatcagaggcacaagcttgaatttgagatactgcatgggtcatactcactaggacccctgctatggtgacttctgaaaactcagtgactacagcaatcaagacagtgcggtattgcttccgtggtgggccatggcagtgaacagccttcaggcatgtct

SEQ ID NO: 31815 - DNA, 439 bp, Homo sapiens
  misc_feature (1)...(439): n = a,t,c or g
ggtgnccccctttganacnnnnnnnnnnnnnnnnnnnnnnnnnnnnnnnnnnnnnnnnnnnnnnnnnnnnnnnnnnnnnnnnnnnnggcacgagggatcactattgatatttttacttaaatagcataatcaaactgtcccaggccaaccaggatgtgtggtcatttcactttaatagattttttttttaaagtaaatgttacaatatatacatatattatgttgtacaccatcgtatatgtaatttttgtcaaaaatacccaaagtaaatgagtgatgtcattaagaattctgatctgaagatggaaggatcttttcagcctaaaagcttgaccatcctgggcaatgtagtgagattctgtcttaaaaaagagagagaattttgagttaggaatttgactgtttgccattgnggcttcttcaagngntcctgcattat

SEQ ID NO: 31816 - DNA, 517 bp, Homo sapiens
  misc_feature (1)...(517): n = a,t,c or g
gnnnnnnnttcnnntnnnnnnnnnnnnnnnnncnnannnanannnnnnnnannnnnnnnnnnnntnnnnannnntnatcaggtgtccccctttganctnctagccatgantacgaannnnnnnnnnnnnnnnnnnnnnnnnnnnnnnnnnnnnnnnnnnnnnnggcacgaggagcaatagccaaagatgtttgtcttgctctattttacaatttttgccatttgtgccagtggacaaccccggggtaatcagttgaaaggagagaactactcccccaggtatatctgcagcattcctggcttgcctggacctccagggccccctggagcaaatggttcccctgggccccatggtcgcatcggccttccaggaananatggtaganacggcaggaaagganagaaaggtgaaaagggaactgcaggtttganaggtaagactggaccgctaggtcttgccggtganaaaggggaccaaggagagactggnaagaaaggacccataggaccagaagggg

SEQ ID NO: 31817 - DNA, 468 bp, Homo sapiens
  misc_feature (1)...(468): n = a,t,c or g
ttgnannccctctttgagaccctatgacnnnnnnnnnnnnnnnnnnnnnnnnnnnnnnnnnnnnnnnnnnnnnnnnnnnnnnnnnnggcacgagcaaccatgtagaaagaagatgagtccaaagtaannnnnnnnnnnnnnnnnnnnnnnnnnnnnnnnnnnnnnnnnnnnnnnnnnnnnnnnnnnnnnnnnnnnnnnnnnnnnnnnnnnnnnnnnnnnnnnnnnnnnnnnnnnnnnnnnnnnnnnnnnnnnnnnnnnnnnnnnnnnnnnnnnnnnnnnnnnnnnnnnnnnnnnnnnnnnnnncaaaaacaaggtttngccatgttgccaaggntganntngnactccngggctnaagggatcngtccatccntgnttccgcntttnaaagnactgggattataggtgcaanccantgggcctggcccaaaagtaattttttnattgccggtttntcatctgtttccc

SEQ ID NO: 31818 - DNA, 484 bp, Homo sapiens
  misc_feature (1)...(484): n = a,t,c or g
ggtnttgaatcgntgacctgattacgaatttaatacgactcnnnnnnnnnnnnnnnnnnnnnnnnnnnnnnnnnnggcacgagattccctcaaggcataataatttaatccagtccactggtgtcaatacatctgctcggcttagaatgctctggagattgttttaaccaagtgggtttactagaaatataaattcagtttttgtgtgtgtgtgtgtgtgattttcttgtttaattggaaaaaattatgtgtttgttagtgaagggctaagaagaagatgggacaggaagatatgatgactttaagccagcttcctctttcaagctctacattatattatgctgttattttgccaagaatatctttcctacagcagtgacctgagagtaccattataacagtaccattataacagtaccatttaaaaaaatatgtccagagnnnnnnnnnnnnnnnnnnnnnnnnnnnnnnnnnnnnnnnnnnn

SEQ ID NO: 31819 - DNA, 461 bp, Homo sapiens
  misc_feature (1)...(461): n = a,t,c or g
nnnnnncnnnannnnnnnnnnnnnnntttgaaaccctnnnnnnnnnnnnnnnnnnnnnnnnnnnnnnnnnnnnnnnnnnnnnnnnnnnnnnnnnnnnnnnnnggcacgagggaactaataacaaatgtgcataataggaaaaacgatagtctcagcttccctagaaacattggaatatctgtcgctgggctcacttttttacgcaatgatcttctggagcagaggtgtaatatcagtgataactgactcataaagggcttcttatgtgacaggcactgttctaggtgccttagttttcagtcttcacaacaatcttttgaggtcatgtgtataattacttccattttgtggatgggagattgaggtacagagaggtttggtcatttgcccaggggcccagtgctggtaaggtgagggagctgggattttagcccaggngctctggctcctggattatatgc

SEQ ID NO: 31820 - DNA, 432 bp, Homo sapiens
  misc_feature (1)...(432): n = a,t,c or g
aanncnttgagaccnnnnnnnnnnnnnnnnnnnnnnnnnnnnnnnnnnnnnnnnnnnnnnnnnnnnnnnnnnnnnnnnnnnggcacgaggagaagctagcaccatgagaatnnnnnnnnnnnnnnnnnnnnnnnnnnnnnnnnnnnnnnnnnnnnnnnnnnnnnnnnnnnnnnnnnnnnnnnnnnnnnnnnnnnnnnnnnnnnnnnnnnnnnnnnnnnnnnnnnnnnnnnnnnnnnnnnnnnnnnnnnnnnnnnnnnnnnnnnnnnnnnnnnnnnnnnnnnnnnnnnnnnnnnnnnnnnnnnnnnnnntnacnnnaanttnannnctttnctttttttttgnacctnaattttanctttaaatcnctttttngnncccaaggggttttnttatttncgganaaaaanccttaccnggntttttttaggggtt

SEQ ID NO: 31821 - DNA, 431 bp, Homo sapiens
  misc_feature (1)...(431): n = a,t,c or g
tttgaanaccttttnnnnnnnnnnnnnnnnnnnnnnnnnnnnnnnnnnnnnnnnnnnnnnnnnnnnnnnnnnnnnnnggcacgagcatttccattttgaaaactaaagtggcttaatctcccagtgtctcagtattcctgcacagaggatggttcttaaaagttgtggcctaaaggattttgatgacctctggaagaggagacaaatcaaaagctgtgtcccttcttgaacccaaaactttttcagtcccttgaatgttataaattgttctacaagtacagtaagtcctcacttaatatcatcaataggttcttggaagctacaattttaagcaaagccaattttttcctcatcaacatcacaatgaaatgatgttatttgggggcctgctatgtgtcattttacttaaagttgcagtttccaagaacctg

SEQ ID NO: 31822 - DNA, 390 bp, Homo sapiens
  misc_feature (1)...(390): n = a,t,c or g
nnnnnnnnnnnnnnnnnnnnnnnnnnnnnnnnnnnnnggcacgagaaaacaggagttcctggcttggttgttccctggaagcttctttgagtatttttgagggggtggggagtggaagctgtggctaggttgaaggagagggagggaggctctccagcctggttcaaagatctaagcaacgtcagggagtgtgggtgggggcagtccaccactccatgtccttcccacaggggctggggaattaacaaatttttgccccaccccggacttgccggaggtgtgaaggacagttctgggagagacctggaggccagccgcatgttttggagggctactgtttgaggtagtgtcctcctctggcctgggcagagacacaggcggaaggcaggc

SEQ ID NO: 31823 - DNA, 394 bp, Homo sapiens
  misc_feature (1)...(394): n = a,t,c or g
nnnnnnnnnnnnnnnnnnnnnnnnnnnnnnnnnnnnnnnnnnnnnggcacgaggcctccagaaggagtgtggtcgtggtcctgccaacaccttgatttcagtttagtgatactgatttcagatttctggctcccagaactgtgagnnnnnnnnnnnnnnnnnnnnnnnnnnnnnnnnnnnnnnnnnnnnnnnnnnnnnnnnnnnnnnnnnnnnnnnnnnnnnnnnnnnnnnnnnnnnnnnnnnnnnnnnnnnnnnnnnnnnnnnnnnnnnnnntgaaactgtgttgttaattcagaactctcccacaaagatagattctagcccggatgacttcagtggtaaattctatcaaacacttaatattgtttttgaaaacagaagaagagggacactt

SEQ ID NO: 31824 - DNA, 442 bp, Homo sapiens
  misc_feature (1)...(442): n = a,t,c or g
ggnnngntnttnnnnattgantcnnaaaccttgannnnnnnnnnnnnnnnnnnnnnnnnnnnnnnnnnnnnnnnnnnnnnnnnnnnnnggcacgaggcctaatatagattttgtgttcagcaggtgcttatagaatattggcttgattcaaggcagctggcacaagcaacaggaccaggcacagagaaacagaatctctagattttttccttgtacagtttaaggatgttgtagtggatgatactagtccaccccacacatcccctttgttttcaccgcttctctacattccaagagcttcattttacaaatatctttgacttttttgtgtgtgtccccatgcttgtactgtgcatataggttcctgtgaattagcatttccagaattagccctgaaccaacaccgnnnnnnnnnnnnnnnnnnnnnnnnnnnnnnnnnnnn

SEQ ID NO: 31825 - DNA, 443 bp, Homo sapiens
  misc_feature (1)...(443): n = a,t,c or g
tttgaacctttgaacatcnttnnnnnnnnnnnnnnnnnnnnnnnnnnnnnnnnnnnnnnnnnnnnnnnnnnnnggcacgagcaaagagcgagattgggcagggaaactccccctaatatgatactgnnnnnnnnnnnnnnnnnnnnnnnnnnnnnnnnnnnnnnnnnnnnnnnnnnnnnnnnnnnnnnnnnnnnnnnnnnnnnnnnnnnnnnnnnnnagcatgtgcaaattcaagatgagatatgggtggggacaaaagacaggcaggagttccgaggatgagtatttgcattctgtccctgagtttgctgtaaaggagagcagcgagacagaggcatggggtgcggaatggcgtgtttaagatggagtgatgacaggtgcccgttggagtgatgcagtagacaggatctgatgatggggagcaggtgtcgtgtgcccttgag

SEQ ID NO: 31826 - DNA, 442 bp, Homo sapiens
  misc_feature (1)...(442): n = a,t,c or g
tttgaaannntggaancccttgacnnnnnnnnnnnnnnnnnnnnnnnnnnnnnnnnnnnnnnnnnnnnnnnnnnnnnnnnnnggcacgagcttcctttcaaagcgaatcccattccttctggttaggttaaggaatattaatattacatttttaaaagaataggtaataaattaatttctaaaaatattttatttccatttgtagagtaccctggaagttaccaagagtataattaaaactcccttttgcccaannnnnnnnnnnnnnnnnnnnnnnnnnnnnnnnnnnnnnnnnnnnnnnnnnaggggngaggaggagggcntgggagtggaatnngnacttnnatanaannngtnacattcctannncttgntctataaanatattgggtagnctgtnccttaagnncntnacanntcnntncagagnccgatntttaga

SEQ ID NO: 31827 - DNA, 441 bp, Homo sapiens
  misc_feature (1)...(441): n = a,t,c or g
aannctttgaacncnnnnnnnnnnnnnnnnnnnnnnnnnnnnnnnnnnnnnnnnnnnnnnnnnnnnnnnnnnnnnnnnnnggcacgagcaagtcctgtttatttcagaagcttgaacagtagaactaggaaggagtgatgaaaacaaggcaccagtccccttgacagggccaaatccggcacaagctctgtctgtgcgatcaaggctgacccagcagcctcaatccgccttttcctgtgaggagagggtttgaggacaacctgcgcacaggtgactgttccatagggtgaggttggggtaagttggctctgggttcctctggatcagctgcaaaaggccagagggcccccagtacccttggccaagagcattccatgctgactctgtctgtgctcaggcaaaaccacattctggagaggaagccgtagtgcctggtgggcc

SEQ ID NO: 31828 - DNA, 443 bp, Homo sapiens
  misc_feature (1)...(443): n = a,t,c or g
tttnnnnnnnnnnnnnnnnnnnnnnnnnnnnnnnnnnnnnnnnnnnnnnnnnnnnnnnnnnnnnnnnnnnnnnnnnggcacgagcgttcactctgcttaaagagtgagcttgtgaattaattacagttaggagatcaagaaactgagacattaattgatagaaaatcgcatccaacacgtagatctagaagaaaatatctttattttctttctagcatcaaggaatattaaatctaaagtgtccccaggtatatggttttcaatcctgtgcttaaatatctcctgagaaggagattccataaattccctctataactaaccaatcctcataatcagcaagttcttttctatctgatctaantccctantcctgccntttaaacncatttcctcatgntctgccctncagggagatnaagaacagctggctgntcctatttgga

SEQ ID NO: 31829 - DNA, 471 bp, Homo sapiens
  misc_feature (1)...(471): n = a,t,c or g
tttggaaacctttnnnnnnnnnnnnnnnnnnnnnnnnnnnnnnnnnnnnnnnnnnnnnnnnnnnnnnnnnnnnnnnnggcacgagacatgttaggaccccagatcaatgtatttcaagggacatttaagatcactctggacaggcaatggaatctctccacctctgtagctatgagcctccttctggaaaaaaagataaaatttttacttgattttttttctctttctcttagtgcttggatcaagcaaaaaaaatgcaaatgaaatttctagccttgttaattcccctgaaatctagcatcctctctaaaatacttggtaaaactaagcacccaggaaacaaagtttaaagtctttaaggtgtgctcagtgtagcctgtaaggcggttaanaaatagcccttaaatttgcatagaaatcataggccattggagcaaaaagtangctcaggcaatgtcacagaaaatgctt

SEQ ID NO: 31830 - DNA, 470 bp, Homo sapiens
  misc_feature (1)...(470): n = a,t,c or g
ttgganactttgaaacccntnnnnnnnnnnnnnnnnnnnnnnnnnnnnnnnnnnnnnnnnnnnnnnnnnnnnnnnnnnnnnnnggcacgagagggtatatacaataatttttcatgctatttttacaattttttctgtgagtctcaaattatttcaagataaaagttaaatagaaagttataaaaaaagatgttattcagtcaacgtgatgtggctgtttgaatggaaaaggaacactgttggtggaggagatggttagttagaaggctaaaagacaggatgtaagatggacctgaaggctagggaaggtctgaactggagaaagaggagaacccacaggtcaggaatagacagtggctcagaggtgagaatcagggtgatgtttggtggaggctggcanagcacagggctgatattgacagcagtggtatgaggatagtgggcactctaaattaaataaaattaaggtg

SEQ ID NO: 31831 - DNA, 466 bp, Homo sapiens
  misc_feature (1)...(466): n = a,t,c or g
ttggannctttgananccnttgacnnnnnnnnnnnnnnnnnnnnnnnnnnnnnnnnnnnnnnnnnnnnnnnnnnnnnnnnnnggcacgaggggctcggtgggtcacactttatctctagctgaccagtttgtgtcttactagccaggcagcccttgccgtatccagcactctggactcatgagctgtgtggcagccccaagactgtagacatgactctcaccaggaggcaagtaagctgtggttgcagggtggattttggactgcaagaataaaaggtacggtggtcttcaggaaatggtacaatttccatgctggaaagcaatgtttgcctgtaaagctcctgtttatgagacagtagtcattttattcacttattctttctctggctttctctttatcatcatgtcaattccagctgctcatcactggagaanaagacacaatcatactgatgggctctgggta

SEQ ID NO: 31832 - DNA, 557 bp, Homo sapiens
  misc_feature (1)...(557): n = a,t,c or g
cnnatnancnnnnnnnaangnangngnnnnnnntnnannnctnncattanannnntngnnnnnnaaaanannatggggntgnntanncntttgaaacctganaccatncgaagaatacnactcannnnnnnnnnnnnnnnnnnnnnnnnnnnnnnnnggcacgagagggatataagaatgcttaaagcttgaggccctaaatctagcctgggaggaccagggaagtctttcccaaggaagtgatgtttgaggtaagaactaaaggacaaaagatgttaactctgtgaagagagaatctgaaggtaaggggtgaaaaacaccccaggcacaggggaatgtgcacaggccctgacagaggtgggagagagcacagccaaggggaagttttcctgagaaacctaacgttcaagcaccagggagaccaaataaacactgtcaaatgcaacagacttgaggaaaaattgaactaggataaaaagnccaaatttcaagtgaagntnacacctacatagcaagttgtgngcccangtacagntcgaaagggccatanatatatg

SEQ ID NO: 31833 - DNA, 484 bp, Homo sapiens
  misc_feature (1)...(484): n = a,t,c or g
ggtgttgactntgaanccntatgacnnnnnnnnnnnnnnnnnnnnnnnnnnnnnnnnnnnnnnnnnnnnnnnnnnnnnnnnnnggcacgaggatggagagagagagagagagagaggggaagaactgcaacttgggaaggaaagagctgaatcggcaacatgtcacagtacaacaatccattctttgcacacatacccaagtgaaggctttccagactccagaatcttgctatctcccctctagctaccatccttctgtttggaaaacggcaaccttcagagcaggactggggtgtgaccgaggagccggtccccaagcatcacagaggactgcacaggctggcagctacgggaactgcagaaatcgcttattcactgctttgacgttgtgtgcgttcccggccagagcctgcccagaaactgacagctggctccacactccgtgtgaccaagggttagtggctacagtgacattgcgggggac

SEQ ID NO: 31834 - DNA, 483 bp, Homo sapiens
  misc_feature (1)...(483): n = a,t,c or g
ggtctcngaaantnnangacccnnnnnnnnnnnnnnnnnnnnnnnnnnnnnnnnnnnnnnnnnnnnnnnnnnnnnnnnnggcacgagagagctagcaccatgacaataccctgatctataaaagagcaaattgataaatttcatcaaaatttaaaattcctgttcttcaagacactgctgagagaatgaaaagatggaccacggcctagagagaatgtatttgcaaatcatttgacgagggacttgcatcccaaatatgtaacgaattctcaaaactcaattacaagaaaacaaccaaccaacaacaacaacaaaaaataggcaaaagacaagaacagacactttgccaaaagggatatacagaagacatataagcttagggaaatnnnnnnnnnnnnnnnnnnnnnnnnnnnnnnnnnnnnnnnnnnnnnnnnnnnnnnnnnnnnnnnnnnnnnnnnnnnnnnnnnnnnnnnnnnnnnnnnn

SEQ ID NO: 31835 - DNA, 297 bp, Homo sapiens
  misc_feature (1)...(297): n = a,t,c or g
cnnnnnnnnnngnacgntngnnnnnnntcntnncnctnngntnnnannnggntcaanngnnnnncgctggggtgttgaattgaaaccgatacgaattaaacgatcannnnnnnnnnnnnnnnnnnnnnnnnnnnnnnnnggcacgaggagaaggacctggtctagttggggaaataagttttccagacagaaggtgcctcattatatcatttgaaaatgatataatgtcattgcatggaaatgatataatatcattgcatcactataatagttctcaagtgtatttttttttttttt

SEQ ID NO: 31836 - DNA, 483 bp, Homo sapiens
  misc_feature (1)...(483): n = a,t,c or g
gnnnnngnnnnntttggaatccccnctttgaanaccnnnnnnnnnnnnnnnnnnnnnnnnnnnnnnnnnnnnnnnnnnnnnnnnnnnnnnnnnnnnnnnnnnnggcacgagtgaagacacgggtttctatttttactggttttgtccttttaaaaagcttgtctttctttagtttttgtttnnnnnnnnnnnnnnnnnnnnnnnnnnnnnnnnnnnnnnnnnnnnnnnnnnnnnnnnnnnnnnnnnnnnnnnnnnnttccttgtacccannnnnnnnnnnnnnnnnnnnnnnnnnnnnnnnnnnnnnnnnnctaactggagtctttaaaaaccttcttttannnnnnnnnnnnnnnnnnnnnnnnnnnnnnnnnnnnnnnnnnnnnnnnnnnnnnnnnnnnnnnnnnnnnnnnnnnnnnnnnnnnnnnnnnnnnnnnnnnnnnnnnnnnnnnnnnnnnnnnnnnnnnnnnnnnnnnnnnnnnn

SEQ ID NO: 31837 - DNA, 482 bp, Homo sapiens
  misc_feature (1)...(482): n = a,t,c or g
ggttggcgcctttggattcccgtcaccntnagacnctnnnnnnnnnnnnnnnnnnnnnnnnnnnnnnnnnnnnnnnnnnnnnnnnnnnnnnnnnnnnnnnnnggcacgagggnnnnnnnnnnnnnnnnnnnnnnnnnnnnnnnnnnnnnnnnnnnnnnnnnnnnnnnnnnnnnnnnnnnnnnnnnnnnnnnnnnnnnnnnnnnnnnnnnnnnnnnnnnnnnnnnnnnnnnnnnnnnnnnnnnnnnnnnnnnnnnnnnnnnnnnnnnnnnnagggtaacctaactttatctaatttgacctttacaaaaacttattgaataaaacgggtacaggccccactgccccaattttaccagtgagaaaactaaggtccagaggggcaanttgttngtncnnagncncaaagntggttgnnaaaaaacttgnancagggatgatnatcncnntttttccagnngggnaaacnnaacccctganttttt

SEQ ID NO: 31838 - DNA, 436 bp, Homo sapiens
  misc_feature (1)...(436): n = a,t,c or g
annccctttggaagncccttnnnnnnnnnnnnnnnnnnnnnnnnnnnnnnnnnnnnnnnnnnnnnnnnnnnnnnnnnnnnnnnnnnggcacgagcgtaaaggtataggtaattttttaaatcttctagattgatttatcattacagtgatttttagaacaaatttgatcaaaacaacacaaacgtattgaacatttcaataaacaattattaaatatagaagttaatgtctattagaaatatatttcttaatgagatggatggttctttatttccaattagtttttttacctatggatgaatgttatttttgccaagggttcaatatcaattccattccttgttttagtccgtatcatataaatggtgagaaacattgcctatcaattatgtgatgggaacagagtttcattagagcanggtcatttccattttga

SEQ ID NO: 31839 - DNA, 430 bp, Homo sapiens
  misc_feature (1)...(430): n = a,t,c or g
ttggannacatttnnnnnnnnnnnnnnnnnnnnnnnnnnnnnnnnnnnnnnnnnnnnnnnnnnnnnnnnnnnnnnnggcacgagaagagtaaaatgtgagttcctattgaggaaggtattaagaagttagtcaaccatctattcagaatgttgtagaggggacttagcttagggtagaaagttgaaattagaagcatccttctaaatctgcttctttaacaattaactaacccattttttttgcctaaggtattataggttgagtatccctaatctgaaaatcnnnnnnnnnnnnnnnnnnnnnnnnnnnnnnnnnnnnnnnnnnnnnnnnnnnnnnnnnnnnnnnnnnnnnnnnnnnnnnnnnnnnnnnnnnnnnnnnnnnnnnnnnnnnnnnnnnnnnnnnnnnnnnnnnnnnnnnnnnnnnnnnnnn

SEQ ID NO: 31840 - DNA, 424 bp, Homo sapiens
  misc_feature (1)...(424): n = a,t,c or g
aanaccattnnnnnnnnnnnnnnnnnnnnnnnnnnnnnnnnnnnnnnnnnnnnnnnnnnnnnnnnnnnnnnnnnggcacgagcaagcaggccctgagggactataagaaggttcagatccagctggagaatctggagagcagtgtgcgggaccgctgcaagaaggaattcacagacctcatgactgagatgaccgatctcaccagtgacctcctgggcagcggcatccccttcctcgactacaaggtgtatgcggagaggatcttcttccctgggcaccgcgagtcgcccttgcaccgggacctgggtgtgcctgagagcagacggcccactgtggagcaagggctggggcagctctctaacctgctcaacagcaagctcttcctcaccaagttcatccacacgctggagagccagcgcacctt

SEQ ID NO: 31841 - DNA, 423 bp, Homo sapiens
  misc_feature (1)...(423): n = a,t,c or g
ncccttggagnncatnnnnnnnnnnnnnnnnnnnnnnnnnnnnnnnnnnnnnnnnnnnnnnnnnnnnnnnnnnnnnnnnnnggcacgagagaattcacacactggacaacacaaaaatcattatgtctagcatctgatcaaacatttctagatgcgaagaaacaggaaaatatgacccataaacaggggaaactttacccaatagaaatacatcaaaatatgaccgagaaattgaaattaacaaacaaaaacttgaaaatcactattataaatgtttaagagctaaatgaaaacatgaatataataaagagacatggaaattataaaaaaaaatctctggaactgaaatagatatttgaaatttagaacaatcactgtgtgtacataataacagattagacactgaagaagttaagatcaagg

SEQ ID NO: 31842 - DNA, 444 bp, Homo sapiens
  misc_feature (1)...(444): n = a,t,c or g
gctnccgcctttgaancccttnctctttgaatncccttnnnnnnnnnnnnnnnnnnnnnnnnnnnnnnnnnnnnnnnnnnnnnnnnnnnnnnnnnnnnnnnnnnggcacgagaactggaaggatagagtcgcttgtgcaaagagaacatggaagagctccaggcggagaagatgacaggagaaaagaacacgaacgaaagggttggatgtattccagaaccgaaaaccaggccggcgtggatggccgggaggaggaagaggcacctattgtgagctgggaggagaggaaggcagaggtccctgctgcacacggcaacagtcgcatggcgccaacagaaatgagtggccgttaagtccaaataaagaaacacaacaccaatttgaactacatttgagtcaatttatgaaaaaattacatatttcatgttcaagtgcagagagttt

SEQ ID NO: 31843 - DNA, 423 bp, Homo sapiens
  misc_feature (1)...(423): n = a,t,c or g
nnnnnnnnnnnnnnnnnnnnnnnnnnnnnnnnnnnnnnnnnnnnnnnnnnnnnnnnnnnnnnnnnnnnnnggcacgagtttttttttaaataatgagaaactaagagaggctgcatcacttgcttaagtgatacaggtggtgaagctggatttaaacctagatcccactcactttgaaacagccacttcccaaataatataccctctacccctcaaaaaccaaggcaattcctttaaaattattaacttaatcatccagaaagtaccctcaatggttagtcatggagtttaaaaagtcctcaactgaaataaattactgttagactagtagccaattttaaggtccttatgaaacacaacttttgaggagaactggtcttttggaatttggtcttggtgaggcaggagtgggaagaggaggga

SEQ ID NO: 31844 - DNA, 436 bp, Homo sapiens
  misc_feature (1)...(436): n = a,t,c or g
gaaacncnnnnnnnnnnnnnnnnnnnnnnnnnnnnnnnnnnnnnnnnnnnnnnnnnnnnnnnnnnnnnnnnnnggcacgagctcaacaagacggccaatgggaacgtggaggccaaagtggtgtgcttctaccggaggcgggacatctccagcaccctcatcgccctggccgacaagcacgcaaccctgtcagtctgctataaggccggaccgggggcggacaacggcgaggaaggggaaatagaagaggaaatggagaatccggaaatggtggacctgcccgagaaactaaagcaccagctgcggcatcgggagctgttcctctcccggcagctggagtctctgcccgccacgcacatcaggggcaagtgcagcgtcaccctgctcaacgagaccgagtcgctcaagtcctacctggagcgggaggatttcttct

SEQ ID NO: 31845 - DNA, 437 bp, Homo sapiens
  misc_feature (1)...(437): n = a,t,c or g
tttgannnnttggaaanccnnnnnnnnnnnnnnnnnnnnnnnnnnnnnnnnnnnnnnnnnnnnnnnnnnnnnnnnnnnnnnnnnnggcacgagcggcacgagcctgattcaccactttggtttactgttgccaaggcatccagagctaacctgcctttataataacctccacaacatttttcctggactaaagccattcgtaaaattagaaattcatttgcccttctaaaaagatctgctatttttattctctgattcagctcaaaatgggtattacctatgaacatctggttaatgcgatttcctccttcctaaagtgtaggtgcaaaggagattcacaagagctgggcggtgcctttgagaatttaaacgtcagagttttgccatcatgaaantatatgtcgaaatgaagancctatcagaanncaaacatgttc

SEQ ID NO: 31846 - DNA, 431 bp, Homo sapiens
  misc_feature (1)...(431): n = a,t,c or g
aacccttnangacancgattacgaatttaatacgactcnnnnnnnnnnnnnnnnnnnnnnnnnnnnnnnnnnggcacgagaactggaaacagtgagccaactctgtgatgtaagcctctcagcagggagatctgtgcaattcatgcattacaaatgcacaatcagggagctttctcatgacaaaaaggaatcaaatcctgtctattattgagaagtcctcctttaggtgagcagcaaagcgcaggcagctttgcaaagcagcagcatgctgttagcaaggtctggaaggtcacacctctggataggatgtttatcatgatacaaacatataaactaacaccatggataagcaattgattcttcaaagaagagcctttctcatgaaaatcctgaaataatatatggagtttagggggaatgaacagaacctg

SEQ ID NO: 31847 - DNA, 431 bp, Homo sapiens
  misc_feature (1)...(431): n = a,t,c or g
tttganaccgctanttngagatcccnnnnnnnnnnnnnnnnnnnnnnnnnnnnnnnnnnnnnnnnnnnnnnnnnnnggcacgannnnnnnnnnnnnnnnnnnnnnnnnnnnnnnnnnnnnnnnnnnnnnnnnnnnnnnnnnnnnnnnnnnnnnnnnnnnnnnnnnnnnnnnnnnnnnnnnnnnnnnnnnnnnnnnnnnnnnnnnnnnnnnnnnnnnnnnnnnnnnnnnnnnnnnnnnnnnnnnnnnnnnnnnnnnnnnnnnnnnnnnnnnnnnnnnnnnnnnnnnnnnnnnnnnnnnnnnnnnnnnnnnnnnnnnnnnnnnnnnnnnnnncgtggcatcgtgcctggtcataactctaaaattaaactagaatttaaaaagaaaaattacttagagcaaagaaatgatcacatgtcattattagaaatgag

SEQ ID NO: 31848 - DNA, 412 bp, Homo sapiens
  misc_feature (1)...(412): n = a,t,c or g
ttgannacancttgatttgattcnnnnnnnnnnnnnnnnnnnnnnnnnnnnnnnnnnnnnnnnnnnnnnnnnnnggcacgaggctcggcgtgggactaactaagcagagatattttacctcctgaaagtggcaattnnnnnnnnnnnnnnnnnnnnnnnnnnnnnnnnnnnnnnnnnnnnnnnnnnnnnnnnnnnnnnnnnnnnnnnnnnnnnnnnnnnnnnnnnnnnnnnnnnnnnnnnnnnnnnnnnnnnnnnnnnnnnnnnnnnnnnnnnnnnnnnnnnnnnnnnnnnnnnnnnnnnnnnnnnnnggtngncaaagtaaaggcnggcncttttccccagcaaaaaaannttgnggaaaanggggagaatnttgggnaaagncntgnngnagggtnttgatcaaagggcc

SEQ ID NO: 31849 - DNA, 424 bp, Homo sapiens
  misc_feature (1)...(424): n = a,t,c or g
ntttgannacnnnnnnnnnnnnnnnnnnnnnnnnnnnnnnnnnnnnnnnnnnnnnnnnnnnnnnnnnnnnnnnnnnnnnnggcacgagattttaacaactggcatggtcatagcagtgtgtatcagctaatctcattcatgacttttattatttttcagagcttttggactcttaattttgtactagggaggcatcatgagaaagcatgtgtttagaatcagaccttgggttcacagtttgattctgcccctcactagcggaaagatcttgagcaagttccctactgcataatggaaaatagaaaggtgcccacctcatgcaattgatgtacaaagtagacgtgacactgattgtaagggtgctttgtgcatgttaagactaaacaagcagcagtgaaaccacacgtaacaaaaggaaaacatt

SEQ ID NO: 31850 - DNA, 425 bp, Homo sapiens
  misc_feature (1)...(425): n = a,t,c or g
ttganacttnannnnnnnnnnnnnnnnnnnnnnnnnnnnnnnnnnnnnnnnnnnnnnnnnnnnnnnnnnnnnnnnggcacgagcgcgcggtcagctgttggcggtgcagggaggaggacgccggggctcgccttccctcctctgccgccgctgccgccatgattccggtgtcgctggtggtggtggtggtgggtggctggactgtcgtctacctgaccgacttggtgctgaagtcatctgtctattttaaacattcttatgaagactggctggaaaacaacggactgagcatctcccctttccacataagatggcaaactgctgttttcaatcgtgccttttacagttggggacggcggaaagcaaggatgctttaccagtggttcaattttggaatggtgtttggcgtaattgccatgtttagc

SEQ ID NO: 31851 - DNA, 424 bp, Homo sapiens
  misc_feature (1)...(424): n = a,t,c or g
aanactttgaanacctnnnnnnnnnnnnnnnnnnnnnnnnnnnnnnnnnnnnnnnnnnnnnnnnnnnnnnnnnnnnnnnnnnnggcacgagatccgcagagccatcctgtgcaaaggaaggagctaggctgtgcgccctgggcgtcatgatccttctgcgggcctccgaagtgcggcagctgcttcacaataagttcgtggtcatcctgggggactctgtgcatagggcagtatacaaggacctggtgcttctgctgcagaaggaccgcctgctcactcccgggcagcttagagcaaggggggagctgaacttcgaacaagatgagctggtggacggaggccagcggggccacatgcacaacggccttaactaccgtgaggtccgcgagttccgctccgaccaccatctggtacgtttttactt

SEQ ID NO: 31852 - DNA, 443 bp, Homo sapiens
  misc_feature (1)...(443): n = a,t,c or g
ntttggannaccnnnnnnnnnnnnnnnnnnnnnnnnnnnnnnnnnnnnnnnnnnnnnnnnnnnnnnnnnnnnnnnnnnnggcacgagattgggaaagtaaaaatctcgaaattacttgaaaagtggacaatattaagggactgtatcaataaaaattttgatccttgtaaattacgttttaaaaagatgtttcttttaaaaactaagctctaatttaaaattacatcaattagaactgtaagaaatctcttgatttcagtgctggattattctttgcagaaaatttgagaagcaatgggcatcctgaagctgcaagtatttctcattgtgctctctgttgcattgaaccatctgaaagctacacccattgaaagtcatcaggtggaaaagcggaaatgcaacactgccacatgtgcaacgcagcgcctggcaaattttttagt

SEQ ID NO: 31853 - DNA, 407 bp, Homo sapiens
  misc_feature (1)...(407): n = a,t,c or g
aanacnnnnnnnnnnnnnnnnnnnnnnnnnnnnnnnnnnnnnnnnnnnnnnnnnnnnnnnnnnnnnnnnnnnnnggcacgagcacatgtgagagtcatctgtaatgctttctgattctcacagtaactctatagtattacatatccctattttacagacaaagatagtcaagaagattaagttctttactgtgtcaggaaaagagacctcaaacccaagttcgagaattagaactttttctgttatatgttactgactcattaaagtttaaatgtccttaaaatttcttaagaattgccctaagtagatgattctcatctcaccttctaggtacactgatttcctctataatatttagaaacaggtacattttgttttgttttaattttaaaacatccgagatgggc

SEQ ID NO: 31854 - DNA, 412 bp, Homo sapiens
  misc_feature (1)...(412): n = a,t,c or g
annacnnnnnnnnnnnnnnnnnnnnnnnnnnnnnnnnnnnnnnnnnnnnnnnnnnnnnnnnnnnnnnnnnnnnnggcacgagatgaagagttgtcttatccctgtcccccacccatctggtgtctttccccacaggcaaccagtattagaatcttgtgggtcctttataaatgaccctatgtaagtaagtagacatctgtgtagtcttccatgccactaccactccttttgtttacgcaaaagctggcctacgttataatattttttgcaccttgcatttgtttttgtttaatactatattttggagatcattctatatctgtacataattaactttgttgttctttttttatgggctgtaacatggtcttatatggatgtaccatgatttatttagtccaactcctattag

SEQ ID NO: 31855 - DNA, 412 bp, Homo sapiens
  misc_feature (1)...(412): n = a,t,c or g
tggaanaccttcttnnnnnnnnnnnnnnnnnnnnnnnnnnnnnnnnnnnnnnnnnnnnnnnnnnnnnnnnnnnnnnnggcacgagagccaggtatggtggtgcgtgnnnnnnnnnnnnnnnnnnnnnnnnnnnnnnnnnccacatggctaatttnnnnnnnnnnnnnnnnnnnnnnnnnnnnnnnnnnnnnnnnnnnnnnnnnnnnnnnnnnnnnnnnnnnnnnnnnnnnnnnnnnnnnnnnnnnnnnnnnnnnnnnnnnnnnnnnnnnnnnnnnnnnnnnnnnnnnnnnnnnnnnnnnnnnnnnnnaaaaacnttttttnaanccntgggaaantnaaacntgtttgnancccaaattnggcccanggncctttaggggtttaaatcaaaatntnangttnnnanagtttt

SEQ ID NO: 31856 - DNA, 412 bp, Homo sapiens
  misc_feature (1)...(412): n = a,t,c or g
aanaccttnttgacatgnttacgaatttaatacnnnnnnnnnnnnnnnnnnnnnnnnnnnnnnnnnnnnnnnnnggcacgagcaacattgcatttttatgaatacaacgtggaaaattaatctaattaacatatttatcaccttaaataacttatggtgaggatatttgaaatgtactcagcaaatttgcagtgcacagtacactaatagctatatttaacatgctgtgcaggtgtcattagtttttgaagtgcattttacatattgtgaaatactcagatcacaaatatattattcagcgagttttgatgactgatttccccagtctcnnnnnnnnnnnnnnnnnnnnnnnnnnnnnnnnnnnnnnnnnnnnnnnnnnnnnnnnnnnnnnnnnnnnnnnnnnnnnnnnnnn

SEQ ID NO: 31857 - DNA, 413 bp, Homo sapiens
  misc_feature (1)...(413): n = a,t,c or g
aanacnnnnnnnnnnnnnnnnnnnnnnnnnnnnnnnnnnnnnnnnnnnnnnnnnnnnnnnnnnnnnnnnnnnnnggcacgagcggcacgagcaggatgaagtcagcatgaggcagtactgagcccacaggcagggaaaataggagaggcagatggagcaggaggccaggcagtgcctggctccacctttggcagaatttcatctggacctcgttggattgcttatctttgcattttctagacatcctttatctttttaacttattggtcaatggcatatatatattgcaccatgcagctcaagcaaccaacccttttgtacttttttatttagaaaaaaagtaagactctgttgggaggcttttactgtctgctcttttctgattcatttcaactttatttaatctatacaag

SEQ ID NO: 31858 - DNA, 415 bp, Homo sapiens
  misc_feature (1)...(415): n = a,t,c or g
tttgatnccttnttgacatgcctacgaatttaatacgactcnnnnnnnnnnnnnnnnnnnnnnnnnnnnnnnnnnggcacgagataaaatagaaaacactagaagtgatttttttttgtgataatataaacctatgataaaagttttttgaaaatgtttttttgaaaatatttttgggggctttgcaagtaagaacatttgaaaactctcttctagcctacaaatgattttggaagagaatgattatgctaaatctgattttattagaaatgagaaaagattaaaaattatttaaacctagtaggtaaaaagctactccactaccttggagatcactttaattgtctggaatacgtcaatggaatatcagtcaaacacaaaataagagactgccttcatcatagtacatgaaaag

SEQ ID NO: 31859 - DNA, 411 bp, Homo sapiens
  misc_feature (1)...(411): n = a,t,c or g
aanaccttttnnnnnnnnnnnnnnnnnnnnnnnnnnnnnnnnnnnnnnnnnnnnnnnnnnnnnnnnnnnnnnnggcacgaggagtcgtttaagcttcttgtgcctcagttttcatatctgcaaaatgaatgaattggactgggtaatacctggtgttgctttaagattctgtnnnnnnnnnnnnnnnnnnnnnnnnnnnnnnnnnnnnnnnnnnnnnnnnnnnnnnnnnnnnnnnnnnnnnnnnnnnnnnnnnnnnnnnnnnnnnnnnnnnnnnnnnnnnnnnnnnnnnnnnnnnnnnnnnnnnnnnnnnnnnnnnnnnnnnnnnnnnnnnnnnnnnnnnnnnnnnnnnnnnnnnnnnnnnnnnnnnnnnnnnnnnnnnnnnnnnnnnnnnnnnnnnnnnnnnnnnnnnnn

SEQ ID NO: 31860 - DNA, 412 bp, Homo sapiens
  misc_feature (1)...(412): n = a,t,c or g
aanaccagctttgacatgnttacgaatttaatacnnnnnnnnnnnnnnnnnnnnnnnnnnnnnnnnnnnnnnnnnggcacgagatccacttaccattaggatattatgcactactgcttcttgtgtgattcaattcaattagttgtaatagcaggaagtaacatgaattgtcagatgtttgacaaacgttttccagttttgagggccaggtttaggaggattattttatataagcagtggtgatggttacttttgatgttggaagcattcttttnnnnnnnnnnnnnnnnnnnnnnnnnnnnnnnnnnnnnnnnnnnnnnnnnnnnnnnnnnnnnnnnnnnnnnnnnnnnnnnnnnnnnnnnnnnnnnnnnnnnnnnnnnnnnnnnnnnnnnnnnnnnnnnnnnnnnnnnnn

SEQ ID NO: 31861 - DNA, 452 bp, Homo sapiens
  misc_feature (1)...(452): n = a,t,c or g
ttganaccctttgaatgacacgaatttaatacgactcnnnnnnnnnnnnnnnnnnnnnnnnnnnnnnnnnnggcacgagagaagaagaaaccctgagccattaatgtgtctcgtaacttgaggaagttcatgaattctctgggcttcatccattaagattcatccttatgctcctgcaagtttcttatatttatgtatttctattctgatttctgaaatgataacctagtagtgtctgatgaagttttttcatgcttattttattctttgtcacagatgaaagaagaataggactaattggggctaagatgaattaatgtaagtgtcagatactaggcaggtgttagggatgaaatgatgaatgaggcatggacctgttcctcagagtttatggcccagtagacataattgtattaggactttctgcagttgacatttgcataaagctgact

SEQ ID NO: 31862 - DNA, 461 bp, Homo sapiens
  misc_feature (1)...(461): n = a,t,c or g
aancccccctttgaaatacccgtnnnnnnnnnnnnnnnnnnnnnnnnnnnnnnnnnnnnnnnnnnnnnnnnnnnnnnnnnnnnnnnnnggcacgaggtgaagcaaaagcgaagggtatagcaggagtgggggtgggagggacgcaagatctagtcctgtctttgcaattaactttctgtgaaaacttggaaacaagtcatcgaagctctttggacctcatttggaaatggaagagattggaacagatggctcctaaagcttcttccagctcatattctatcagtttataaattctactttgtagttgtagagaatgcaatgtcattatattctgtaattatggtattacaaggatgaactaaacacttaaaaaaatcagcacagtgccaatttagcaaatccgttagaaggaaggcaatttaggcttaaagagcactcacctgtgccaggctccatcccag

SEQ ID NO: 31863 - DNA, 447 bp, Homo sapiens
  misc_feature (1)...(447): n = a,t,c or g
ttggacaccccnntttncatgaccacgaatttaatacgactcnnnnnnnnnnnnnnnnnnnnnnnnnnnnnnnnnnggcacgagtgaagacatgtttttaatatgttttaagatttgtctttgtaatgcatctttgtaaggttaccacaactaatgtattttattactcttagggaaatttcagtgtggtacgtgggatgctaaataattaaagctaaatagttaacatgtaggaaacaaaataaatacatataattttgttttaaaatttaaatatgtaaaatctatgtttgcactgctttgtatttagcagatattcccccagttaatgtgtgaatcagttctttgaaattcaagctttatcttaaataattcttctttattaggtcatttcagtgcattctttacattatttcctctttttttttttaaacngnccnaaagctg

SEQ ID NO: 31864 - DNA, 447 bp, Homo sapiens
  misc_feature (1)...(447): n = a,t,c or g
ggananccgtnnnnnnnnnnnnnnnnnnnnnnnnnnnnnnnnnnnnnnnnnnnnnnnnnnnnnnnnnnnnnnnnnggcacgagtgcttatcaggatctaacccaaagaagtaatcagatgttcagggaaagattatctatagggatattcatagtggtattatttatagtagcaaaaattaatgattatcttaaatgcagacacatatttataataatctttatatatttagtttaacatttgatatattgctcttatcacattttgtggttaatagtaatacaggttaattttctatatcttagtatttatcatcaaaaacattctataagcaaataatttaaaaagttaggtaactaactttctttccataaattaatattggtctacatgacaaagctcacagaaccgctaacttgctgcaggggaaggggtgatttcctctca

SEQ ID NO: 31865 - DNA, 458 bp, Homo sapiens
  misc_feature (1)...(458): n = a,t,c or g
tttgaacacccctnttgcatgaccacgaatttaatacnnnnnnnnnnnnnnnnnnnnnnnnnnnnnnnnnnnnnnnnnggcacgagacttttagagttgagagaagtttaattgtagtttaaagtttcattattagacagtagtcttaaacaattcccaagaagctaaaatgtgggattaacattttactttcattgtaattcatatcctaaatataaatgttaatataaattataaagtttctgaatttcctttcataaaactgggttctttgggttcttagttattttggatgaaacaaggggagggctagttggaaatgatggaacatttaaccactgtcaccacagttagtcacaattggtacatgcagaattaataaagcagcttgccttggttttatttcttgtgaggtcagatgacagtggatgatattgacttgggaagatggccagaac

SEQ ID NO: 31866 - DNA, 452 bp, Homo sapiens
  misc_feature (1)...(452): n = a,t,c or g
tttgaanacccgtnnnnnnnnnnnnnnnnnnnnnnnnnnnnnnnnnnnnnnnnnnnnnnnnnnnnnnnnnnnnnnnnnggcacgagggaagactacaggaggagcatgtttagggtagggaaatcaggacatctctgctgtggtgttgttgagatgttttttagcccccaaataatgtgaatgtcaagtgagcagttggagttcagaagcatcagggctgaagatgtaaagtcacaagtcattagcatgtaggtggggttagatgcgattcccacaaaggagtagagctgtagaagagaacaagagaacaggactgtaccacaaacttaccaggtagcactgcttacattcccactctacagataaggaaaacaagcttaggtggtttcagtgattggcccaaggttctaggaaacagtagcactgggattgcacccaggcagtctgactct

SEQ ID NO: 31867 - DNA, 456 bp, Homo sapiens
  misc_feature (1)...(456): n = a,t,c or g
tttganaccctttttgatgacnnnnnnnnnnnnnnnnnnnnnnnnnnnnnnnnnnnnnnnnnnnnnnnnnnnnnggcacgagtaagttgagacttggaggatgagaaggagctagtcaggccgagaggagggagaagtgtgttctggccacatggaacatctgagagtgaacgccctgagacatgttcaaggacctggagaaggcttactcatttcaggtactgtgctgagcgcattgtgtgcattatgtcacttaattatcacaacaaccctgtgagatagatagatactactagttatccttacattttcggtagggaccctaaggaaagaggcattaaataagttgccaagatcacagctagtcagtcaatgnatatcaacatagatttcaaagcttatattccaaccttctgtcttattgcctcctaattaaaagatcactataaattattt

SEQ ID NO: 31868 - DNA, 453 bp, Homo sapiens
  misc_feature (1)...(453): n = a,t,c or g
accnnnnnnnnnnnnnnnnnnnnnnnnnnnnnnnnnnnnnnnnnnnnnnnnnnnnnnnnnnnnnnnnnnnggcacgagacacgtccacaccatcataccannnnnnnnnnnnnnnnnnnnnnnnnnnnnnnnnnnnnnnnnnnnnnnnnnnnnnnnnnnnnnnnnnnnnnnnnnnnnnnnnnnnnnnnnnnnnnnnnnnnnnnnnnnnnnnnnnnnnnnnnnnnnnnnnnnnnnnnnnntctgtttttccctcgtgtctattttgttcacagctgtatccccagtgcctaaaacaatacctgatgcacacaaggcaaccagtaaatgtgtgtaaaattaacgaacagcaaatgctattgttaccatgcccattttgcagatggagaaaccaagagcacagaggtgttgtcacttctccaaggtcaaacagtcactaagtgcagaagctcagat

SEQ ID NO: 31869 - DNA, 451 bp, Homo sapiens
  misc_feature (1)...(451): n = a,t,c or g
anaccccttgtcnnnnnnnnnnnnnnnnnnnnnnnnnnnnnnnnnnnnnnnnnnnnnnnnnnnnnnnnnnggcacgagagactttaaagagtttcctgaagtctagattttgctgatcagtatatacagcattttcatctcccctcagaaacacctgggtgtttttgcatttgtctgtctggggacttcatgggtttcactggtttcaggctagtttttaatgccagattctgagtttggggtctgtaaatcatctaggtagtatcaatttggactaggtacccatgtgtgtcctggactggaggtttcagtttttcataggagactgctaaagctagaggagatgttctagacttctttaggcaggtagttagacttctttaggcaggtagttaatctccaggtctctttgcttacaggatatgctgcctcagctcctttctggtctttg

SEQ ID NO: 31870 - DNA, 449 bp, Homo sapiens
  misc_feature (1)...(449): n = a,t,c or g
ctttggacaccnttatgacnnnnnnnnnnnnnnnnnnnnnnnnnnnnnnnnnnnnnnnnnnnnnnnnnnnnnnnnnnggcacgaggtctctccaagtagcttaaattctctgagcctgaggcatctcctaggaatgaagacaccctgtaagctcaacaccattattcatgcctaagacaactacaccaattccccagcttttgaatgaccataggaattatcagcagaacaggacactttggaaagtgaatgaggtgggattaataattatgcggaaacagcaggtgtgagccagaaccatcccaggcaagctcgtggtcactttatgtgatatcaactccactccgttcctatctagatttccccactgtccccagcacatctttccaaccagcagccaacaacggtcgggctctgcatttgtttgcgagcctgtgttgctcatttat

SEQ ID NO: 31871 - DNA, 433 bp, Homo sapiens
  misc_feature (1)...(433): n = a,t,c or g
acccnntnnnnnnntttgaanacnnnnnnnnnnnnnnnnnnnnnnnnnnnnnnnnnnnnnnnnnnnnnnnnnnnnnnnnnnnnnnnnnnnnnggcacgagctgaaaggagcaaggctccatggagaaatggcagattccagagctggggaagggaaagttcagaatgaacttggaacatcttgtgcttgaaagtaaggcagtgctcaaagaatggtggggacgtgttcaaaggacatggaaaccagattgaagggacttccactgaccaaacttgacatggnnnnnnnnnnnnnnnnnnnnnnnnnnnnnnnnnnnnnnnnnnnnnnnnnnnncagagggaatcataattccaaactgatataaattagtacgtgaaaaaaattgaaagtttgatgagggactggatgtttacattgttgcaaagaacccctg

SEQ ID NO: 31872 - DNA, 425 bp, Homo sapiens
  misc_feature (1)...(425): n = a,t,c or g
anaccnnnnnnnnnnnnnnnnnnnnnnnnnnnnnnnnnnnnnnnnnnnnnnnnnnnnnnnnnnnnnnnnnnnggcacgagagaaagggcttgtctcagacccatcgagcttttgcccagtttttccctacaaattgtgaagcagattcacagaggacttgcttcatggttggttcattcatatgcccctcagcaccgacaggctgaaattaacataaaaaccaaaacagaaccacttcctgtcctgtggatatccttactgttgagttattgcaggtgtttagcttcttaaccattgcagaagctcccgggtagattgtggaggaagctgccctccaggcctttcctgccccttggcagacaacccgagccattgttattttaatccatttcacacatcagattttggctgaagattttgtttgg

SEQ ID NO: 31873 - DNA, 426 bp, Homo sapiens
  misc_feature (1)...(426): n = a,t,c or g
ccnnnnnnnnncttganacagcttgacnnnnnnnnnnnnnnnnnnnnnnnnnnnnnnnnnnnnnnnnnnnnnnnnnnnnnnnnnnggcacgagccgatgagcatctgccatgtatcaggcactgcgcaatgttccttacataccacgatcccatttaaccctcaaaaaacactgcagagggctatcactgccttccttttacatacgaaaaaacagacttaacagttgctcacgggaagctgaaccaagaatcaaaacaaaagactttcgggcctcaaagactgcactgtttccactgcacaaagttgtctgcactgtgagcaacagaggaggggaaaggggactaaaaaccaaaaccaaaaatccaataaataaaacaaaataaatgaactgagcattcaacacaaaaagttataaggagcagag

SEQ ID NO: 31874 - DNA, 425 bp, Homo sapiens
  misc_feature (1)...(425): n = a,t,c or g
anaacngctnnnnnnnnnnnnnnnnnnnnnnnnnnnnnnnnnnnnnnnnnnnnnnnnnnnnnnnnnnnnnnnggcacgagcnnnnnnnnnnnnnnnnnnnnnnnnnnnnnnnnnnnnnacnnnnnnnnnnnnnnnnnnnnnnnnnnnnnnnnnnnnnnnnnnnnnnnnnnnnnagctatgacatagtagccaacagggtttcctagctcatctttgctcagtaccatttcttctaactagaatgtctttaaactgccaccaaatcaaaaaagagtcccgattggagttccaaagacaggcgtctagtccccgctctgcctcttactagcagcatgagacctggggcctatggcccccttctgttgggccctcagtttcctcatctgtttatagggaacaagactctctccccgcactggcagctt

SEQ ID NO: 31875 - DNA, 429 bp, Homo sapiens
  misc_feature (1)...(429): n = a,t,c or g
ttganacccgcttgacatgatttgcaaatccnnnnnnnnnnnnnnnnnnnnnnnnnnnnnnnnnnnnnnnnnnnnnggcacgagtttttgcatatgtgtttatgagggatatatctctgtagttttcttccgtacgatatcattttcagattttattgtgtcagggtcaaattggaatcatgaatgtgttgagaaagttccattttctggaagaggctgcatagtaataatattatctcatttttaaatgtttcatagaatttgcaaattaattcatctggggcagaagtcttacttataggaaggttttgaacattcaaattctttaatagataaggcaattaaggttttgtctttcttcctgagcaagatatggtagtttctgtctgtcagcaaatttatccatttcatctaggttgttgaatttat

SEQ ID NO: 31876 - DNA, 471 bp, Homo sapiens
  misc_feature (1)...(471): n = a,t,c or g
nttggannnnnnnnnnnnnnnnnnnnnnnnnnnnnnnnnnnnnnnnnnnnnnnnnnnnnnnnnnnnnnnnnnnnnnnnggcacgaggaatctttctctgaagaacttaatgaacacttgtcatttatttatatcaagcaaggccctataagccttatttctaggacttgtgcatttactatgcaactcctattctaaagtaggctttgtgcatgggaaggaagaatagatagggtttcaatcttatttgtggctttagggaagctgtacatccatcctctaagtgtgtacagacaggggctcaactctgaataaaagcaggtctctggcacacatgggatggggtgatactccctggcaatttcccaagcatctactagctggcacttttcaatttccatgacaatttgcctgcccttcacttaactgacatcagaacatttctctgctggctgctcccctgacctgaagg

SEQ ID NO: 31877 - DNA, 474 bp, Homo sapiens
  misc_feature (1)...(474): n = a,t,c or g
tttgaattccgttacnnnnnnnnnnnnnnnnnnnnnnnnnnnnnnnnnnnnnnnnnnnnnnnnnnnnnnnnnnnnnnggcacgagatggcatggttatagtactggcccttggtttgggaatcaactgaggctatgagcagcagatagagccccatgcaaaagtctgcaaaggagagattgcacatgagaaaacgaggcactgtaagtttgtaacgacttgtcaggagaacaaaaagaacagtcatgtttcccatgatggctagaatattaatcagccaaatcaggaccctaaggaagtcatagcccataatgtcttcacagggattaaaagcatctggttcaggagcacatcggggtgtcttgggtaagcagaaaccatattcatagtcccagccactcagttcactctcagcaagcatggaagaataactgtatgaagaattattggcttgaggtaagggattttctctgag

SEQ ID NO: 31878 - DNA, 474 bp, Homo sapiens
  misc_feature (1)...(474): n = a,t,c or g
ttgaanntccgnttnnnnnnnnnnnnnnnnnnnnnnnnnnnnnnnnnnnnnnnnnnnnnnnnnnnnnnnnnnnnnnggcacgagactatttagatatagatgaaaatagaactcccacctanagttttcnatgcatattttatgagtataatagtgccaggaatataggttgaattggattacaataaaatcattatcttttacgcctctgtcttgtgagtatttatgtgtactcttacatgtagtttatacatgagtgttacaaattaatgctaccaaaagcaagttgtaaaagtagtccagaattacattgtaaatgacttaagccatctaattaaaataaaatttcaatgtcttgaaataattcagtgaaggattagtgacttaaatttcatcgctgctctgaacatgaccttctctttgaatatattagaaaatggagcttaagagatcatcatttaaaaggtttattgg

SEQ ID NO: 31879 - DNA, 381 bp, Homo sapiens
  misc_feature (1)...(381): n = a,t,c or g
annnnnnnnnnnnnnnnnnnnnnnnnnnnnnnnnnnnnnnnnnnnnnnnnnnnnnnnnnnnnnnnnnnnnnnnggcacgagtacttatctatatgattgtaaataatacgctttcttgannnnnnnnnnnnnnnnnnnnnnnnnnnnnnnnnnnnnnnnnnnnnnnnnnnnnnnnnnnnnnnnnnnnnnnnnnnnnnnnnnnnnnnnnnnnnnnnnnnnnnnnnnnnnnnnnnnnnnnnnnnnnnnnnnnnnnnnnnnnnnnnnnnnnnaattttttttttttttnnaaangganncnccntttgtnnccagnccnaaatngcccatngccntcnaaantaggcaacanancaaaantttgtntnanaaaaaaaaaaaaaa

SEQ ID NO: 31880 - DNA, 437 bp, Homo sapiens
  misc_feature (1)...(437): n = a,t,c or g
acccntttnnnnnnnnnnnnnnnnnnnnnnnnnnnnnnnnnnnnnnnnnnnnnnnnnnnnnnnnnnnnnnnggcacgagagcaaccctacatgtatgagttcatgccagttagcttcatgatcatatgttattaaaactctctagcctatttggattttagcgtaatacattcttgtgctttcccaatggtctgaaacttctcaagctgctttcatcaatgatgtagagtcctgaagagacgcacagaaaaggacagggtcagacaaggtaatcatgaccaatagaatgggtcagggagcatttactatcttgcttcctcactctcaaggaattagcaattcattcattggttatttaacaagcacctatagtgcagcattgtatgccaggcactatactaagctctgctgataaatgctccttttgctaaggaatg

SEQ ID NO: 31881 - DNA, 433 bp, Homo sapiens
  misc_feature (1)...(433): n = a,t,c or g
ttganaccgttgaacacnnttgacnnnnnnnnnnnnnnnnnnnnnnnnnnnnnnnnnnnnnnnnnnnnnnnnnnnnnnnnnnggcacgaggacgcttttggcctggctggccgctgttttctgtcccactttttactcgggcctgcgtccgctgccgccgtccctcagtttgcccccggaggaggcagggcggccgtgccttctgccgtgcgcccgcgtggctgccaccgcccctccgaatcctccggggccgcagaggggttcgctacggagggaggtgggggccttcgggaggaggaggcggaggaggcggaggaggagggaaggaagatggcggccgtggaactagagtggatcccagagactctctataacaccgcatctccgctgtcgtggacaactacatccgctcccgccgagacatccgtccttg

SEQ ID NO: 31882 - DNA, 424 bp, Homo sapiens
  misc_feature (1)...(424): n = a,t,c or g
accgnnnnnnnnnnnnnnnnnnnnnnnnnnnnnnnnnnnnnnnnnnnnnnnnnnnnnnnnnnnnnnnnnnggcacgagcggcacgaggaaactgaagcccagaaagtcatataagtcctataaggaatcagtggcaaagctaggatgagtagaattctagaaggtcagacctagggctctctccctcccgtcaagctgctaatccagtgggttacaaactgtttggctgggcttcctggtgagctacagcctcccttcaaccagaacagctctacttttacgtacttcatattttgaagttttgtgtgattttctgtttgggagattgaggaggcaggaagctgttagaaatgtaataaagtcaaaaccactgagcaaaacccagccattacagttgggaacactcagacctacagggggaagt

SEQ ID NO: 31883 - DNA, 425 bp, Homo sapiens
  misc_feature (1)...(425): n = a,t,c or g
ttgaataccntttgaanaccncttgacnnnnnnnnnnnnnnnnnnnnnnnnnnnnnnnnnnnnnnnnnnnnnnnnnnnnnnnnnnggcacgagttcagatttgtcaaagtaaaactgctcttcatttgataaaatttaagtcacatagatacacaaatgtttcggcatatacagagcaatgttagaaaatggatgctgatctgtagagatctttgataataacagtcatctttttgtaataaattatttatttaacagaagtggcagacttttttcccccttaattccattaggcttctctgacaacacaaagaagtccataaagcaatattcttaacccacctgggacactagagcagattcccaaacacattctcaaggttcaaacctagtaaaatgtttattaaaaatccattatttcagga

SEQ ID NO: 31884 - DNA, 424 bp, Homo sapiens
  misc_feature (1)...(424): n = a,t,c or g
nacnnnnnnnnnnnnnnnnnnnnnnnnnnnnnnnnnnnnnnnnnnnnnnnnnnnnnnnnnnnnnnnnnnnnggcacgagaattcctcatccttaagtttacattttcggcaacatattgcttggaagaaggactgaaagagataaatgatgcagagaaaataactctttctaatcctcgagtttccagataattaatttaaataaactagataatttaattgagatttttatataaaactttagaaagtttaagaaatacctttttataagtttaaaaacaaacagaaatcttataagtttgataaatattgtgccaccccaacatctcatagcacttttaaacactttatcttatactcctattcagtaaggaggtgatgcatataattattccaatgttgcagatgaggagactcaggcaca

SEQ ID NO: 31885 - DNA, 423 bp, Homo sapiens
  misc_feature (1)...(423): n = a,t,c or g
ccnttgaanacagctatgacnnnnnnnnnnnnnnnnnnnnnnnnnnnnnnnnnnnnnnnnnnnnnnnnnnnnnnnnnnggcacgaggagctgaaaagttcctataaccgagtgtgggtagcctagcacaaggcagtactcacatgtttgtggtgatgctgatgtgaacgaacctactacacttccagtttgtataagagtatagcacnnnnnnnnnnnnnnnnnnnnnnnnnnnnnnnnnnnnnnnnnnnnnnnnnnnnnnnnnnnnnnnnnnnnnnnnnnnnnnnnnnnnnnnnnnnnnnnnnnnnnnacaaaactcaaatattcaaaaatatatatttgcaacatggcaaaacctnnnnnnnnnnnnnnnnnnnnnnnnnnnnnnnnnnnnnnnnnnnnnnnnnnnnnnnnnnnnnnnnnn

SEQ ID NO: 31886 - DNA, 423 bp, Homo sapiens
  misc_feature (1)...(423): n = a,t,c or g
ccntttgaanacagcttgacnnnnnnnnnnnnnnnnnnnnnnnnnnnnnnnnnnnnnnnnnnnnnnnnnnnnnnnnnnggcacgaggtgaggaagagggaggaaggggaggaaagaaatcaaggctgactcctgggcatgtgaatgtgaagtgtgtgtacacatgtgcacaccatgcttttgtcaatcagtctcctatatttggacatttaaataattcctaatgttttgtaattataaataatactgcaataaaatttgattcatttcccaaatcatacatatggataaactacaactctgattggatcaaagatttaactctaaaatattaaactatgcaggtactagaagaaaagatgcgagaattcctctttaatctgggtgtaaagagggttttctaactaggactttcctgggcaca

SEQ ID NO: 31887 - DNA, 429 bp, Homo sapiens
  misc_feature (1)...(429): n = a,t,c or g
gaanaccnttggaanaccancttgacnnnnnnnnnnnnnnnnnnnnnnnnnnnnnnnnnnnnnnnnnnnnnnnnnnnnnnnnnnggcacgaggtatttcaatgactaatttattcatcattgatttcttgtatcccaaaaagtggatgatataggaaatgagaacaagctatccaacttctagtctaccaatttttctgtcatcccaccaaagctgcaagatgttagtttccacttcagttcttaatttaacgttgtacaatgttattttttaaaattaaaaataatgaggacttaagagattagattcaagggatacctggtttgatcaacagaagtgagcggagaaagcagtaaagatacctcctctagactggagcagccagggctaatgagtatgtagttttcttaccataatgctgtgattgaa

SEQ ID NO: 31888 - DNA, 456 bp, Homo sapiens
  misc_feature (1)...(456): n = a,t,c or g
tttgaaattggaatgccnnnnnnnnnnnnnnnnnnnnnnnnnnnnnnnnnnnnnnnnnnnnnnnnnnnnnnnnnnggcacgagatccgtttgctttgaaagatcacacaccaggatacatacagagatgtgacccggatggatggacctttgcctcacaatcagggtagaagcctctggttttcttatttctttgtcctcctctgtggtgtgacacaggttcaggaggaggtacccagacacagaagagatgctttccctgtgcaggcttgctgacagtcttgcccaccactcctggcctcctccctctacatgtccacattcgctgctctgaccctgagttggacccagctaggaattgtgacttcagttactagtatttcctctgagcctctagtcatggtcatgggctaatctgtatatgaaaacccacttgaaagaaatcccagtgctgaaa

SEQ ID NO: 31889 - DNA, 451 bp, Homo sapiens
  misc_feature (1)...(451): n = a,t,c or g
gaaaaccgntatgacatgattacgaatttaatacnnnnnnnnnnnnnnnnnnnnnnnnnnnnnnnnnnnnnnnnnggcacgagaaacatttaggattgttatatccttttgataatggactcttctattatgaaaagataatatactgtgggtttataacatatgtaagtatgagtaacatattatcagaaggggagaaatggaagataacttaggcatcttatttttaagcatagttttccctttgtttctgcattagatgatttacctgaaatgtcattcaatttaacttactctccatcctcacccgcccagctttggttatgaggcagtagaaagaaatgatctgcctgtggttttctagaaatacgaaagttgagtccttaaggctacacagaangaaagtacctccccagggcttnacccttcccatcctttcagcaggcttttt

SEQ ID NO: 31890 - DNA, 457 bp, Homo sapiens
  misc_feature (1)...(457): n = a,t,c or g
tttgganatcntnnnnnnnnnnnnnnnnnnnnnnnnnnnnnnnnnnnnnnnnnnnnnnnnnnnnnnnnnnnnnnnnnggcacgagggctggtcacaactccggcggcccaaggagctgctcggttcacccacaaggaatgagagctgcctgcctgctgctgcttggagagccccagacagtcgcttgaagaggtgtgtggatgtctcctagatcttgacttgctcctgaggaaatattgtgtgactgagtttcctgttatactgctctccaatccatcatgaaccagccagagtctgccaacgatcctgaacccctgtgtgcagtgtgtggccaagcccactccttggaggaaaaccacttctacagctatccagaggaagtggatgatgacctcatctgcacatctgcctgcaggctttgctggaccccctggacactccgtgtggacacacctac

SEQ ID NO: 31891 - DNA, 443 bp, Homo sapiens
  misc_feature (1)...(443): n = a,t,c or g
tttgaanttccanctacnannnnnnnnnnnnnnnnnnnnnnnnnnnnnnnnnnnnnnnnnnnnnnnnnnnnnnnnnnnnggcacgagggctggggcaggagctatagggagttaaggaatgatgatagggaagttggagccaccaccgtggactgggccttgtcactggaggtcgtaggcagtggctcatcaccctggtagggctgataggggctttcagggaggctggttagctccctgcactctggctctttactggcttactgtttagctcctcccacctcgaggctcttcttcctgccaccctttgggctcagaggagggtggctttttttcgaggtgagccatgttgtagacacatgatacgctctgcgtctgctctactgagtactttctgcaggggcctgttaaggacgaggcctncccagccctgccggtgcaag

SEQ ID NO: 31892 - DNA, 445 bp, Homo sapiens
  misc_feature (1)...(445): n = a,t,c or g
tttggatctnagagcccttntgtannnnnnnnnnnnnnnnnnnnnnnnnnnnnnnnnnnnnnnnnnnnnnnnnnnnnnnnnnnnnggcacgagtcatgttacagccaggaaatagcagctcagagaagttaagtgacatgcccaaggtcacagattgttcagaggtaaagcttggatttgaacccacatctccagactctaaatttagctccttaccacagttgcctccctgttactatgttttccctttgtagtattttataaacccttggattaagttggtagtaattttagtacaactggcaactgcttgcttagtgccgagtcattggtgcctctctctgtccttaataggccaagaaacctactacagcagtgcttgtgacctgtctggtgctggcagggtccctctcatccttgggcagancccanttgtggngagggg

SEQ ID NO: 31893 - DNA, 440 bp, Homo sapiens
  misc_feature (1)...(440): n = a,t,c or g
antacnnnnnnnnnnnnnnnnnnnnnnnnnnnnnnnnnnnnnnnnnnnnnnnnnnnnnnnnnnnnnnnnnnnnnggcacgagttttttttttcaaaacccgcttatttctgtaaataaagataaatgtatgtataaatccaacttatacattcaaagcagcaaaagcagacccaaaggatttggtatttaaattatcccttgctctacgggcttacattaataattagggaacaaagaaaataaactctcaagagaaagttagtaatcagcaccatatataacaaaaagcaaagtactttttgatgttcaaatgaccttgtcttcctcaaaggccacctgttcattatgattcaacaatacattatcaacagcatgcttacctttataaactataaaagaatgttgaaaccctctaaacaagtagttttgnattcaaacc

SEQ ID NO: 31894 - DNA, 435 bp, Homo sapiens
  misc_feature (1)...(435): n = a,t,c or g
anttccnnnnnnnnnnnnnnnnnnnnnnnnnnnnnnnnnnnnnnnnnnnnnnnnnnnnnnnnnnnnnnnnnnnnggcacgaggagaaccatgttcaataccctgggacaaaccgcaatttactaagtgcctgccaagccctgtggggatctccacctggagtccaaggccttggctgagctctccagcttcgagcgcctccacttcccctcttccaacactcctggccccttggttctctggtgacacagaaccccctgtagtctctggaatgcatgagctatttcacctccaggtctttgcatatgctgtcccttctgaactttctccttgctatctccgtggccaaatcctatccagtcttcaaaacccagctcaacacccaggacctatacacccactggtctcgatctgnttttactggccattcatgttt

SEQ ID NO: 31895 - DNA, 425 bp, Homo sapiens
  misc_feature (1)...(425): n = a,t,c or g
acnnnnnnnnnnnnnnnnnnnnnnnnnnnnnnnnnnnnnnnnnnnnnnnnnnnnnnnnnnnnnnnnnnnnnnggcacgaggagtgtgggaattagaacaggaagtcaaaaatgacacctgagttttttgtcaaggtgatgggggtagacagtggagccggtgggctagaggatgaaaaggtggtgatggagtcctttgggacaggttgagtctgaggggcctagggggactccaccttagctggcagacagaggtgggaatggccagtgcagcaccctaaccctaaccctaacccagcagagcaatggccaatgtcaaaggtcaggaaaggaaaggtcaagaatacagtgagaagaatgactctgggattggcagttagagggtcactggtgaccttagcaagatctgtttccatgggctgatgg

SEQ ID NO: 31896 - DNA, 506 bp, Homo sapiens
  misc_feature (1)...(506): n = a,t,c or g
annannnnnnanntnnntgntnnnnngnangnnnnnnnnannnnnnnnnnnnntannnnntnannnnnnnnnanannncttganncccttgaannccntctatgaatgannnnnnnnnnnnnnnnnnnnnnnnnnnnnnnnnnnnnnnnnnnnnnnnnnnnnnggcacgagggaaaacctgcacctgaaagccgtaactccccggcacctggctggttgacttcttcccccttaaccccatttactttgaggatggaggtagtctttagggtcaggctgagatttgtcctgacccatgcttagttggcacatcttgcttctgcaacatgcttgcttagggttgggcaggggcccggagaaaacaagtcgtggcatcaccaggacctgattacccccaggcaccaaggagcacctgggaccaaggggaggtttggggcttgggatatgttttagggtgaaggatcacagaagcttactcatacctatttgaaagccaagtcaacagg

SEQ ID NO: 31897 - DNA, 433 bp, Homo sapiens
  misc_feature (1)...(433): n = a,t,c or g
ttgganncccttttgaanacnnnnnnnnnnnnnnnnnnnnnnnnnnnnnnnnnnnnnnnnnnnnnnnnnnnnnnnnnnnnnnnnnnnnnnggcacgagnnnnnnnnnnnnnnnnnnnnnnnnnnnnnnnnnnnnnnnnnnnnnnnnnnnnnnnnnnnnnnnnnnnnnnnnnnnnnnnnnnnnnnnnnnnnnnnnnnnnnnnnnnnnnnncagaatgctcaatttttaaatccaattgaaagcatgaagaagagggaaatgtgtgtctagaaatgtctgaatgatcactcactagaggtgcataatttaaaaagaaaaatcttatcttcagttttagcagattaaaatttaaccctgttgagatcaataataataaatacttgaaaaacgcatttaatcatatttcctactaagtagtttgcttccttcttcat

SEQ ID NO: 31898 - DNA, 435 bp, Homo sapiens
  misc_feature (1)...(435): n = a,t,c or g
ttggnnncccntttgaanacnnnnnnnnnnnnnnnnnnnnnnnnnnnnnnnnnnnnnnnnnnnnnnnnnnnnnnnnnnnnnnnnnnnnnggcacgaggctcggcgtgnnnnnnnnnnnnnnnnnnnnnnnnnnnnnnnnnnnnnnnnnnnnnnnnnnnnnnnnnnnnnnnnnnnnnnnnnnnnnnnnnnnnnnnnnnnnnnnnnnnnnnnnnnnnnnnnnnnnnnnnnnntcaatcaatcaatcaaccaataataacaatagcaaatacttccgtaatacaatatgatagacatgatttaagtgctttacctatatcagcctgtttaagcctcatgtcaataggtactattattacacccacttatagatgaaaaaattgaagcacagagaaatcccctaaatttccatgaaagatagtagctggttttaagaga

SEQ ID NO: 31899 - DNA, 436 bp, Homo sapiens
  misc_feature (1)...(436): n = a,t,c or g
ttgaanactnnannnnnnnnnnnnnnnnnnnnnnnnnnnnnnnnnnnnnnnnnnnnnnnnnnnnnnnnnnnnnnnnnggcacgagctgaaaattagtatccccctcccacgagataactcagcaggcttgcaaatccaatagctatgcttggtgcccagcatctgcctctcctgaaagtattcagccacgaacttggtatagtcattgggcatgacgaacgtcagggggatgaactggtacagggaagtgccatacatcctcctcatgtgcttcaggtgtttggccaaacagtctttcctggtaagcttggtggttccagggtggtggtttagctgctgccacggtttaacactgttgtgnnnggcattcggaaagaggatgtcctccagtacaggttccagtcttccgcgttctgctccnnttatnaacttattc

SEQ ID NO: 31900 - DNA, 440 bp, Homo sapiens
  misc_feature (1)...(440): n = a,t,c or g
tttgaanacttnatatnnnnnnnnnnnnnnnnnnnnnnnnnnnnnnnnnnnnnnnnnnnnnnnnnnnnnnnnnnnnnnggcacgagnnnnnnnnnnnnnnnnnnnnnnnnnnnnnnnnnnnnnnnnnnnnnnnnnnnnnnnnnnnnnnnnggtcattttagagaacagggcatagcaacagcaagccagggagctgatgaaagcagaatgatacttcggcatcaccccagtgtctttgctgctctcttcgtagacgtaccgtgagcccgtgtcagactaccaggtcctgcgggagaaggctgcatcccagaggcgcgatgtggagcgggcacttacccgtttcatggccaagacaggcgagactcagagtcttttcaaagatgacgtcagcacatttccatgtgagagttgccccactgtgtggaccctgcttatttgaa

SEQ ID NO: 31901 - DNA, 431 bp, Homo sapiens
  misc_feature (1)...(431): n = a,t,c or g
anntntgagcctttnnnnnnnnnnnnnnnnnnnnnnnnnnnnnnnnnnnnnnnnnnnnnnnnnnnnnnnnnnnnnnnggcacgaggataattttattttaagagannnnnnnnnnnnnnnnnnnnnnnnnnnnnnnnnnnnnnnnnnnnnnnnnnnnnnnnnnnnnnnnnnnnnnnnnnnnnnnttagattagtggttgcctaagctgggagggttggggagaaatggggagtgaattctcatggacactccttaatgtgcctcagttcaccctctcaacagaactgctggagtttatgaaaccacataattgggcttataaaaaaatacaaagaaaaaatgagttagaattaaaaatcgaggatctgggtgtgttttagctttaacttttatgtgtgaccatgggcaagtatctgtcctaagttgtaaaa

SEQ ID NO: 31902 - DNA, 438 bp, Homo sapiens
  misc_feature (1)...(438): n = a,t,c or g
ttgaanaccnnnnnnnnnnnnnnnnnnnnnnnnnnnnnnnnnnnnnnnnnnnnnnnnnnnnnnnnnnnnnnnnnnnggcacgagggtatattattgatgatgggggcaatgggtacactaaaagtgcagacttcatgacacaaaatattcatgtaacacaaccacacttgtactcctaaatccataaaaataaaaataagnnnnnnnnnnnnnnnnnnnnnnnnnnnnnnnnnnnnnnnnnnnnnnnnnnnnnnnnnnnnnnnnnnnnnnnnnnnnnnnnnnnnnnnnnnnnnnnnnnnnnnnnnnnnnnnnnnnacatacaatgcaatattattcttacagtattattcttgcaatattgttaaccttacaaaatgaagaaatattgcaatatgcaatacacagatgaactttaaaatactatgttgaggccaggca

SEQ ID NO: 31903 - DNA, 437 bp, Homo sapiens
  misc_feature (1)...(437): n = a,t,c or g
tttgagacnntattnnnnnnnnnnnnnnnnnnnnnnnnnnnnnnnnnnnnnnnnnnnnnnnnnnnnnnnnnnnnnggcacgagaaaccttaaactggagcaagacttaaaaagcccaatctctctggttattttggacattcaaatgctgtctaagagaaaagaactcattatgactcagttccgttaattagacgtaaattaccatcttttgtctgatacaaaagaaggtaaagggaactctgcaagaccagaggatactgaaattctaatgagatgagagcataggctggaaactgagtgaaaacaagaagccattcaactagaggcaagcccctagtgtgccttgtgtgtgagcaaaaagcaaaaacatacatttgtaattgtccagattcatatattatttagaaccatggtcagtgtccccagagagctcat

SEQ ID NO: 31904 - DNA, 431 bp, Homo sapiens
  misc_feature (1)...(431): n = a,t,c or g
tttgannccatctatgacnnnnnnnnnnnnnnnnnnnnnnnnnnnnnnnnnnnnnnnnnnnnnnnnnnnnnnnnnnggcacgagatcctgtctaatttttaattttnnnnnnnnnnnnnnnnnnnnnnnnnnnnnnnnnnnnnnnnnnnnnnnnnnnnnnnnnnnnnnnnnnnnnnnnnnnnnnnnnnnnnnnnnnnnnnnnnnnnnnnngggtagctttcttggggtgactacggtcttactaaattgtgtcactgtaatgtcacagaattctctttgatcagtgggtcgcgtagctggtgatttttgatgaaagggtagaaaggcaattttgctgctctctgtatttttaaatgttataattcagcatctctttatttgataggttcgaggctataaaacatttcttcgtttatttcctcatgaagttg

SEQ ID NO: 31905 - DNA, 436 bp, Homo sapiens
  misc_feature (1)...(436): n = a,t,c or g
tttgaanaccannnnnnnnnnnnnnnnnnnnnnnnnnnnnnnnnnnnnnnnnnnnnnnnnnnnnnnnnnnnnnnnnnnggcacgagcttnnnnnnnnnnnnnnnnnnnnnnnnnnnnnnnnnnnnnnnnnnnnnnnnnnnnnnnnnnnnnnnnnnnnnnnnnnnnnnnnnnnnnnnnnnnnnnnnnnnnnnnnnnnnnnnnnnnnnnnnnnnnnnnnnnnnnnnnnnnnnnnnnnnnnnnnnnnnnnnnnnnnnnnnnnnnnnnnnnnnnnnnnnnnnnnnnnnnnnnnnnnnnnnnnnnnnnnnnnnnnnnnnnnnnnnnnnnnnnnnnnnnnnnnnnnnnnnnnnnnnnnnnnnntattgtacctcacagagctgatgtggccatgtgatgaagtcacatgtataaagtgttatgacaatgcttgaaacacagg

SEQ ID NO: 31906 - DNA, 435 bp, Homo sapiens
  misc_feature (1)...(435): n = a,t,c or g
aannttggaanacnnnnnnnnnnnnnnnnnnnnnnnnnnnnnnnnnnnnnnnnnnnnnnnnnnnnnnnnnnnnnnnnnnnnnggcacgagagttttggcaaggtcttcctggcagaattcaagaaaaccaatcaatttttcgcaataaaggccttaaagaaagatgtggtcttgatggacgatgatgttgagtgcacgatggtagagaagagagttctttccttggcctgggagcatccgtttctgacgcacatgttttgtacattccagaccaaggaaaacctcttttttgtgatggagtacctcaacggaggggacttaatgtaccacatccaaagctgccacaagttcgacctttccagagcgacgttttatgctgctgaaatcattcttggtctgcagttccttcattccaaaggaataagtctacaggga

SEQ ID NO: 31907 - DNA, 434 bp, Homo sapiens
  misc_feature (1)...(434): n = a,t,c or g
gannntntgaaancccttcttgacatgattacgaatttaatacnnnnnnnnnnnnnnnnnnnnnnnnnnnnnnnnnnnnnnnnnggcacgagcaaccataaaatttcgtgaagtctttagaggttttatatcatattaaatgttttactttggacttacaaagttaaaaatgctttttatcttttttatgtgttttacttagaattaattgaatataatattttataacttcagaaataataacttaagaaatatgctttatatttaagtatttaaaagctgttttgttgtgtctttttgttccctttaatgtaaagtagttcagatttagtttagtccttgaaatttatttcaattgaaaaaaagctcaaatcatcacgtctaactttgttgtggttaattttgcgtatttaattcattttggttttagagac

SEQ ID NO: 31908 - DNA, 438 bp, Homo sapiens
  misc_feature (1)...(438): n = a,t,c or g
tttgaattccatntacgacatgattacgaatttaatacnnnnnnnnnnnnnnnnnnnnnnnnnnnnnnnnnnnnnnnnnggcacgagggaacccactgggaccaggaagcaggggttcacaagtcacattcaggggctgagtcctgcagcaccctccccccacccctcattcctgtcccagtccaacatctgtcacctcagtagttaaaaagtacgactggaatgactttgaaagggaaacacttctgcttctcctttaggcttcgagggtctggcttgagcagcacagacagggacgtgtctaaccgggatgaccatgaggtctcatcgcagtttgccactaaccaggtaggcatgctcagacctctcagatggagaatgtgtaaaatgcctgtcacggggcctgatatgtacctgtcctgatatgttggacctgga

SEQ ID NO: 31909 - DNA, 433 bp, Homo sapiens
  misc_feature (1)...(433): n = a,t,c or g
anttcgaanacnnnnnnnnnnnnnnnnnnnnnnnnnnnnnnnnnnnnnnnnnnnnnnnnnnnnnnnnnnnnnnnnnnnnnggcacgagggctcggcgggggtgggggtggtgtggaaatgggataatcccaagcttattatattcaatccttagagtcaaattcagctagctacttcgtatataactaagtcactaacccctttacttctttccactccagaataagaaattttattttaacaaagacttagcaaacagtaaaatcagagggcttgcttctatggagaatccatgtgtcactttatttttcacgctgtgtatttttgcagtgaagatgtgtaatttgtaacaccatcattccccttcttccaccaactgtacccagatttccctcaggggctgncaatcatattggtgagccttccctgctaa

SEQ ID NO: 31910 - DNA, 429 bp, Homo sapiens
  misc_feature (1)...(429): n = a,t,c or g
ttgantccattccnnnnnnnnnnnnnnnnnnnnnnnnnnnnnnnnnnnnnnnnnnnnnnnnnnnnnnnnnnnnnnggcacgagaggaaatcaaaaataattctgtttgagattagttcacagaacacaaaactatatttaattgctcaggtagtatcctgtggttcaataaagcaaaaattatttccatgcatttgccctgacccataattaagttagttctcagaaaatgcttcctgagtaattatttcctggccttccggggctgactgcgtggaacatgcaggctcattcaagatgtgaggtgtcctgggggcacatatttatttccctgcttatttaatggaagttattacttagctaaaagtataaggctttatttgcctgaaaaagaattactttaaaatagcctcaaaataataagctagtt

SEQ ID NO: 31911 - DNA, 430 bp, Homo sapiens
  misc_feature (1)...(430): n = a,t,c or g
ttggantccatctccnnnnnnnnnnnnnnnnnnnnnnnnnnnnnnnnnnnnnnnnnnnnnnnnnnnnnnnnnnnnnnggcacgagtctctactgggttgtttggcttttctccaaagccaggtagaagtttttcacattgaggtttttcagaaattcttacttagatatttcatctttctgtaaaaggcagatttattggcccacaaatttggggagccatatgcatttttatatttggcatagcttatgcccaggtcctctccatacgggtgtacttttatcgagttagaattgttgagttggatttagatgtgtatatagaatgttcaaagtagcttcccacagtccggttttctcttgggggtgaggagttccaggcctccgaagccaaaccgttcagaattggtagccaaatcaccattgactgca

SEQ ID NO: 31912 - DNA, 427 bp, Homo sapiens
  misc_feature (1)...(427): n = a,t,c or g
ttgattccatnccgacnnnnnnnnnnnnnnnnnnnnnnnnnnnnnnnnnnnnnnnnnnnnnnnnnnnnnnnnnnggcacgagtgcctctgaaaattcatggagtgtcagttttgtccaccagcatgcagaacaatattaacatttaaagcactgaaaacaattaagaaaatgcgtcagctgtactgagagcagggtgcagagattcggggtggcagtgggagtgtattggcttctaacatttcctgtctttgctctctctttccctgttattttttgtttcttggtggccagaactctccatgccttccgatcagtacgagttgcagcttcagaacagcatcccgggccccgaaggagacccaacccggccggtggctgtcttggcccaggacacgtcgatggtcactgcactgcagctgggacaga

SEQ ID NO: 31913 - DNA, 435 bp, Homo sapiens
  misc_feature (1)...(435): n = a,t,c or g
tttgaatttcnattcccntcttgacatncnnnnnnnnnnnnnnnnnnnnnnnnnnnnnnnnnnnnnnnnnnnnnnnnnnnnnnnnggcacgagggatgtttgttctatcaaatattaaaatgtattttattaaaaagtacagttgttaaactgtaatgctagatgtaacaacagagtcgtggttatatagtataggaaaaggatcagtacagtctaaaactaaggtcatttctgtttagaaggctactttttctgttgcctacataatacaaaggaaatgttataggaaatcttagagaacagtaagaacatttgaaaaaaattaaaatattaagccaacataaaatgtaaaatattcaactgataaacagtatgtgaaaaaagtagaggttgctctatgttttccttttgaaatacttagatgagctgtataat

SEQ ID NO: 31914 - DNA, 438 bp, Homo sapiens
  misc_feature (1)...(438): n = a,t,c or g
acccnnntttggaagaccnnnnnnnnnnnnnnnnnnnnnnnnnnnnnnnnnnnnnnnnnnnnnnnnnnnnnnnnnnnnnnnnnnnnggcacgaggtttaaggcaggaggataaatttggtccattttatttcatcattgccagaagtagaaggcagtcgtcacctttttaaaggtgatcatttataaacaggccgaaaaatgcagttctgtaggattaaagggaaatttcagtttgagtttttaaaagtgagacagttaataggttatgtaggtaagagggcactttgcttctgtgcaaacaccacagagtatgctgctgagttgctctgattaaccctaaatttgtgaatttaagcttataaattaaattctctataatgtatttatcaagtgccaggacagagctattatggtttttctatgctttgcattggctt

SEQ ID NO: 31915 - DNA, 427 bp, Homo sapiens
  misc_feature (1)...(427): n = a,t,c or g
acccgctttnnnnnnnnnnnnnnnnnnnnnnnnnnnnnnnnnnnnnnnnnnnnnnnnnnnnnnnnnnnnnggcacgaggaaactccatctcaaaaagaaacctcctgtctccctctcataaggacacttgtggttacatttaggtcccacttggggnnnnnnnnnnnnnnnnnnnnnnnnnnnnnnnnnnntcacactgtcaaattcccttttcacgtcatccaaatccctttgccgtacaaagtaagattcccagattccaggaattaggacctggatatctttgaggaccatttttcagcctaccacaccctgggtcctgtgtaaagagatgccgaaacacagcctctcggtgtggtttgaatctgagtggtttttgtctgggatttaactggcttcagtgaatggctttgtggaggacattcta

SEQ ID NO: 31916 - DNA, 425 bp, Homo sapiens
  misc_feature (1)...(425): n = a,t,c or g
ncnttggannnnnnnnnnnnnnnnnnnnnnnnnnnnnnnnnnnnnnnnnnnnnnnnnnnnnnnnnnnnnnnnnnnnnnnnggcacgagactggttttaaatctgagagtctaatacattccagagttttgtagaaaccaaaatgcctcctttgttatttttccaacagatatacaagattcctataaaaatgtatttcagtaaaatatgattatctgtgggtatttgcaaaatgtttaccagtgtcaggctctgattaccaggaaaaaatgccaactgcaactgcaggatcatcaggtaacttaagtgaagtgtgatcttctactcagattgtatatacaagcacatctgcttaaaggccatatttaattttagattaatttctcatgaaagtatttaagtctattatagcaaaataattcaaag

SEQ ID NO: 31917 - DNA, 428 bp, Homo sapiens
  misc_feature (1)...(428): n = a,t,c or g
tttgaanaccttgnnnnnnnnnnnnnnnnnnnnnnnnnnnnnnnnnnnnnnnnnnnnnnnnnnnnnnnnnnnnnnnnggcacgagcttacataaaatttcccctatccatttgcaacttagttttagatattatttctatccctaaatatgacttcagcatggatctcctatataaccacaataatgttatcacaactaagaaaaatgattttacaatatcacttaatgggaagcctacattcaatatatccaactgtcccccacatgctttctgtagctgctttttctttcctacatccaagctcaaggacataatgtgaagctgtatcactactggctttgctaaatttgagcaaggtgttgactactagattcttctatttgttgttaaggctcagttttccatcatanaaaagaaattaagtat

SEQ ID NO: 31918 - DNA, 428 bp, Homo sapiens
  misc_feature (1)...(428): n = a,t,c or g
ttgaannnctttgaagaccctnnnnnnnnnnnnnnnnnnnnnnnnnnnnnnnnnnnnnnnnnnnnnnnnnnnnnnnnnnnnnnnnnnggcacgagggacgatttgctttctcatatatgggttctgtaacttgtaagtgagtacatattggaggatgggtgcacagtgaaactttcatggacttcttgttagtagtaacaagaacaccttcaaatattcatcctactttgcagtggcaatatgtgtatcagtccatagtgatatttttctaaaatacagtttccagagggcacagttgagccacttagtttgcatttcccagtgtagactgctctctgacttcctgagggtggcatcttctggccctgtctcctttctacagaagtgatggtatgtgggctctcacctagtttcaaactggactactt

SEQ ID NO: 31919 - DNA, 419 bp, Homo sapiens
  misc_feature (1)...(419): n = a,t,c or g
acctnnnnnnnnnnnnnnnnnnnnnnnnnnnnnnnnnnnnnnnnnnnnnnnnnnnnnnnnnnnnnnnnnnnggcacgagagaaattgaagggaatgcagcttcatttctctgtgatgatccatctagagttgaattattttgtcaaaataaggagcatgtccctagttagaaaaactcaaagcactcagaacatgataggataaatttcctaaaggaaacaacccctccagaaatttgaaggctcttgagcacacactcagttctaaagtaaacatgttggttgtaaaagtcagtatatagaccttctgcaagacacatgtaacttttatagctcaaaatttacaattgatttttctctcaaggttttttagacctaaattaatttttaatatactgacccaaggtgcccagttatttt

SEQ ID NO: 31920 - DNA, 437 bp, Homo sapiens
  misc_feature (1)...(437): n = a,t,c or g
ttngntttggaanaccnnctatgacatgattacgaatttaatacnnnnnnnnnnnnnnnnnnnnnnnnnnnnnnnnnnnnnnnnnggcacgagccctcttgatgctatcactaatatagggaaattggttggagagattgacaaccaatgagagggacaaagagggaggaaaaatatttttaccattgagaatattggaaagtggatatagatgttcttctagtgacacagattatagcataattcatgagttatgtatcctgttttatcattgaagttcttatgaaactgtaacatggaaaatacatgtggggagcttttggcagctaatttggccctgaaccccatttggatcatcatgccttaggaaagtatgcttgtaatttgacttatgaacaagattttgggatttaatcttactatgaactgaagagtgt

SEQ ID NO: 31921 - DNA, 429 bp, Homo sapiens
  misc_feature (1)...(429): n = a,t,c or g
ttggaanacctnnnnnnnnnnnnnnnnnnnnnnnnnnnnnnnnnnnnnnnnnnnnnnnnnnnnnnnnnnnnnnnnnnggcacgagtgtctttaaaaaacaaaaaggtggaaatgtatgcccttagcctgcagtcaccccactttcttggaagacatcattctccttctctgcctctgccagagcatggggctaggtttttacttgatcagcatcataaggatttgttgtatacttaaaatgcatttgtgtaatcattggttccgacacgtttttgctttgaggcataagggacttgattgtatattttataaatatttgccagataagatagccaatggcttgcagtcatcttaaagataaaaattgatgttatagccttgaattaagttgaagtactgtatttgctctgagtggcatttaacctaata

SEQ ID NO: 31922 - DNA, 404 bp, Homo sapiens
  misc_feature (1)...(404): n = a,t,c or g
nnnnnnnnnnnnnnnnnnnnnnnnnnnnnnnnnnnnnnnnnnnnnnnnnggcacgagcggcacgagnnnnnnnnnnnnnnnnnnnnnnnnnnnnnnnnnnnnnnnnnnnnnnnnnnnnnnnnnnnnnnnnnnnnnnnnnnnnnnnnnnnnnnnnnnnnnnnnnnnnnnnnnnnnnnnnnnnnnnnnnnnnnnnnnnnnnnnnnnnnnnnnnnnnnnnnnnnnnnnnnnnnnattcacacagacatccatggacagccccccaacacggacatatcacacacattcacacacagacagtctcacatgtacacacatacttagacacacaactggtatttatgataactgtaaagagaaaaatacaggaaaaccctggcaaacctacttcttggccaacagttaaa

SEQ ID NO: 31923 - DNA, 514 bp, Homo sapiens
  misc_feature (1)...(514): n = a,t,c or g
cntnnantgnnnnnnnnnantntnncantnatnntnntnatcnaanatannncntngtngnactnatnannatnnnnantnnatcaccatttgattgaancctctnnaatgatacgaattnnnnnnnnnnnnnnnnnnnnnnnnnnnnnnnnnnnnnnnnnnnnggcacgaggtgaaacagagctgctgctgaaaaatgggagcacagagctgttcactggggctcttgattctagacactcaaagaggggtacagttctctgccccatgtgtgtttctcacccaaccttttcatggtgttgaggaggggaagggacagctcagtggtgattcttcacttctcaaacgtgtcctcctcctctgtcttcataatgacctcctgaagtccaaagtgccttccaaaatagctcttggaaagaggtggcagtttcctgactccccaatctcccccatcctgggagatgtgttgatggcactaatttgcggggtagcatgagactatagtcctactctc

SEQ ID NO: 31924 - DNA, 423 bp, Homo sapiens
  misc_feature (1)...(423): n = a,t,c or g
ttgcttgganncctcttnactgcnnnnnnnnnnnnnnnnnnnnnnnnnnnnnnnnnnnnnnnnnnnnnnnnnnnnnnnggcacgaggtcatgttaaaacactttctgttttgcttaattcgtaactaggcataattaaagttaaatgctaaattttaggtagcagctgataaatggttctaagctttcctgacagaatactcctactactttggtgaatcatggaaaactctttctcctttatttttaattatttcttttccatctgttattgatgtcatcaacacggaagttggaaaggtgacaatgattgttctagactgcctctgtaatgctttttctcctctgagaattaaaaatacatacttacaccttgagccaggtagaattgccagaacatgttttcctccgtgtcttcggtcta

SEQ ID NO: 31925 - DNA, 419 bp, Homo sapiens
  misc_feature (1)...(419): n = a,t,c or g
nnnnnnnnnnnnnnnnnnnnnnnnnnnnnnnnnnnnnnnnnnnnnnnnnnnnnnnnnnnnnnnnnnnnnnggcacgaggagattaattatcagtttcattaaatagttactaggccacaagtgcagacctgcagcatttcagggaaagtgattcaggctgcaaaatgataacagcaaaaccattatacacagctgtgtggcagaagattggcatcagagctgactttgccgcctttttattttcagctcctggtgctgagtgcctatgagaataaggggttagagaagttgctggggcccagcaaacagctcaggtttgcacagggaggaaatcccaacggtgggtggtcagagcatttcatacatttctgtaagaggtgatctggagccgaaaccttctgaaaaacctttgcctagag

SEQ ID NO: 31926 - DNA, 427 bp, Homo sapiens
  misc_feature (1)...(427): n = a,t,c or g
ntttggaanaccnctatgacatgattacgaatttaatacnnnnnnnnnnnnnnnnnnnnnnnnnnnnnnnnnnnnnnnnnggcacgaggaagaagggaggaggaggagaagaaaagaaagaggtgggtcaaaaggaggaagaggaaagacagacagtgaacacacaacagcaaggttactgagcttgaactatgtccctaactactagatctgaaatgactacgccagatgccagatgctcaagtgccaagctctgggtaacaggaatagacatccttccaggatgagagagatgagtctggatgagggttaaggctggagggacaggcgggatttgaagaggagggaaaggaagtggatgacacattctgttaactgtccagctgtgtctctactggtcactcagaggcacgggagccgctccctt

SEQ ID NO: 31927 - DNA, 426 bp, Homo sapiens
  misc_feature (1)...(426): n = a,t,c or g
nttggaanaccnnnnnnnnnnnnnnnnnnnnnnnnnnnnnnnnnnnnnnnnnnnnnnnnnnnnnnnnnnnnnnnnnnnggcacgagaaaaaggaagtaagtctttgagcttgagtgtttgtgtcatgcgggccccagggcaagtgatctgcttgcctggatcttaggtggtactggtgagcattggtgagttaaacaacccactgtagggaaaagtggtatggaaaagcaacagtagtataaaagattagtttttatagcgtggcaaacaacacttcttacaaaatgcatttctgctaaaataactggtctcgtttgcttggacccaggatcaatatgcagaatgagcaccttaggttcagaagcatgaatgcatttaagagaaatcacttctaagagaaatgaagcaaagccttccaatgccagg

SEQ ID NO: 31928 - DNA, 426 bp, Homo sapiens
  misc_feature (1)...(426): n = a,t,c or g
ttggataccnctcnnnnnnnnnnnnnnnnnnnnnnnnnnnnnnnnnnnnnnnnnnnnnnnnnnnnnnnnnnnnnnggcacgaggagtcctgggagcttccttgactggcatttgaaattaatcttatattttcctcataagcagttgttagcatagcagaattttgatttgtttagaagtcaaatgtgatttactaattcaatccctgtggtttgagggagaaaggagtaggtccctattagaactgtgaaatcagtacagtttgctctcataaatgctcatacacaaccctcctcacttcctctttttcttgtggttctttttagtccccaaagtccagcaaccccttttttccccttgaccaatttaaaacaaaccatttgaatggaatcgtagatgattgcaatttagtgtggatttagttgc

SEQ ID NO: 31929 - DNA, 430 bp, Homo sapiens
  misc_feature (1)...(430): n = a,t,c or g
ttgntttgnaanacnnnnnnnnnnnnnnnnnnnnnnnnnnnnnnnnnnnnnnnnnnnnnnnnnnnnnnnnnnnnnnnnnnnnnggcacgagcccaccattgttataattctatccccttaagggccatctctaggaaatagagaaaaaaaagtgtttttaatgagaataagatttctcgtatgttgaagacctctcctatgtttataaaatctgagaagattttatagattgtatagaactttttatactttaactcttaacactttatatttaggggcttaggtatttgatccttctgtggtattatttcctggaagcttacagcccctttgttttgtttgattttaaaacttaatttgtattaattagtattctcataggctgttttaaagtaactgcaatctgatattttaaatctggattataggt

SEQ ID NO: 31930 - DNA, 431 bp, Homo sapiens
  misc_feature (1)...(431): n = a,t,c or g
ttnnnttggaanaccnctatgacnnnnnnnnnnnnnnnnnnnnnnnnnnnnnnnnnnnnnnnnnnnnnnnnnnnnnnnnnnggcacgaggaatcaggatacccagagaccacaactcagaaagctacaagtcaaaacattaagacttattttaacaaagagccaaatgggataaatctaaacaaaaaatacgtcaaagaagtatgcttaaatgaaactcacatgacctagctctaggcattcaactcccctgtgcttcattttcctttaaggtcctcactctaatgttataactttccttctttagagtcccaaagaggatcgaagttgtcaataagcagcaatgttttgaaaacaaacttttttttctgagnnnnnnnnnnnnnnnnnnnnnnnnnnnnnnnnnnnnnnnnnnnnnnnnnnnnnnnnnnn

SEQ ID NO: 31931 - DNA, 421 bp, Homo sapiens
  misc_feature (1)...(421): n = a,t,c or g
nnnnnnnnnnnnnnnnnnnnnnnnnnnnnnnnnnnnnnnnnnnnnnnnnnnnnnnnnnnnnnnnnnnnnnggcacgagcttctttttaatagtgaaagcccgcaggaagcaagcagctgggagaccagagaaaatggatgatgaagaccccattatgggtaccatcacctcggaagaagccctggccagacagccccggagatcaagcatctcctcctggggatgcccctcccttggaagaacaaaaggagctccattatgcctcccttagtttttctgagatgaagtcgagggagcctaaggaccaggaggccccaagcaccacggagtactcggagatcaagacaagcaagtgaggatttgcccagagttcagtcctggctggaggagccacagcctgtctgggggaaaggacaagtca

SEQ ID NO: 31932 - DNA, 428 bp, Homo sapiens
  misc_feature (1)...(428): n = a,t,c or g
ttgnaanacnnnnnnnnnnnnnnnnnnnnnnnnnnnnnnnnnnnnnnnnnnnnnnnnnnnnnnnnnnnnnnnnnnnnnggcacgaggggagaggattgatgagcctggtggaaagaatcctagcatccctggagtagtcaggcagacatggctgtgaattccaggtctggccagttgcagctgggtgacttaggataaaccatttaatggcccagagcctcagtttcctcagttgtgaaataaagagaatagagcttcctttgtggcaaggcttcccagggcaggcctgttaatgcttggactnnnnnnnnnnnnnnnnnnnnnnnnnnnnnnnnnnnnnnnnnnnnnnnnnnnnnnnntggcctccacccagcccctccagcctctttgttgtgacaactgaaagtgtctccagacattgccagtgt

SEQ ID NO: 31933 - DNA, 447 bp, Homo sapiens
  misc_feature (1)...(447): n = a,t,c or g
ttgganncctttgaaataccanctnnnnnnnnnnnnnnnnnnnnnnnnnnnnnnnnnnnnnnnnnnnnnnnnnnnnnnnnnnnnnnnggcacgagggtggaggccccggcggggcaaagtggcaggaacctcttaaagggcgagagcggcgcggagccagaacgcggtcggcccggtccccgccgcacccagcccagagaagagtttagtgactgaggccgaaaattcacagcaccaacagaaggaagagggtgaggaagccataaactcaggccaacaagaacctcagcaggaggaatcttgtcaaacagcagctgaaggagataattggtgtgaacagnngctgaaagcttctaatggagacactcctacacatgaagacttgaccaagaacaaggagcggacatnagaaagcagaggactttnacgactattctcctggtttta

SEQ ID NO: 31934 - DNA, 446 bp, Homo sapiens
  misc_feature (1)...(446): n = a,t,c or g
gaatttggataccgtnnnnnnnnnnnnnnnnnnnnnnnnnnnnnnnnnnnnnnnnnnnnnnnnnnnnnnnnnnnnnnnnnggcacgagaactggtatttctgagttacttgagagttctgcatgaaaaataggttccaataggtgaaataggaaaattagatcttaaattagtgaactggcatacagagcaaatataagatgaatttgaatcatcacattctttttttttaaataaactaagtttcctgtcagggtttttaaatatttgccttaatttatgagtcacacagcttatgtagacatagcaaaattttgttaatgccaataatagtttggaagaaaagctttcattttcaagcactgttctgaaacatccaggaaaatctgaagaancagaaaaaataatattaacatgacctttggccactgctactttgtgatatgg

SEQ ID NO: 31935 - DNA, 447 bp, Homo sapiens
  misc_feature (1)...(447): n = a,t,c or g
aatttgaanacccnnnnnnnnnnnnnnnnnnnnnnnnnnnnnnnnnnnnnnnnnnnnnnnnnnnnnnnnnnnnnnnnnnggcacgagccgagataannnnnnnnnnnnnnnnnnnnnnnnnnnnnnnnnnnnnnnnnnnnnnnnnnnnnnnnnnnnnnnnnnnnnnnnnnnnnnnnnnnnnnnnnnnnnnnnnnnnnnnnnnnnnnnnnnnnnnnnnnnnnnnnnnnnnnnacatttgtctattttgaatcttccttgcttttctctgtagatgcagatgcagccggggagctcatcttgagtgcattctccaccttttcaggggcgatctttccatcttagtttgtagggcctgtccccatgtgtgttcattggcccccgtttccgtggtctggatggactgtccttgcaagctgttgcttgtcctccaaggcgtggataggccct

SEQ ID NO: 31936 - DNA, 538 bp, Homo sapiens
  misc_feature (1)...(538): n = a,t,c or g
nnnnnnnnntagngtnnnnnnnntnnnnntnnnnnnnntnnntnnnannnnggnnnnnnttnannntnnnnnatttggaanacntgnnnnnnnnnnnnnnnnnnnnnnnnnnnnnnnnnnnnnnnnnnnnnnnnnnnnnnnnnnnnnnnnnggcacgagggatgaatgagcaacagtatacagggatcttaccatattttcctggagattaactccagtggagttaaacccacaattacttgcccgaagaagcactaaggaaatagctaaaatgaatggtctcacagatgtatagaaagctgaaaagagggaaacataaacagggacataacatagtgagtctgtctactgtatttatttatctaatctgtttgatcagaattattttgtgtaatatacacctagtaaaactgcagctattgaaagaaaaaagggaggattgaaacacctagcantagatggaacattgatgttcacagacacacgaaacacaaatctgggctctgntttttaactcaggattcacatttttaagtcc

SEQ ID NO: 31937 - DNA, 460 bp, Homo sapiens
  misc_feature (1)...(460): n = a,t,c or g
ttgganacttgannnnnnnnnnnnnnnnnnnnnnnnnnnnnnnnnnnnnnnnnnnnnnnnnnnnnnnnnnnnnnnnggcacgagctttgaatacgaagattgtggcaagcagatagtaattcttagaagttctgagttgccagctctgccaatccatagctaagaaatgccaaatgccaccaggaagaatataacaaatagagtcactgttagaaggaaacaaacaaggcttcctgatttgtcatatattgcctcttgtctggtggcctctctaggcttgtcgtcattgatttctatgaattaaacaccagtagctgagaaactgacagtgaaactgtcctttgtgggtcagtggtcagtgagcaaatgtctttaaaatgtcactgactaccttgccaattttcccattggttactgtgttggtgcctccccatagttgagcaccctccctagtgacatc

SEQ ID NO: 31938 - DNA, 459 bp, Homo sapiens
  misc_feature (1)...(459): n = a,t,c or g
ttggaanacntgnnnnnnnnnnnnnnnnnnnnnnnnnnnnnnnnnnnnnnnnnnnnnnnnnnnnnnnnnnnnnnnnnnggcacgaggttactgtaccttacctgtgacctttaggggtttcatgtagaaggtacaaggaataggaacttcagctactttcctcctgtaatcattccttgccagttattgcttgattgattaattgattggnnnnnnnnnnnnnnnnnnnnnnnnnnnnnnnnnnnnnnnnnnnnnnnnnnnnnnnnnnnnnnnnnnnnnnnnnnnnnnnnnnnnnnnnnnnnnnnnnnnnnnnnnnnnnnnnnnnnnnnnnnnnnnnnnnnnnnnnnnnntgtgcaccttgctagttatttaatccattatataacccctagctcaggtggcattttttagtatgnccatcaatangtaatattcatgccatcatcagatccataattg

SEQ ID NO: 31939 - DNA, 449 bp, Homo sapiens
  misc_feature (1)...(449): n = a,t,c or g
nttggaanaccgctatgacnnnnnnnnnnnnnnnnnnnnnnnnnnnnnnnnnnnnnnnnnnnnnnnnnnnnnnnnnnggcnnnnnnnnnnnnnnnnnnnnnnnnnnnnnnnnnnnnnnnnnnnnnnnnnnnnnnnnnnnnnnnnnnnnnnnnnnnnnnnnnnnnnnnnnnnnnnnnnnnnnnnnnnnnnnnnnnnnnnnnnnnnnnnnnnnnnnnnnnnnnnnnnnnnnnnnnnnnnnnnnnnnnnnnnnnnnnnnnnnnnnnnnnnnnnnnnnnnnnnnnnnnnnnnnnnnnnnnnnnnnnnnnnnnnnnnnnnnnnnnnnnnnnnnnnnnnnnnnnnnnnngactctctctcaaaaaaaaaaaanggccaggaatttntgggcttagggcaaaagngntttcttaaaaaancgggccnttgccttgggggttttcctnaggaaaaag

SEQ ID NO: 31940 - DNA, 444 bp, Homo sapiens
  misc_feature (1)...(444): n = a,t,c or g
atttggaanacnnnnnnnnnnnnnnnnnnnnnnnnnnnnnnnnnnnnnnnnnnnnnnnnnnnnnnnnnnnnnnnnnnnnnggcacgagagcacaggcattcttcaagagcaatgctgcatgaaaaatcaggggaacaccctggaaatagtgactttctgcaagggaggcagggaagcccccaggtgcctctaaatgctgctattgccgagtggatgcaatctaccagacctctctgttttccaggccagctaaataaagacatgacctatgcgcagttgtactccttcctgaactgcctccaggtcagcccctgccacggctggatgtcttccaacaagacgttgcggactctcacttcagagagagcagagcaactctccaacacactgaaaaaaattgcagccagtgagaaatttacaaacttcaatcttttctacatggat

SEQ ID NO: 31941 - DNA, 465 bp, Homo sapiens
  misc_feature (1)...(465): n = a,t,c or g
tttgaagatcgtnnnnnnnnnnnnnnnnnnnnnnnnnnnnnnnnnnnnnnnnnnnnnnnnnnnnnnnnnnnnnnnnnggcacgaggaatacgaccttcttagagaacaagcgtcccgatcccggtcccgatcccggtcccggtcccaaacaaatgacaattatgagggtgatctgaccagcggtgtctatctgctgtccagggaggaggggcgaagagaggctgggcgtagggcttccccgcactctgcgaattcctcccggcctccttccggagaattccttgatgacgattcagcagacatcacctttgatatgagcgggagccctcgactcccaaggcatagctctctcatagatgaaatgttcaagggctcggctggtcacagccccctggccaccccattgtntcccagcancagcatgttcaagtccaaaatatgaagttgggacagaactgggctcaa

SEQ ID NO: 31942 - DNA, 452 bp, Homo sapiens
  misc_feature (1)...(452): n = a,t,c or g
anatcnnnnnnnnnnnnnnnnnnnnnnnnnnnnnnnnnnnnnnnnnnnnnnnnnnnnnnnnnnnnnnnnnnnnggcacgannnnnnnnnnnnnnnnnnnnnnnnnnnnnnnnnnnnnnnnnnnnnnnnnnnnnnnnnnnnnnnnnnnnnnnnnnnnnnnnnnnnnnnnnnnnnnnnnnnnnnnnnnnnnnnnnnnnnnnnnnnnnnnnnnnnnnnnnnnnnnnnnnnnnnnnnnnnnnnnnnnnnnnnnnnnnnnnnnnnnnnnnnnnnnnnnnnnnnnnnnnnnnnnnnnnnnnnnnnnnnnnnnnnnnnnananccacntggnnngcccnaacatgancttattaattnaccntttnngngccaggtgctacttatngtactaactcaacnanccttaanaaccaantgtgnnatggagnnaaagcttacgcctntnttcgcagnaattt

SEQ ID NO: 31943 - DNA, 458 bp, Homo sapiens
  misc_feature (1)...(458): n = a,t,c or g
tttgaanaccnttatgacnnnnnnnnnnnnnnnnnnnnnnnnnnnnnnnnnnnnnnnnnnnnnnnnnnnnnnnnnnggcacgagtctctaaagaccactgtcatgcccacattcaataatattaactaacaattatacagtgcttactgttcactgtcctaaacaatttttaaaattaactctaacctcaacaattctctaagaaattattgtnnnnnnnnnnnnnnnnnnnnnnnnnnnnnnnnnnnnnnnnnnnnnnnnnnnnnnnnnnnnnnnnnnnnntgtggcattgctaaaatcagaacccagtctggccccagagttcacgctcttaaccaaaacattagacagcctctccaatgtgcttctaaccagtgttgccaactggccacagcccagggactccaggtgcgctgggaacccaggcagaagaggagagcagtattcagccttctctc

SEQ ID NO: 31944 - DNA, 460 bp, Homo sapiens
  misc_feature (1)...(460): n = a,t,c or g
ttgnanatcgctnnnnnnnnnnnnnnnnnnnnnnnnnnnnnnnnnnnnnnnnnnnnnnnnnnnnnnnnnnnnnnnggcacgagacaaagttacatagcctcatttactctaggagggcattgtggagagtctctggtttccacttcaatcaccttgtgtgagtggccccgaagctgggagtgggaattctaacactctttgggagcagtaactacagccataggctgtctgcagctgccttggggcagggagttaccactgctggtgtctaggacttgcctctgatgggtatcttcctattctgggaaggagagagctgtgctgacaagctccgcctcaggagctgggtggaaatggaattgggctcccctctctttttatcccctttccccaacctctgtgttgtggagtaagcttggaagaaagtttagcttggatttgaatcccacttccatcactt

SEQ ID NO: 31945 - DNA, 462 bp, Homo sapiens
  misc_feature (1)...(462): n = a,t,c or g
ttgnaatcggnnnnnnnnnnnnnnnnnnnnnnnnnnnnnnnnnnnnnnnnnnnnnnnnnnnnnnnnnnnnnnnnnggcannnnnnnnnnnnnnnnnnnnnnnnnnnnnnnnnnnnnnnnnnnnnnnnnnnnnnnnnnnnnnnnnnnnnnnnnnnnnnnnnnnnnnnnnnnnnnnnnnnnnnnnnnnnnnnnnnnnnnnnnnnnnnnnnnnnnnnnnnnnnnnnnnnnnnnnnnnnnnnnnnnnnnnnnnnnnnnnnnnnnnnnnnnnnnnnnnnnnnnnnnnnnnnnnnncagggcagtttttacctgtaacagttgaggagaaanttgnccacaggcctcatacgnatttaggaggcnttgaaaatgggcaactgttgaaacnntggagctgcaantgnatgagctnttgaaagncttctnacacttcctttgnaaanggtggaanacaaanganaaagaa

SEQ ID NO: 31946 - DNA, 460 bp, Homo sapiens
  misc_feature (1)...(460): n = a,t,c or g
nnattcggttgncatgattacgaatttaatannnnnnnnnnnnnnnnnnnnnnnnnnnnnnnnnnnnnnnnnnggcacgannnnnnnnnnnnnnnnnnnnnnnnnnnnnnnnnnnnnnnnnnnnnnnnnnnnnnnnnnnnnnnnnnnnnnnnnnnnnnnnnnnnnnnnnnnnnnnnnnnnnnnnnnnnnnnnnnnnnnnnnnnnnnnnnnnnnnnnnnnnnnnnnnnctgtgctcttaactgctatattattacttccaggaacttgctttactggtcatctggacttgaacagtaaatccccaaacctggtgtgagaccctaccttccaagtgaaatacaaacaaatggttatttcctggtgctcttgatatcagaattgctgggactcaccattcagtgatgatgaatagggcaaaagaatgcaattatctcaaatggggatgaggctgagcatctct

SEQ ID NO: 31947 - DNA, 464 bp, Homo sapiens
  misc_feature (1)...(464): n = a,t,c or g
tttgnanattggttgnnnnnnnnnnnnnnnnnnnnnnnnnnnnnnnnnnnnnnnnnnnnnnnnnnnnnnnnnnnnnggcacgaggaagagaacagacaggttgactgtggtccccagagctactgagatttattggttcacagacctgagcagtagccttgaggcagtggggtgatgggggagcgcaagtgtgggtctgaactgaggtggaagtgctgggtcttgctgtgctgggtgacagtagaacagtgggtggtagcgtctataaacaagtcgcataagctgttctcttctcagacacctcagagctgagccgagccaggctggccctgagcaaggaccctcagatggggacatgcttagcctgcagccccagctccccgtgccatttgccaaggccacagacacctcattcctttagttcctgcaagccttctgaagggtcctctgcagcccacagggag

SEQ ID NO: 31948 - DNA, 433 bp, Homo sapiens
  misc_feature (1)...(433): n = a,t,c or g
ttgnanacnnnnnnnnnnnnnnnnnnnnnnnnnnnnnnnnnnnnnnnnnnnnnnnnnnnnnnnnnnnnnnnnnnnnggcacgagctggaagatagcgtaagtcattattttttgagattcattttaaaataaataattattttttgagtcctttttgagattctcagaactaccagttgttcttctgtcgatttagaagagaacagctggtttccttctgggggaaagtaacgtctttcaagattcttagcagagatgtaaatgaagctataggctagataattgtcaatttataagtgacacttagctgagaggggctgaattatgcagcacatgaagctggaaagcaggaggggaaactacaggagtatggggggaatactgatgtttcaacagtgagaagagagaagaggcctgcttctgcagaaattct

SEQ ID NO: 31949 - DNA, 440 bp, Homo sapiens
  misc_feature (1)...(440): n = a,t,c or g
ttgnnnnccccttggannacnnnnnnnnnnnnnnnnnnnnnnnnnnnnnnnnnnnnnnnnnnnnnnnnnnnnnnnnnnnnnnnnnnnnnggcacgagatcttagggaatcctctggtatgagctgtcatgctgattattgtataaacaaacccaaaaagttaatttctaaacccacggtgaattggaagaaaaaaatggtgcttgaaggcagatactgacagtataaatacatgacagccttcagaaatggcaaggctgagaaggctagaactagatgctctgtgttcagaggcaggaaagtaggtaaaatattctagaaattattacaacgtaaaaattttaaagaatttaaaaggataaaccctcagctatctaagaagacacatttccagaaagtagctatgcttaactggagttaaatatttattgtcagtgagtc

SEQ ID NO: 31950 - DNA, 439 bp, Homo sapiens
  misc_feature (1)...(439): n = a,t,c or g
ttgaccccctttgaanaccatnnnnnnnnnnnnnnnnnnnnnnnnnnnnnnnnnnnnnnnnnnnnnnnnnnnnnnnnnnnnnnnnnnggcacgaggccagacattgaacaaattcatttaccagatactgagagcctaccatgtgccaggcattgtgcaaggtgtggggaatacagagatgaaaagagacgcagccactcccacaaggagctgtagagggaagtgagccaggtgcaagcaaagacagacagtagaccacctcctgctcactagcaaggacagaaaggcgagtgctagcaacttgaaggtaccttgcatgatcatagagataaaggtaaaagggagaaaggatactgtggcctgggcggtggtgaagcctatggctgtgtgggaatgtgaattggttctgattttctgaattagcagtctggcggatgta

SEQ ID NO: 31951 - DNA, 501 bp, Homo sapiens
  misc_feature (1)...(501): n = a,t,c or g
nannnncnnnttnctnnnnnctntnantannncgngncnacngattnngangttcannctngatgnncccccttgacacgttgnaaccttacgaannnnnnnnnnnnnnnnnnnnnnnnnnnnnnnnnnnnnnnnnnnnnnnggcacgagaactggaacaaatgcaaatgagggctcctcatccctccccccgacaatttcttaaatgattgaaatttgatgagtacagtgaaaaagaacaaaagtcaaacacattagaataagccctgaattattatttcctcacaccagagtcaagttgtcctgaggtgccaatagggaatcgctcatagagaatgaaatacggtcacaggcagagagaactgagtattggccagagctctttcaggatgagagtgttgactctttgagggcaaaaatggacttaataaccctttagagtgataactagcctagtcctgcacaggaatatcaacgataaatgacttaaaagttgttaca

SEQ ID NO: 31952 - DNA, 437 bp, Homo sapiens
  misc_feature (1)...(437): n = a,t,c or g
tttgaanacnnnnnnnnnnnnnnnnnnnnnnnnnnnnnnnnnnnnnnnnnnnnnnnnnnnnnnnnnnnnnnnnnnnnnggcacgagtaacatattaatgtcttttggagtggggagtaaacaaactgaggtggaaaagtcatcttagaagaaaaacataacccgctgctcattttttattattttaaatttgcttcagttatgtctctgggtggagtatagaatttttgagaagaataacattcctgccctgaagtgttgacagttgcccgacacaaaggaaagaattaagattgtgaagactgcctaggtgattaaagaaaaagaagccccactctactttttcctcctgccatggcacttcagtgaaaccttggtctcccccgcgcttgttctacctcccgcccttgatctgggtgacagagtgagattctgtct

SEQ ID NO: 31953 - DNA, 457 bp, Homo sapiens
  misc_feature (1)...(457): n = a,t,c or g
gnnnnnnngnnnccctcnttgganccccctttgaacaccatnnnnnnnnnnnnnnnnnnnnnnnnnnnnnnnnnnnnnnnnnnnnnnnnnnnnnnnnnnnnnnnnnnggcacgagatggaacctctgtagaataggaaatgtttttagtagttcagatgtatttttttcttaccttgttgagaacaaaacagaattatgtttttcaggttgccatggctccgtagaaaagagctcctctgggagaataacgttaggagagcaggcagctgccctagcaaaccctcatgaccgtgtggtggctttaaggagagtgactgctgctgctcaggttcttctggccagaaccatggtcatgagagcgctgtctcttctctcagtcaggtaagtgttattttatgtcacatgatgctaagttaacttctagtgtcattagctggaagtctggtggtgtttggg

SEQ ID NO: 31954 - DNA, 530 bp, Homo sapiens
  misc_feature (1)...(530): n = a,t,c or g
nnngangaannnnnnnnnanngnnnnnangnnnanannnnanggcnanntnnnnannnnaccnnggagannnngtnnngncnccctttgaaancctctttgaannccntcgatgacatgcattacgaannnnnnnnnnnnnnnnnnnnnnnnnnnnnnnnnnnnnnnnnnnnnnnggcacgagcggcacgagcagactggctgaaggagaatctctgagtgtgacacccaggaagatcaataggtttctctgagggtaaagatgatgcagtgcttttggccatccccgcgagctgctcaattaaaaagttcccaggagagagtctaacgggtcctcactgggtcaactgctcacgtgtttgacagaggttgtagtgtatgtggttgggtatggtgtcccttgattgacagccctgttaaaatcacattgatggaagtgaggcagcaccccaaagaaggcgatggtgagaagataaaatagatacctgctctaagaagnttccagaaggagacacaagaagaggggaacca

SEQ ID NO: 31955 - DNA, 437 bp, Homo sapiens
  misc_feature (1)...(437): n = a,t,c or g
tttgaanaccntcttnnnnnnnnnnnnnnnnnnnnnnnnnnnnnnnnnnnnnnnnnnnnnnnnnnnnnnnnnnnnnnnggcacgagggcatcagaaagaaaatgaggaaaggggtgagaagctataagggagtcagaaacgtaggaaggaatactacaggagttgtgcatgtggagtagagtgccactcacaagttccttcagttgcctgtcttgaagcagattattcaaaaaacgtacataggaattcttagtcttcatcaggaaggtcattatcactaggaagacctcacaagctctatgtaaaataaatatgtttttataatatcaactgctttacctggcaagaagcaaattcagacaatcctaaacctgttttgaccatgaggttacatcaaaacactcctattatatgcttctgatcattgaccnnaagtc

SEQ ID NO: 31956 - DNA, 431 bp, Homo sapiens
  misc_feature (1)...(431): n = a,t,c or g
ncctcttggannnnnnnnnnnnnnnnnnnnnnnnnnnnnnnnnnnnnnnnnnnnnnnnnnnnnnnnnnnnnnnnnnnnnnnnggcacgagctttgacttgatggtgaacaaaaaaagagcattattttgtataaatcactatggctcatatagatgttaaatttttaggtttattactggtcagatatcttctgtattgaaattcaactttgtaacaaaaaaacagtattttttctgtgcacagctaaagctcagagggaaaaaatgtcaaatcttatatagcatagcatagttgaaaaagtattttatatttttattctatttatcatgtctttatcacagcttagtgacatgtggttattgtccacctttttttttcttttgcaagtgaagactaaacctcatttctttgcattgagatagaaaatgac

SEQ ID NO: 31957 - DNA, 439 bp, Homo sapiens
  misc_feature (1)...(439): n = a,t,c or g
tttgaanacccttttnnnnnnnnnnnnnnnnnnnnnnnnnnnnnnnnnnnnnnnnnnnnnnnnnnnnnnnnnnnnnnnggcacgagcattagaataattgtacttaggaagtacatctaagcagtttcatctgtacctgggcctgattcagattctaacattctggattccaaactgatgctgtaaaggggttatgggaggattttgtaagggtggggctgtgggggtaagtatattttacatatgaaaagaatgtaagtaatttgtggctagaggacagattggtcttgtcttaaaatatgttcacaaattctgtgatactctttccttcaaaagatgaagcttgattctgcttttcttgagtgtgggctgtgcttagtggcttatttctaaagaatagaatgtagcagaagtaaccgatgtgtgattcccaaactaa

SEQ ID NO: 31958 - DNA, 452 bp, Homo sapiens
  misc_feature (1)...(452): n = a,t,c or g
gnnnnnnntttgaanncccnntttggannacnnnnnnnnnnnnnnnnnnnnnnnnnnnnnnnnnnnnnnnnnnnnnnnnnnnnnnnnnnnnnnnnnnnnnggcacgagatctggatagccagttatctagtcagataacttttaagttttgttctataacaaaaactctatgactccaagggctatgttgttttagcttcaaaggggagggagtaaagtgaagtagaaccctacatcgaacctggatctgaaacctcaactgtggcaactgtccacagcagcatttctctgagacttagtggttgctttcatttgtgtacctgtgtatgtaagcacatgtacaaatgcacccatatctttaatcaagatagcttggaatcttgagcaaattctctaatagggtgaattatgattttcttcatctcaaattatttgcctattttttttctggt

SEQ ID NO: 31959 - DNA, 429 bp, Homo sapiens
  misc_feature (1)...(429): n = a,t,c or g
nttggaannnnnnnnnnnnnnnnnnnnnnnnnnnnnnnnnnnnnnnnnnnnnnnnnnnnnnnnnnnnnnnnnnnnnnnggcacgnnnnnnnnnnnnnnnnnnnnnnnnnnnnnnnnnnnnnnnnnnnnnnnnnnnnnnnnnnnnnnnnnnnnnnnnnnnnnnnnnngacncactagtancaatcacattttgattatngttaaggaaacagatncccacattctntgcccctnactccttttcccctcgcatatactcacagcatgcaatctgttttgtatacncagcactntacttgtttcagcacttaccatgttgtacanaaangggttttcattatcccttcctccccgcaacanacaggngtctttgagttcctcaaaggcacacaccaagtcttactcatgtgacagttccatagcncttacc

SEQ ID NO: 31960 - DNA, 438 bp, Homo sapiens
  misc_feature (1)...(438): n = a,t,c or g
tnacctctttgaataccatnnnnnnnnnnnnnnnnnnnnnnnnnnnnnnnnnnnnnnnnnnnnnnnnnnnnnnnnnnnnnnnnnnggcacgagatcaatgtgtgcaggcacagggaaatcattctgagagttaaaatagtccaagaaacccctcattaattattaattgacatcccctgaggattcaggttcttaagtcccagttttgtacaatccccaggatgggagctgcctgctccaatgtgtgtccttaaacccatacaaaaggtgcaccatgaagccgtcctgtaaaccagaacaatctatggagcagttctagaaacagcgcagctcagcaggctgtcctgggtgcaactgtttcctgagagcagagacaaactgtgtcagaaaggaagagctggaggatgacaacaggaggcccgtgctgattgaancctt

SEQ ID NO: 31961 - DNA, 450 bp, Homo sapiens
  misc_feature (1)...(450): n = a,t,c or g
gnnnnnnttttgatnnccctctttgaanaccatnnnnnnnnnnnnnnnnnnnnnnnnnnnnnnnnnnnnnnnnnnnnnnnnnnnnnnnnnnnnnnnnnnggcacgagtccctgggggcagcggtgttgcaagagtgtgatggtggaagctgcaaggcatattgaggcttaggctttggaacgcctacaacaccgctctaccacattctattggtcaaagcaagcccagctcagatgcgaggggtgggaagcagatgcctctctgcgtggagaggagcacagcctcacaatggaccacaccattgtgtaacacttcatgtttgcttttcagtctagctattaagctggagtttggccaagaaaatacagtaaataacttattatagtaaataacaataaatgctacataatgtcttgacccttctaaacagtatctgggagtaaaaataaa

SEQ ID NO: 31962 - DNA, 439 bp, Homo sapiens
  misc_feature (1)...(439): n = a,t,c or g
tttgaanaccntttnnnnnnnnnnnnnnnnnnnnnnnnnnnnnnnnnnnnnnnnnnnnnnnnnnnnnnnnnnnnnnnggcacgagaacagtgaactgaagcttttttgcctggaatccattggcttctttgatggggataggaagcagcctgggactattgctgtgacatgacatcaatcttggtggctaacgggaaggggttatgaagaagggggtggacttgggggatgaagaggacctgtggctccagtccaccagaatgaatgacctaggccatgggaagtaagactgggaagtgtttttcatcttcttagagtttgggatatatggatgaattgagtgaaatgaggattttagtgagtatctctactaggttcctgacagggatggtttctccagggattcaactgaatcttatangnagaactggatctgggg

SEQ ID NO: 31963 - DNA, 432 bp, Homo sapiens
  misc_feature (1)...(432): n = a,t,c or g
tttgaanaccattttgacatgcntacgaatttaatacnnnnnnnnnnnnnnnnnnnnnnnnnnnnnnnnnnnnnnnnnggcacgagcaaagagactgtgaggaaatgtgcccggagctgggtgaccgccctgcagctcatggagcggaaccctgagttcatctttgcctgctcccaggcgcagcagctggaatgggtgaagagccgctaccctggcctgtactcccgcatccaggagtttgcgtgccgtgggcagtttgtgcctgtggggggcacctgggtggagatggatgggaacctgcccagtggagaggccatggtgaggcagtttttgcagggccagaacttctttctgcaggagtttgggaagatgtgctctgagttctggctgccggacacctttggctacttaagcacaagttnccaanncatg

SEQ ID NO: 31964 - DNA, 440 bp, Homo sapiens
  misc_feature (1)...(440): n = a,t,c or g
annnccctctttggaanacatctnnnnnnnnnnnnnnnnnnnnnnnnnnnnnnnnnnnnnnnnnnnnnnnnnnnnnnnnnnnnnnnggcacgagggagagtactgctaagatgaaacacaggaaggacaggccttgatggaaggttggggggccgagagatccagagcctatgggaggggacttgtgagtgctggcatattcaggacccagtgcaaacccaagcacagctctgctcccggccccagtggccaaactgaaggcttgccctggctattctgccgttgacatgggcctcaccctaccacggggataggtcttggatggagggaagagggagactcaccgggggcctcctgagtcctttgagtgtccccatgaccccagcacctgggacagctgctggaaagagggtactggcaaaaattttgcttaattggac

SEQ ID NO: 31965 - DNA, 423 bp, Homo sapiens
  misc_feature (1)...(423): n = a,t,c or g
nnnnnnnnnnnnnnnnnnnnnnnnnnnnnnnnnnnnnnnnnnnnnnnnnnnnnnnnnnnnnnnnnnnnnnnggcacgagcttttgtcaaccataatggtaaataaataatattgaaatatgaaaaatcaaactcaagtgttccaaagaaatcgcatctactcttcgttctgtcttatttttatgatcatctttatacctatagctaacatcttgtagtatcttaagggtgtcagagttgatccgatattttggcttctttgatgctcgctgtcacctcatgagattgatatggtgttggtcttatctctttctcatttaactttgcagtgtcagcttcagctttgcaggaatgcatgataactgttagtcatttgagaaaatgttgtgctaggaaacgttaagttcagagtgacattcgttaa

SEQ ID NO: 31966 - DNA, 415 bp, Homo sapiens
  misc_feature (1)...(415): n = a,t,c or g
nnacnnnnnnnnnnnnnnnnnnnnnnnnnnnnnnnnnnnnnnnnnnnnnnnnnnnnnnnnnnnnnnnnnnnnnggcacgannnnnnnnnnnnnnnnnnnnnnnnnnnnnnnnnnnnnnnnnnnnnnnnnnnnnnnnnnnnnnnnnnnnnnnnnnnnnnnnnnnnnnnnnnnnnnnnnnnnnnnnnnnnnnnntaaataatcacaagcttagcagcttcaaaggcattgattaggtgtctgacttcttgctggctgtcagctggggctgctctcagctccaagaggcccctgccattccttgctctcacaagccctctcacaagagatcctccttcaatcagcaggagaaccccgctctccagtctgctaggagggagtccacataacctaaggagtcaaggtagtcactagccat

SEQ ID NO: 31967 - DNA, 453 bp, Homo sapiens
  misc_feature (1)...(453): n = a,t,c or g
gccccctctttganccccctttgaacccttnnnnnnnnnnnnnnnnnnnnnnnnnnnnnnnnnnnnnnnnnnnnnnnnnnnnnnnnnnnnnnnnnnggcacgagggaaagtgacgtgacaaaaaccatgtttgaacaagctggtaatggcacttacaggtaagagggcttcatttaacaaactagcagatatttactgtattccattttgaggaactttggggatatatgagggaaatttcaagaagtattaactaagggtagcttccagtagtttgtagtctaatttgggataaggtgtatatgtgtgtacataccttatgcatgtgtgtgtgtgcataagacagattctgtgggtgttataaatactaagtagcataggtgtttagagatggaagaagtctctttgggttgggttaattagagatggccccattaggaaggtgtttggatc

SEQ ID NO: 31968 - DNA, 459 bp, Homo sapiens
  misc_feature (1)...(459): n = a,t,c or g
gnnnnngnnncctcttgnatncctctgannccttctnnnnnnnnnnnnnnnnnnnnnnnnnnnnnnnnnnnnnnnnnnnnnnnnnnnnnnnnnnnnnnnggcacgannnnnnnnnnnnnnnnnnnnnnnnnnnnnnnnnnnnnnnnnnnnnnnnnnnnnnnnnnnnnnnnnnnnnnnnnnnnnnnnnnnnnnnnnnnnnnnnnnnnnnnnnnnnnnnnnnnnnnnnnnnnnnnnnnnnnnatcaaacacaccgcatctcttatgctagagtaatctaaaatcatttgggtttgttctggttttaagaaaaggtaagcatttaagaaatccctcagaggataaggaacattttaaagacttaaattttagtgttgtatacatgaaaggtacagaagttatggggtctgactcaggcccagagagattatatgaatagtccaggcttacaagtttacagag

SEQ ID NO: 31969 - DNA, 455 bp, Homo sapiens
  misc_feature (1)...(455): n = a,t,c or g
gnngnnnnntnnnnncccccttganacngtttgacnnnnnnnnnnnnnnnnnnnnnnnnnnnnnnnnnnnnnnnnnnnnnnnnnnnnnnnnnnggcacgaggacagagagcaaagcaactgtgacataagaacaaaatccaccatgggaaaaagaagccagccctctcattttattatttatttataggtatttatttattcatatattattatttacatatctgttattattgctcaagtttttcctctatcttagccttgattcaaaaattacacttattaggcacctactatataccaaacacattcgtacacatcattttatttaatcccaaccacagtctaacaagattgcttccatcgttctcattttacagttaaggaaactgaggcttagcaagataaagtaatctgccaacctcataaagtagtaagtagtagagacaaaagtaac

SEQ ID NO: 31970 - DNA, 443 bp, Homo sapiens
  misc_feature (1)...(443): n = a,t,c or g
ganncccttgaannnnnnnnnnnnnnnnnnnnnnnnnnnnnnnnnnnnnnnnnnnnnnnnnnnnnnnnnnnnnnnnnnnnnnnnggcacgaggtgagggctggcagcaatggggggacacaagggagggggactggggtggagggtgttgggcatctgcaggacccaagtcgccaccctccggggcctggctcctctgggtttgggagatggtcttttctcccaggtcactgagacttctggaggggtgtgggactagagctgggtgtcacgtgaacccttcctggtagggtgacccccttcccctggagggggttttagagctgccgcctctgctccctctaacctctttggaggcagggttgggggtattgtcattcaaggccttttttttgtctgctccctccccgaccctgtgccctcttctggaggtttctcgtctgg

SEQ ID NO: 31971 - DNA, 428 bp, Homo sapiens
  misc_feature (1)...(428): n = a,t,c or g
anacttgatnacatctatgacnnnnnnnnnnnnnnnnnnnnnnnnnnnnnnnnnnnnnnnnnnnnnnnnnnnnnnnnnnggcacgagaaaatgtcattatgcggttgcataactgtatttattgttatgttcttttttggactgtttttatattttggattatactttggaaaaattactgagcctctcttgagctccagtttccttctctttgagatgggacaaataataggacctacaccatagggtgctacttcactggattgtgtgggagagtacatgcggagccctagtatgttctttcctttacttgtacaactcaccaggatgacagctgtcatgaataaagagtgtgctttgccctgcccaactacaaggtcccactaccagttgaggagtatactctgattcattgtgaaaatgccaac

SEQ ID NO: 31972 - DNA, 520 bp, Homo sapiens
  misc_feature (1)...(520): n = a,t,c or g
gnnnnnnnnnnnnnnnnnnnnnnnnnnnnnnnnngnnnnnnnnnnnnnnnngnnnngntnnannngnnnnnnnnnnnnntnnnntnnnacttgaanactttgangacctgatacgaannnnnnnnnnnnnnnnnnnnnnnnnnnnnnnnnnnnnnnnnnnnnnnggcacgagcttgcaataggaagccgagcgtcttgcaagcttcccgtcgggcaccagctactcggccccgcaccctacctggtgcattccctagacacctccggggtccctacctggagatccccggagccccccttcctgcgccagccatgcctttaaaccgcactttgtccatgtcctcactgccaggactggaggactgggaggatgaattcgacctggagaacgcagtgctcttcgaagtggcctggaaggtggctaacaaggtgggtggcatctacacggtgctgcagacnaaggccaaggggacaggggacgaatggggcgacaactacttcctgggtggggcccgtacac

SEQ ID NO: 31973 - DNA, 429 bp, Homo sapiens
  misc_feature (1)...(429): n = a,t,c or g
tttgaanaccttnnnnnnnnnnnnnnnnnnnnnnnnnnnnnnnnnnnnnnnnnnnnnnnnnnnnnnnnnnnnnnnnnggcacgagtggctcggcgtggaaatgagattcactaccaatgttaaccatatactaatctgaatgcgaaacaaaaatcagtaagactaatgataggcctattactgtgtgtataaaagttttatgattattttgaaatatttaatatggaaaattcttcataggatttgaaatttttcggtgtagaacttttcagtatcgcatttggcaataaaggaaagtaacaataacagcacctaagatataccacttaaagagactgaaatcattttaattctgttaacagtaagaaaagagtttctgtcagacaaagagcaacaaattccttctgccatgtgctaccatttaatgaa

SEQ ID NO: 31974 - DNA, 423 bp, Homo sapiens
  misc_feature (1)...(423): n = a,t,c or g
ttganacnttatgacnnnnnnnnnnnnnnnnnnnnnnnnnnnnnnnnnnnnnnnnnnnnnnnnnnnnnnnnnnggcacgnnnnnnnnnnnnnnnnnnnnnnnnnnnnnnnnnnnnnnnnnnnnnnnnnnnnnnnnnnnnnnnnnnnnnnnnnnnnnnnnnnnnnnnnnnnnnnnnntattcttttttgttgctgagtaatgttccagtaatggatgtgccacaagatatttatccattccttgtggatggatatctgtctctacctttagtgtgctgtgtctgagtctgagtcttgctgtgttacccaacctgnnnnnnnnnnnnnnnnnnnnnnnnnnnnnnnnnnnnnnnnnnnnnnnnnnnnnnnnnnnnnnnnnnnnnnaagccagcttgtgctgtgtgttattaagtagcggaacact

SEQ ID NO: 31975 - DNA, 423 bp, Homo sapiens
  misc_feature (1)...(423): n = a,t,c or g
ctttgaanaccttctnnnnnnnnnnnnnnnnnnnnnnnnnnnnnnnnnnnnnnnnnnnnnnnnnnnnnnnnnnnnnnnggcacgaggtctaatgttttcatccaaagccaatcttagacataaagctgtagcatgatgccaacttttcagatcggcttctggctggaatttcacccctagagtaacaaaaaataaataatagaccattagagctggaacagactgagaggtcatctagccagaacattctgtaactaaagcatagaaacatgaagcagtttgcccaacataacacagactgttcatggcacaagggggattacagaccaggtttttctagtcctttcctggtgacctgggcatgccaccaccctccccactgctcccaacctgataagcacatatatacccggngaattcatg

SEQ ID NO: 31976 - DNA, 421 bp, Homo sapiens
  misc_feature (1)...(421): n = a,t,c or g
tttgaanaccttnnnnnnnnnnnnnnnnnnnnnnnnnnnnnnnnnnnnnnnnnnnnnnnnnnnnnnnnnnnnnnnnnggcacgagnnnnnnnnnnnnnnnnnnnnnnnnnnnnnnnnnnnnnnnnnnnnnnnnnnnnnnnnnnnnnnnnnnnnnnnnnnnnnnnnnnnnnnnnnctaatcaaaaagaacaaagccagaggcatcacaaatatatgttaaggcaagtggcctagaggcagtcaggaccatatacttggctatgaaaagtacttgaatttaatatgcattatttaagaggcaaaaaacccaatagtgtttgactcacaaaataaacacagcatttggctggtaggagtgtataaagtgaagtgaaatctcgagacaaataaagaaaatttaaaataccattctgaaataattg

SEQ ID NO: 31977 - DNA, 423 bp, Homo sapiens
  misc_feature (1)...(423): n = a,t,c or g
ttganacattttgacnnnnnnnnnnnnnnnnnnnnnnnnnnnnnnnnnnnnnnnnnnnnnnnnnnnnnnnnnnggcacgagaataccctgtcaggaacacattatgcagttgatagacaaaaaaacaaaactgaggctagttacctgtgtccaaagcttcacatctagtaaattgaagccacactgcaaacccaggcctgtctgctttcaatcacacactctttcgagtaaataccataaattatttgcttcaacctggacaaatgaaacaataacagaccttcaattgtacttttaaaagtccaccatcagtgtaaaacagaaaacgcagcctaacatttacagctcgacaagtgacgacacaaagcatatccattagggcaactggttcttaggaagacactgnaacgngcggtaaagata

SEQ ID NO: 31978 - DNA, 423 bp, Homo sapiens
  misc_feature (1)...(423): n = a,t,c or g
annacnttnnnnnnnnnnnnnnnnnnnnnnnnnnnnnnnnnnnnnnnnnnnnnnnnnnnnnnnnnnnnnnnnnnggcacgaggtaactttgtgttccccaccattctttcctttatgaaccgatggtgcaacagcatgactacctgaaattcttagtcactcccagctgctttagtggagggaaaatgcccacagcacaggaaatagtcctgcccttcgagagaggccaggggatgggagcgtgtccagagaagggcgatgggttgatgaagggtggccacagcgcccgggaggaaggggccagaacgctctctgttctgttccatgaggaggattatgctggtgtgtgtagtccactggttcagagttgtccagaaatagctcagtgtaaggaacaattttccaaagatcaaaagaacttgt

SEQ ID NO: 31979 - DNA, 445 bp, Homo sapiens
  misc_feature (1)...(445): n = a,t,c or g
tttgaataccttntttgaanaccttnnnnnnnnnnnnnnnnnnnnnnnnnnnnnnnnnnnnnnnnnnnnnnnnnnnnnnnnnnnnnnnnnnggcacgaggtgtgttgttgtgtataatatcccaaataactggatcttaaaatagacatgagtgaccagtgttcagagaattagttgtttgttagtttcttcagtaagtattgacttaaggccaccatgtgctaggcaccaggtgttaatggttaggagggagttggaatctaatgttctgttactgagattcttaggaatttgaagaaaacacaagagaacatttaagcctgaagtgcatctaggcccattgcaagttgcatttttaaataagtatttatttatttatatctaaaaccattgcttttcaaaacaatgggaatttacagatcttgggtgtgtggntgtttggaac

SEQ ID NO: 31980 - DNA, 437 bp, Homo sapiens
  misc_feature (1)...(437): n = a,t,c or g
ttgnntncnnnntttgannaccatnnnnnnnnnnnnnnnnnnnnnnnnnnnnnnnnnnnnnnnnnnnnnnnnnnnnnnnnnnnnnnnnnnggcacgagatagtattatgtccctgagtatatccagccagtcctcagtttacagcatttccctactgcaaatggtcctgccctgagcatcctgtgcatcctccttgtcctcactaatgggtacttatttctgttcacagtgctactgtagaattaggagcatgctgcgtgcaacttgggagatggctgagctctgtcattctctgctttcaggcaatcccgccctctcttttacaaccacccttacactgtctgctgaagaacaggggatggtgtggagggctccaggttctcacccaggcctnnctgagcaagggaccctnctttnctgctctcagagaaccccct

SEQ ID NO: 31981 - DNA, 438 bp, Homo sapiens
  misc_feature (1)...(438): n = a,t,c or g
ttgnnttnccnnnntttggaanaccantnnnnnnnnnnnnnnnnnnnnnnnnnnnnnnnnnnnnnnnnnnnnnnnnnnnnnnnnnnnnnnnnnnggcacgagacctaagaaaatattttaaaagacaaatttacagagagaaaaacgctatgaaagccatagactatggctcatcagggctattatttgctggattgagaaaacagttagtggtctatttaatattacactgttctatagtttagcaaaacccactaagaagggggttgaggaggcaactctattgacaacctgtgaatcaatcaatatctagcagcaaaacagaaatgacattagctccttccaaataaaataacttaatacataggtgatggaagacctgacaagccaaagacagacaataaaaggaccccaaatttagcccaatctgaagccctg

SEQ ID NO: 31982 - DNA, 428 bp, Homo sapiens
  misc_feature (1)...(428): n = a,t,c or g
acctttnatttgaaanaccatnnnnnnnnnnnnnnnnnnnnnnnnnnnnnnnnnnnnnnnnnnnnnnnnnnnnnnnnnnnnnnnnnnggcacgaggaaaatttcggcttcaacttgtagtccatttctttaaaatatgaaacaaaatttccacatgaaaacgattttagaatttgatttaatgagatctaattctaagtctaacattttatgattctctatattacgaatatataattagtattaaaaacttataacaataattttgaaacttcgatttaatgactaaaaccttactggcatcctgagattgcttttttctttaaactctctactgggagcagttcaactagtgtcatgtcacacataggtgaaggggagtggtaccgtcttgtaatctaggttttaacgggggtgcttagtggcatc

SEQ ID NO: 31983 - DNA, 428 bp, Homo sapiens
  misc_feature (1)...(428): n = a,t,c or g
tttgaanaccatntttnnnnnnnnnnnnnnnnnnnnnnnnnnnnnnnnnnnnnnnnnnnnnnnnnnnnnnnnnnnnnggcacgagccttctttaaggattaattttgaggtttctaagaaaatcctttgtatattagttcacattttctaatattaaacactgtcaatgtgaaatatgcagttaattttggacaatgaatcatttacttttcttgttggcatttggatgttttaaccttcatcgttaaaagacaaaagagcaaaagcagaatgctgtctaacaacaattaggtggtagaaacaaatatacatcaggcagaaaattcataaaattcaccaatattagggtgggttgggggcaaggagcaggaagaatgtccctactggtgtgactgntatttaatgacagataacccctagtacagatg

SEQ ID NO: 31984 - DNA, 453 bp, Homo sapiens
  misc_feature (1)...(453): n = a,t,c or g
nnnnnnnnnnnnnnnnnnnnnnnnnnnnnnnnnnnnnnnnnnnnnnnnnnnnnnnnnnnnnnnnnnnnnggcacgagtggaagaaaacaaacatggtacttgatgactgcccctttgtacccaagaagagataaacccaggtgctagaagacttacctcataaatccaagtctattaattggtgacaaagtacaaactaaaatggtgtcgatcatctaatcataagtgctagcgtctgtactggccactttgggtaacaaaataagtactcacgaacttttgttctgtcaaacagcaagtcattccctccctaagtgcttcctgctttcagacgttcccaaaagtcttcatcaaaccacttcatctaagagaaggtacaagtctccacctggttttgtttgtattccaacacatccacggtggatcagctaaagtaatggctccaattgtttc

SEQ ID NO: 31985 - DNA, 447 bp, Homo sapiens
  misc_feature (1)...(447): n = a,t,c or g
ggnnannnnnnnnnnnnnnnnnnnnnnnnnnnnnnnnnnnnnnnnnnnnnnnnnnnnnnnnnnnnnnnnnnnnnnggcacnnnnnnnnnnnnnnnnnnnnnnnnnnnnnnnnnnnnnnnnnnnnnnnnnnnnnnnnnnnnnnnnnnnnnnnnnnnnnnnnnnnnnnnnnnnnnnnnnnnnnnnnnnnnnnnnnnnnnnnnnnnnnnnnnnnnnnnnnnnnnnnnnnnnnnnnnnnnnnnnnnnnnnnnnnnnnnnnnnnnnnnnnnnnnnnnnnnnnnnnnnnnnnnnnnnnnccgngatcacaccactgcactncagcgcaggcaaccaagtganaccntttttcaaacaaaanaaagcaattatgtgngtncaatgcatgcttaccagggagtgntcntggaagcnctgcntgtggaaggaaggacngagggaaaagccagatgc

SEQ ID NO: 31986 - DNA, 454 bp, Homo sapiens
  misc_feature (1)...(454): n = a,t,c or g
nnnnnnnnnnnnnnnnnnnnnnnnnnnnnnnnnnnnnnnnnnnnnnnnnnnnnnnnnnnnnnnnnnnnnnnggcacgagactccacagtggctccttctaaaggtcacctctaaaggcaactcttagaggtaaggaccatttcacgtaaagttgtaaggatctgcttttgagaacataggctagggtgccgatagagatcagaccttactggaggacctcttcctaaatgatcccttcatcccagacactgccctccatgcctcagtctctgcagaagaggagaaagagaatcctcctcaacaagaggagggtggctggcttttacacagggagtggctagactggtctcttcgcagagaatagaaccagaaaacagacatcagacagactgaggtcgggcagcagggtggcatttctgtcttggacacacagcatgagtgtgagggaagcagc

SEQ ID NO: 31987 - DNA, 468 bp, Homo sapiens
  misc_feature (1)...(468): n = a,t,c or g
ttttggancccctctttnnnnnnnnnnnnnnnnnnnnnnnnnnnnnnnnnnnnnnnnnnnnnnnnnnnnnnnnnnnnnnnnnnnnnnnnnnggcacgaggctgcttaagcagtcaaatgttttggactgcacagacatgtgtggttcaactgcaaagactgcagagtagaggaatcttaaagtttagagagactgttaaagactggagtcagggaagatgagcatctttaagaaacaaacatcaccttgtcctccaagctatcgaagatctttgtcagaacctgcttatgcagattcagagataggaacaagtttaaagagttatccatggtgtggtccagtgaaaagcaagaggaagaaaaatgattctgctgtttccaatctgggaaagccactgggtgcttatcggtggcagagacatccgagttttaggtggaaagggaacaaaagggagagattgccaagtat

SEQ ID NO: 31988 - DNA, 472 bp, Homo sapiens
  misc_feature (1)...(472): n = a,t,c or g
nnnnnnnnnnnnnnnnnnnnnnnnnnnnnnnnnnnnnnnnnnnnnnnnnnnnnnnnnnnnnnnnnnnnnnnnnggcacgagcacaaatgttactccttatccttgagagtcatctgagcttgcatggataagcataggagccataatatacgtgctctatattttcatgttttattttgttcatcacagtgtacatttgagggcaagaggatgttttgatttgctggnnnnnnnnnnnnnnnnnnnnnnnnnnnnnnnnnnnnnnnnnnnnnnnnnnnnnnnnnnnnnnnnnnnnnnnnnnnnnnnnnnnnnnnnnnnnnnnccacccaagtagccgnnnnnnnnnnnnnnnnnnnnnnnnnnnnnnnnnnnnnnnnnnnnnnnnnnnnnnnnnnnnnnnnnnnnnnnnnnnnnnnnnnnnnnnnnnnnnnnnnnnnnnnnnnnnnnnnnnnnnnnnnnnnnnnnnnnnnnn

SEQ ID NO: 31989 - DNA, 471 bp, Homo sapiens
  misc_feature (1)...(471): n = a,t,c or g
nnnnnnnnnnnnnnnnnnnnnnnnnnnnnnnnnnnnnnnnnnnnnnnnnnnnnnnnnnnnnnnnnnnnnggcacgagtagcattttggtgatacccctgttcaaagagctgcaaaacttggaagcaacattaacatgcaatttaaaaacaaggcaaatgatttcaagttgttttccttggctctttacatgtcaactgacatacagatacggcttaactgttattgtttatttgaggagtcaatgctgagtttgaagtgacctggaaaatcagtctctatgaatgaacattctctgtggaataactataggcaaagattaaaggtgttaacgattaaagaactttaattagagaagtttaaagattaaacaaattgagaaaacacaaattcagtacaatctcaagtagaatctgctaaaatgtgttaaaatggatggtggcaaaaatgtangatagaaaaaggcttagttt

SEQ ID NO: 31990 - DNA, 480 bp, Homo sapiens
  misc_feature (1)...(480): n = a,t,c or g
ttnnntttggnnannnnnnnnnnnnnnnnnnnnnnnnnnnnnnnnnnnnnnnnnnnnnnnnnnnnnnnnnnnnnnnnnnnnnggcacgagaagaagaggaaatttggacataggaaaaggcatcggggatgaacagaggaaagaccactcacttgtgggtgctgtgagaaagcagccatgtgccagccagagagagaagactcaggacaaaccaaacctgctgacattgtcttgcagctctagcctccagaaccatgaaagaaatacatttctgtttgtttaagccatcttttctgtggtatttgttatggcaaccttagccaatgaataaaatgccaaaacactgggaatgtggtggagggtggtaataggaggtggggttgcaacacaggcagggacctggatacaaaggccacgtgttccatactgaggatattccatattattctgacaacnngagataggcactgaagaattaac

SEQ ID NO: 31991 - DNA, 482 bp, Homo sapiens
  misc_feature (1)...(482): n = a,t,c or g
ttnnnnttngntatnnnnnnnnnnnnnnnnnnnnnnnnnnnnnnnnnnnnnnnnnnnnnnnnnnnnnnnnnnnnnnnnnnnnnggcacgagagaactgggagtgagaagtggaattgaaaatgttctgagcaaagggaacactatgcagacatctcagacatccctcattatacacaggggcataccacaaggggattggttccaggattccctactcgtgtgccctcctcccccaacacacacacaccaatatcaaaatctgcacatgcctcagtcctgcagcaggccctgtggaacccgagtatgtgaaaagtgtgcctggcccctgggcctcagagcccctgtgactatgagctgtttgcatcccgtgaattctgtatttttaatttgcatgtgattgaaaaaacctgattnnnnnnnnnnnnnnnnnnnnnnnnnnnnnnnnnnnnnnnnnnnnnnntacaatcacgtaccgcataat

SEQ ID NO: 31992 - DNA, 453 bp, Homo sapiens
  misc_feature (1)...(453): n = a,t,c or g
nnnnnnnnnnnnnnnnnnnnnnnnnnnnnnnnnnnnnnnnnnnnnnnnnnnnnnnnnnnnnnnnnnnnnnnggcacgaggtggccaagaggaacttaggctgggtgagcttgggaaagctttcaccattctgcccagtccccaacccttcctctacccaaagtagaaggcctccaaagtcaaaaccaaaccagnnnnnnnnnnnnnnnnnnnnnnnnnnnnnnnnnnnnnnnnnnnnnnnnnnnnnnnnnnnnnnnnnnnnnnnnnnnnnnnnnnnnnnnnnnnnnnnnnnnnnnnnnnnnnnnnnnnnnnnnnnnnnnnnnnnnnnnnnnntaattccatnnnnnnnnnnnnnnnnnnnnnnnnnnnnnnnnnnnnnnnnnnnnnnnnnnnnnnnnnnnnnnnnnnnnnnnnnnnnnnnnnnnnnnnnnnnnnnnnnnnnnnnnnnnnnnnn

SEQ ID NO: 31993 - DNA, 424 bp, Homo sapiens
  misc_feature (1)...(424): n = a,t,c or g
annnnnnnnnnnnnnnnnnnnnnnnnnnnnnnnnnnnnnnnnnnnnnnnnnnnnnnnnnnnnnnnnnnnnnnnggcacgaggggaggcgggcagcggagccaagctgacccggcgagcggagccggggctggagagcggcgaccactgcggatctcggaaggaagaaatgatgtaaatcactcatccaaaccttaaggtcaaaggtgagaaggaaggtcaggaagaacatggcctggccaaatgtttttcaaagagggtctctgctgtcccagttcagccatcatcatgttgtagtgttcctgctcactttcttcagttattcgttgctccatgcttcacgaaaaacatttagcaatgtcaaagtcagtatctctgagcagtggaccccaagtgcttttaacacgtcagttgagctgcctgtgg

SEQ ID NO: 31994 - DNA, 456 bp, Homo sapiens
  misc_feature (1)...(456): n = a,t,c or g
ttggnnactttnnnnnnnnnnnnnnnnnnnnnnnnnnnnnnnnnnnnnnnnnnnnnnnnnnnnnnnnnnnnnnnnnggcacgaggaagtagaactggtattgaagagatatctttctatgggaatccagcaaaaatactgggttccaagaacttgcttgcctggggaactcccagattctttaaaaaccttacatgtgaaatagcttaacataaatatataggtttagacatactgattgatgtttcagtgcctatttttatatgcatttatatcgctcaggtcatctattttccacttgttctattaagtcatggttttgcaaatggtcaccatttaaatataagggacctattttgcttctttcatattcttcgacatttcctcaatgaaagaataaggaaagtttaggagtgagttacttagggtgtattctactctgaggatttcagtttta

SEQ ID NO: 31995 - DNA, 456 bp, Homo sapiens
  misc_feature (1)...(456): n = a,t,c or g
anantttgaatanccgnnnnnnnnnnnnnnnnnnnnnnnnnnnnnnnnnnnnnnnnnnnnnnnnnnnnnnnnnnnnnnnnnnggcacgagaagggaatcagtgtgtaaggcacctgagaggactcagttctacccaaattcttgcattcaaacctgaatgcaaggccatgaagtcctttgaaatgtacagatattaagcaatttaataatataccatgtttcccttacataagcagacaaatatttacacccccatgacctgaagttttgttaggctgtgaccacatgaattcgcagtataaatgggtgagtcctttttgaaaacctcatcttcagtgtgcctgatctgtaaaactagagcctcaggtttgatcctaggtaggcttcccacaacgtggggaaaattagtttgtgagggaaagctgtttctgagcattatggcatagtgattaagag

SEQ ID NO: 31996 - DNA, 452 bp, Homo sapiens
  misc_feature (1)...(452): n = a,t,c or g
tttggatnnnnnnnnnnnnnnnnnnnnnnnnnnnnnnnnnnnnnnnnnnnnnnnnnnnnnnnnnnnnnnnnnnnnnnnggcacgagcgaaatattaaatgtaaggtctactttgttgatgtcaaaaataaaatcagatccacttagaaaatgtaaaattgtatcatcttttctttaaggagggtacattgtgatccaggagacgttaaactgaaagtggtgagaggctcagaagcacagttacaggatggtttataaagtaaaaatgaagaaatcatttaacctttacaatgattagttattacaatgacggtttcctgatagcaggagatttgttaaagatgactgctttatgccatttttggaaggcaactcaagttttctttatgattattagagactttacaagaaataaccaaagttaagttttgcttatgttcagaaattaagctg

SEQ ID NO: 31997 - DNA, 401 bp, Homo sapiens
  misc_feature (1)...(401): n = a,t,c or g
ancagctatgacnnnnnnnnnnnnnnnnnnnnnnnnnnnnnnnnnnnnnnnnnnnnnnnnnnnnnnnnnnggcacgagggaagatttctttccatagattagtataatttacgtgggctgtttgaagagattaccttcttagtggttcccttaaagctctttgttatgtatatcctgaagcccagtcacttcttcccacttgtttttgagtgtttgatctagacaatgtaaaggcacttttaagataaaaattattgtatttgggggactttgggagactcacttcccaatcattttgtttagaagcaaaaatgattaaacagtactttatgtcagatctgcctgtttaagggatttgagcacacctggtagcaaagaggtttaacctagtttctcagatg

SEQ ID NO: 31998 - DNA, 414 bp, Homo sapiens
  misc_feature (1)...(414): n = a,t,c or g
tttgaanttcgttacagctatgacnnnnnnnnnnnnnnnnnnnnnnnnnnnnnnnnnnnnnnnnnnnnnnnnnnnnnnnnnnggcacgagcaatcttctttcccaccttggtctaggtggtagctaacctactttcttcctattctgggcacttcatataaatggnnnnnnnnnnnnnnnnnnnnnnnnnnnnnnnnnnnnnnnnnnnnnnnnnnnnnnnnnnnnnnnnnnnnnnnnnnnnnnnnnnnnnnnnnnnnnnnnnnnnnnnnnnnnnnnnnnnnnnnnnnnnnnnnnnnnnnnnnnnnnnnnnnnnnnnnnnnnnnnnnnnnnnnnnnnnnnnnnnnnnnnnnnnnnnnnnnnnnnnnnnnnnnnnnnnnnnnnnnnnnnnnntgcagtgagccaagatagcaccat

SEQ ID NO: 31999 - DNA, 415 bp, Homo sapiens
  misc_feature (1)...(415): n = a,t,c or g
ttgnannnnnnnnnnnnnnnnnnnnnnnnnnnnnnnnnnnnnnnnnnnnnnnnnnnnnnnnnnnnnnnnnnnnnnnnggcacgagatcagttttattggggtataatttacatgcaataatgtgagaaattcttaacgggttgaatctatccaaacatttgaatcagttattgatgatcagttttgctcttattttatgtatgcatttagatgagttttgatacacaaatgcaatcttgtaaccatcatcacaattgggatatccttgtattccttttgacttaagtacttttaggaagcagatgcaccaaaaacacttttaaaaaatatttattttcgttactttatctttctctattcagacgatgacagtgagcctattttggggcaatggtttgaggagactatttctccc

SEQ ID NO: 32000 - DNA, 410 bp, Homo sapiens
  misc_feature (1)...(410): n = a,t,c or g
tnnnnnnnnnnnnnnnnnnnnnnnnnnnnnnnnnnnnnnnnnnnnnnnnnnnnnnnnnnnnnnnnnnggcacgaggaggagtcgcctcctgaaagagggggagcttaggtcttccttgccctgccccgcgttcaagtgatacacaacatgtggatgttgagatggattttctcctcaaatgatccctccaggagggcaggctgagcgctgtgaaaagcagctgtgtactcatctaaggagagggccggcagccatggaaaacagccctgcccggctccctgcgcgacacagacagcccctcagcctcacttcctgctgcctctctccccgggaccctggcgccggttgcgttctgctctgaaaaacaagaaaggatttcggagagaagcaggaggcagttgagctctgca

SEQ ID NO: 32001 - DNA, 407 bp, Homo sapiens
  misc_feature (1)...(407): n = a,t,c or g
caccnnnnnnnnnnnnnnnnnnnnnnnnnnnnnnnnnnnnnnnnnnnnnnnnnnnnnnnnnnnnnnnnnnnggcacgagaaatctcacaaaattgttttgataaacatactcttataattcttgcaacaccttgggaaatagttggttctatattactgttttatagctgaggagaaagactcacatcatttactaagatcatatagctagctagtaaatgtttgagtgaaaatacaaacaaaggttttctgactttaagagcttgagttttttccactataccatattgcatctgttgtaattgttaactaatgtgcattttaaaattctcatttgtcttatgtactgagcccttataccagtgctaatttatgtgactcctttctcctgcagctaagagaaaaat

SEQ ID NO: 32002 - DNA, 424 bp, Homo sapiens
  misc_feature (1)...(424): n = a,t,c or g
ggccccctttgaacnacccgtnnnnnnnnnnnnnnnnnnnnnnnnnnnnnnnnnnnnnnnnnnnnnnnnnnnnnnnnnnnnnnnnnnggcacgaggaacgacattcactaactctgaaaatacaaagatttaccttagcataaatatattgatatttcccatggaagacaataatggtgatttgtcttttctatgatgctgcctcttagtctgcatgatcatttttttctttttaaatagactttatttagagtnnnnnnnnnnnnnnnnnnnnnnnnnnnnnnnnnnnnnnnnnnnnnnnnnnnnnnnnnnnnnnntgctcatgaatagcctcccctgattattggcatcccccaaaagacnnnnnnnnnnnnnnnnnnnnnnnnnnnnnnnnnnnnnnnnnnnnnnnnnnnnnnnnnnnncg

SEQ ID NO: 32003 - DNA, 444 bp, Homo sapiens
  misc_feature (1)...(444): n = a,t,c or g
ttgnntttnnnnnnnnnnnnnnnnnnnnnnnnnnnnnnnnnnnnnnnnnnnnnnnnnnnnnnnnnnnnnnnnnnnnnggcacgaggaaggcctcaatctgtctctgaggcttcattaacgcagagagaaacagagtgcgaacaagtaaccactcacctctaagacatctattccattgtatcagagagggctgaggacacaaagaggaggaaactagaaagaatgtttataaagatcaggaaggccttacagtctaaatgaggggaaagcttgccagaaggaatgggagttcttctaataggaagagatagcatataaagtgagagaggcctgtgaagtgtttggcaagcttgggtaatcacaactgattccatgtgactaatgggagtaagggggtgggatggtgacattacaagagattaagatgctggcccgtggtggcac

SEQ ID NO: 32004 - DNA, 435 bp, Homo sapiens
  misc_feature (1)...(435): n = a,t,c or g
cggnnacnnnnnnnnnnnnnnnnnnnnnnnnnnnnnnnnnnnnnnnnnnnnnnnnnnnnnnnnnnnnnnnnnnnnnggcacgagccctgagagcctggtggggctcatggaggtaaaactcagactggtatggggacctccccagtgactattcccctggagtttttgtctcctactggtccatgctcagtctctgccatttgtcagttcccctttcctctctgctggtgctggctctagggtttctgccccgcaatgagctgtgattcttagcattgcatatctgtctctccatctttggggttattgttttttcatgtgacctcaattatctgatggatctgagaacagtcattgattttaagtttgccagctttcttgttgtgaggatgggagtgatgacttctgagcctttacaagctggacaggaaattg

SEQ ID NO: 32005 - DNA, 439 bp, Homo sapiens
  misc_feature (1)...(439): n = a,t,c or g
gnnttcnnnnnnnnnnnnnnnnnnnnnnnnnnnnnnnnnnnnnnnnnnnnnnnnnnnnnnnnnnnnnnnnnnnnggcacgagggtgttgacatgaacagagaagcctttacccacatcgtacctggacaagtccaaatgggaagaaacgctccgtctgcccctgggaaccacggtggaaggtttcacgccagtcttcgatgagtgcagggaatgtgcaattgtacagatccgtgttataatttatattggactcccctaaaaacagtccaaattgtaaagggagtttggagtagactgcaaaaatgaccacacattactctcctccctccatccatgccctgaggtagtggtcttcccacggtctctctggactggtctttttccagccagtggggcatcagcaaatgtggtacgaacagaggcttgaaaagtacttca

SEQ ID NO: 32006 - DNA, 462 bp, Homo sapiens
  misc_feature (1)...(462): n = a,t,c or g
ggngnnnnntgnnttnnnnntttgaanaccntnnnnnnnnnnnnnnnnnnnnnnnnnnnnnnnnnnnnnnnnnnnnnnnnnnnnnnnnnnnnnnnnnggcacgagcatctaccttggtgatcttgaagcaaagaacagaactgatgctcaggccaggctcacctgtagccttacgccgcaagcatacgtgaggcgccagctctgtcgctgaaggagcgcttactcagaggagcggtcggccccctcttggtgttaaggtctcttagttaacctggctttttggtgcaggtgtgatctttgaagctcaggcaggtccctgatgccatcctaaggtgaggacaggaacctcacccaccatcttcttagcgtgtccctgatgactctgtcctctgttagatggtcgttgtgcttctgagtaaaagtacaacccgactccgttctctccccttcctgcagcagagg

SEQ ID NO: 32007 - DNA, 439 bp, Homo sapiens
  misc_feature (1)...(439): n = a,t,c or g
gnnttcgnnnnnnnnnnnnnnnnnnnnnnnnnnnnnnnnnnnnnnnnnnnnnnnnnnnnnnnnnnnnnnnnnnnnnnnnnggcacgaggagttggaaatcatagccgtattcactagcattgaaatctttgagatgattcttaatagacatactgaacttaattagtatcataattaaggtcatataagaagggctagcttctatactttgcagtatgactcttgatatgtgaccctgggaagtcttcctctagttcttattggctaggcagggagaatcaaccagatggtcttggagttcttggatctgatatagtgtactcttctagcactgctgcttatattatgactgaaagaaagtgatgtaccacagcttttacctggttcgtgttgccaatactatgcttaactgagactggcaaagtgaagagtcaaaaat

SEQ ID NO: 32008 - DNA, 431 bp, Homo sapiens
  misc_feature (1)...(431): n = a,t,c or g
nnnnnnnnnnnnnnnnnnnnnnnnnnnnnnnnnnnnnnnnnnnnnnnnnnnnnnnnnnnnnnnnnnnggcacgaggtggggagtattcaatcctgcatcgccttaaagcagccatggggacagcatggcgggactatatttccatctgcgggcttcgtacacacggagagctgggcgggcaccccgtctcggagctcatctacatccacagcaaggtgctcatcgcagatgaccggacagtcatcattggttctgcaaacatcaatgaccggagcttgctggggaagcgggacagtgagctggccgtgctgatcgaggacacagagacggaaccatccctcatgaatggggcagagtatcaggcgggcaggtttgccttgagtctgcggaagcactgcttcagtgtgattcttggagcaaatacccggcca

SEQ ID NO: 32009 - DNA, 440 bp, Homo sapiens
  misc_feature (1)...(440): n = a,t,c or g
nntttcgannnnnnnnnnnnnnnnnnnnnnnnnnnnnnnnnnnnnnnnnnnnnnnnnnnnnnnnnnnnnnnnnnnnnnnnggcacgaggtagaatcctagatttcttctaagaggcagacaagggcctggccagactgccttctggttttgtccagcagttgagtgagtcttctgggattaggggcaatgcagacacagcagcaggctctgcccagcccctccaggccctggctttccttgatttgttcttcccttggctgataaagtcagccaaaacagggactagaaaaaagctttaaggtctaatctgcctttcttctcccgagaatgttgcatcctctgttgacacctctcaagtctctatgtcagagaggaatgaatgaatgaatgagtgaatgtcccacagcctggccacactgaatcatctttcaacttcttt

SEQ ID NO: 32010 - DNA, 433 bp, Homo sapiens
  misc_feature (1)...(433): n = a,t,c or g
nnnacnnnnnnnnnnnnnnnnnnnnnnnnnnnnnnnnnnnnnnnnnnnnnnnnnnnnnnnnnnnnnnnnnnnnnggcacgagtgaggttgtaatgaggtagggtggacccctaatctactatgactggtgtccttatacagattgacaaagtgtcaatctctgatgggatcctgcttcttttcaaaaagtcattttagagacaatcaaggatatttgaatttaaactggatattataaactaggaattattaattttcttaagtattactttattattagtagtattattattgtagtagtatttaataattagtattattaaagtatttagtatgactaaagtatgtaagtattgccctttcttaggtattaccattctgtaggagaatatccttgcttttaggagatacgtgtttaagtgtttaggggtga

SEQ ID NO: 32011 - DNA, 431 bp, Homo sapiens
  misc_feature (1)...(431): n = a,t,c or g
nnnnnnnnnnnnnnnnnnnnnnnnnnnnnnnnnnnnnnnnnnnnnnnnnnnnnnnnnnnnnnnnnnnnggcacgaggatgtactgtttgaagactggggcatacagaactagcacctaatgaatctcagtaaacatgctcgtaaattcactaggacataagaagggaagccgagaatcagacatgaaaaaatatccacagttttaaaacccctcatgtttgaaccgtgtcttgttgagctgcgttttatcatgttatgcaagtttggaccagggaagatgatctgaataaactgaggatgaccccacaaggtgggactccctcatgggcgaacgcagcactgggagttggtcttcctgggttctcttcacaagtgaactggggacaggtctcttcccatctaggggaattctagccgaaggggcaaagtga

SEQ ID NO: 32012 - DNA, 443 bp, Homo sapiens
  misc_feature (1)...(443): n = a,t,c or g
ttngnnttngannnnnnnnnnnnnnnnnnnnnnnnnnnnnnnnnnnnnnnnnnnnnnnnnnnnnnnnnnnnnnnnnnnnnnnnggcacgagcgttctctctgctcccttcactctggttttcaaaggtgcttggttcttttactttctatgattttcagatttctgccaggtaaatcagattggttcttaacttgtcaccactgcagcttggaatattgtatgttagggattgctacattagttacaactggtcgtgnnnnnnnnnnnnnnnnnnnnnnnnnnnnnnnnnnnnnnnnnnnnnnnnnnnnnnnnnnnnnnnnnnnnnnnnnnnnnnnnnnnnnnnnnnnnnnnnnnnnnnnnnnnnnnnnnnnnnnnnnnnnnnnnnnnnnnnnnnnnnnnnnnnnnnnnnnnnnnnnnnnnnnnnnnnnnntttaagtagaga

SEQ ID NO: 32013 - DNA, 425 bp, Homo sapiens
  misc_feature (1)...(425): n = a,t,c or g
nnnnnnnnnnnnnnnnnnnnnnnnnnnnnnnnnnnnnnnnnnnnnnnnnnnnnnnnnnnnnnnnnnnnggcacnnnnnnnnnnnnnnnnnnnnnnnnnnnnnnnnnnnnnnnnnnnnnnnnnncgttgcgccagtgcattnnnnnnnnnnnnnnnnnnnnnnnnnnnnnnnnnnnnnnnnnnnnnnnnnnnnnnnnnggttttcaanacgtccactgcccnagnggaattatatatagncanaggngggttttttgngttttttttgagggtttttttttttntttggnnncggngtntnattttgacccccngnnnaangggcctnnaccnannntggncnantggaancnnnncntantnggaagnttgangctggaannagnttngnnccnaaaaggntgnggnnncaatggcccttgagta

SEQ ID NO: 32014 - DNA, 443 bp, Homo sapiens
  misc_feature (1)...(443): n = a,t,c or g
tttgnnttngannnnnnnnnnnnnnnnnnnnnnnnnnnnnnnnnnnnnnnnnnnnnnnnnnnnnnnnnnnnnnnnnnnnnnnnggcacgagnnnnnnnnnnnnnnnnnnnnnnnnnnnnnnnnnnnnnnnnnnnnnnnnnnnnnnnnnnnnnnnnnnnnnnnnnnnnnnnnnnnnnnnnnnnnnnnnnnnnnnnnnnnnnnnnnnnnnnnnnnnnnnnnnnnnnnnnnnnnnnnnnnnnnnnnnnnnnnnnnnnnnnnnnnnnnnnnnnnnnnnnaggctgtcatgttagatccaccctcctcctcaggggaacccctgggctgctctctgggtagagatgggaacccaggcctcgggccagtgagtggaaggaaactttgggatgattgacttgggactgggctagaggtgaagaatctcccagtaggcaaagttcggcctt

SEQ ID NO: 32015 - DNA, 432 bp, Homo sapiens
  misc_feature (1)...(432): n = a,t,c or g
nnnnnnnnnnnnnnnnnnnnnnnnnnnnnnnnnnnnnnnnnnnnnnnnnnnnnnnnnnnnnnnnnnnnggcacgaggattcctccttgcagggtcctgcggctggagaggtcagtggtcagatgtttcctggaccctggctgtagggtgcacactggaggatcctgaggtcaatttgtttgtttattcagccagtattaattgagcaactattatgtgccagatgctgtagagctaaggataaagcagagaatgagatagctatagccctgctctggggtaactcacagcctgaggctgggtggagagagcaaaccaataggtagctaaaatgatttcaggctggaagggaggagtagaaagttataaggggatggtgtaggatgaagggggggtctccctgagctgcacctgaaggatgggaaggggatgg

SEQ ID NO: 32016 - DNA, 433 bp, Homo sapiens
  misc_feature (1)...(433): n = a,t,c or g
gannnnnnnnnnnnnnnnnnnnnnnnnnnnnnnnnnnnnnnnnnnnnnnnnnnnnnnnnnnnnnnnnnnnnnnnggcacgagaccactgaaattccaatgagggctatttagttaatagtattatacttaggttaattttctggttgtgacaattgtaccacggtcatataagatggcaatgtttaggaagctgagtaagggctatatggaaactagataatttttttttttgcaatatttctgtaagtctaagattagttcaaaatttaaaatgagtnnnnnnnnnnnnnnnnnnnnnnnnnnnnnnnnnnnnnnnnnnnnnnnnnnnnnnnnnnnnnnnnnnnnngcacatagggacagatgctgtgtctgcttatgtgaggtccctcgagtgctcaggttcanagacagaaggtggaatgggggctgcca

SEQ ID NO: 32017 - DNA, 422 bp, Homo sapiens
  misc_feature (1)...(422): n = a,t,c or g
cgctnnnnnnnnnnnnnnnnnnnnnnnnnnnnnnnnnnnnnnnnnnnnnnnnnnnnnnnnnnnnnnnggcacgagcgaatatacagaaatttagattagagctactgtgtaacagaggttagagcacagaccttgaagagatgagaatccggaaaggcaggataagacatgtaagagagggcagagccaggagaattttagggaaatttgctgaatcttaccaagcagagcctgaagcacccccctacccaggttcatttatgtgaacccataattccctttattatttaagctgttttggttggatttttattttatttgtaaacaagcagaagattcctaattgatacattgacccagaagagattagctaggtactttgagccccataggagcagggtatccttactcttgggtactgg

SEQ ID NO: 32018 - DNA, 421 bp, Homo sapiens
  misc_feature (1)...(421): n = a,t,c or g
nnnnnnnnnnnnnnnnnnnnnnnnnnnnnnnnnnnnnnnnnnnnnnnnnnnnnnnnnnnnnnnnnnggcacgaggcagtattaatcacaatagccaggatatgtcatcaacctgagtccatcagtggatgaatggaaaaagaaaatgtgannnnnnnnnnnnnnnnnnnnnnnnnnnnnnnnnnnnnnnnnnnnnnnnnnnnnnnnnnnnnnnnnnnnnnnnnnnnnnnnnnnnnnnnnnnnnnnnnnnnnnnnnnnnnnnnnnnnnnnnnnnnnnnnnnnnttacgtgcaatctaaaaaagttgaactcatagaaacaaagtaaaatgctaactaccagaggctggaggctggaggattgggaagatgttggtcaagggacacaaaaatttcacttttataggaggaataagttcaagag

SEQ ID NO: 32019 - DNA, 424 bp, Homo sapiens
  misc_feature (1)...(424): n = a,t,c or g
naacagctnnnnnnnnnnnnnnnnnnnnnnnnnnnnnnnnnnnnnnnnnnnnnnnnnnnnnnnnnnnnnnnggcacgagagggcgcgagtggctgtgaaggctatggtgtgtgtgcccacaggcgtctgctaaacatgtgtctggagacagctctcaactgtcagcctgcggttctctgtaaaatggaagtcagttactttgttaaaagttataataaggccagccacctcgcctggccaacgtaactattttataaaacaaaacatttctattgagaagaacagcattgcgtcagtgtttctgcagatctcctgggtgtctgactgaatagaggatacctggattctcggttgttgcagtatctctttcgctcagcccctgggaaagtccactgtaccctcatgagagaatgacagaagaaac

SEQ ID NO: 32020 - DNA, 422 bp, Homo sapiens
  misc_feature (1)...(422): n = a,t,c or g
natnnnnnnnnnnnnnnnnnnnnnnnnnnnnnnnnnnnnnnnnnnnnnnnnnnnnnnnnnnnnnnnnnnnnnggcacgagaactggctcacacaccccgcgggaggatggtatttatatgggctctccctctgacctcttggcagcaaatgtaagaaagtccttttttgagccttaggggcgggcccaggactttcaactacccattcaaacagggttacaattcccctcctccacaattaagttcctttcctattctccatgcatgcatgaattgcagtgacattgacatgggggcttgacattagtctttgaaggtcatttaaatcatcctccttccaaactgccttaaaagcagtgtatcatccattccacaatgtctgagtgtagggtttgactagatcgtactcaaagcagaatcac

SEQ ID NO: 32021 - DNA, 424 bp, Homo sapiens
  misc_feature (1)...(424): n = a,t,c or g
ttgnnttcgannacagcttgacnnnnnnnnnnnnnnnnnnnnnnnnnnnnnnnnnnnnnnnnnnnnnnnnnnnnnnnnnnggcacgaggctaattttctctgtatttttccaattttcatatatgtgctgctgaagcgatcaccctaagtactgtttgatttttgcactcctgccaacttaattagggctgcaccaatagagtgggttatcaaacttttggatttttgccaatctcatttgtaaaatatactttattgatatggtttagatttgcataccttttttaaaaaagcaaaagcctggacatcttttcaagatgtttaaaggnnnnnnnnnnnnnnnnnnnnnnnnnnnnnnnnnnnnnnnnnnnnnnnnnnnnnnnnnnnnnnnnnnnnnnnnnnnnnnnnnnnnnnnnnnnnnnnn

SEQ ID NO: 32022 - DNA, 418 bp, Homo sapiens
  misc_feature (1)...(418): n = a,t,c or g
nnnnnnnnnnnnnnnnnnnnnnnnnnnnnnnnnnnnnnnnnnnnnnnnnnnnnnnnnnnnnnnnnnnnggcacgagggaagaatggatngaanttganncncggatcagattatnatttgcacaggtgtatcanggncagaagaagncnaaagaanctttgacccactatcatcagcttngnaatatgttgagatcagtaaaggtgaaacaagncgngantgngtacccatattganagaattaccagntgtagancaagccctgggactccacnatgtatccatcaaccacttccttcaggcacatcgtcatcatcctgagtanaagcccctctcaagtggaggcatcagactcggcacacatcggcgcccatgctgctgtcacttnagggagacacgagcaccatgagaacaacct

SEQ ID NO: 32023 - DNA, 417 bp, Homo sapiens
  misc_feature (1)...(417): n = a,t,c or g
nacngctnnnnnnnnnnnnnnnnnnnnnnnnnnnnnnnnnnnnnnnnnnnnnnnnnnnnnnnnnnnnnnggcacgaggaacaagaagaattccttgtcttggaagtgcttctagttaggaattcatattaatatacagcaaacacaacagaaaaaacagataaatgaatgcacagttgtattttaagtgaattttgatgggaaggaagtgagcaggttggcccatttaggaagatttcctgaagaatatacaactttaaatgtatttctgcttatgaatgtggctttgataggcacagagaataactgaaaaaaggatggagttaaaaatgattataggctgatccaggttggagtggagattggtttcactgtaacagtatgtgttctttggaaatgaggtagtggaaaataaggt

SEQ ID NO: 32024 - DNA, 419 bp, Homo sapiens
  misc_feature (1)...(419): n = a,t,c or g
atnnnnnnnnnnnnnnnnnnnnnnnnnnnnnnnnnnnnnnnnnnnnnnnnnnnnnnnnnnnnnnnnnnnnnggcacgaggggggaatcaggatgaggatggccaagcctctggagcaggcggtagctgccatcgtgtgcaccttccaggaatacgcagggcgctgtggggacaaatacaagctctgccaggcggagctcaaggagctgctgcagaaggagctggccacctggaccccgactgagtttcgggaatgtgactacaacaaattcatgagtgttctggacaccaacaaggactgcgaggtggactttgtggagtatgtgcgctcacttgcctgcctctgtctctactgccatgagtacttcaaggactgcccctcagagcccccctgctcccagtagcctctgcttcaggggg

SEQ ID NO: 32025 - DNA, 426 bp, Homo sapiens
  misc_feature (1)...(426): n = a,t,c or g
ttnnnnttggnnnacnnnnnnnnnnnnnnnnnnnnnnnnnnnnnnnnnnnnnnnnnnnnnnnnnnnnnnnnnnnnnnnnnnnnnggcacgagcacggactctgtgacttcatgatccatcacttctgtctctcccaccagacggtggtcaccttctcaaggacagggactgtttctgatttgtctgaactcccagcactggggcaaggactcacctgtggcaggctcatgaggggcttgcggaatgaaggtgcacgagacagagagagacagggagtaaacgaattaaatggagtaagcgcagggtgagcagggaagagggtgagccgtgacctctccacttctgccagcccccacacttctgccagcccccacactgggtgtctgaggccagagtggtcccctgccttgggaggacaggtcaaga

SEQ ID NO: 32026 - DNA, 425 bp, Homo sapiens
  misc_feature (1)...(425): n = a,t,c or g
tnnnntttgannnnnnnnnnnnnnnnnnnnnnnnnnnnnnnnnnnnnnnnnnnnnnnnnnnnnnnnnnnnnnnnnnnnnnnnggcacgaggcatagggctcnnnnnnnnnnnnnnnnnnnnnnnnnnnnnnnnnnnnnnnnnnnnnnnnnnnnnnnnnnnnnnnnnnnnnnnnnnnnnncaatcctcccgccctccacctccaaaatgagactttaagaggcaggaggcaggaacaaaaaccagaatcctgagttcaaatttcaggtctttcacctgctcacagtgtcaccttgggcatgtctctgagcctcagtttacccattaggacaataggaactgagttagggttagacgagccaatgtatcacatggacttggccccatgcttagcagataataagcgctcattctctccgcatcatga

SEQ ID NO: 32027 - DNA, 427 bp, Homo sapiens
  misc_feature (1)...(427): n = a,t,c or g
ttnnntttgaannnnnnnnnnnnnnnnnnnnnnnnnnnnnnnnnnnnnnnnnnnnnnnnnnnnnnnnnnnnnnnnnnnnnnnggcacgagaagccacataacctagaaatattgggcgggggggaaattaagaaaaagttaannnnnnnnnnnnnnnnnnnnnnnnnnnnnnnnnnnnnnnnnnnnnnnnnnnnnnnnnnnnnnnnnnnnnnnnnnnnnnnnnnnnnnnnnnnnnnnnnnnnnncaaacacacagagcccatacaaggcaccttttgcatcaagagaaatgtaacagagatgcagtattaaatcataattgcataaaaataactaannnnnnnnnnnnnnnnnnnnnnnnnnnnnnnnnnnnnnnnnnnnnnnnnttggtgagctcgtatgtttccaagtgtctgcttaaaacacca

SEQ ID NO: 32028 - DNA, 420 bp, Homo sapiens
  misc_feature (1)...(420): n = a,t,c or g
nnnnnnnnnnnnnnnnnnnnnnnnnnnnnnnnnnnnnnnnnnnnnnnnnnnnnnnnnnnnnnnnnnnnnnnnggcacgaggctcataacccagcaggacttactaagaggctagcagaacttgttttgttgttatcaacctaccacagtctccaaaattggaacattccccgttagaggagacatcactgggatcaggggttagaggggttagagcatcccatgttcctggtaagaacttactccattctgcctctctgggaaaagattacaggtgttttcttttttcagtgaaagtccaggctaattaagggaagcgctgagaaaaccacttgtagaaatcggtgggagtcagagagaggacctgcaggaattggggcttagcttatccctccctgacgagaagcttattaggatgcag

SEQ ID NO: 32029 - DNA, 376 bp, Homo sapiens
  misc_feature (1)...(376): n = a,t,c or g
tttgnanaccttgnnnnnnnnnnnnnnnnnnnnnnnnnnnnnnnnnnnnnnnnnnnnnnnnnnnnnnnnnnnnnnnnggcacgagagggggtgggcgaagagagcgccagtgcgtagcgactattctgggagaggaggtgctcggaggaaagggcgggggttgctgatgtaatggggagaagtgattaatccttcggttcgccgtttcagcttcccccctaccccaaccttcacccgatttttttgagctgaaaaaaaagtggaacgagggagccaatctttggtaactcgggttttctgtggtaggtgggttcaaaatctgagctgtagggagcgctagagatttcgtgccctttagccaagctgagggtatttg

SEQ ID NO: 32030 - DNA, 405 bp, Homo sapiens
  misc_feature (1)...(405): n = a,t,c or g
gnnnnnnngnngnnnttnnnnttntngcctttcnananctcttngtgactgcnnnnnnnnnnnnnnnnnnnnnnnnnnnnnnnnnnnnnnnnnnnnnnnnnnnnnnnggcacgagggataaaatacaaaaatcatacttttaaggacactggaggactgtggaatcatcaagctctttattaactataattcttaggaagaaagaaccctttctagataagcagagattactggtaattttcttcctggggtatattgattctgggtacagattgagattcatcattggcacaagcaggaggacttcactgggagaaagaaactcttgaggactttctgcaggactaggtatgaaagaaaatgaaatcgttggcagccttgacaaacatgagggcagatgtagag

SEQ ID NO: 32031 - DNA, 366 bp, Homo sapiens
  misc_feature (1)...(366): n = a,t,c or g
acttgnnnnnnnnnnnnnnnnnnnnnnnnnnnnnnnnnnnnnnnnnnnnnnnnnnnnnnnnnnnnnnnnggcacgagagtaaaggctctcccacttactaacttattcaccttgcgtaaatcacttaacttccctcagccttggtgtctttcagctgtcaattggcaattgtcacactctttgtggtatctatgtctcagaagcttcagaatcaagcaatctaatccctgtcgagagcctgaaaaccttatagttctcactattgggtactgtttatgttgacattttttcttcacaggaggttcacaacacatccgttgaaatgctgggattgtgactgactcagttaggcaggaagaacaagtc

SEQ ID NO: 32032 - DNA, 370 bp, Homo sapiens
  misc_feature (1)...(370): n = a,t,c or g
naccntnnnnnnnnnnnnnnnnnnnnnnnnnnnnnnnnnnnnnnnnnnnnnnnnnnnnnnnnnnnnnnnnnnggcacgagtgaaggttccaactaaatttactttgtccccttgtcccagcatccttggaataaagtagcttttgaggtaataaggagtagtccctaagaacccacgtggaaggtcacacttctgatctgagacctttcagcagagcctcagagcagagtggaaaaggccaggaaagagcatgtctggaactgcctgttcactgaagacattcttggcactcctgtacagttaaataacacttggtgatgtcagcacatgcagaaaccatggcagactgtccagtggatgggctttcagg

SEQ ID NO: 32033 - DNA, 374 bp, Homo sapiens
  misc_feature (1)...(374): n = a,t,c or g
ttggnnacttgnanacagctnnnnnnnnnnnnnnnnnnnnnnnnnnnnnnnnnnnnnnnnnnnnnnnnnnnnnnnnnnnnnnnggcacgagnnnnnnnnnnnnnnnnnnnnnnnnnnnnnnnnnnnnnnnnnnnnnnnnnnnnnnnnnnnnnnnnnnnnnnnnnnnnnnnnnnnnnnnnnnnnnnnnnnnnnnnnnnnnnnnnnnnnnnnnnnnnnnnnnnnnnnnnnnnnnnnnnnnnnnnnnnnnnnnnnnnccagctgtgagagtctggattttaatctaagtaccgtggaaaccattggagtgactttaagcagaagggtagaatgatccagcttaagttttacgacacttattttggctgttgtgtggg

SEQ ID NO: 32034 - DNA, 375 bp, Homo sapiens
  misc_feature (1)...(375): n = a,t,c or g
ttgnanacttggannacagctatgacnnnnnnnnnnnnnnnnnnnnnnnnnnnnnnnnnnnnnnnnnnnnnnnnnnnnnnnnnnggcacgagcccaggaagtccagctgacttcacctctgaattgttgctggatcatattcagtagagcaaatgaggaacttcaggagccatatctgtggaagtcctctgcaaactacagagcttcatgtgatcacctgtaacaaagcttggcctcaagataaagtggctcatttgtgggggaaaaaaaagcaaaattaactgactcacaaaatgttgtagatgatgggatctcagaaaacaacccattcccctggctgggctgctttttttttttttaaaaggagtctcactt

SEQ ID NO: 32035 - DNA, 368 bp, Homo sapiens
  misc_feature (1)...(368): n = a,t,c or g
anaccnnnnnnnnnnnnnnnnnnnnnnnnnnnnnnnnnnnnnnnnnnnnnnnnnnnnnnnnnnnnnnnnnnnnggcacgagcggcacgagtttgttttttttttagtagctatcctaaagggtgttaaatcagtattcattgtttttgtgtcccaactaagtattgttcactgaaaagccaagtagtatattatggcttcattttctttcttgaattgttaatttttgtaaagttgttaattgcttcagtttctttcattaaattttttttttgggaaagctttttcctaaagccttctgttctactgctccaatttgcactgcttgttctttacccctgcaacaaagctgtcatcccaggattttcc

SEQ ID NO: 32036 - DNA, 377 bp, Homo sapiens
  misc_feature (1)...(377): n = a,t,c or g
tgganncctttgngnaccttntntgacatgcnnnnnnnnnnnnnnnnnnnnnnnnnnnnnnnnnnnnnnnnnnnnnnnnnnnnnnnnggcacgaggaattttaatagggcatcaaagataaagaatgctgaggtgaatccattcaatttggaataaggccgagaagagatggtcaggctccattctcagtctgaaccaagctccatgagggaaatcaaagtatgagagtgcagcaaacacagcaaggnnnnnnnnnnnnnnnnnnnnnnnnnnnnnnnnnnnnnnnnnnnnnnnnnnnnnnnnnnnnnnnnnnnnnnnnnnnnnnnnnnnnnnnnnnnnnnnnnnnnnnnnnnnnnnnnnnnnnnnnnnnnnnnnnn

SEQ ID NO: 32037 - DNA, 397 bp, Homo sapiens
  misc_feature (1)...(397): n = a,t,c or g
gnnnnnnagnnnntnnnntnnnnnntttgnanactncttgacnnnnnnnnnnnnnnnnnnnnnnnnnnnnnnnnnnnnnnnnnnnnnnnnnnnnnnnnnnggcacgagnnnnnnnnnnnnnnnnnnnnnnnnnnnnnntcaggagtcttctttgagacttcgtctcaaaaaataaaaataaaaaaacaaacaaaaaaaacaaggtatcacttacaaatgttctgttttgattcacaaaagcagagactacaaaatttgtgtggactgtacatagcttcagaggaaagaggaagagttctctatatatccagaaagtagaacattaaaaagacatcagccgtattcttaacaaaagctgtcatcctccaccatcggttcatcccctcctgtgaggtcc

SEQ ID NO: 32038 - DNA, 373 bp, Homo sapiens
  misc_feature (1)...(373): n = a,t,c or g
tttgaanacccttgnnnnnnnnnnnnnnnnnnnnnnnnnnnnnnnnnnnnnnnnnnnnnnnnnnnnnnnnnnnnnnnnggcacgaggtcatttctgcagagcctcaggttttcatcaggaagtactttaaaactgacactgcttagagaacttttttttgttgattgctgcttattctggaattccttcaaagttggaacaattgccaaatagacgtcgaatgtttgtctattaagtgacagggtttgtaggttcataaagtgcaataactgtgggcactgccacgaaatgtaaatgtcctttgagataactgtgtggactgtgttggcagaagtacgcattctgctggtgaggtatcaaatgagggagtgtc

SEQ ID NO: 32039 - DNA, 372 bp, Homo sapiens
  misc_feature (1)...(372): n = a,t,c or g
ggnnacttggannnnnnnnnnnnnnnnnnnnnnnnnnnnnnnnnnnnnnnnnnnnnnnnnnnnnnnnnnnnnnnnnnnnnnnnggcacgagcggcacgagnnnnnnnnnnnnnnnnnnnnnnnnnnnnnnnnnnnnnnnccctcctcttcccctctttctttcctgccttcctgcctttcttcaaagtaataggaggtaaattccacaactggtcccatgctccatgctgagggatatgtaagagaagcccctgtccctgaggaggggaccagctctctagggcaggagcctacacagggagtcattattcagccactcagtaccaaatgggtggaacagacagaaagacctggagagcagcaactgcccag

SEQ ID NO: 32040 - DNA, 367 bp, Homo sapiens
  misc_feature (1)...(367): n = a,t,c or g
naactnctatgacnnnnnnnnnnnnnnnnnnnnnnnnnnnnnnnnnnnnnnnnnnnnnnnnnnnnnnnnnnggcacgagacattctataacctacaggacagccccccacaacagagttgtctannnnnnnnnnnnnnnnnnnnnnnnnnnnnnnnnnnnnccttttcagcagtccaagtaaccccagagcttacatttcaactgcttttgtagtttttcaaatgcaatgtcgttttcctatttgggatacctcatcattttaacagtgagcaggggaaaattctctctactgagaagcatattcacttgaaagattaaagagtgagnnnnnnnnnnnnnnnnnnnnnnnnnnnnnnnnnnnnnnnn

SEQ ID NO: 32041 - DNA, 370 bp, Homo sapiens
  misc_feature (1)...(370): n = a,t,c or g
ttgnanacttnatgacnnnnnnnnnnnnnnnnnnnnnnnnnnnnnnnnnnnnnnnnnnnnnnnnnnnnnnnnnnggcacgagaagaacatcctttttttaggtgaacagcctgaggcagagggggtgtcgcttgccccaggtctcagctggcaggaaaactgggacttgacacaaagttacttgggctttcctccaccttcctccctgcccatggtccccactgattgcaaaacagtcataggggaggtgagtccaggctgggaatttggaaagcagacactgacataacgtggggtgcaggcgcaggagtagtatcacccccgctttacagacccagaaacggacaccgagaggttgcgaagccagaca

SEQ ID NO: 32042 - DNA, 371 bp, Homo sapiens
  misc_feature (1)...(371): n = a,t,c or g
nnctttggannacnnnnnnnnnnnnnnnnnnnnnnnnnnnnnnnnnnnnnnnnnnnnnnnnnnnnnnnnnnnnnnnnnnnnnggcacgagagaggcttgttaattctacagagtggttagccacacagaaaaccagaaagaagtacttttcctcagggccattttcctttataggatacttataggcattgatgttttaccaaagcaatgagttgtctcaggcttttagatcatagaatgatagaattttagagtcaaaaaaactcagtaaacatttttagtttatatgtgagagaattcaggtttagagatgtatttaagatcagatagtggcagaatctaggtctgctgatttccagtccaacatttta

SEQ ID NO: 32043 - DNA, 372 bp, Homo sapiens
  misc_feature (1)...(372): n = a,t,c or g
tttganaccttnnnnnnnnnnnnnnnnnnnnnnnnnnnnnnnnnnnnnnnnnnnnnnnnnnnnnnnnnnnnnnnnnnggcacgaggatgaagcggcggccgtggtgagagcgtggggaagggtggggtgagggggcgaggccgcagctagggcggcgaaactctcctcccctcggccccaccgcgtgggacggcgtgaacgtggtgtcagaagttggagaaacactggtgtatggtggggaaactctttgaggtttttttgaatagttagaggccacagctttgattagtattgcaaaaggatattcctattgtatgatattaaaataatgcatgcttgtttatattttcagggcacctttgatgattactt

SEQ ID NO: 32044 - DNA, 367 bp, Homo sapiens
  misc_feature (1)...(367): n = a,t,c or g
anacttgatgacagcttgacnnnnnnnnnnnnnnnnnnnnnnnnnnnnnnnnnnnnnnnnnnnnnnnnnnnnnnnnnnggcacgagtttcatgttcccattttataagtgagaactcagatttagagagtttagtgaactccaccagcatcccacagctgatgcagaggggttgaaacccctcacccatctgactctgcagcccatgtgcttttaccatgggtggtatcctcaggaaaaccctttggggaaagtgtctccatggagtccagtatgggcaaccagaacccaggctgtttttctttgggctctcacactgagggtatagctaagtagccaatgaaccagagcctctagctgtcatatct

SEQ ID NO: 32045 - DNA, 433 bp, Homo sapiens
  misc_feature (1)...(433): n = a,t,c or g
ggnnnnnnnnnnnnttgnanaccntnnnnnnnnnnnnnnnnnnnnnnnnnnnnnnnnnnnnnnnnnnnnnnnnnnnnnnnnnnnnnnnnnggcacgagggaaagcatccagtcattcaccatagaatattatgttatctgtaagatttttttgtgtaaaccttgtcagattttacaaatgcccttctattttttgtttgcagaatgatttatcatgaaatgttgaattgtgtcaaatgccttttctatgtctatgtggcttttattttttgtatcttcctttttatatatttctggatttcatttgttagtattttacttaaaatttttccacgttcatgagggatattagtttgtagttttcttctggtattatagtatctttgtatagtttttgtttcaggactatcgagtctcataaaatgagtaaaatt

SEQ ID NO: 32046 - DNA, 434 bp, Homo sapiens
  misc_feature (1)...(434): n = a,t,c or g
ggtgnntnnnnnntttgantccnncttcnnnnnnnnnnnnnnnnnnnnnnnnnnnnnnnnnnnnnnnnnnnnnnnnnnnnnnnnnnnnnggcacgagatggaaaacttgcaaacagaaacacattcctcatctcctattagtgctgggttgaaaagcaaacttcaaattagttaatgttcatgtcgttaagtggttccctattgactgggaagaagtaggtggggagctgacttggagaggggctactgctggcaggccaatagcaaaatgaaagccaaaatcactcagattgcaggagaaaggtttaaaaaaaaagcataaagaaattatctaggcagtacaggatctcatctctgttggatgctaaagacccccctccacatgacacatntgggtggcnctgtganaaanaaagaattttgggaaaggacct

SEQ ID NO: 32047 - DNA, 412 bp, Homo sapiens
  misc_feature (1)...(412): n = a,t,c or g
annacagctatgacnnnnnnnnnnnnnnnnnnnnnnnnnnnnnnnnnnnnnnnnnnnnnnnnnnnnnnnnnnggcacgagtcactttggtttccaattattaacacttttgctttcagaattattcttttgcttttccaattagaaaaatagaaaagatgtgattctttaatcttactgccttcccagagtgtgaataataattataatagctacaagttattgagttctcactatgtaccaggcatttcacctggcatcatctttgaccatcaaaagagccctgctaggtctgttcgtgatatcactagaaaactaagggtcacaaactctagaaagagaaagagccaggatttgaagactactaaagcctgcattgtttctgctttcgctgaagcttccagttgaccact

SEQ ID NO: 32048 - DNA, 420 bp, Homo sapiens
  misc_feature (1)...(420): n = a,t,c or g
ttggantncngttacnnnnnnnnnnnnnnnnnnnnnnnnnnnnnnnnnnnnnnnnnnnnnnnnnnnnnnnnnnnnnnggcacgagaaaattaatgatggataatgtgctgagtgtctggtaccagaatcgatactttatacattattccatttcattcctaagtaatgactaatagtgcaggtgctagagtttgggctgactagatgtgaattctggcttcacttaccagctgtgtgactctggataacgaactcgctatgcctgttttctgataagaaagtgggggcatagtactggtatctattccgaagagttattgngagtaggaaataagatantgcatgccaagtaacatgcncagtgcctgacacaaagtatgcagtnagccttattattattattaatcctcacagtaagcc

SEQ ID NO: 32049 - DNA, 428 bp, Homo sapiens
  misc_feature (1)...(428): n = a,t,c or g
ggtgnntntnnatntgannccntttgacnnnnnnnnnnnnnnnnnnnnnnnnnnnnnnnnnnnnnnnnnnnnnnnnnnnnnnnnnnggcacgagtcagcacatattttttgagtccttgcaagtgattagtttctatttgaggtgctgggaattcactgattattaagacagactatgtgtctactttcatagactacattctaaggacttactgggatatgaagaaaatggaaggccagtaattgatatggcactagcagagttgacttgaatttaaattctcaaggacttgttcacctgtctacaaaagtcttatttttttgttgttgttgctatttagcacagattagcttanaatancaaaggcagacactactaattgatcacatcactcttctctgcctgacgcccagatgagatttgtgat

SEQ ID NO: 32050 - DNA, 421 bp, Homo sapiens
  misc_feature (1)...(421): n = a,t,c or g
ttgaatttnaattaccttnnnnnnnnnnnnnnnnnnnnnnnnnnnnnnnnnnnnnnnnnnnnnnnnnnnnnnnnnnnnnnnnnggcacgagctccgtgccgccggcgccatgggcaattgccacacggtggggcccaacgaggcgctggtggtttcagggggctgttgtggttccgactataaacagtacgtgtttggcggctgggcctgggcctggtggtgtatctccgacactcagaggatttccctagagattatgacgttgcagccccgctgcgaggacgtagagacggccgagggggtagctttaactgtgacgggtgtcgcccaggtgaagatcatgacggagaaggaactcctggccgtggcttgtgagcagtttctgggtaagantgtgcaggacatcaaaaacgtcgtcctg

SEQ ID NO: 32051 - DNA, 414 bp, Homo sapiens
  misc_feature (1)...(414): n = a,t,c or g
cggnnnnnnnnnnnnnnnnnnnnnnnnnnnnnnnnnnnnnnnnnnnnnnnnnnnnnnnnnnnnnnnnnnnnnnnnggcacgagaactggagatatgctatttagtcttaacccaaacagatatgctgtttggccttaacccatgtggaaatttgtaaactttgtcaggatttccctgtgcatggtggtgaaatcatgtagggaaaaaaaaattcaccgtgtaatctctttagaagtcacaaaagaaaaagaaggttatcttgctcccaaaaggctgtaaaaagaataagtaaagtggccatagaggcctagtcttctcaggacagtgtccgggttgagagtctgtctcctgaagcgcactctggggaaaatcccttcctgccctcctgcaggtccttagggtcccagacccaga

SEQ ID NO: 32052 - DNA, 433 bp, Homo sapiens
  misc_feature (1)...(433): n = a,t,c or g
ggngnntnnnnnatttgaanaccnnnnnnnnnnnnnnnnnnnnnnnnnnnnnnnnnnnnnnnnnnnnnnnnnnnnnnnnnnnnnnnnnnnggcacgagggaaactgttagcttctccaccctaaggaagagggtgagggttagtgcttctttcaggatggagagactactgttcttatcctgtcacaacctgtactgtttgtcttttccagtaataccaaggcaaaaataaaagtagtgggaagggggcaaagggggaggtacaatgccaaaaacggaaggccctttatggtcctgatttcagacgcaaggtggggggaatgtacgctcctaggaggtttcatgatggtgctcactgaacactttaataagcgagaactccttgcagtctactgcactcaaacacaagattcttgagtttaatttcttttatt

SEQ ID NO: 32053 - DNA, 432 bp, Homo sapiens
  misc_feature (1)...(432): n = a,t,c or g
ggngnntnnnnnattgattcnntnaccagctatgacnnnnnnnnnnnnnnnnnnnnnnnnnnnnnnnnnnnnnnnnnnnnnnnnnnnnnnnnnnggcacgaggaaaagcacatgtatctgctgttaaaaacattagatactctatccagatggttgatttaaagctatgttgtaggtgttcattgtgggaaatttttcctcatgagaccaaggttctttcaaaatataaataaattttannnnnnnnnnnnnnnnnnnnnnnnnnnnnnnnnnnnnnnnnnnnnnnnnnnnnnnnnnnnnnnnnnnnnnnnnnnnnnnnnnnnnnnnnnnnnnnnnnnnnnnnnnnnnnnnnnnnnnnnnnnnnnnnnnnnnnnnnnnnnnnnnnnnnnnnnnnnnnnnnnnnnnnnnnnnnnnnnnnnnnnnnnnnnnaga

SEQ ID NO: 32054 - DNA, 419 bp, Homo sapiens
  misc_feature (1)...(419): n = a,t,c or g
atttggatnacnnnnnnnnnnnnnnnnnnnnnnnnnnnnnnnnnnnnnnnnnnnnnnnnnnnnnnnnnnnnnnnnnnnnnggcacgaggactacagagaacaatggtcaagacaattgacatttataatgggcatgcctaaaggtgttgaagtcataactgatcaggaatctatttcctgcttataaggaaagtgcgtgggcaaatctgaaggtgatttaacctataatccatcacctagatgtctccatctgaacaattctgacactttctcctcctccccagctgtcgcagcatgccatggaggctaaatttctataaaaatactgtnnnnnnnnnnnnnnnnnnnnnnnnnnnnnnnnnnnnnnnnnnnnnnnnnnnnnnnnnnnnnnnnnnnnnnnnnnnnnnnnnnnnnnnnng

SEQ ID NO: 32055 - DNA, 422 bp, Homo sapiens
  misc_feature (1)...(422): n = a,t,c or g
tnnnntttgggnnaccntnnnnnnnnnnnnnnnnnnnnnnnnnnnnnnnnnnnnnnnnnnnnnnnnnnnnnnnnnnnnnnnnnnggcacgaggaatatggatatgatgatacatacgcagaacaaagttacgaaggctacgaaggctattacagccagagtcaaggggactcagaatattatgactatggacatggggaggttcaagattcttatgaagcttatggccaggacgactggaatgggaccaggccgtcgctgaaggcccctcctgctaggccagtgaagggagcatacagagagcacccatatggacgttattaaaaacaaacatgaggggaaaatatcagttatgagcaaagttgttactgatttcttgtatctcccaggattcctgttgctttacccacaacagacaagtaa

SEQ ID NO: 32056 - DNA, 435 bp, Homo sapiens
  misc_feature (1)...(435): n = a,t,c or g
gngtgnnnnnnnnnntttganacnnnnnnnnnnnnnnnnnnnnnnnnnnnntnnnnnnnnnnnnnnnnnnnnnnnnnnnnnnnnnnnnnnnnnggcacgagtggagtgaagtcggtcaagaacaaatggcccctatgcacagagccataggaactgggggccttccctggacagtgatcatgccaggcctggacctttaggcctgcctccccaggactccttagatcccactctttctacagacttctgtgatcacagccccctgcgggcaggggggctctccctccaccaactctcaaggctcctcagcctaagactatggctcatgagaaacactcaggcctgacctaggcttgggagtcaaactgctcatattgagcatattgttaagtgggtaaagccaagtaaaggtactgggtgtttttgtgaccactt

SEQ ID NO: 32057 - DNA, 435 bp, Homo sapiens
  misc_feature (1)...(435): n = a,t,c or g
gagggnntnnnntatttgaatntgantaccntnnnnnnnnnnnnnnnnnnnnnnnnnnnnnnnnnnnnnnnnnnnnnnnnnnnnnnnnnnnnnnnnnggcacgagaagcaaagatgactaaaatacattaaagttttctgtaattgtctctaaggtctcccaacaaacatataccccatctgtttcaagctctgcataacctttcccagaagtcaagttcaggccctggcctcatggtgcctggcccaggttaagagtgctacctgatgatggagttaatacacgttgctttgacctctgactttaagatgtcctcccacttttccaccccgcaatctctagccctctctgggcacagcagcaattgggaactagttcctgtactgcctttatctcattttacaaaacaaacttctacaaagaagctggaaaggg

SEQ ID NO: 32058 - DNA, 435 bp, Homo sapiens
  misc_feature (1)...(435): n = a,t,c or g
gagtgnntnnannnatttgaatncntctatgacatgattacnaatttaatacnnnnnnnnnnnnnnnnnnnnnnnnnnnnnnnnnnnnnnnnnggcacgagagaaaataagggagatcaacattcaaggccagggaaattatatgtgcaaagaagatacaacgtgtgaatatttcccactaatttgcctgtaatgtatttggaataaaaagatacatttggcaagtagcaagaagtgaggtagaaccaagtagagagtagatgatgggggccttgaatctggaaaacatttgatcttgattttatatggtcagttatggaaagctattcttggtcatgtgatttaaagtggtgttggaggaagattgtgaatcatcaaattcacagtgtacctaccatgtctaaggcactgtctgtagacctttgccattcttca

SEQ ID NO: 32059 - DNA, 436 bp, Homo sapiens
  misc_feature (1)...(436): n = a,t,c or g
gngatgnntnnnnnnattgganttcgantaccatnnnnnnnnnnnnnnnnnnnnnnnnnnnnnnnnnnnnnnnnnnnnnnnnnnnnnnnnnnnnnnnnnnggcacgagctaatgtagaagtaattcagaaataaccaaataaagtaccacttagtagttgtatgctaaaatttaatggaatttataaccttttaaaaccttcaaaacatcaaaagcatatcacttagtgagtctttgggttctaagttgattttgtaattttatttgcaaattagccttaggttgagatttactgttacatttctgtatctataggctttgagtctctgattagtaggtaccacaaaacagtaaagacttccagtaaattaaagaactaggatcacgcggaatggatattatggtcaatgggagtcgggcagtaatttgctatttt

SEQ ID NO: 32060 - DNA, 431 bp, Homo sapiens
  misc_feature (1)...(431): n = a,t,c or g
gagngnntnnnnnnttganncnnnnnnnnnnnnnnnnnnnnnnnnnnnnnnnnnnnnnnnnnnnnnnnnnnnnnnnnnnnnnnnnnnnnggcacgagaacatnnnnnnnnnnnnnnnnnnnnnnnnnnnnnnnnnnnnnnnnnnnnnnnnnnnggtgagtggctgctatgtcagacgatgttgctctagagcttacagactataaataatgatttattataaaacgtgcttaaannnnnnnnnnnnnnnnnnnnnnnnnnnnnnnnnnnnnnnnnnnnnnnnnnnnnnnnnnnnnnnnnnnnnnnnnnnnnnnnnnnnnnnnnnnnnnnnnnnnnnnnnnnnnnnnnnnnnnnnnnnnnnnnnnnnncatgctaactatgcctaataaatgtctaatttatgcagctcacatcatttgggaatggggaagc

SEQ ID NO: 32061 - DNA, 414 bp, Homo sapiens
  misc_feature (1)...(414): n = a,t,c or g
tttganaccncttnnnnnnnnnnnnnnnnnnnnnnnnnnnnnnnnnnnnnnnnnnnnnnnnnnnnnnnnnnnnnnggcacgagtttttaatcagggaagtaaagaaggaaagcattggctttggaatcccaatcttagatttcaagccaagctttgccacatcagaactgtgtggttttgggcaagcctcagtttttgcatatgtgaaatggggataacaatagctcctccctcttgggttgttgtgaagatgaaaggagacaacgtgtaagcgtttagcacaggacctggcacccagtaagctattttttgatgaggcccaaaaagctcactgtccatttgaccacaggacccagatatctgacagaatcattangaccattccttgaaccggaatntttggnaangggttta

SEQ ID NO: 32062 - DNA, 423 bp, Homo sapiens
  misc_feature (1)...(423): n = a,t,c or g
ttgantaccntnntttgnatncnnnnnnnnnnnnnnnnnnnnnnnnnnnnnnnnnnnnnnnnnnnnnnnnnnnnnnnnnnnnnnnnnnnnnggcacgagcttcttatctgtttgggnnnnnnnnnnnnnnnnnnnnnnnnnnnnnnnnnnnnnnnnnnnnnnnnnnnnnnnnnnnnnncagctgggaggattacttgagcctgggagttcagggtcnnnnnnnnnnnnnnnnnnnnnnnnnnnnnnnnntgaaaaaaagaaaaaagtggataaagtaattctaataaggggttgggaggtttagatgaggtaatatgttaagcactctggtgtctaacgcacagtgggtcaattaagtgttattattatgattgtgattatttctagaaaataaggactataattggggtcctnggtaattgg

SEQ ID NO: 32063 - DNA, 420 bp, Homo sapiens
  misc_feature (1)...(420): n = a,t,c or g
ttgannnccnnntttggannacnnnnnnnnnnnnnnnnnnnnnnnnnnnnnnnnnnnnnnnnnnnnnnnnnnnnnnnnnnnnnnnnnnnnnggcacgaggtcctctataactctgtactacccaacaactaaatggtttagattgtttagctcatgttaataggatggttgtgtattataaaaaacgagttacgtgtgtgtgtgcacgcatgcacgcacatgtgctggcttaaaggttgttaatgcaaggtttggggtcccctttaacactggtgaaagctacggtactctccccagagatatgtcttgtcagcctctctagttccccttggcctgcatgtacaaacttctaccctagaagctctctgccatcgatgtattctaatagatttgtaaggctattaatttgaagccaactcc

SEQ ID NO: 32064 - DNA, 413 bp, Homo sapiens
  misc_feature (1)...(413): n = a,t,c or g
tttgnanaccattattacatgacnacgaatttaatacgactcnnnnnnnnnnnnnnnnnnnnnnnnnnnnnnnnnnggcacgaggaagaatcttagtgctgtaattaatattagctggaaaaatcaagacacatcagaatacagacaggatgattctaggccaactaaattatatcatttaggaacacactgtagataggaagactaaagacaagcaagaaatactagtgtaaaagccagggagtgctgatatctacgaatgaggaaagaggttgaggtcagggtgcagaatttgtgtccaggaacacttctaactcaagagagagtgccagtaatgacctgtgtggtgcttccatgggcatgtgctttattactatgtgttaaactgaacatattctggcatatatctcatg

SEQ ID NO: 32065 - DNA, 409 bp, Homo sapiens
  misc_feature (1)...(409): n = a,t,c or g
accntnattggatgnnnnnnnnnnnnnnnnnnnnnnnnnnnnnnnnnnnnnnnnnnnnnnnnnnnnnnnnnnnnnnnnnnnnnnggcacgagtggaagaatttatttctctgatatttcctttttcctttttaactatatggtgtaggagaaattctccaggactatccctgagagctgggggatcagtgtctcaggaacacctgtgtttattacctgtgtccattctctgtgtcttaagtggccatttgaagccatctacgtccttttcaattgaaagattatcannnnnnnnnnnnnnnnnnnnnnnnnnnnnnnnnnnnnnnnnnnnnnnnnnnnnnnnnnnnnnnnnnnnnnnnnnnnnnnnnnnnnnnnnnnnnnnnnnnnnnnnnnnnnnnnnnnnnnnnnnn

SEQ ID NO: 32066 - DNA, 403 bp, Homo sapiens
  misc_feature (1)...(403): n = a,t,c or g
ttgganacnnctttanatgacnnnnnnnnnnnnnnnnnnnnnnnnnnnnnnnnnnnnnnnnnnnnnnnnnnnnnggcacgagcactactcaatatatccatgtaatacaactacacttgtgcccaccaaatttgtacaaataaaaaaatgcataagatataaaagtagtgcataagagatcgtaaaatgaacacctttgtgacccccccatccacaaaaagaaatataactttgctaacatctgtacatcttttagctatttacagctccttgccatgcctctactggtagccactatcctcaccattatagcattgactttgattctctttatagttttataacctaattatgtattcataaacagtgtagtaaaattgtgcttggttttggancttttcct

SEQ ID NO: 32067 - DNA, 412 bp, Homo sapiens
  misc_feature (1)...(412): n = a,t,c or g
ttnnnntnctttgatttgaanncnnnnnnnnnnnnnnnnnnnnnnnnnnnnnnnnnnnnnnnnnnnnnnnnnnnnnnnnnnnnnnnnnnnnnggcacgagctgaagaattgatctttatgaatcttaggggcatcattaaatcattatgtttcttctaaggaaaggcatatggtagtagttggtcatatttctacctttttcagtggggcctatagggcccctttactttgttttaaactgcactgatagctttttactggttagcccagggaattatccctacagtgtaaaatgatgtttctcatcatgattttcatttaataatttaaaaacaaaataacaggaaacacatgtttctagagaggaagtgtggaatacctgactagtanagggtcaggtgacnattgccaa

SEQ ID NO: 32068 - DNA, 395 bp, Homo sapiens
  misc_feature (1)...(395): n = a,t,c or g
ctcnnnnnnnnnnnnnnnnnnnnnnnnnnnnnnnnnnggcacgagacattttgaaatttttaaaattcagggtttcatcctttattagtgggctaaggataccannnnnnnnnnnnnnnnnnnnnnnnnnnnnnnnnnnnnnnnnnnnnnnnnnnnnnnnnnnnnnnnnnnnnnnnnnaggannnnnnnnnnnnnnnnnnnnnnnnnnnnnnnnnnnnnnnnnnnnnnnnnnnnnnnnnnnnnnnnntactgagtccttgaatggtccctctgtctggnnnnnnnnnnnnnnnnnnnnnnnnnnnnnnnnnnnnnnnnnnnnnnnnnnnnnnnnnnnnnnnnnnnnnnnnnnnnnnnnnnnnnnnnnnnnnncanggcctatcttcnnaaaaact

SEQ ID NO: 32069 - DNA, 404 bp, Homo sapiens
  misc_feature (1)...(404): n = a,t,c or g
nnnnnnnnnnnnnnnnnnnnnnnnnnnnnnnnnnnnnnnnnnnnnnnnnnnnnnnggcacgaggtgcaaagtttggtccaggatagaaaaatgactgatcaaaggcaggcgatacttcctgttgccgggacgctatatataacgtgatgagcgcacgggctgcggagacgcaccggagcgctcgcccagccgccgcctccaagcccctgaggtttccggggaccacaatgaacaagttgctgtgctgcgcgctcgtgtttctggacatctccattaagtggaccacccaggaaacgtttcctccaaagtaccttcattatgacgaataaacctctcatcagctgttgtgtgacaaatgtcctcctggtacctacctaaaacaacactgtacngcaaaggnggga

SEQ ID NO: 32070 - DNA, 433 bp, Homo sapiens
  misc_feature (1)...(433): n = a,t,c or g
ttgaccacngntatgatnnnnnnnnnnnnnnnnnnnnnnnnnnnnnnnnnnnnnnnnnnnnnnnnnnnnnnnnnnggcacgagggtcaggcagcaagagctggacaacctgctgcatgagaagcggtacctgcgggcgctgggcctggccatctccctggatcggccccacaccgtgctgactgtcatccaggccatccggagggaccctgaggcctgcgagaagctggaagccaccatgctccgactgcggcgcgaccagaaagaggccctgctgcgcttctgcgtcacgtggaacaccaactcgcggcactgccacgaggcccaggccgtgctgggtgtgctcttgaggcgagaggcccccgaggagctgctggcctacnaaggcgtgcggcagcgcttgaaggccttntgcctaaactgancggaacttt

SEQ ID NO: 32071 - DNA, 435 bp, Homo sapiens
  misc_feature (1)...(435): n = a,t,c or g
caccgtnnnnnnnnnnnnnnnnnnnnnnnnnnnnnnnnnnnnnnnnnnnnnnnnnnnnnnnnnnnnnnnnnggcacgagcacagttccccaatgaagaagactcatttcataagtttgtggctcctgaagaagtcctgccattcacagaaggggacattctggagaaggtcagcgtgcattgccctgtgtttgactacgttcccccagagctcattaccctctttatctccaacattggtgggaatgcaccttcctacatctaccgcctgatgagtgaactctaccatcctgatgatcatgttttatgaccgaccacacgtgtcctaagcagattgcttaggcagatacagaatgaagaggagacttgagtgttgctgctgaagcacatccttgcaatgtgggagtgcacaggagttcnccttaaaaaaaaaatt

SEQ ID NO: 32072 - DNA, 438 bp, Homo sapiens
  misc_feature (1)...(438): n = a,t,c or g
ttgcncccctcccccttngaccaccnnnnnnnnnnnnnnnnnnnnnnnnnnnnnnnnnnnnnnnnnnnnnnnnnnnnnnnnnnnnnnnnnnnggcacgaggccactacttgtgttagcaaccctcttctacacgctagaaaagccagcatgggaggattgaaggatttaatgtctagaacattctttgaatatattgctgagcagatttactgggcaaagtcaatccaatggaaaacattataagattaaactaatagtaaatcagtagccaacatttgtggtgtatacactgtttgccgagcactgtgctgggtacttatatgcattctgtctttagctctcacaacctcactgtgcagcaggtcacccctggcatgtgacagataaggaaggtcatagggcttgcaagtaggtcgtgatcttctgaagaantgtgt

SEQ ID NO: 32073 - DNA, 393 bp, Homo sapiens
  misc_feature (1)...(393): n = a,t,c or g
gnacaccgntatnantnnnnnnnnnnnnnnnnnnnnnnnnnnnnnnnnnnnnnnnnnnnnnnnnnnnnnnnnnnggcacgagggatcctgctgcacggctcagccctgctctatgcggccggatggtcacctgaaaagcaggcccagcacctgcccctcagggtgacagaactggttcagcagctgacaggccaggcacctgctcctgggcagcgggtgttggagctagagctgagctgtgagggtgacgacttaggacactgccttcccacctctgcactatgagctgtgacaaggcagccaccctgtcacctagctcaatggagccccggatcccaagccctgcattgtaagcccacagtaggcactcaataaatgcttgttaaaggaagg

SEQ ID NO: 32074 - DNA, 434 bp, Homo sapiens
  misc_feature (1)...(434): n = a,t,c or g
cacccgnnnnnnnnnnnnnnnnnnnnnnnnnnnnnnnnnnnnnnnnnnnnnnnnnnnnnnnnnnnnnnnnnnggcacgaggctagagaaagtgtgattaaaaaaatcataaaatggcattaagttgnnnnnnnnnnnnnnnnnnnnnnnnnnnnnnnnnnnnnnnnnnnnnnnnnnnnnnnnnaggagttggtcttgctgtctctggtggaggagagacaggcacactttatgcaacttttattgaaatgtnnnnnnnnnnnnnnnnnnnnnnnnnnnnnnnnnnnnnnnnnnnnnnnnnnnnnnnnnnnnnnnnnnnnnnnnnnnnnnnnnnnnnnnnnnnnnnnnnnnnnnnnnnnnnnnnnnnnnnnnnnnnnnnnnnnnnnnnnnnnnnnnnnnnnnnnnnnnnnnantccaggnacttcngagtnttgg

SEQ ID NO: 32075 - DNA, 437 bp, Homo sapiens
  misc_feature (1)...(437): n = a,t,c or g
ttgacnacccgnnnnnnnnnnnnnnnnnnnnnnnnnnnnnnnnnnnnnnnnnnnnnnnnnnnnnnnnnnnnnnnnnnggcacgagcagaatagtaactgttatcaggttaatgaggagatactagaatcacatcgtttttaagctaggaaaaaatcttagagagtgattatgcagtaaaaagaatttataccccctttttttagagggtagctaactgtatatagtttgttagagataaagtatgaattttaacttttccagccattaaaatcttaattttgttatgttgttagcataatgaaagaaaatgtacaagtaaacatgcttaaggtttaaacgagaaaatgtttttttcagttgtacattgttccagggcaaatactgtgctacatagtagagataaagcngagaaccaaataggcatggncttgctttc

SEQ ID NO: 32076 - DNA, 465 bp, Homo sapiens
  misc_feature (1)...(465): n = a,t,c or g
ttganaccnttatgacatgattacgaatttaatacnnnnnnnnnnnnnnnnnnnnnnnnnnnnnnnnnnnnnnnnnggcacgnnnnnnnnnnnnnnnnnnnnnnnnnnnnnnnnnnnnnnnnnnnnnnnnnnnnnnnnnnnnnnnnnnnnatggggtnnnnnnnnnnnnnnnnnnnnnnnnnnnnnnnnnnnnnnnnnnnnnnnnnnnnnnnnnnnnnnnnnnnnnnnnnnnnnnnnnnnnnnnnnnnnnnnnnnnnnnnnnnnnnnnnnnnnnnnnnnnnnnnnnnnnnnnnnnnncacaggataaacccctactttttttaaagcaatttacattacaattccaagtgaaaccagaagcatgacttttaagtagcaggaacattgagataatggaaaacttggagcctttgagaaaacaaagcacaaagctgctcttgaacaccttgccatgaaagtaacaaa

SEQ ID NO: 32077 - DNA, 484 bp, Homo sapiens
  misc_feature (1)...(484): n = a,t,c or g
nnnnnnnnnnntttgnnaccgctatgacnnnnnnnnnnnnnnnnnnnnnnnnnnnnnnnnnnnnnnnnnnnnnnnnnnnnnnnnnnggcacgannnnnnnnnnnnnnnnnnnnnnnnnnnnnnnnnnnnnnnnnnnnnnnnnnnnnnnnnnnnnnnnnnnnnnnnnnnnnnnnnnnnnnngtttcatttttaaaccttgtgtctcgtagagtcgtagggatgactgaaaatgtcaccatatacaatttttttataaaactagaaaatatgaatactctgattgcaaccattcataaaatagaactacaagtacagatcataatgttaacagtggttataatatctgcatgttgatataatgatggcaactatttatatttttctgcattttccacatattaagagcattttctcttataatcaaggagtttaaaaatactaagccattttgatagatcttatactcttaatacacatggcaaaa

SEQ ID NO: 32078 - DNA, 470 bp, Homo sapiens
  misc_feature (1)...(470): n = a,t,c or g
anaccctnncttgaaancnttatgacnnnnnnnnnnnnnnnnnnnnnnnnnnnnnnnnnnnnnnnnnnnnnnnnnnnnnnnnnnggcacgaggttggtagaaatgtgaacactaaaacccattctgnnnnnnnnnnnnnnnnnnnnnnnnnnnnnnnnnnnnnnnnnnnnnnnnnnnnnnnnnnnnnnnnnnnnnnnnnnnnnnnnnnnnnnnnnnnnnnnnnnnnnnnnnnnnnnnnnnnnnnnnnnnnnnnnnnnnnnnnnnnnnnnnnnnnnnnnnnnnnnnnnnnnnnnnnnnnnnnnnnnnnnnnnnnnnnnnnnnnnnnnnnnnnnnnnnnnnnnnnnnnnnnnnnnnnnnnnnnnnnnnnnnnnnnnnnnnnnnnnnnnnnnnnnnnnnnnnnnnnnnnnnnnnnnnnnnnnnnnnntggtgaggcnttaaatagaaatgagggacaggtttattggaaccca

SEQ ID NO: 32079 - DNA, 450 bp, Homo sapiens
  misc_feature (1)...(450): n = a,t,c or g
tnncacccctatnattgantaccaatttaatacgactcnnnnnnnnnnnnnnnnnnnnnnnnnnnnnnnnnnggcacgagtgctcattctcatatatgaacagataattaggcctcgataaatatctgaggaaagtactatcattcctgctgagataaacacattaagatgatgataggcatgctgaagtatatagaggtgaagcatgctgctgtctggaatttactcaaaacctattgaaaaacatgatgggctggcatggnnnannntccccctgannnnnnnntcnanngtatancnnagtganactttncgnncnaantttttnttaccntcanctanctgnncctgnnnnacatccctgannnccanatgcttaanctnnngtgnnnnatncttnnnaannnnctctatcctttncntannnnnncnnangngnnnntatcatca

SEQ ID NO: 32080 - DNA, 466 bp, Homo sapiens
  misc_feature (1)...(466): n = a,t,c or g
tttgagaccttatgactttgacgacccnnnnnnnnnnnnnnnnnnnnnnnnnnnnnnnnnnnnnnnnnnnnnnggcacgagggctcgnnnnnnnnnnnnnnnnnnnnnnnnnnnnnnnnnnnnnnnnnnnnnnnnnnnnnnnnnnnnnnnnnnnnnnnnnnnnnnnnnnnnnnnnnnnnnnnnnnnngtctctactnnnnnnnnnnnnnnnnnnnnnnnnnnnnnnnnnnnnnnnnnnnnnnnnnnnnnnnnnnnnnnnnnnnnnnnnnnnnnnnnnnnnnnnnnnnnnnnnnnnnnnnnnnnnnaannnnnnnnnnnnnnnnnnnnnnnnnnnnnnnnnnnnnnnnnnnnnnnnnnnnnnatannaagaacancgatcactgaagaacaaaaggtagccnatgtgtcatagcatattataatacacagcacagcananggaaaaaccatcttacntnntctcacc

SEQ ID NO: 32081 - DNA, 484 bp, Homo sapiens
  misc_feature (1)...(484): n = a,t,c or g
gnnnnnnnntttgnanncccntnnnnccctttggananccgnnnnnnnnnnnnnnnnnnnnnnnnnnnnnnnnnnnnnnnnnnnnnnnnnnnnnnnnnnnnnnnnnnggcacgagaaggaggagagggagaggtcttgggtctcagctttcaaagtccatgatcttcctatttggttaggggaaaccaaattacagtcatttgcaataccgtcattcacatcccatcttcactattttttgccttatatgcttacattgctgtaccatgatttactaaaggtttttttttcttttagatcatctcatttttgataaagttaaattcttatcactgaaatgttcactgaggaaagcgatcatgaaataaatccaatgaaagcaaactgtggttaaattctaactagataatattgcctgcctaagggcctcagctctctcattgttaaaaagggaaggtagcaagtgatagaggctaaaggcgtt

SEQ ID NO: 32082 - DNA, 426 bp, Homo sapiens
  misc_feature (1)...(426): n = a,t,c or g
atnngnttcctnnnnnnnnnnnnnnnnnnnnnnnnnnnnnnnnnnnnnnnnnnnnnnnnnnnnnnnnnnggcacgagtttggctagatatggaattcagggttggaaatcactaatactcaactttccaaacatcattccagtgttgctattaggaagtttgaagtttgaagccattataatcctccttttttttttattgtaatctttttctctctaaaaacttttgagatctgttatttttgattttctgaaatttactgatgatgtgctgaactgtggaccttttccccactcccttgctccccagttattatcatcattcactgagcactttcagctggaaatatacatccttcagttctgaggatgtttttggcattgcctgataattttctcttttcngntttgggttgctgtgttgttg

SEQ ID NO: 32083 - DNA, 426 bp, Homo sapiens
  misc_feature (1)...(426): n = a,t,c or g
acctntnnnnnnnnnnnnnnnnnnnnnnnnnnnnnnnnnnnnnnnnnnnnnnnnnnnnnnnnnnnnnnnnggcacgagctggcttatgataagggctggcgtgtcagaactgactttaagcagtatcaggttttgaagcagaatccgttctggtggacacaccagcggcatgatgggaagctctggaacctgaacaactaccgtacagacatgatccaggccctgggcggtgtggaaggcattctggaacacacactctttaagggcacttacttccctacctgggaggggcttttctgggagaaggccagtggctttgaggaatctatgaagtggaagaagctaactaatgctcagcgatcaggactgaaccagattcccaatcgtagattcaccctctggtggtccccgaccattaatcgagcc

SEQ ID NO: 32084 - DNA, 424 bp, Homo sapiens
  misc_feature (1)...(424): n = a,t,c or g
accnnnnnnnnnnnnnnnnnnnnnnnnnnnnnnnnnnnnnnnnnnnnnnnnnnnnnnnnnnnnnnnnnnnggcacgaggaacacagctagacattagcacagcggagtgcttcgtgccaacctgagagttaaaactaggatgcagaagctgtaattctagtctggaacaagctcttttgttggactataggaactcacctcttctctctccttaggcactaaacagaaaagacagagtccttgctgccaattggcaacctagagagggtttgtttgataaagtcctatctttccattccctgtagcatgaacagatacactcccagtaaagtccttgatcctggagtttcttcttggatggggaaaagctgtgttgggttgaaatttttccaaagtacctcagccttgctattggaggtgattt

SEQ ID NO: 32085 - DNA, 427 bp, Homo sapiens
  misc_feature (1)...(427): n = a,t,c or g
accnnnnnnnnnnnnnnnnnnnnnnnnnnnnnnnnnnnnnnnnnnnnnnnnnnnnnnnnnnnnnnnnnggcacgaggtaaaatgaagcttccattattgagaaaaagaaatttggaaaatgattcttttaaaaaattatacnnnnnnnnnnnnnnnnnnnnnnnnnnnnnnnnnnnnnnnnnnnnnnnnnnnnnnnnnnnnnnnnnnnnnnnnnnnnnnnnnnnnnnnnnnnnnnnnnnnnnnnnnnnnnnnnnnnnnnnnnnnnnnnnnnnnnnnnnnnnnnnnnnnnnnnnnnnnnnnnnnnnnnnnnnnnnnnnnnnnnnnnnnnnnnnnnnnnnnnnnnnnnnnnnnnnnnnnnnnnnnnnnnnnnnnnnctgttaatttaaatattanctcattgcattattacaaataattattngnaatt

SEQ ID NO: 32086 - DNA, 420 bp, Homo sapiens
  misc_feature (1)...(420): n = a,t,c or g
nnnnnnnnnnnnnnnnnnnnnnnnnnnnnnnnnnnnnnnnnnnnnnnnnnnnnnnnnnnnnnnnnnnnnnggcacgaggtatttggttgccctagaagaagactagaatataaatatttcccctcacctcctgcaaaggtttgaattaaacttcctcaaggactgggggaaccatttttttttgttgttgttattttgtcagagtctcactcttattgcccannnnnnnnnnnnnnnnnnnnnnnnnnnnnnnnnnnnnnnnnnnnnnnnnnnnnnnnnnnnnnnnnnnnnnnnnnnnnnnnnnnnnnnnnnnnnnnnnnnnnnnnnnnnnnnnnnnnnnnnnnnnnnnnnnnnnnnnnnnnnnnnnnnnnnnnnnnnnnnnnnnnnnnnnnnnnnnnnnnnnnnnnnnnnnnnnnnnnn

SEQ ID NO: 32087 - DNA, 425 bp, Homo sapiens
  misc_feature (1)...(425): n = a,t,c or g
accngnnnccnnnnnnnnnnnnnnnnnnnnnnnnnnnnnnnnnnnnnnnnnnnnnnnnnnnnnnnnnnggcacgagcagcagcattcagtgttattctttcttgaaccctttgagaaagaaaacagcctggccagataaacccttctgtcactttacttgcatcctggctgtctttctgcttctttgatccccacttttagtctccttcatgcattactctttttttttttnnnnnnnnanttncaatntngnnntccaggnngnagngcaggggcnnaatttnggntnanngaancctnngtttccnnggttnaancagttttttngcntaancntcccaagtngnnggnataacnggcncncnacnggnccnggnnaattttggaattttnagnaaaaacggggtttnnccnnatnggngggg

SEQ ID NO: 32088 - DNA, 426 bp, Homo sapiens
  misc_feature (1)...(426): n = a,t,c or g
ttnnnnnnnnnnnnnnnnnnnnnnnnnnnnnnnnnnnnnnnnnnnnnnnnnnnnnnnnnnnnnnnnnnnnnnnnnnggcacgagctggattgtnnnnnnnnnnnnnnnnnnnnnnnnnnnnnnnnnnnnnnnnnnnnnnnnnnnnnnnnnnnnnnnnnnnnnnnnnnnnnnnnnnnnnnnnnnnnnnnnnnnnnnnnnnnnnnnnnnnnnnnnnnnnnnnnnnnnnnnnnnnnnnataaaaataaattcataaagataaattacacagttcaaaagaacagttccattagaactttgtgcagaattactttagagtataaatttatgtgggaataaatgatacctttacaatattcagccttccattctagaatcataccttttaatttagtaaattattattttctatctttcaaaaaggattag

SEQ ID NO: 32089 - DNA, 428 bp, Homo sapiens
  misc_feature (1)...(428): n = a,t,c or g
tnnnnnnnnnnnnnnnnnnnnnnnnnnnnnnnnnnnnnnnnnnnnnnnnnnnnnnnnnnnnnnnnnnnnnnnnnnnggcacgagaaatgttaactgttattaccatctttctaaaattaaacttctctgcttaaaatccttcagtaccaaattctgcgatatagtatatatgagttgtaacccattcccgtgcgttgctccaaacttgtcaattgccacttcttcataatgccctctgtgttccactgtaccagttctcaaagtgtggatgtagaggacagcaccagcaatagtatcccccaaaaacttgtttaaaatgcagattcttgagccatatttcaggcctattcaatcagaaactgaatttggggctttgcaacccgtatgttagtaagtcctccaggcgattctgatgcacgcttgagttc

SEQ ID NO: 32090 - DNA, 432 bp, Homo sapiens
  misc_feature (1)...(432): n = a,t,c or g
ttnnnnnccnnnnnnnnnnnnnnnnnnnnnnnnnnnnnnnnnnnnnnnnnnnnnnnnnnnnnnnnnnnnnnnnnnnggcacgagatgggttttaggttctatgacggatgtaattgcagccactttcatgagttttttctagaaaacttcatttttatctgttttacagtttagaatattaaacagttaactgtgggtggtgagaatcctgtgttttgttttttgtttttttgttaccagaaaagttcttacatgttagctggtagtgatgattataagaaggacatcagtagtctcctccacaggattaacataatttgctaaaagggatctcagtcatttgagactgaatttcctgtagtcttctgttctcaaagacagtaaaaaggatagtctggaccagacttaggggagtgttcttatcttatggat

SEQ ID NO: 32091 - DNA, 424 bp, Homo sapiens
  misc_feature (1)...(424): n = a,t,c or g
ncngtntatgacatgattacgaatttaatacnnnnnnnnnnnnnnnnnnnnnnnnnnnnnnnnnnnnnnnnnggcacgagcaagcaccaggtcctccagggatagttggctctattcagtctttgattcattcaacaagagcttactaagctcctttttggtaccagatactctttgttgctgaaaataaataaaaggccagcaagattaagtagactgtgagatctggaccagtaatttgacaacacaaagtactgtcgtaaagatacagtttctgatgtgtagtgaccattccgtatgaaagcttagtctttcaggagattaaaatgggtggtggaatattcctacctagcaagcaagcaaggtgaaatgagtggctgtttgactcccacctgctgatgctggtcttttttggttcctaggg

SEQ ID NO: 32092 - DNA, 430 bp, Homo sapiens
  misc_feature (1)...(430): n = a,t,c or g
ttnnnnnnngtgnnnnnnnnnnnnnnnnnnnnnnnnnnnnnnnnnnnnnnnnnnnnnnnnnnnnnnnnnnnnnnnnnggcacgagcaactgtgggcctgacaccaatcgacctgctggcactatagcacagaacaagtcgggagatcacttcagtgatggagtgtcctttctgctgagggactcagaaaataatcaagtaacagttaccgaaataagggaatttcagataacaatcagtgcagtgaagacaatgtaataacatagtatgattgacagtcatgagaagcggtagtaaagtaaggacgttttgaagaggtgacatttgagtttagatctgaacgatgataaggagctacctactcaataacaattccaggccaagcaaaggcccaggggaaggaaagagatagaatgattgaagaacagaaa

SEQ ID NO: 32093 - DNA, 413 bp, Homo sapiens
  misc_feature (1)...(413): n = a,t,c or g
nnnnnnnnnnnnnnnnnnnnnnnnnnnnnnnnnnnnnnnnnnnnnnnnnnnnnnnnnggcacgagctgtttttttggtcttggtggttgatcctggtgtttgtggagaggcagacggttgaggttaagagccggagtgctggagcagactccctggtttgaatcctggccggccgcccttcgcctcagttttcctctctatcgatcgggaataacacccgtgtcaggactgctgggagaatccgtgagaaaagtacacggaacatgctcaggatggcacggaacgttaccaggcctccgtaaatggtaacttttatcattcagagtggactctttgagaactacaagaagattaaaaaaaaagaaaagaaaaaataaaagaaaatgccccataattctgcccctagaagacaa

SEQ ID NO: 32094 - DNA, 419 bp, Homo sapiens
  misc_feature (1)...(419): n = a,t,c or g
nntnnnnnnnnnnnnnnnnnnnnnnnnnnnnnnnnnnnnnnnnnnnnnnnnnnnnnnnnnnnnnnnnnggcacgaggcgctttaaatctccattctctgggttttcctcccaccttcctggctgctctgtcttcttgcctgctgatgcctcctcatctccctggcctcctgcctcctgctggtggagctccaggcatcctttctgtgtgtcctcatccctcatccctggggtgggctcctccagccttgcgcctgaatggcatctctgtcctgaccactcccaaattggtatccctgggcccagacctttcccctgaaccccacccccgagtgtccaacagcagagtccgtatctcaactcggggtcaaaggcagctcacgctcgccccggctggctcctcatcaccctcggcacacct

SEQ ID NO: 32095 - DNA, 415 bp, Homo sapiens
  misc_feature (1)...(415): n = a,t,c or g
nnnnnnnnnnnnnnnnnnnnnnnnnnnnnnnnnnnnnnnnnnnnnnnnnnnnnnnnnnggcacgagccactttcctgctactaatacgcaaataaaataatttaacagaagagactttttctcaggaatatgatgaatgtgaatggaatgtgtgcaaaattaacttgtaattgttatgctctcatttccacatcttctgtcttttcttgataaagcttttaggtggacctctgaagtacttgatttctgtatttgcttaacaaatatttgatgaacactatgtatcaggcacgtgggtcagggcatgaggtataatgatatagaatatactttaccgattttatagccaagagggagagagaaacattaaataaattatcacacatcaatattttataagtgttattaaggaaaa

SEQ ID NO: 32096 - DNA, 418 bp, Homo sapiens
  misc_feature (1)...(418): n = a,t,c or g
cnnnnnnnnnnnnnnnnnnnnnnnnnnnnnnnnnnnnnnnnnnnnnnnnnnnnnnnnnnnggcacgagatcgagacactgaacagagaacaaatggtgtcattcgataaagctgatgagtctgcttctcacatggcacccagatcgtaaggcagtggggtctgtaaaatcatcgcggtggctggccgtgtcctcatgagccaagcacactgactcccgggagtggtgtgcacgcacatgtggtgcctggacatacacgaagacacatggacgtgggggtctgacctggacattcacaacggaaacgtctacaacagaaggcgcccaggacccacctttctggcgcataaatgaagatttttggctcaaaaacctaagcatcctccagcttttgctaccatctgtccctcggctggctg

SEQ ID NO: 32097 - DNA, 418 bp, Homo sapiens
  misc_feature (1)...(418): n = a,t,c or g
cnnnnnnnnnnnnnnnnnnnnnnnnnnnnnnnnnnnnnnnnnnnnnnnnnnnnnnnnnnnggcacgagaaaacaatgacaaaccattcccacatacctatatatctatgtacacaaagacctgtgttagatcatgtgaccatggagaaagtcacgaaaggatccatgttaagctgctggttacagcggattaaggggaagatggggcaaggccatattttatataggaggaaagtgtccatgataaaaacatgtataatatgatcccacttatataatgtttggacatgcatgcctaaagaaatgcatcaaaacattttaaatgaacataaccttttcctttttctttgagacggagtctcgccctccagcctggtgacagnnnnnnnnnnnnnnnnnnnnnnnnnnnnnnnnnnnnn

SEQ ID NO: 32098 - DNA, 415 bp, Homo sapiens
  misc_feature (1)...(415): n = a,t,c or g
nnnnnnnnnnnnnnnnnnnnnnnnnnnnnnnnnnnnnnnnnnnnnnnnnnnnnnnnnnggcacgaggtaaaataaaaatataaaaagattactatttagtacttggaagacaggtaagaggaggacctttatcaccttatagaatgaagacgcatggctggaaacaaccaaatcttcgtatggttctttgaatgtcaagtttttggcacagaagaaagcagctcctaatgggggattcttcagtcctgctttcatctgccgttgattagcagtccggccctgctgtttccagtctgtcctgtcttcttgggacataatctgcccaccctctcattccatctgtggcttactcctttctgtcttaaccttccgtggcgtcctttgggaagtctttcctgttggagcaggcagccct

SEQ ID NO: 32099 - DNA, 420 bp, Homo sapiens
  misc_feature (1)...(420): n = a,t,c or g
gtnnnnnnnnnnnnnnnnnnnnnnnnnnnnnnnnnnnnnnnnnnnnnnnnnnnnnnnnnnnnnnnnnggcacgaggtacttaatgccactgacctgtacacttcatttatttatttatttagaaatgctcccagccaaactggacactttaaatcagtnnnnnnnnnnnnnnnnnnnnnnnnnnnnnnnnnnnnnnnnnnnnnnnnnnnnnnnnnnnnnnnnnnnnnnnnnnnnnnnnnnnnnnnnnnnnnnnnnnnnnnnnnnnnnnnnnnnnnnnnnnnnnnnnnnnnnnnnnnnnnnnnnnnnnnnnnnnnnnnnnnnnnnnnnnnnnnnnnnnnnnnnnnnnnnnnnnnnnnnnnnnnnnnnnnnnnnnnnnnnnnnnnnnnnnnnnnnnnnnnnnnnnnnnnnnnnnnnnnnnnn

SEQ ID NO: 32100 - DNA, 416 bp, Homo sapiens
  misc_feature (1)...(416): n = a,t,c or g
nnnnnnnnnnnnnnnnnnnnnnnnnnnnnnnnnnnnnnnnnnnnnnnnnnnnnnnnnnggcacgagtctttttttattgtttcctactaggctgtaagcaatttaagggcagggatacatgtctttgtcatttgtatatcctttgtcatctgtatatcctttggtaccaaacacataggacatattctgaatgcttttgagtaaatgtaagaaacaaacacacccatccaaacccaaagaatagactcagagacctggagaacagcagaagcaagactttttaatgatgatcttgcaagatcgagtgtctggtgggcagacatacccagcacagttacaacaagcaatttatgccctagtatgcaggtccctcccgcagttcctcataggctgagtactatgtgggtcacaatctt

SEQ ID NO: 32101 - DNA, 419 bp, Homo sapiens
  misc_feature (1)...(419): n = a,t,c or g
ntnnnnnnnnnnnnnnnnnnnnnnnnnnnnnnnnnnnnnnnnnnnnnnnnnnnnnnnnnnnnnnnnnggcacgaggagagagctagcaccattccctgagaacgtcctgtattttgtttttttcctgcatgtgcttatgccgtccccatcatctgggacttcttccccatctctggctattaagtagttgaatctatctttccaagtctacctcttcagccctatcataattaagcttctttactctcaaaattatttaaatctccattaaagttaatggcattgtttgactagtattactgttctttatgtttaagcttatttccctcgccagattccccataagattcttgatagcaagtgtttttgtctcattcaacaactgtgacttccaggatgggtgcagtggctcacgcctg

SEQ ID NO: 32102 - DNA, 421 bp, Homo sapiens
  misc_feature (1)...(421): n = a,t,c or g
nttnnnnnnnnnnnnnnnnnnnnnnnnnnnnnnnnnnnnnnnnnnnnnnnnnnnnnnnnnnnnnnnnggcacgaggagagctagcaccattaccctgctgatggtctatttctataagagtttagttttctaaaaacttttgtatataaaacttttttttaaagctgtctccaactaatatttgatccaaagaaggatccaaagaaggatctctggaaatttggggttttttggttttggccttccccttccccttccccttccccttctccttcttcttctttttagagacaggctggaagnnnnnnnnnnnnnnnnnnnnnnnnnnnnnnnnnnnnnnnnnnnnnnnnnnnnnnnnnnnnnnnnnnnnnnnnnnnnnnnnnnnnnnnnnnnnnnnnnnnnnnnnngtcccacctcacca

SEQ ID NO: 32103 - DNA, 422 bp, Homo sapiens
  misc_feature (1)...(422): n = a,t,c or g
ntnnnnnnnnnnnnnnnnnnnnnnnnnnnnnnnnnnnnnnnnnnnnnnnnnnnnnnnnnnnnnnnnnnggcacgaggaagaagggggcaagggttgaaaaaccaactattgtgtatttttctcactacctgggtaacggactcaacttcatgaaacannnnnnnnnnnnnnnnnnnnnnnnnnnnnnnnnnnnnnnnnnnnnnnnnnnnnnnctatacatattttttaaagaagctacctcagtactctttgtgaaaggtgacaaggcagtggaaatggaatggtaaggcgatcaggaattcaaaagacatttttaaagtgttatcctcttgaaacagaatgaagaagaagacaagaggattggatacacatacagattgcaaagagggtctgtagcacctctctcttttgaaatttatatt

SEQ ID NO: 32104 - DNA, 443 bp, Homo sapiens
  misc_feature (1)...(443): n = a,t,c or g
gnngnnnnttgattgcatnnnnnnnnnnnnnnnnnnnnnnnnnnnnnnnnnnnnnnnnnnnnnnnnnnnnnnnnnnnnnnnnnnnnnnggcacgagctggaaggaaagagaagaaaggcaggacaaggatttagcgctgtcacttttcagagatggctacagtgatctgttcccccggctggcttcttatgtggctccgtcttgcaggggtgggattcttcatctccacactgcacaccaatctggccaaacctgccttaattctaaaatgtagctgctggcactcagcaacaataaccttctagagcacaaaacggaagctatttttaagtgataccaggaatttctagaaacattttaagcaattgattgtgagggcttcacagtgtttaaaaaaatcacttggagctttaaaggagcactaaaagatgaaagaaaacgct

SEQ ID NO: 32105 - DNA, 440 bp, Homo sapiens
  misc_feature (1)...(440): n = a,t,c or g
ggngnnnntttattgcatacagctnnnnnnnnnnnnnnnnnnnnnnnnnnnnnnnnnnnnnnnnnnnnnnnnnnnnnnnnnnnnnnnggcacgaggcaccataccctgtgtttaatgctcgcagataaatgcctgtggcaattacaacaaaaccatggcctctaaggctaccccgatctggctctgtttcctgccccagctctaacacctcacttagtcccaccatcccttttaagttccttgaatatgctaacgttgaccctgcctcagggcccttcccctctgcctagaaagcattggcctatcatcatgcaccttcccaacaccctggctggagatctctccacactttccccgtgagatcactctctatctccttatgcaggttttccttcatacactaatcattaattggaaanggattncattacatcttatta

SEQ ID NO: 32106 - DNA, 436 bp, Homo sapiens
  misc_feature (1)...(436): n = a,t,c or g
ggagnnnnattgattncatnnnnnnnnnnnnnnnnnnnnnnnnnnnnnnnnnnnnnnnnnnnnnnnnnnnnnnnnnnnnnnnnnnnnnnggcacgagaatttgacttcctctgtaaaggacccatctttaaacatccacggaaggcaggtgtgatttttctttatggtctgaatagaatattaactatatataaagtaatatatattaatttacatatttttgtaatctgctaatctttgaattcagcatccttttccaaggcttttccttccactttcttctggaaagttggcaataatattcttcattgttatttcactttcttccggagagagagaatagtagcaaacaaatactaggcctggaatgttagatccttgcttagcaatggtcgttggcccaggatcgtgctgcanagggtnanggggtacctgg

SEQ ID NO: 32107 - DNA, 438 bp, Homo sapiens
  misc_feature (1)...(438): n = a,t,c or g
ggtgnnnattgatacngctnnnnnnnnnnnnnnnnnnnnnnnnnnnnnnnnnnnnnnnnnnnnnnnnnnnnnnnnnnnnnnnggcacgagaccatttctcccaaagggggaggataacatgaaatcacaataataacctaaaataacaatatcaaagttctaggaaaagattttagacaaaccactctgtgacatgtccccaaggcgagaatggagtagggcttgatcaaaatggtggtctcaaacaagctgcctaaaggaattattatttcagtgggattagaataatgtgaggggtagaggaaaacctgccaggcataagcattccacctagtggaaattagattttgatgatgaaatcgcaaatgattttaacagggaggaagggggcgggcagcagcccaggagaacngatgaatgtagggtttcaatgaacct

SEQ ID NO: 32108 - DNA, 439 bp, Homo sapiens
  misc_feature (1)...(439): n = a,t,c or g
ggntgnnnnattgataccnctctgacnnnnnnnnnnnnnnnnnnnnnnnnnnnnnnnnnnnnnnnnnnnnnnnnnnnnnnnnnnggcacgagtgaacatctgaatgggtatgttaagtagttggatatattcgactggggttcaagagagagaaatccaggagttgttagcatgtagatgtcatttaaaattatgaggctggcaagagatcaccaagggagtgagagtagatagaaaagtgaagaggaacagggaccaatccctggggcactctcattttaagaggtttggaagaagaggaagaaccagtaaaggagactgaaggaacggtcagtgaggttgtaagaaacgtgagccaccaggcccggccggagttacttttattaagcaacaggggcctctttgcttaaaaattcaccaacaggacatgtgctttgtt

SEQ ID NO: 32109 - DNA, 439 bp, Homo sapiens
  misc_feature (1)...(439): n = a,t,c or g
ggnnnnnntttgattacattctgacnnnnnnnnnnnnnnnnnnnnnnnnnnnnnnnnnnnnnnnnnnnnnnnnnnnnnnnnnnggcacgagagtggcaccacgtgctaaaatgaaccagcagcgttcaaggaggttcagggcatcaaaagaaggaatggaagcagcagtcgagaagcagcgagtcagggaagaaatattggcaaaaggtggctttcttcctccagaagaaataaaagaaagatttgacagcaactgtattacaccaggaactgaattcatggacaatcttgctaaatgccttcgctattacatagctgatcgtttaaataatgaccctgggtggaaaaatttgacagttattttatctgatgctagtgctcctggtgaaggagaacataaaatcatggattacattagaaggcaaagagcccancctac

SEQ ID NO: 32110 - DNA, 435 bp, Homo sapiens
  misc_feature (1)...(435): n = a,t,c or g
ggagnnnnttgatacattntgacnnnnnnnnnnnnnnnnnnnnnnnnnnnnnnnnnnnnnnnnnnnnnnnnnnnnnnnnnnggcacgagaactggaagaatatttaccaagcaaagggaaagcnnnnnnnnnnnnnnnnnnnnnnnnnnnnnnnnnnnnnnnnnnnnnnnnnnnnnnnnnnnnnnnnnnnnnnnnngnnnnnnnnnnnnnnnnnnnnnnnnnnnnnnnnnnnnnnnnnnnnnnnnnnnnnnnnnnnnnnnnnnnnnnnnnnnnnnnnnnnnnnnnnnnnnnnnnnnnnnnnnnnnnnnnnnnnnnnnnnnnnnnnnnnnnnnnnnnnnnnnnnnnnnnngaacaccctactttcaatgttagattaatgagacagaaaattaacanggatattcaggacttgactcagctntggccaagtggcct

SEQ ID NO: 32111 - DNA, 441 bp, Homo sapiens
  misc_feature (1)...(441): n = a,t,c or g
ggagnnnnttgattncatnnnnnnnnnnnnnnnnnnnnnnnnnnnnnnnnnnnnnnnnnnnnnnnnnnnnnnnnnnnnnnnnnnnnnnggcacgagcnnnnnnnnnnnnnnnnnnnnnnnnnnnnnnnnnnnnnnnnnnnnnnnnnnnnnnnnnnnnnnnnnnnnnnnnnnnnnnnnnnnnnnnnnnnnnnnnnnnnnnnnnnnnnnnnnnnnnnnnnnnnnnnnnnnnnnnnnnnnnnnnnnnnnnnnnnnnnnnnnnnnnnnnnnnnnnnnnnnnnnnnnnnnnnnnnnnnnnnnnnnnnnnnnnnnnnnnnnnnnnnnnnnnnnnnnnnnnnnnnnnnnnnnnnnnnnnnnnnnnnnnnnnnnnnngggatgatgatatctttagactgtgacacccttatgttcctccccagggggagcacagtcctgtgagatggg

SEQ ID NO: 32112 - DNA, 443 bp, Homo sapiens
  misc_feature (1)...(443): n = a,t,c or g
ggngnntnnttgattgcatnnnnnnnnnnnnnnnnnnnnnnnnnnnnnnnnnnnnnnnnnnnnnnnnnnnnnnnnnnnnnnnnnnnnnnggcacgaggagagctacaataccctggaacccttcagtggaccacctctggggattaatgttcaatgggaacacattttgggaaaggctgtccaagcatacactttttgtgttagatacaattaaaaatgacatctaaggttaagaaatgacaaaacatggcaagaatatgttttagaaatggtaatgttcacttaaaaatactaatcttctaaaactataatatttaaccagcactgagtcagtttgtaacttgatatggaaagagtaagcaagcccaaatggcccattttacccgaacaaaaagtgagagaagactttatattaacatattagtctgaaaaaaaatttgtgc

SEQ ID NO: 32113 - DNA, 371 bp, Homo sapiens
  misc_feature (1)...(371): n = a,t,c or g
ggccctcgaggccaagaattcggcacgagaactggaagagtgtgctataaagggaaatgaaaaagttgagtaactgttatggagataaagggcaaaataaacttggttttggatatcataaaggatatttatgtggaaggattctcaacannnnnnnnnnnnnnnnnnnnnnnnnnnnnnnnnnnnnnnnnnnnnnnnnnnnnnnnnnnnnnnnnnnnnnnnnnnnnnnnnnnnnnnnnnnnnnnnnnnnnnnnnnnatgcaaccaccatgcccagctttcaagatatttttgatcacctagttgtaaatgcaaatggaagcttggacttanagagtcatcangcataggacaataatagcngttnttgaa

SEQ ID NO: 32114 - DNA, 437 bp, Homo sapiens
  misc_feature (1)...(437): n = a,t,c or g
ggntgnnnntttnatacngctnnnnnnnnnnnnnnnnnnnnnnnnnnnnnnnnnnnnnnnnnnnnnnnnnnnnnnnnnnnnnnnggcacgaggggctcggtggttaaaggagtctacatatgtgataaaatggcatagacatagtcatgtgacattgttagatattgtcctacatttatacaaaatagaacctttggaggaaactgagtaaaaagtacatgaaacctctctgtaccatctttgaaatttcctctgaatctatatttccaaataaagggttaacatttttaaagttgctttatacaaaaatattaaatagaaataatgttgattgctgcaggtctggcaaacctttgaatgactggcatctctaatccatccaatgcacaattgcccctggcaggccctgnctaagctaggnccctgntaaaanaaag

SEQ ID NO: 32115 - DNA, 439 bp, Homo sapiens
  misc_feature (1)...(439): n = a,t,c or g
ggagnnattgataccntcnnnnnnnnnnnnnnnnnnnnnnnnnnnnnnnnnnnnnnnnnnnnnnnnnnnnnnnnnnnnnnggcacgagttttacaattaccggtagtattttttaaactattgacttacatattttgtagctccaacatttaaataagggcctttaaattttctatgttatgtttatcaaaatggggcatgaatttaagaagactgagaaacaccatcaaatacaaaagtcggactcacacagttgaatccaaaggggatcagaacatgccactccaaaatatgctactttggcatcagtattattttgaactgaaggcaaataggaaacggaagacaggagcactctctcccctggccctttctgtgtaaaagtagaacacaaaattccctttgtaaatgtgacagaaatgcccggttgnaaagaata

SEQ ID NO: 32116 - DNA, 442 bp, Homo sapiens
  misc_feature (1)...(442): n = a,t,c or g
ggngntnnttgnttgnatacagctnnnnnnnnnnnnnnnnnnnnnnnnnnnnnnnnnnnnnnnnnnnnnnnnnnnnnnnnnnnnnnnggcacgagggaaatcgcaacagcagcaatttgaggaactactgtagcagaattcgacacagcaggaatgagaagtatttccctttagagggcttgcagtgttccagttggaagcaaaaccctgaccggctttcatttagcccagcactgtcatttgaatagcatcaatactttattaagagaagtaatgcggggggggcggagattgtcctgactagtgattttattgagggagatggtatttgagaaacagaccctcacctgatgaaaccgagacgctcttctggtgtgatgatctgccgtcagagccagatggaactggcagagcttaattnctgtggctgacaagggggttc

SEQ ID NO: 32117 - DNA, 441 bp, Homo sapiens
  misc_feature (1)...(441): n = a,t,c or g
ggnnnnnnattgatnnnnnnnnnnnnnnnnnnnnnnnnnnnnnnnnnnnnnnnnnnnnnnnnnnnnnnnnnnnnnnnnnnnnnnggcacgaggttattgtaaatttgggttttagcttttgtctgcatcctctagacctttgggggtacgcatgtgtgatgtcctcaactgttggaaactatttgaaaaannnnnnnnnnnnnnnnnnnnnnnnnnnnnnnnnnnnnnnnnnnnnnnnnnnnnnnnnnnnnnnnnnnnnnnnnnnnnnnnnnnnnnnnnnnnnnnnnnnnnnnnnnnnnnnnnnnnnnnnnnnnnnnnnnnnnnnnnnnnnnnnnnnnnnnnnnnnnnnnnnnnnnnnnnnnnnnnnnnnnnnnnnnnnnnnnnnnnnnnnnnnnnnnnnnnnnnnnnnnnnnnnnnntgacagaagatcggaccncttcc

SEQ ID NO: 32118 - DNA, 434 bp, Homo sapiens
  misc_feature (1)...(434): n = a,t,c or g
ggngggnnttgataccgtctgactgattacgaatttaatacgactcnnnnnnnnnnnnnnnnnnnnnnnnnnnnnnnnnnggcacgagaactggatgaaaatattagtaataatactgaggtgaaatgcaacgtaaacaataaatacaaactttatttcaaaatatagagacaaagaagtgaattctgataattccattagtaagacaactgcaaaacatgtaaaacacaaagtcaaattcaggatattttcagagtatctacacttaagacagtggtcttaaatatgatccctatatgagcagcatcagtgtcatctatgaaannnnnnnnnnnnnnnnnnnnnnnnnnnnnnnnnnnnnnnnnnnnnnnnnnnnnnnnnnnnnnnnnnnnnnnnnnnnnnnnctcaagcaattctctnacctcagctctgag

SEQ ID NO: 32119 - DNA, 452 bp, Homo sapiens
  misc_feature (1)...(452): n = a,t,c or g
gagnnnttgantccgntatnacnnnnnnnnnnnnnnnnnnnnnnnnnnnnnnnnnnnnnnnnnnnnnnnnnnnnnnnnnnggcacgagggagcnnnnnnnnnnnnnnnnnnnnnnnnnnnnnnnnnnnnnnnnnnnnnnnnnnnnngaagcactctttaacagtcacaatctcacaatgatttccgtgactatttgaggtatgtcatagtgtggctaccctgtccccctggctgagctctgtgggagcagcgattttgcctactcctacatttcccatagtgcctggtacataggcacttgataagcatttgggcagacacggtgtgacatagtatgatgcggtgaggtgctgggtcattgtagtcccaggccaaagcaaaatcctgggcccctctcattggtctaggtagagaaatgggactttctgctgcacttganagattggccacac

SEQ ID NO: 32120 - DNA, 456 bp, Homo sapiens
  misc_feature (1)...(456): n = a,t,c or g
gnngnnnttnnnttcgnnaccgctatgacnnnnnnnnnnnnnnnnnnnnnnnnnnnnnnnnnnnnnnnnnnnnnnnnnnnnnnnnnnggcacgagctccttaccttacatcttctatagaaattagctcaaaatgaattgaagacataaatgtaagagctaaaattatagaacttttaggagaaaatcttaataacctagaattcggtaacgatatcttaaataacacatagagagtctgaaagaaaattgccnnnnnnnnnnnnnnnnnnnnnnnnnnnnnnnnnnnnnnnnnnnnnnnnnnnnnnnnnnnnnnnnnnnnnnnnnnnnnnnnnnnnnnnnnnnnnnnnnnnnnnnnnnnnnnnnnnnnnnnnnnnnnnnntttttttttaattagccaggcatagnnnnnnnnnnnnnnnnnnnnnnnnnnnnnnnnnnnnnnnnnnnnnnnnnn

SEQ ID NO: 32121 - DNA, 456 bp, Homo sapiens
  misc_feature (1)...(456): n = a,t,c or g
aggaggntttnnatcgntnnnnnnnnnnnnnnnnnnnnnnnnnnnnnnnnnnnnnnnnnnnnnnnnnnnnnnnnnnnnnnnggcacgaggaaaaccaaaacaaaaccatactctcggtttccgcgttcgctccccgtcgcgctctcggtttccgcgttcgctccccgtcaggctctcggtttccgcgttcgctccccgtcaggctctcggtttccgcgttcgctcccggtcgcgctctcggtttccatgtttgcttcctgtcttacttttcttccaccctgttcctccttccccttcaccaacttcagtaccaagaaaaaaatctagaggtgtctaatgactcaaatcctgtaaagaactcagaacaatggcaccattcaccccttttggggtgntctgttttcttggtggcgtttcaagagtcatggacaggtccttctgggtctaaggctctgg

SEQ ID NO: 32122 - DNA, 459 bp, Homo sapiens
  misc_feature (1)...(459): n = a,t,c or g
ggagnnntttgaatccnnnnnnnnnnnnnnnnnnnnnnnnnnnnnnnnnnnnnnnnnnnnnnnnnnnnnnnnnnnnnnnnnnnggcacgagnnnnnnnnnnnnnnnnnnnnnnnnnnnnnnnnnnnnnnnnnnnnnnnnnnnnnnnnnnnnnnnnnnnnnnnnnnnnnnnnnnnnnnnnnnnnnnnnnnnnnnnnnnnnnnnnnnnnnnnnnnnnnnnnnnnnnnnnnnnnnnnnnnnnnnnnncaaagattgctacctgctccttcctctggaagcttcatcccagaggagcacctgccaaatgccagctgaacctctcctgtatgaggcgtctgtcaacccctgctggtgagaggtgaagccagctggacttcctgggtcgnnnnnnnnnnnnnnnnnnnnnnnnnnnnnnnnnnnnnnnnnnnnnnnnnntctgtaaaaacacaccaatcagcact

SEQ ID NO: 32123 - DNA, 458 bp, Homo sapiens
  misc_feature (1)...(458): n = a,t,c or g
atgagnnnttgantccgnnnnnnnnnnnnnnnnnnnnnnnnnnnnnnnnnnnnnnnnnnnnnnnnnnnnnnnnnnnnnnnnnnggcacgaggttaaccaagttggcatgtggctgtcatttgtccctttacattactgagctaccattgtctgaagaacccaacattccccaaagatcaactggtcttcaaatttcacatctgtttagattagtagctactttgtttcttgacagattgtttgctcgtagccaaaaagtagcatanaaggtaggctctggagttagattgcctggattcaaaccccagctccaaatcccagctccacacttcatagctacgtattcttggacaggttacttgaggcttagtttgcccatgtgtaaaaattaaaataataacaacctttgctatgtgccagacatttcttataaagtaacacatttaatcctccaacaa

SEQ ID NO: 32124 - DNA, 467 bp, Homo sapiens
  misc_feature (1)...(467): n = a,t,c or g
gnnnnnnnnntnncnncccccctttgaacaccgtttnnnnnnnnnnnnnnnnnnnnnnnnnnnnnnnnnnnnnnnnnnnnnnnnnnnnnnnnnnnnnnnggcacgaggagaaattgtatttatcagccttatgttttatggcttctggattttagttcatgtatagaaaggcctcccttttccaagatgataaaaacacacatgtttttttctactacttctctggttttatttttacatcaaactgcaccttttttgaaaattattctagagcagtctaagaggcctcgccttgaagtgggtcaccaaggggtagttttccagcacccaggggcggacgcaggcgttcctctccagcaactaatgccgaccgcacaaggtaaggcccagcagcagagccagctccccgctcaggagcaggcagcacactgcggttccagaaaccagcaccagactcagactttggg

SEQ ID NO: 32125 - DNA, 447 bp, Homo sapiens
  misc_feature (1)...(447): n = a,t,c or g
tcttgaccccctttgacncncntctnnnnnnnnnnnnnnnnnnnnnnnnnnnnnnnnnnnnnnnnnnnnnnnnnnnnnnnnnnnnnnnggcacgagaaataaatgaagaaatgaatgaagaaataacgtatgggtgattgcaggatgaacagttgtggatatgtttgtcaacactgatagtgttgcagataaatgtgccacaggagtgtctgggtacagagctagaggcatgtgtgttatagtaatagtgactggatttgcacaaactgagagtgtgtaatgtgcaaaaggacagcacattgttgtccacagatggactgagaatgtgtagggccacaggaggatatcgtataagcacagtagataaaaaatgtgtgtaaatgcagagtggcagtatctggggatgcacagtcaaaaagagagtacttttgaatgcagggggacaaa

SEQ ID NO: 32126 - DNA, 462 bp, Homo sapiens
  misc_feature (1)...(462): n = a,t,c or g
gnnnnnnnntnnnnncccccttggannaccgtttgacnnnnnnnnnnnnnnnnnnnnnnnnnnnnnnnnnnnnnnnnnnnnnnnnnnnnnnnnnnggcacgaggtgtgctgagaaaagtcagccaagctgccgtgtcttacatccttgaacttgatgtctagatctagagcagcgaagggaagggctcgcaggaggctgtttttcacccagcaatttcagtgttctctgccccaaccaggttggggttccttccagcagtttacagaaacctttgtacaggatcagagctgacagacggtagtgcacacacactcgtgtcaagctcagaggacttgcccgacctcttctgccagcctaagaaataacccagtatcaggattgctttcacatttttccttggagatttcaggcatcttaggccggaagggacctcgaaggtggccttttcttacccatccctt

SEQ ID NO: 32127 - DNA, 457 bp, Homo sapiens
  misc_feature (1)...(457): n = a,t,c or g
nnnnnnnnctttgnnnccccttggannacnnnnnnnnnnnnnnnnnnnnnnnnnnnnnnnnnnnnnnnnnnnnnnnnnnnnnnnnnnnnnnnnnnnnnggcacgagcaaagaaagttcagaaaattgggtatttcacagacacattaagatttcaaacaaagacgagagcattcacaaggaacagagagggaacgtatgtggatggggcaagtaactgccagtcatcagcctgttatgtactgtacacatagagttttgctgtgcagcagcaaatataaaaatgaatgtcatcaccatgaaagtggaaaaccgtatttcaatgtcatgcaaatgccataattgaaatgaaaagataggaaatgctggtgcattgtctacattaatgtatttggttgttgactttattgcataaaaagtatcagtggggacgagatagttttgctttgtttcagaaga

SEQ ID NO: 32128 - DNA, 465 bp, Homo sapiens
  misc_feature (1)...(465): n = a,t,c or g
gnngnnntngnnnccctccttgaanacctctgaacaccatntntnacnnnnnnnnnnnnnnnnnnnnnnnnnnnnnnnnnnnnnnnnnnnnnnnnnnnnnnnnnnggcacgagggacaaaagaaataacatttgcccaagatcacactgtcagctaataatagcctgactctgtgttcacaagcacggtaggacgttgcctctgaaaaggcctcactattccaaaagacatgtcatgataacattcttaagtgattaaatactgtcacattacatgacagggatcagcaaactttttctgtaaaggaccagatgttaaatattttagacttcgtgagacatgtggcctctgtcacaactgctcaactctgccatcttctcatgaataatacgtaaacgaatgggcatgactgtgtttcaatagagctttatgtttggacacaaatgttaaccacatacactttta

SEQ ID NO: 32129 - DNA, 456 bp, Homo sapiens
  misc_feature (1)...(456): n = a,t,c or g
gcgccctcgcnccctcttgaataccnntgaagacctnttnactcatnnnnnnnnnnnnnnnnnnnnnnnnnnnnnnnnnnnnnnnnnnnggcacgagttgaatttccttctgtgggtttgaaaggtaaaggttattcttcttatggttaccataacttattgtgccctcttctttacctcatcactatcttgtgtcttccccacgaaagagacagggccttcagcatggccccgccctgccctgctctcccaacctgtgctggcccagtggcatctccaggactgggttccggggagggataatgcagccctgctcatttgccatcttactcagaactgggcaaggcttattcagggccatcctagggagactccagcattcagtgggagtttggtttaaatgacctctaggctgggcatggtggttcatgcttgtaatcctacactttgagaggg

SEQ ID NO: 32130 - DNA, 445 bp, Homo sapiens
  misc_feature (1)...(445): n = a,t,c or g
cnttgagacctctgaaccctnnnnnnnnnnnnnnnnnnnnnnnnnnnnnnnnnnnnnnnnnnnnnnnnnnnnnnnnnnnnnnnnnnggcacgaggttttccaaagcagttcactgacttacatgaataccagtagtatatggtagtttctgtggtcccttatccttgccagaatcttggtactgtcacattttaaaatttttgccaatctgtataacagtatcatattaggcttttactttgcattttcctgatcactgatgatgttaaacgtcttatgtatattacttatttggattcttcttttctgatagtttctctacttcaactccaaaaattttcatatgttatgcttgtgtagcccctgtgaaaagaaagcacagtaggatgacctagttactcacttgaaaagtatgatggagcccagcgacctttgttctaatccc

SEQ ID NO: 32131 - DNA, 457 bp, Homo sapiens
  misc_feature (1)...(457): n = a,t,c or g
gnnngnnnnntnnntnnnnnctttganaccgcttgacnnnnnnnnnnnnnnnnnnnnnnnnnnnnnnnnnnnnnnnnnnnnnnnnnnnnnnnnnnggcacgagctgcacatgaattatataatttgaaatcttttttcatttatccagctgggttgatttcaggctagaatacacacacgaatagtgatgtctaatttnnnnnnnnnnnnnnnnnnnnnnnnnnnnnnnnnnnnnnnnnnnnnnnnnnnnnnnnnnnnnnnnnnnnnnnnnnnnnnnnnnnnnnnnnnnnnnnnnnnnnnnnnnnnnnnnnnnnnnnnnnnnnnnnnnnnnnnnnnnnnnnnnnnnnnnnnnnnnnnnnnnnnnnnnnnnnnnnnnnnnnnnnnnnnnnnnnnnnnnnnnnnnnnnnnnnnnnnnnnnnncagtgagctganaacgaaccnctggacttcaacctgg

SEQ ID NO: 32132 - DNA, 455 bp, Homo sapiens
  misc_feature (1)...(455): n = a,t,c or g
gnnnnnnnntnnnnnnnnncttgaanaccgctttgactgcnnnnnnnnnnnnnnnnnnnnnnnnnnnnnnnnnnnnnnnnnnnnnnnnnnnnnnnggcacgagtgctactaattcttgttaactgatgtgctgacaaataagaaccaaacatagaattattttgggaaggtggtggatattataaagcccacccatttctgcacttccctacatttctcagactcctgtgcagttaggttggccatgtgactgatttctggctaatggaatgtgggtggaaatggtgttctctacttgtaagcttcttgatcttccatgctctgaatctgaaatatcctgcatatctaccatgctctccttatctcattcctggtcctctaaaatggctccagacatctgcatcagactttgcatgagcaagaaatacttttatcatggtaagtctngtggaaat

SEQ ID NO: 32133 - DNA, 470 bp, Homo sapiens
  misc_feature (1)...(470): n = a,t,c or g
gnnnnnngnntnnngnnnnnnttttggannccctctctgannaccantnnnnnnnnnnnnnnnnnnnnnnnnnnnnnnnnnnnnnnnnnnnnnnnnnnnnnnnnnnnnnnnnnnggcacgaggagagctagcaccatgagcttcacctgttaacgagaaaaatatctccatactattagttgagattaaatgtggaattccaggccagaaagtacagttagagagtgttttatttatgctcctctcaactagagtcacaaaaatgagattttgaaattcctacttaaaacaataatatagcaggcaaagtgaaatgaataaatcaacccttatattctgactccccacctttctatgttaatctggagtaaggaggcacagtttaagatgaagctagtgagagaggtaggaacagaccacacagggcattggagactaagttaaggattttctccctttatccctgggaa

SEQ ID NO: 32134 - DNA, 464 bp, Homo sapiens
  misc_feature (1)...(464): n = a,t,c or g
gnngnnngnttnnnttnnnnctcttgaanaccctctttgaaatgccnnnnnnnnnnnnnnnnnnnnnnnnnnnnnnnnnnnnnnnnnnnnnnnnnnnnnnggcacgaggatgaggccctcgtggctggccccgaggggaagggatccgaggcaggtatgcgggagtggctggggtgggggagatgccagctggagatggtgggggggctgagagcaccatggcttcctgggcctctacatatactccagcactctgggcagctcccagatccgcaccacctgctggctgtgtgaccttgggtaagtgcctctacctctctgtgcccaggtttcctgtctgtgcgatggggatggaggtgatagtgtctaccctcctgaggtcgttggggggactaaatgggatagtaagtgtaaatgggacagcagtgccaggcacaaaagtgagcactttaattaagtcaacc

SEQ ID NO: 32135 - DNA, 469 bp, Homo sapiens
  misc_feature (1)...(469): n = a,t,c or g
gngnnnnntnnnnntnnnnnctttggaanacctctntgaanaccatnnnnnnnnnnnnnnnnnnnnnnnnnnnnnnnnnnnnnnnnnnnnnnnnnnnnnnnnnnnnnnnnnnggcacgaggcgtgtgtaattttagtgtaatactgcaattagctttttgaagcatagtaacttaaaaattatatgttcaaatgggaatacggattggtgatttaggcaaaactnnnnnnnnnnnnnnnnnnnnnnnnnnnnnnnnnnnnnnnnnnnnnnnnnnnnnnnnnnnnnnnnnnnnnnnnnnnnnnnnnnnnnnnnnnnnnnnnnnnnnnnnnnnnnnnnnnnnnnnnnnnnnnnnnnnnnnnnnnnnnnnnnnnnnnnnnnnnnnnnnnnnnnnnnnnnnnnnnnnnnnnnnnnnnnnnnnnnnnnnnnnnnnnnnnnnnnnnnnnnnnnnnnnnnnnnnnnnnnnnnnnnn

SEQ ID NO: 32136 - DNA, 432 bp, Homo sapiens
  misc_feature (1)...(432): n = a,t,c or g
ttgaantcccttnatttgaanaccntctnnnnnnnnnnnnnnnnnnnnnnnnnnnnnnnnnnnnnnnnnnnnnnnnnnnnnnnnnnnnnnnggcacgagccctgtcttaatttattatcctcacatgagtcgtatggacacaacattgaggagaatgggttcatgaataaatgataccttgccatcacttttattctcatttttttaaatcggtagatggtagacattgtctgatatttttatttctttgtaaggtaatttgaaaatccttattattaatctggattattaggaagtcccaaaatatttcagttttctataagcaggaacatcagagtaaatctggctgtgataaacacttatgggtaaataaaaaccattatggatgcctgaatgtacaagccttgccctcatgtgttgntatcttgttca

SEQ ID NO: 32137 - DNA, 450 bp, Homo sapiens
  misc_feature (1)...(450): n = a,t,c or g
gnngnnnnngtnnnttgnnntttganaccnctatttgntgatcncnnnnnnnnnnnnnnnnnnnnnnnnnnnnnnnnnnnnnnnnnnnnnnnnnnnggcacgagaggttctaaaacttaaacaaaacatgagtgaatngtagtctgtttctttctgtcttcccatctctctctggtatgcccttagtttaaaaagagttgttttgtttgggttgctctgccgtaaagaaggaatttgaagaggaatcagtaaaaagaaggagatggctccattaatcaagtgtgaaagacttttccaggaaacaggctagtgtaaaagctgcaagtgaaatgtataaatacagatctaaggttttaaaanaagatacactgctcttgaattatggctcctaaaaaatccaaggtagaagcaaaatcactgaaaatatttcaagagctggcatttggatat

SEQ ID NO: 32138 - DNA, 452 bp, Homo sapiens
  misc_feature (1)...(452): n = a,t,c or g
gngnnnnngtnnntgnnnntttgaanaccttnntttgannacntnnnnnnnnnnnnnnnnnnnnnnnnnnnnnnnnnnnnnnnnnnnnnnnnnnnnnnnnnnnnnnnnnggcacgagttccattttctcagctttggctcaaagaccagactcaaaggactctacctctctgagagtcctcagggcccaaggaaatggggcacccccagcccaacctcagcaagtgaaggtcaaggcctggccctgagatggcccatgcggagctgaccacccagccgtgtgacacagtaggagtgcccttcctaatgtcctaggggaaaccagttggccctctgagagcaagagggtcctggaaagacaacaaaggccacaaaaatgctctcacatggcctaaacttatgggtagcgcccctcctgctggggagtgggtagagacttctgatggaccctgc

SEQ ID NO: 32139 - DNA, 430 bp, Homo sapiens
  misc_feature (1)...(430): n = a,t,c or g
ttganaccgctatttgatgaacacnnatnanatnnnannnnnnnnnnnnnnnnnnnnnnnnnnnnnnnnnnnnnnnggcacgagggcaattagggcatatggaaaaatgggtttaatacatttaaaatgatacaattgtcgatgaggaacttccagtgctcaggcaattccttactgtaaaagtgagagccattttaatatagaacaagatttgcatggtcacagcctttctcttgggtggagctaaagttatttgatccctggctgcactggcagatagagctcacaatttactaattttacccaagactgcaataatagccacagtgttgcataagaggtgtagggttgcatggtgattgccatcgaaactgcccagattgtcataaacttcaggagtgcagcagctatgctgnattgntaaaatgtt

SEQ ID NO: 32140 - DNA, 446 bp, Homo sapiens
  misc_feature (1)...(446): n = a,t,c or g
ggngnnnnntnnnncnttggactttcgatnaccgtnnnnnnnnnnnnnnnnnnnnnnnnnnnnnnnnnnnnnnnnnnnnnnnnnnnnnnnnnnnnnnnnnnggcacgaggataagaagaattcaaactccaacatctgggagagcttgtttcagtagccagccgggaagccggaaagctggcctcatacaggtgagatgtgttatgggaataagggccttgtgcacttaatgaaccctgcctgcctgtcagcctggtttttcatgtaccattgttgttcaaataagaaaaagagagtgttcacagcctgtggtgagattagagtaatgaaaatgaagtgttaatctgttgataggaagcacatcccatatcctgcatcccgggccacattcatgcgtgtataatatattccaggttttctcatgaccagaaaagcttgggtgttca

SEQ ID NO: 32141 - DNA, 444 bp, Homo sapiens
  misc_feature (1)...(444): n = a,t,c or g
gcgnnnnnntnccccctttganttcnnnnnnnnnnnnnnnnnnnnnnnnnnnnnnnnnnnnnnnnnnnnnnnnnnnnnnnnnnnnnnnnnnnnggcacgagttcaaagtattctccttaaatattttattttcacatctatgtttgctcaagactcggtggtggacaacatgagagtagcagtgaaattttcctgtattgctatttaaaggcagtgagtgcctttttattttaccttctaatagaatatcaacaggaaaggctggacatttagaaatgtcagggtatggaccaggagaatcctcgtgagcaaaaccaacattctgtgtaaagataatcctgagtctatttaaaacacactgtgaaatgggtaacggagatgttgaagatgacatgaagatgcagtttacagtcactgggtgcaaacaggagttaaaactgcaaa

SEQ ID NO: 32142 - DNA, 442 bp, Homo sapiens
  misc_feature (1)...(442): n = a,t,c or g
gggtnnntnnnnctttgacttcgactaccacnnnnnnnnnnnnnnnnnnnnnnnnnnnnnnnnnnnnnnnnnnnnnnnnnnnnnnnnnnggcacgagaaacaagagtattaataattttaagacagtaccacttaacagtcacaaaaaatattgttcagagataaatttaacaaaacgtgcaagacctatacactgaaaactacaaaacagtgctgagagaaattaaaatctaaagttgttaagatctgccccatttgtggattggaactattatgccctttctcccccaaattgtcccatannnnnnnnnnnnnnnnnnnnnnnnnnnnnnnnnnnnnnnnnnnnnnnnnnnnnnnnnnnnnnnnnnnnnnnnnnnnnnnnnnnnnnnnnnnnnnnnnnnnnnnnnnnnnnnnnnnnnnnnnnnnnnnnnnnnnnnnnnnn

SEQ ID NO: 32143 - DNA, 442 bp, Homo sapiens
  misc_feature (1)...(442): n = a,t,c or g
ggtgnnnttnnntcttggacttcactaccnnnnnnnnnnnnnnnnnnnnnnnnnnnnnnnnnnnnnnnnnnnnnnnnnnnnnnnnnnnnnggcacgaggttttatagagttaatcatggtctggattttgctgatattgcatccccttggtggtgtttagaatgtgtctctgtcctctgtgtgtttcctgtatattgatacctggaactagaggattgatccaattcaggtaaatttttgttacttgtttttggcaaaactattttatagttggtggtatgttccatcagcagcagcaggtacgtggtatctggtttctttttctgataatcacagctgcttgtacttagtcactaattcattaaagggagcaaaatggtgatactttaatcattttatgttagctggaatacttctctagagagaaaattctctactacta

SEQ ID NO: 32144 - DNA, 437 bp, Homo sapiens
  misc_feature (1)...(437): n = a,t,c or g
gagtgnnttnnnnatttgaatnngaataccttnnnnnnnnnnnnnnnnnnnnnnnnnnnnnnnnnnnnnnnnnnnnnnnnnnnnnnnnnnnnnnnnnnggcacnnnnnnnnnnnnnnnnnnnnnnnnnnnnnnnnnnnnnnnnnnnnnnnnnnnnnnnnnnnnnnnnnnnnnnnnnnnnnnnnnnnnnnnnnnnnnnnnnnnnnnnnnnnnnnnnnnnnnnattatgtgctttctatatgtcaaacactacactcagtatgtatatgccttctcatcatactcctcactacagtcctatgagataacaccaggatgagcaagtgaatatgaagattagagaaaaagacaagagtaagagtgaaagttgtttccttggaatggccagaagcctaggaaatatttctctgttttgttggccctcaggtcccaatgccat

SEQ ID NO: 32145 - DNA, 434 bp, Homo sapiens
  misc_feature (1)...(434): n = a,t,c or g
gngtgnntnnnnattgantntgaataccntngnnnnnnnnnnnnnnnnnnnnnnnnnnnnnnnnnnnnnnnnnnnnnnnnnnnnnnnnnnnnnnnggcacgagcggcacgaggatctggtccttccctttttaggatctcacaatgtattcacagtcgaagaggtgtggcacaagcatttcatggcctcccacttcctcctctggggctttgcacttactctcctccaacacttacgattattggttggatcttttgctgacttttctgccctttccctgccacaatctacctgtgggcatttctcactgttctggtctcagccctcttctctttctgtatgcagtcccttgacaggctcattccacctatccagttgcaacccttcccactatgtggctgaacacacctacacctgtgacctctgcattgggt

SEQ ID NO: 32146 - DNA, 431 bp, Homo sapiens
  misc_feature (1)...(431): n = a,t,c or g
gngngnnnnnnnnttgantcggattccnnnnnnnnnnnnnnnnnnnnnnnnnnnnnnnnnnnnnnnnnnnnnnnnnnnnnnnnnnggcacgagcaatcatctagccactaaaaataagtaacagtaacgtttaatatgcacagtaaaatgggtagtgtaacagcctgtccatatacaacaccaaacttaaagttaacttgaagttctaggattggttgtagacctagacttttatctccattcaagccaaatcaatcatttatatggaactaacaaaagcagggatagcattaatgtaacaagaggcacacacttgtgacagctatactaacaaaacccattccattctagggacctgtgatgttccatttcagtaaaggatattcttcattttgcaggttttatgaaaatctttacaacctatgcctgac

SEQ ID NO: 32147 - DNA, 428 bp, Homo sapiens
  misc_feature (1)...(428): n = a,t,c or g
acccgntatgctnnnnnnnnnnnnnnnnnnnnnnnnnnnnnnnnnnnnnnnnnnnnnnnnnnnnnnnnnnggcacgagctcaaaggcataacttgccctaaaatcaaagggcaaggagtagaggagtcaagattccaacccctgtctttctggctcccctataccaacatagccttagtgtaatgaaaacagaccgctcaggaaggctgacagtgaagcaaggctggtctctgagaccccccgggagatcagctctgacggggcctcaggaatctcccggtagagtttctctaccacagacatttctctttccttgcccctcacactgagctctggctcctgagtattccttaaaaagttatcgtgagccaccacgccaggccaaaatttttttttaaattagctanagacgggcaggccatgggggg

SEQ ID NO: 32148 - DNA, 438 bp, Homo sapiens
  misc_feature (1)...(438): n = a,t,c or g
nttgacccctcccccttgncccccntttaatacgactcnnnnnnnnnnnnnnnnnnnnnnnnnnnnnnnnnnggcacgagattgttattatatccattaaagttaatcagccataagggtgaaataaggttgaaaacggtagactttcattagtannnnnnnnnnnnnnnnnnnnnnnnnnnnnnnnnnnnnnnnnnnnnnnnnnnnnnnnnnnnnnnnnnnnnnnnnnnnnnnnnnnnnnnnnnnnnnnnnnnnnnnnnnnnnnnnnnnnnnnnnnnnnnnnnnnnnnnnnnnnnnnnnnnnnnnnnnnnnnnnnnnnnnnnnnnnnnnnnnnnnnnnnnnnnnnnnnnnnnnnnnnnnnnnnnnnnnnnnnnnnnnnnnnnnnnnnnnacgggtgataaagcagcatanacaactngcaacatcaacaaccgcctt

SEQ ID NO: 32149 - DNA, 475 bp, Homo sapiens
  misc_feature (1)...(475): n = a,t,c or g
gnnnnnnnnnnnngnnnnnncccccattggacncccttnnnccttggagnaccnnnnnnnnnnnnnnnnnnnnnnnnnnnnnnnnnnnnnnnnnnnnnnnnnnnnnnnnnnnnnnnnnnnnggcacgagcttttgaaaggtacaaatttagactctaaattttaatgtctaatccccatgctgccatcttgagtgacatgtatgtattaattgtaaattatggatggattgggctttttctaatatgacataataaacactagtgggttttaagattgatctctaaccagtagaaattgtagctgacactcgacaccatccatcatttttacagttaagtcttagaagacttaaccaacatgaagagtatgaagaaatgtcttccttttcttttatgtcttttatgtgccctttctagtggattttacttgaatcctatttttgtcttagngtttatggatccacaatactcagg

SEQ ID NO: 32150 - DNA, 431 bp, Homo sapiens
  misc_feature (1)...(431): n = a,t,c or g
tttgaanaccctttatgactttgaacccnnnnnnnnnnnnnnnnnnnnnnnnnnnnnnnnnnnnnnnnnnnnnnnnnggcacgagcttggcattccatgacaagtttgtcaacctacacttttatatagacatatcattatttcatggtcaagcctgtagtattaaaatgatttttttaaaagatgtaaactgtgcttagttaattggttatattttgttctgtttttttttttttnnnggcaaantnttgtnntgtnnccnggcctgaagnccagnggcgnaanttngnntaantgaanccccnncccccnggnttnanggnattntcnngcntaacccncccnagaannngnanttncngnnntnccccancncccccggtnaagtttnganttttnggcaaaaagggggttcnccntntggnccaggt

SEQ ID NO: 32151 - DNA, 463 bp, Homo sapiens
  misc_feature (1)...(463): n = a,t,c or g
gngnnnnnngnnnnnngntttgatncccttnnnnctntgaanaccntctatgacnnnnnnnnnnnnnnnnnnnnnnnnnnnnnnnnnnnnnnnnnnnnnnnnnnnnnnnnnnggcacgagggaacaaacactagggttttgtttttgaaatattaaacattaagatgaaaagacgaatgagatgctatcatcaggctacagtaagaccagacagattatttggagaagctgttaatactggaacagatcgtatgttttgcagttacattcagtccctcagatctgatagttccgtgtgtgtatgtatagtaactgaattccatatatccaggcctgcagcttttaccagctgtgtgctcagaaaaggaagtatggtggtccaacttgacttgtacttggtgaaaccatttctttgttactcactgtttctaagtgctcacaaatgtttcatccttgagatctt

SEQ ID NO: 32152 - DNA, 440 bp, Homo sapiens
  misc_feature (1)...(440): n = a,t,c or g
tttganaccctntatgacntttnnnnnnnnnnnnnnnnnnnnnnnnnnnnnnnnnnnnnnnnnnnnnnnnnnnnnnnnggcacgagcttgaatcaagatgggacttgnnnnnnnnnnnnnnnnnnnnnnnnnnnnnnnnnnnnnnnnnnnnnnnnnnnnnnnnnnnnnnnnnnnnnnnnnnnnnnnnnnnnnnnnnnnnnnnnnnnnnnnnnnnnnnnnnnnnnnnnnnnnnnnnnnnnnnnnnnnnnnnnnnnnnnnnnnnnnnnnnnnnnnnnnnnnnnnnnnnnnnnnnnnnnnnnnnnnnnnnnnnnnnnnnnnnnnnnnnnnnnnnnnnnnnnnnnnnnnnnnnnnnnnnntacccagntnattttttnattctctaaatttgtaaaatagtttcagtctatggaaaaagtaancttgaaaagaaggaagtggaa

SEQ ID NO: 32153 - DNA, 443 bp, Homo sapiens
  misc_feature (1)...(443): n = a,t,c or g
gnntttganaaccgtnnnnnnnnnnnnnnnnnnnnnnnnnnnnnnnnnnnnnnnnnnnnnnnnnnnnnnnnnnnnnnnnnggcacgagagcaaactggagaagcagctggggtggggcgcagttcagcccgctaccctgacactctaggccctggcatttgctttagctgcttttgtagaattgacatgagggagactgtccctctagaggaaaacgctcagctattaccaatgaggaaaaggcaatactgatgtgctggggttttttgttttttttaatctcaaacttaggaaaagatgcaagtgcgttacaaagaattttgtttcctgaaccgtgtgagtcagttgctgagagtctgctacccgcccacgatacagacactgaacaggaagtcagcatggacgcagtactcctancgggtcctcaggcccagtcatgtcct

SEQ ID NO: 32154 - DNA, 462 bp, Homo sapiens
  misc_feature (1)...(462): n = a,t,c or g
gnngnnttnnnttnnngctntgannaccttttgancnnaaccncnttatgactgcnnnnnnnnnnnnnnnnnnnnnnnnnnnnnnnnnnnnnnnnnnnnnnnnnnnnnnnggcacgagctggaattgtaactggaaaaagagacaagtccctgtggtctggccctcttgctttgtgggtaaacagattcaggcccagagaagtttgacttaatgtggatttttatgactctttgcctaaaacttactcttcttttctctgaagtggtctgtgctgagggagtgaaagggtagaagactggattggaaatgccagtttcacatccagatgtagctctctacccatttagaagtaagaggtactgaattagtgacagctagattccattgaagtttattaagtatttctgaaacccagtatgaagtacgatatttcatgtctgtatatatgtttgtgtgcctta

SEQ ID NO: 32155 - DNA, 435 bp, Homo sapiens
  misc_feature (1)...(435): n = a,t,c or g
ggattnnntttganacattnnnnnnnnnnnnnnnnnnnnnnnnnnnnnnnnnnnnnnnnnnnnnnnnnnnnnnnnnnnnnnnggcacgagggggcaaaggccatgctctgtgctctcagcagacctgtgtgggcagggtgccggtgagggtggggtggtcaccggaggcagccttcaagcagcaccgtgtggggcctcctcctcagtgtaggcccatgccagggacgccgtgtgtgaggaggggctcagggagcagcagaggctggggccgctccgcctctaggatgcctgtccaggcagatacccggggcaggaaggcccggcatggcccagggagggccagttgttccacgctgtgctctcggccctgagagcttatcatgggctccaggggtccctgtaacccttctccctgcaaccctgctgtattccagg

SEQ ID NO: 32156 - DNA, 445 bp, Homo sapiens
  misc_feature (1)...(445): n = a,t,c or g
ggtgntnattgnttgnntaccatnnnnnnnnnnnnnnnnnnnnnnnnnnnnnnnnnnnnnnnnnnnnnnnnnnnnnnnnnnnnnnnnnnggcacgagggcgtgagccaccgtgcccggccccaaacctgttttcatcactgcttcatatttaagttctaagaagttatctgtacttactgtctctacttaatctctcatgtgcttttcaaatgcactgaaatttgggttctgtcttcatcagtccatcaaagtagcttttactaaaatcatcaatgatctccaatccattatctagttttcagttcttatcttacttgtctgcccctagcactgttcttcacagttgtactcgctcctttttgcttccaaattacattttcctcatctggtactgagctccctgttaactttctttactcttggttttagcatttccatttcctt

SEQ ID NO: 32157 - DNA, 443 bp, Homo sapiens
  misc_feature (1)...(443): n = a,t,c or g
ggnggtntttgttccttccgnnnnnnnnnnnnnnnnnnnnnnnnnnnnnnnnnnnnnnnnnnnnnnnnnnnnnnnnnnnnnggcacgagaaattacatatgtgtgtatttccctgaacatttttttttatagtggttcattagaatctggatttgtttatcctagtgtttcgtagaagtgaatgttatatcatgtatatctctggggggaagaaaggccgagacctgtcatgggagactgtgcctttgctagccagtctgtaaatcgaataatcttgaaacatttanntaggcccatttggggngacttcnaagngctttatgaagccttctctcctcacacntcccctanagactaccttncctgaanttnnatgatnnattgcaatgnganctgcntgntngnnctatacnntannagncacnnnaangcactcttttgat

SEQ ID NO: 32158 - DNA, 446 bp, Homo sapiens
  misc_feature (1)...(446): n = a,t,c or g
ggtgntnatttgntgnatacctnnnnnnnnnnnnnnnnnnnnnnnnnnnnnnnnnnnnnnnnnnnnnnnnnnnnnnnnnnnnnnnnnnggcacgagagaaaaccaaagggctcattgatggccttactaagttttttacaccatcacctgatggtcgcagatcacgaggtgaaattatagacttttcaaagcactatcgtccaaggaaaaaggtctctcagaaacagtcatgcacttctcatgtgttggctacaggtaccacacaaaagctaaaacctccaccttcttcacttccacccccaacccccatctccggtcagagccccagttcacaaaagtccagcacggccacttcttctccctctccccagagttcttccagccagtgcagtgtgccctccctgagcagccttaccactaacagccagctgaaggcactntttgat

SEQ ID NO: 32159 - DNA, 446 bp, Homo sapiens
  misc_feature (1)...(446): n = a,t,c or g
gtgtgntttgtctgcgtccttnnnnnnnnnnnnnnnnnnnnnnnnnnnnnnnnnnnnnnnnnnnnnnnnnnnnnnnnnnnnnnnnnnggcacgagcaaacaattgaagcagagctaatatcacttatgaaaaggggaaactgttggaagaggctaggaaggcttacagaattaagggaagtgaagaacccggcacacccaagacaggaaacaggcatctggaaaatccgtcttgagcaccctctcagaaacaaacaggtaaacttaacaccaggtttttggatgtacacatcagagtcttatgaaaagaaagctttttggctgaacttaagattagtcacatgcctgccccttgtccctagcatggcactgagaggactgatctgaccaagaagcctcctctgagttccatggagggagctagggcacgcnnagcccccttggggt

SEQ ID NO: 32160 - DNA, 471 bp, Homo sapiens
  misc_feature (1)...(471): n = a,t,c or g
gnggggtnnnntttgnnnntttgaaatncnggaaagccttatgacnnnnnnnnnnnnnnnnnnnnnnnnnnnnnnnnnnnnnnnnnnnnnnnnnnnnnnnnnnggcacgaggatatatctggggatacccaaaaagcaaagcagtccctggcttttcttcagcgggcaggtcgttctgaagctgaggtggaatacgtcttcagtggttctcgtctcaaactctatttgccaaaggaaacttgccttatcaccttcttgcttgcaggcattgaatgccccagaggagcccgaaacctcccaggcttggtgcaggaaggagagcccttcagcgaggaagctacacttttcaccaaggaactggtgctgcagcgagaggtggaggtggaggtggagagcatggacaaggccggcaactttatcggctggctgccatcgacggtgccncctgccgtcctgctggtggaacacgcc

SEQ ID NO: 32161 - DNA, 469 bp, Homo sapiens
  misc_feature (1)...(469): n = a,t,c or g
gnggngttnnnttnnnnntttggaaattcgnnnnnnnnnnnnnnnnnnnnnnnnnnnnnnnnnnnnnnnnnnnnnnnnnnnnnnnnnnnnnnnnnggcacgagctggctcattactcccattttttttagtaaccaaaatgaggtccagaaaatttacagagaagctgggctccatggaatgttttgttttgtttttgttacctacagtcttctgactgctgcattaaaaaaaaaaaaacngtntaaaanancctancttaaagganaggntncctaaagtntgcaagtcacttgtaaagngttgatgnganncttacanaancanacnttttcccaaaaaggntttaaggaaattgatccgcaacaaagttgcctttgancncanatttttgaanccaagtancaggngggattcctttatttactgatagttaataagggatacanccaactcaaannggcaacgtt

SEQ ID NO: 32162 - DNA, 468 bp, Homo sapiens
  misc_feature (1)...(468): n = a,t,c or g
gnnntnnnnnnnnnnnttttgaaaatcngtatgacnnnnnnnnnnnnnnnnnnnnnnnnnnnnnnnnnnnnnnnnnnnnnnnnnnnnnnnnnnggcacgagaaaggaggctttaagaggtcacttgcatccaatgctgcagaagtgtcagagactgaggacttaaatgaagccactgattagcaatttaaagatcctctccaagggtctcannnnnnnnnnnnnnnnnnnnnnnnnnnnnnnnnnnnnnnnnnnnnnnnnnnnnnnnnnnnnnnnnnnnnnnnnnnnnnnnnnnnnnnnnnnnnnnnnnnnnnnnnnnnnnnnnnnnnnnnnnnnnnnnnnnnnnnnnnnnnnnnnnnnnnnnnnnnnnnnnnnnnnnnnnnnnnnnnnnnnnnnnnnnnnnnnnnnnnnnnnnnnnnnnnnnnnnnnnnnnnnnnngaatgctaaggccagaactgtccctaccaac

SEQ ID NO: 32163 - DNA, 465 bp, Homo sapiens
  misc_feature (1)...(465): n = a,t,c or g
gggngtnnnnttnnnntttggactctgaaaccttatgacnnnnnnnnnnnnnnnnnnnnnnnnnnnnnnnnnnnnnnnnnnnnnnnnnnnnnnnnnnggcacgagccgagcagttgactcccagtgaatgacaaaagaggaaaaaacagccagagaatctttgtccccagtgcagggccgtggtacaagtggaaagatgatgaagcaggagcagcaatacctgggttctagccccctactgtcagcaatgagccgtgtggctaaacctctctggacttcgcttctctcatctgtaaaatgggatgacgctattgcctagtctgggaacctcacagtgttgctgcgaagatgaaacaagacgtgttgtagagatgctttgataatctacagcctactctaaacatcaagtataatttttggcttccaaaactggctcaaaatattttcatgnaatgggcccaacca

SEQ ID NO: 32164 - DNA, 448 bp, Homo sapiens
  misc_feature (1)...(448): n = a,t,c or g
tttggganatncgannnnnnnnnnnnnnnnnnnnnnnnnnnnnnnnnnnnnnnnnnnnnnnnnnnnnnnnnnnnnnnnggcacgagccaatagtgaaatgccacacctttgtccactgtcagggttgtctacctgtaggatcagggtctaagcaccttggtgcttagctagaataccacctaatccttctggcaagcctgtcttcagagaacccactagaagcaactaggaaaatcacttgccaaaatccaaggcaattcctgatggaaaatgcaaaagcacatatatgttttaatatctttatgggctctgttcaaggcagtgctgagagggaggggttatagcttcaggagggaaccagcttctgataaacacaatctgctaggaacttgggaaaggaatcagagagctgccttnagcgattatttaaattattgntaaagaatac

SEQ ID NO: 32165 - DNA, 468 bp, Homo sapiens
  misc_feature (1)...(468): n = a,t,c or g
gnggnntnnnttnnnnnntttgaaatncgnnnnnnnnnnnnnnnnnnnnnnnnnnnnnnnnnnnnnnnnnnnnnnnnnnnnnnnnnnnnnnnnnggcacgagggagagatgaagccacagcagcccctgcctcctggcttagcatctaacctgaagacaaaagatgtttgtatttgagcccacctctgattagtcccaagcaagggccatggccataagagtcatcagcctggaggagcaaaaaagcccatcccatgaggacagagaaagctgctttgaggggctgggatttgagctaggttcagaacatgggccagggtttggctaggtgaaactgatgtgtcatgtgaagcagaaactgttttggatgtgtggggactcttgagccagagctcagtaaagtggagagtcaagaaatgagtattcannnnnnnnnnnnnnnnnnnnnnnnnnnnnnnnnnnnnnaag

SEQ ID NO: 32166 - DNA, 452 bp, Homo sapiens
  misc_feature (1)...(452): n = a,t,c or g
tttgaaattcngtatgacntgattacgaatttaatacnnnnnnnnnnnnnnnnnnnnnnnnnnnnnnnnnnnnnnnnnggcacgaggtcagcccgggagttaggtctcacgaatctcacctcgtgttagccgtgctaggatcaaggcttgctcttgaggtagaggaagtggtacaaagcaaatatttgaatccttcctggtggaatttcctcacttggcaataagaatctgcaacagggaactataatttcagtttcctgttatgacatagcacagatgcctgagcaaagaggggcagccttttagttgaggatgttcagctaggccaaagctcacagatgccagggttagaaggatggcccccttcattctccttagaatgtagttattcgttcaatcaacagataatgcctgctgtgtgccaagcactgatctaagctttggggacacaa

SEQ ID NO: 32167 - DNA, 445 bp, Homo sapiens
  misc_feature (1)...(445): n = a,t,c or g
tttgaaatcngaatgncnnnnnnnnnnnnnnnnnnnnnnnnnnnnnnnnnnnnnnnnnnnnnnnnnnnnnnnnnnggcacgagatgtgatttagaataagacctggattgtgtccacactaactgtgcatgtgcaatcttggaaaaatcactaagcctcagtttcctctctgtcgttggtaacagcaatgcctacctcatggtttttgctcaatgcataagatgtgaatgtgtgtaaaagtgcctttaaaaccacccagtgttctctgctgttaagatcaaggatgccctacccatttctcatgcggaggtgcctcctaagctactttggccctctcttgttgtgctatcctgtccccaggaaccttcattcagttatcttacctaaactgccttccaacccttggccgactatatttgggaaagaacctgntactacattaaga

SEQ ID NO: 32168 - DNA, 467 bp, Homo sapiens
  misc_feature (1)...(467): n = a,t,c or g
gggnngtnnnntttnnnntttggantnngganacccttatgactgacnnnnnnnnnnnnnnnnnnnnnnnnnnnnnnnnnnnnnnnnnnnnnnnnnnnnnggcacgagaaaaattcacaaatttaattaggacacaaagtagattagtggttgtctaggattgggtagtggggttgataatggcaatttacaagtaaggtttattttctttttgcagtgggaaatatcttaacattagatttgtggtaatggttgcaccactctgtaaatgtactaataatcattgaattgcacacattcaacaggtgatgtttaagctatagtaattacatcaccaaaaagtcattttaaaataaaaaggatgatatttctgnatactaagctgctattctaagtaaaataattggngcttatgaaaaaaagaaacattatttgggctttgggggtaaaggaagtctctcctgtat

SEQ ID NO: 32169 - DNA, 466 bp, Homo sapiens
  misc_feature (1)...(466): n = a,t,c or g
gngnnntnnnntnnnnnctntggaatnccgtatgacnnnnnnnnnnnnnnnnnnnnnnnnnnnnnnnnnnnnnnnnnnnnnnnnnnnnnnnnnnggcacgagcatgatttacataccttccctattaagtgccagtcaggttctcgctacagatgagcaaatctgctttttccacagtgagaaaaacatttagagacaattctacaattagaattttgtgatactaatggaaagtgcgtgtatgtacacgtacttaaaatgagctatacaatttgttgggagttcagtgatccctcctttaaaaactacaactgtgaagctataagacctcacagtgatcatctctttgttgacataaatgtgataaaccttgccaagaaatatataattctttggttggcttgctaagccttaaagntctcatgggcaagggatgaaaaagggncttctgaggactattattttt

SEQ ID NO: 32170 - DNA, 467 bp, Homo sapiens
  misc_feature (1)...(467): n = a,t,c or g
gngnnnntnnnntnnnnnnntttggaaatccgnnnnnnnnnnnnnnnnnnnnnnnnnnnnnnnnnnnnnnnnnnnnnnnnnnnnnnnnnnnnnnnnnggcacgagaaatttgtctctttattcagtaattgaactatggctctacaccatctgtcttcctacagctatcatcaaaagtatgcattctctcagaagcaatgggtctcagccaagatggctgccacatgaaaatgagataagcaggcacattatcaatcccaaaaacaactcacaggaaccgttcaaaaacaaagctcctcagggggcaccctccacctcccttttgactgtcagcatgtctgtcacctgcacacccactaataaacaaatacaaaaaaaatgggtcaccttactcttcacatcagttctaccctgcaggggttaacacattcagaaacnaggcagaggaggnaactaaatnctttgaa

SEQ ID NO: 32171 - DNA, 464 bp, Homo sapiens
  misc_feature (1)...(464): n = a,t,c or g
gnggnntgnnttnngntctggaaatncgnatgncnnnnnnnnnnnnnnnnnnnnnnnnnnnnnnnnnnnnnnnnnnnnnnnnnnnnnnnnnnggcacgagcatatttaccttctaatatttgtgacatttattaaccatgtttgaagccatagaagttgaagcacagtcaaaacaaaatgtcatgaaaacaaggccctcaaagccatatttttgttttgtgttgtttttaaccaaagtttacattcacctgaataaataggaatagtcttctttgttgtagagccaggctgttggtgaaatacctgctgcttctcagtttgagtctgcacaattctctgaagtcttgttccagactgaaccagatgtgaatatcttcccatcaaaatacaatttgtgaacagtaagtcagtgagtgattcattacacctcantggtggaaattgcgtgctcctctgntgctaag

SEQ ID NO: 32172 - DNA, 466 bp, Homo sapiens
  misc_feature (1)...(466): n = a,t,c or g
ggnngtnnnnttgnnntttggantnngaaacccttatgactgacnnnnnnnnnnnnnnnnnnnnnnnnnnnnnnnnnnnnnnnnnnnnnnnnnnnnnggcacgagctttttttgcctaacttttaagttcatgaatttgtagttcagaatgttgcatttattcctgacaactttagaagaggctcaaggatgaagagcacaattctcattgcatgcccaccttttcatgtggcacttgcaacatttctaaatctcaagtcagagataaagtagagatcagttcaggtagcacagatctgtcagttgctcaaaagcaggtgcaataactcaagctttagttatggggaggcttggagattttaaattatttggcaatagatttgaaataaaccagtctgcttttcacagtatgccatttttaagggaagtagaattcagaaatgccntatttattctaagnaaaaat

SEQ ID NO: 32173 - DNA, 439 bp, Homo sapiens
  misc_feature (1)...(439): n = a,t,c or g
annttcganancnttatgacnnnnnnnnnnnnnnnnnnnnnnnnnnnnnnnnnnnnnnnnnnnnnnnnnnnnnnnnnnggcacgagctttgacaagcttaaatgtagagtactctaccatactatcagtactctagtacttgttgaggagcaagtgtggcatggtcctttttcatccgatttcttgaaatctgttctagaaagccaaccgtggaaggactgcaacagatgagaataggactgatggagttgctttcatgggaatcattccctggctccctctggaggcagagttgttttgggtcgggagtaactccatctccatcagatgcagggactggtggctcactttgaaaggaggagaccatacagcagtgtccagctgtccttcaggggaaattcctatgaaagangtctggagcaaaccngantcctcagga

SEQ ID NO: 32174 - DNA, 464 bp, Homo sapiens
  misc_feature (1)...(464): n = a,t,c or g
ggggnnttnnntnnnnntttgaaatcctttgacnnnnnnnnnnnnnnnnnnnnnnnnnnnnnnnnnnnnnnnnnnnnnnnnnnnnnnnnnnggcacgagcaattcttttgaatgacacaaacacagaaattagaggaattgatctccaagcaggccccaaactagcagcctcagtaatgcctggaacttattcaaaatgtaaattctcagacctatnnnnnnnnnnnnnnnnnnnnnnnnnnnnnnnnnnnnnnnnnnnnnnnnnnnnnnnnnnnnnnnnnnnnnnnnnnnnnnagtagctaacatctgagagcaactgaaccagaacattccaaaatgctacagtgacgtgtgttgatggactgaaagtcacgggacacagacaggcacacgatggtctctggntcctaaaagctttctntacaggggctnttgaacttgnacaaagcattaagcttatccaa

SEQ ID NO: 32175 - DNA, 446 bp, Homo sapiens
  misc_feature (1)...(446): n = a,t,c or g
ggantttgggaaacccttatgacnnnnnnnnnnnnnnnnnnnnnnnnnnnnnnnnnnnnnnnnnnnnnnnnnnnnnnnnnnggcacgagatttggggtgnnnnnnnnnnnnnnnnnnnnnnnnnnnnnnnnnnnnnnnntgctttttctttcaatatgannnnnnnnnnnnnnnnnnnnnnnnnnnnnnnnnnnnnnnnnnnnnnnnnnnnnnnnnnnnnnnnnnnnnnnnnnnnnnnnnnnnnnnnnnnnnnnnnnnnnnnnnnnnnnnnngtctgttcatccgttgatggacatttcgattgttctcacttttgggctattaagaagnnnnnnnnnnnnnnnnnnnnnnnnnnnnnnnnnnnnnnnnnnnnnnnnnnnnnnnnnnnnnnnnnnnnnntatcctaagaatggaattaatgggcatatgaataccctaactttttg

SEQ ID NO: 32176 - DNA, 463 bp, Homo sapiens
  misc_feature (1)...(463): n = a,t,c or g
ggggnnttnnnttnnnnntttggaaantcnatgacnnnnnnnnnnnnnnnnnnnnnnnnnnnnnnnnnnnnnnnnnnnnnnnnnnnnnnnnnnggcacgagctcttttagctccattgtgcaaagacttaattggaaatgagtgttgattttaatgacttccttctctgtttttaatgagataatcgtgtgactttttcctgtaatctgttcatgttgataggcttttttttatgttgaataagattaattttcttttcatatgctattgaccatttgtatttcttttctgaattgagtgttcatagccttcctagattttttatctcttaggttgtgttagggaaaaactcaaactgtttttcctctgctgtcacatcaacacagcaattatcaacacaaaagacctctgnaatatgnggggatttctgnggcagacaccaattgggtgcctcctattcaat

SEQ ID NO: 32177 - DNA, 468 bp, Homo sapiens
  misc_feature (1)...(468): n = a,t,c or g
gnggnnntnnnntnnnnnnntttggaaaatccgnnnnnnnnnnnnnnnnnnnnnnnnnnnnnnnnnnnnnnnnnnnnnnnnnnnnnnnnnnnnnnnnnggcacgaggttcaggaatgcttgtgtagatgcttactttgcttgttggttgaaaatatctagaacactttcatttgctgtttttgttataacaaactaaaggtctgctattattgcaattatcctctttgtttctccaccttttactagaaaagttaagagagctttccatatttccttctcctgggtggatgcctgtaaagaggtgatatgaaatgaaattgtctggaaaggctttccttcttcatcagcccccctctaccttctcattgtcagggcagggctcaaagcccttggcttcccactctctacagttgcctctntcccaccgcgtacctatgtaaaaccatggaaataataaaactgnctta

SEQ ID NO: 32178 - DNA, 452 bp, Homo sapiens
  misc_feature (1)...(452): n = a,t,c or g
tttggaaatcngaaaccctnnnnnnnnnnnnnnnnnnnnnnnnnnnnnnnnnnnnnnnnnnnnnnnnnnnnnnnnnnnnnnnnnggcacgagnnnnnnnnnnnnnnnnnnnnnnnnnnnnnnnnnnnnnnnnnnnnnnnnnnnnnnnnnnnnnnnnnnnnnnnnnnnnnnnnnnnnnnnnnnnnnnnnnnnnnnnnnnnnnnnnnnnnnnnnnnnnnnnnnnnnnnnnnnnnnnnnnnnnnnnnnnnnnnnnnnnnnnnnnnnnnnnnnagtgggaggttcagataatttgaacctaggaagtcaaagttnaagtcagntgtnaacacgccactgtactccancctgngaggcagattagaccctgctcaaaagaaanccagaaagancaaganngatatattaaaactttctatctgtnacngaanaaangtttaaaataaaaaagattga

SEQ ID NO: 32179 - DNA, 450 bp, Homo sapiens
  misc_feature (1)...(450): n = a,t,c or g
gnagnntgnntntnnctntganaccttgatgacnnnnnnnnnnnnnnnnnnnnnnnnnnnnnnnnnnnnnnnnnnnnnnnnnnnnnnnnnnggcacgagcaaactattcagttcctttaactaagtactgactaagtgacagtgcatgacaggcactgtgctggtgctgcagggactgaaagatgactaagccactgccctcaaggagctcaaggtctgagtagacacagatggatgggaggaagatggagactaacagctatcagttgctctgtgccaggcccagttgtgaacactttacatatattagttcacttaatcttttcaacaactgtataaggtattattatccccattttctaagtgaggagacagagggtaagtagcttatccaaggttatacagctagcaaacattggagagaggatatgaactagggccatctgtctc

SEQ ID NO: 32180 - DNA, 434 bp, Homo sapiens
  misc_feature (1)...(434): n = a,t,c or g
tttgaanaccttgatgacctnnnnnnnnnnnnnnnnnnnnnnnnnnnnnnnnnnnnnnnnnnnnnnnnnnnnnnnnggcacgagcaatcaatcaatctatctgctgctgttgctgctgactgcacaggcatccatatcggtgggtctttcttaccttttagtcggttcagggtcacccagtagtgttgctctgggctgcggatgtctttggaccactgaagcatgtcttttgcatggatgtcagtcagtatgaactctacaaacttccttgtaagtacatagtaagcacttccaaaataaatggttaagttatggggtggtttgtctttgaatctgttatttggaggtgcatagatacttcctttaggaacgaattcgagatgactttgacttgtcttggatttaatgtgcaatggttggattactccaggagt

SEQ ID NO: 32181 - DNA, 449 bp, Homo sapiens
  misc_feature (1)...(449): n = a,t,c or g
gnntgnntntnnctttgaanacactnatcccttttannnnnnnnnnnnnnnnnnnnnnnnnnnnnnnnnnnnnnnnnnnnnnnnnnnnnnnnnnnnnggcacgagatttagcaataaaaaggaatgaattgtgacatgctacaacatggatgaacttgaaaacattaccctagatgcaaaggacctcatatagcattattccatttatatggaatgtccataaagttgattagtgcttgcctggaagtgtttgggagactgactgcaaatgggcacagggannnnnnnnnnnnnnnnnnnnnnnnnnnnnnnnnnnnnnnnnnnnnnnnnnnnnnnnnnnnnnnnnnnnnnnnnnctcgttgaacacataaaatggatgaatttctcaataaagttgttaaaaaattagaaagactttacctttgcaatttgttggggtaaaactttgt

SEQ ID NO: 32182 - DNA, 435 bp, Homo sapiens
  misc_feature (1)...(435): n = a,t,c or g
ttganactttgatgacnnnnnnnnnnnnnnnnnnnnnnnnnnnnnnnnnnnnnnnnnnnnnnnnnnnnnnnnnnggcacgagactggatacatattttttaaaaaccaaaatggtgatgacattatgtgaataaccaaaaaaaattatgtatttaagaaaagtacaaagacaacctctctcaccttgttcccctcctcccaaagctcagaaaaggaaactccagccttgcctcagtatgaaaatacatgactttttaaaatagcactatcggtaggtgttagcagtgggcaatgtgtgacccacaatcttcctttcccacaaaacacaacactatcgtcttctaaatttccttcatccgagttggagatgaccctctccaatcccctatgttttaaaataagcaactaatatctagataggttacagggtacttg

SEQ ID NO: 32183 - DNA, 455 bp, Homo sapiens
  misc_feature (1)...(455): n = a,t,c or g
gnnnnnagnnnntnnntttgaannctttgaanacntnnnnnnnnnnnnnnnnnnnnnnnnnnnnnnnnnnnnnnnnnnnnnnnnnnnnnnnnnnnnnnnnnnggcacgaggagagtagtagcattagaaatactggtcacgaggatactatatattatggtgatgtcccattgaatattacagtgaatgtcccctctctggggcccgtgtgaattgatgccttactaaatatgctcagctggtactcagggtacgttttgctcaggttcaggcagaaccaccctgttagtaggtaacnnnnnnnnnnnnnnnnnnnnnnnnnnnnnnnnnnnnnnnnnnnnnnnnnnnnnnnnnnnnnnnnnnnnnnnnnnnnnnnnnnnnnnnnnnnnnnnnnnnnnnnnnnnnnnnnnnnnnnnnnnnnnnnnnnnnnnnnnnnnnnnnnnnnnnnnnnnnnn

SEQ ID NO: 32184 - DNA, 430 bp, Homo sapiens
  misc_feature (1)...(430): n = a,t,c or g
tttganacctttatgacnnnnnnnnnnnnnnnnnnnnnnnnnnnnnnnnnnnnnnnnnnnnnnnnnnnnnnnnnnggcacgaggaacctaggcctgtgctgccaacagacatgaaggggccccttttccacccatcccccaggaggcaagagggggatacagaaggatagtccttgcctccccacccagggttggacctgagctggagtggacagttggtcagggtcagaaagaactggactttttatggcccagctgtaggactttttatggctcagctgtaggactttttatggcccagctgtaggactgtatgtcctagtcctggtctggacattggttctgagcaccagatgaccctgcccgatgctggctagggagggtgaccccggagagggtgcaagaaacagtgctcctctcgttaatgctg

SEQ ID NO: 32185 - DNA, 437 bp, Homo sapiens
  misc_feature (1)...(437): n = a,t,c or g
tttgatacnttgantacctttnnnnnnnnnnnnnnnnnnnnnnnnnnnnnnnnnnnnnnnnnnnnnnnnnnnnnnnnnnnnnnnggcacgagggcggaacagatagaggccgatgtcatccttctgcgggaacggtaagaagctgggggccgcgtgcgtgattacctggtccggaaacgattaggagacaatgacttcctggaggtcagggtagcagtggtgggcaacgtgaatgctggcaaaagcacacttctgggggtcctgactcatggtgagctggacaatggcctaggctttgcccgccagaaactctgtctccactaacattaaattgaatctggttgcaccagcactgtggacaactgacattctgggctttgacagtgaaggcaatgtanngancaagcctgacagtcatggttcatnctngatnggac

SEQ ID NO: 32186 - DNA, 450 bp, Homo sapiens
  misc_feature (1)...(450): n = a,t,c or g
ggaggnttnnntntgctttgaaacctnnnnnnnnnnnnnnnnnnnnnnnnnnnnnnnnnnnnnnnnnnnnnnnnnnnnnnnnnnnnnnnnnggcacgagcggcacgaggtgaaggatcccatcgtgccccccttgctgttacctcccaagtcatcaactgtagaaaccaggcggtccagtttatcagcgcccttgtggatgaattaaaggagagtatattcccagtcgtccgtatcttactgcagcacatctgtgccaaggtggtagataaatcagagtatcgtacttttgcagcccagtccctagtccagctgctcagtaaacttccttgtggggaatacgctatgttcattgcctggctttacaaatactcccgaagttccaagatcccacaccgggtttttactcttgatgttgcttanctctgttagaactgcctgaaaganaggg

SEQ ID NO: 32187 - DNA, 433 bp, Homo sapiens
  misc_feature (1)...(433): n = a,t,c or g
ttganacttnnnnnnnnnnnnnnnnnnnnnnnnnnnnnnnnnnnnnnnnnnnnnnnnnnnnnnnnnnnnnnnnnggcacgagggagatgtcttaatataggaaatgaacacaattaaaggctggaatggctacgtgtacaataagtttttaaatgaattactggaaactgtgtagcaatcaatatgagaaatgacatataacaccatataacagtaattattattgttacctcgactataattattcctcaaatgctttacatttcatatattttcatacatactattcaactgcagagttgtatgaaatgttttatgactcacagttgttgcctaatctctgcttaaaaccttccaaggcctttccaattcaaactcagactgctaggataatagataccatatggttagcttatgactttgaaattcaggc

SEQ ID NO: 32188 - DNA, 454 bp, Homo sapiens
  misc_feature (1)...(454): n = a,t,c or g
ggnntagnntnttgctttgaanncntnnataccctntnnnnnnnnnnnnnnnnnnnnnnnnnnnnnnnnnnnnnnnnnnnnnnnnnnnnnnnnnnnnnnnggcacgaggatctttttttcccagtgacattaaaaaaatctgaataacctttatgtgtagttatgcttgctataagttaaaacttgtaagttatgcttaagttaaaactgctttaaaaaaatctttactttgtaatgaaccacaccagttaaaataaactatactagttaaaagctgcctaaatatttgtcagaattgcaatttaaatctaaaaaagctattcataaatattctctagttacctatgtatattaaagtagatatttaaaataaaggatctgatctaagttcatattttttagacactgataggattcatattccaatcaaatcttaangatttctcatcctaac

SEQ ID NO: 32189 - DNA, 432 bp, Homo sapiens
  misc_feature (1)...(432): n = a,t,c or g
tttgaanaccttgnnnnnnnnnnnnnnnnnnnnnnnnnnnnnnnnnnnnnnnnnnnnnnnnnnnnnnnnnnnnnnnnggcacgagctgtgactggctgacccctttccaggcatgcttgggagcaggttctcagggcatcttgcctctgaagtggaagagcctgattgttttccagctcccattcataatgttagggctcctcactaaatgacagctcacgggccaatgccacagcaactacttggacagtttctttcttgtttgagcagatgtctttctttgaatgagactctgtcattccaagcactgaagtagcccataaaggatcataaatttcacaattatgtataagtcatttcaatttgaactttgtatgaaccaaacatcttgtgaaagacttctggctctaagattaagaaatcgtagaactg

SEQ ID NO: 32190 - DNA, 450 bp, Homo sapiens
  misc_feature (1)...(450): n = a,t,c or g
gnnntgnnttntnnnttgaanctttgaanaccnnttgacnnnnnnnnnnnnnnnnnnnnnnnnnnnnnnnnnnnnnnnnnnnnnnnnnnnnnnnnnnggcacgagcactcagagtaaggatgaatgtgtgttctttgctacttgaactggtattaaaaggccaatgtgaagtgttagatattttaaaatgtttattggtatcattagaagttgacttcagttgcccaaatgcatggtgagaaaggggatgtgtaaacaaaaatgatattttggattgtgaggcagaaagtcattttaaatggccctgggaggcagagggaccaatcctctcagtcgcctgggactgtcctgggtttagcatggaatgccttatgttcccagaaaccccttaggtcccagcaaaccaggatggccattcaccatagaggtggagaagtaaagggctgtaga

SEQ ID NO: 32191 - DNA, 452 bp, Homo sapiens
  misc_feature (1)...(452): n = a,t,c or g
ggngnnttnnnttnnnnctttganaccttnatgacnnnnnnnnnnnnnnnnnnnnnnnnnnnnnnnnnnnnnnnnnnnnnnnnnnnnnnnnnnggcacgagaatggaagtgtgtgtactaacttatctgtgtgtatattgattgtttgtccattagttctgtccacccttaaaaggaacggctgctgtttcttacggaaagatgccttttcaattccatctgtaacatgttaggcaatttgcttgtctgtctccttccacctaatggtaaggactctgagagcagcaacagtgaatagttcatccatcctgtatctctagtgcatggtggtttgcaattagtcaattgaaaattttaaataagttcaaaatcattcttaaaatgttgtagctagagaagaagcctgtattttcagagatggggtatacctctctggatctgctaaaactgac

SEQ ID NO: 32192 - DNA, 448 bp, Homo sapiens
  misc_feature (1)...(448): n = a,t,c or g
ggctgnntctnctttgaanctctgnatccctnttnactgcnnnnnnnnnnnnnnnnnnnnnnnnnnnnnnnnnnnnnnnnnnnnnnnnnnnnnnnggcacgagagatgtggcttctgtctccagaacttctttaattgtgtccaaaggctcctggagatctttcagcagtgttgttagtggagacctaggaagcacaatcagcagaggcagtttctgtccatcatgacctcggtgaacgttgtttggaaggccagaaaaagtgctaagatgaaagattctacaagagttacaagctatgaaaaacagctctgactttgttttggtttaatttagacattattcttgcttttttagacttcattaggtgcttttaaatgtttttacggggtgtgtgnnnnnnnnnnnnnnnnnnnnnnnnnnnnnnnnnnnnnnnnnnnnngnnnacat

SEQ ID NO: 32193 - DNA, 456 bp, Homo sapiens
  misc_feature (1)...(456): n = a,t,c or g
ggagnnntnnnttnttcntctganacccttnnnnnnnnnnnnnnnnnnnnnnnnnnnnnnnnnnnnnnnnnnnnnnnnnnnnnnnnnnnnnnnnnggcacgagtcagactagtcatcttgagggatcagccaggtattgcaggaatgctattattactcaaaatatggttgggaacaggtttagaattgttttcattgtgtgaggacttaaaaaaaagaatctcagtggttgggaatctttatcctttgagaatagggttttttttttagggcaaacctaagagccctaaaaaaatttgatgtcaagtcaggtgaatgatgtttcaaactggtaaaaccatttttggtcaaaaatagggagtgattgaaatancagaatgatttttctganncagttccacagaaagttccaaaaatattttganaaatggcancnccaatatagggggataaatg

SEQ ID NO: 32194 - DNA, 457 bp, Homo sapiens
  misc_feature (1)...(457): n = a,t,c or g
gnnnnngnnnnntnnntttgaannctttgaanaccatnnnnnnnnnnnnnnnnnnnnnnnnnnnnnnnnnnnnnnnnnnnnnnnnnnnnnnnnnnnnnnnnnnggcacgagcaggaccccaggaaatcttaagaatattgcagtaccccagggttcattatagatttatacatcaaggctagaaggggaaagtggatagagtatttactgaaacctggagtcaaagagggcccagtggagaaaggagcctagagctttggtcaaggttaccctgcagggagggagcatgtgagtcatctttccaactccactcacctactcccttcagtcttctgttagtgctcacccttgtctgaacccaggtagacatcagagacatgagaacctgttgatttagtccatacaggtcagtctcctggggaatagagcaaggtagaggagagtggaaatggcatca

SEQ ID NO: 32195 - DNA, 437 bp, Homo sapiens
  misc_feature (1)...(437): n = a,t,c or g
tttgataccttnnnnnnnnnnnnnnnnnnnnnnnnnnnnnnnnnnnnnnnnnnnnnnnnnnnnnnnnnnnnnnnnnggcacgagattgaattctaacttttctaagatagcaatttttgaagagacacgaacaaaaatctgaattagttcatgagccttaatgtaaatctcttgctgaaatagtttttaaaatcagaatttagttatctatcagactcaaaatcatttaaagactaacaaaacacaatcatgatattctaactgtggtcaaaccaggtacccaagccacctccctgcccaacgcctttccggcttttcccctccctcttgggctggtggttatgctcctccagctctagttcagctataattccttttatagagaaaccaacctgatacacactttcatgatgggagaaaaatgtgggagtgaaatg

SEQ ID NO: 32196 - DNA, 454 bp, Homo sapiens
  misc_feature (1)...(454): n = a,t,c or g
gnnnngnnnnntnnntttgaannctttgannacagcttgacnnnnnnnnnnnnnnnnnnnnnnnnnnnnnnnnnnnnnnnnnnnnnnnnnnnnnnnnnnggcacgaggttacattggcattgattcaaagtaaattgctatgattttattaaatcgtatgtcatccccacagaacagagaataactgtgttagaatatactccacaggaaatgagaaagaaataccaatgtcattttaaaaaatcacataaccttacgaaatggtagtaaaggtgaatatgaaggacaaaaagctatagagagtgggaaacattgaaaatggcacaagtannnnnnnnnnnnnnnnnnnnnnnnnnnnnnnnnnnnnnnnnnnnnnnnnnnnnnnnnnnnnnnnnnnnnnnnnnnnnnnnnnnnnnnnnnnnnnnnnnnnnnnnnnnnnnnnnnnnnnnnnnnn

SEQ ID NO: 32197 - DNA, 434 bp, Homo sapiens
  misc_feature (1)...(434): n = a,t,c or g
tttngaaacccttctttgagaccctnnnnnnnnnnnnnnnnnnnnnnnnnnnnnnnnnnnnnnnnnnnnnnnnnnggcacgagacaagtcaggccagctagctctgaagccagttagctgccccgactgagaaatgtgcagggatctcaatctttcatttcctttcaaaaaacagagactagccatatgctggtgaggaattattgttacggtttcggttttatttttattttaaaataatttgaaagctgaannnnnnnnnnnnnnnnnnnnnnnnnnnnnnnnnnnnnnnnnnnnnnnnnnnnnnnnagcccaggagtttgagggtgatgtgcactatgattgatcctgtgaattagttgnnnnnnnnnnnnnnnnnnnnnnnnnnnnnnnnnnnnnnnnnnnnnnnnnnnnnntagttttaaaaattttgg

SEQ ID NO: 32198 - DNA, 426 bp, Homo sapiens
  misc_feature (1)...(426): n = a,t,c or g
tgaatccctctnngaancctnttgacnnnnnnnnnnnnnnnnnnnnnnnnnnnnnnnnnnnnnnnnnnnnnnnnnnnnnnnnnnggcacgagataccctgcagagagcaattctctgaaaaatctggaataatcacaggtctctgttcatgtgctccactgagactttctccttcctttagtctcttcacatgaagcctgacttactgaagtaggcgggagacagaagcacacactccctcaccaaaccagcatacttagaaaaacaaaattttttttttttngaaanggaatattgcnttatnnccctggcatgnagngccanggcnnaatntcggntaaattgnaacctccgcntccngggttnaagcnannntcctgccnnagccttccnagnaccnggnnntaacnccntggnnaccacgcc

SEQ ID NO: 32199 - DNA, 457 bp, Homo sapiens
  misc_feature (1)...(457): n = a,t,c or g
gnnnnnngnnnnnttttgaattccgtctccngnaanaccctnnnnnnnnnnnnnnnnnnnnnnnnnnnnnnnnnnnnnnnnnnnnnnnnnnnnnnnnnnnnnnnnnnggcacgagaattagttgaatttttacttattttgacatgagagattacatagaatctctatgttgcccaggttggtctccaaatctgctcaaacaatcctcccgcctcagtttctcaggtaactgggattacagggacacaccactgtgcttagcttaaatagttgaatttattgggcatccactgaaaagaaggaagtaggaataaaatctgcaatattatgactaaacctgtaagtgagcatgagcagtggtgggcaagggtatgcagactctggaatccagaaatagaaagtcagtggaaagccaggcacagtggctcacacttataatcccaaagtgctaggattg

SEQ ID NO: 32200 - DNA, 456 bp, Homo sapiens
  misc_feature (1)...(456): n = a,t,c or g
ggggnnaggnntgnnnctttgaatccctctctnganacctttnnnnnnnnnnnnnnnnnnnnnnnnnnnnnnnnnnnnnnnnnnnnnnnnnnnnnnnnnnnnnnnggcacgagagaacttggcaagaggcccaggggaaggcatgtgtgtgctgtggacctgaagcctgtcccctatttgccctcccagcaaccccgggaggtgccaaggggctgctgagcctgttctatgacagatgccctcccttggcctggcaggtgagcacaggcgactgagcccgcacaggtccccttacaggcagtggtcacccatggccacaagtgcgctccccagtctccagcgatccctgtagcccctctaggacctgcctcctgcctgatctgagcatgactccacctcctgctcccactcacctggacatgttcctaaagctgccattctccagtgagttggatt

SEQ ID NO: 32201 - DNA, 445 bp, Homo sapiens
  misc_feature (1)...(445): n = a,t,c or g
tttgaaatcccctcctttgaanacccntnnnnnnnnnnnnnnnnnnnnnnnnnnnnnnnnnnnnnnnnnnnnnnnnnnnnnnnnnnnnnnnnnnggcacgagggcaactttatttctatctcaggagttgtcagcctttttctttgaggtacatctcatgatgtgtgtgtcattagttctcacaattctacgatgtctccttcctcccacccacagttttaaaatagtacggactatagttgtcatagttttacaatgctctgcaatagttattattcaggatgggggaaatcaagattttagattatttgaagatgaattggttttcacagctctgctgttcactggctcctggtgggacatttgtggctttgacaatgtttcctcaggggaacatggggaattgataggctttttctcagacccttctggccgtgaagcttga

SEQ ID NO: 32202 - DNA, 453 bp, Homo sapiens
  misc_feature (1)...(453): n = a,t,c or g
gngnnnntnnntgncnctttgaaacccnncttgaagaccnnnnnnnnnnnnnnnnnnnnnnnnnnnnnnnnnnnnnnnnnnnnnnnnnnnnggcacgagagtcctcaattcctaacttcctgccagacatttccactaggacaatctgatgttgcatcaaatttagtatgttcacaatcaaatttaccaccttctgcagaacttgacctcaggcaggactgaagtctgggcctgtcaacaggcagtctatctggcaagttgaccttcctttcacatagtctcacagtagacagtccataatatattggggtgaatctacctcagttatttgcacccactgagcagacaagcaggtagtcaaaaaaaagttcacacaagttctttaaaatattcactttttgattatgtaaagcatgcacatagttccaaataaaaaaggtcttggctgggcac

SEQ ID NO: 32203 - DNA, 463 bp, Homo sapiens
  misc_feature (1)...(463): n = a,t,c or g
gatggcncnnnacntnnnnnnnnnnnnnnnnnnnnnnnnnnnnnnnnnnnnnnnnnnnnnnnnnnnnnnnnnnnnnnnnnggcacgagaaatacagccctctttagcagattctccaagcctagacacctttcatttctccctctccctcaccacccctttgctcatatccaaacaattgccagtccctccacctaaacatttctcaaatccatacaattctaagaactttgagaaacaatctcctcaccttctccaatcaccctcacatatctcacccagaaaggcatctaactatctcctagcctccaggaagggtaagtgctccacctgctccataatccactctcatcattgtgtagcaatgtttctaaaacacctgccaaaacatgttacttccagtggcttcccaatgccccttagaatataattcaggtttcttaacttggctacaatctgccttc

SEQ ID NO: 32204 - DNA, 461 bp, Homo sapiens
  misc_feature (1)...(461): n = a,t,c or g
ggttcctcnnaactnnnnnnnnnnnnnnnnnnnnnnnnnnnnnnnnnnnnnnnnnnnnnnnnnnnnnnnnnnnnnnnnnnggcacgagattgaaaccacaatgacatgccactacatacctactataatggggaaaaaactgacaataccaactgcagagccacnnnnnnnnnnnnnnnnnnnnnnnnnnnnnnnnnnnnnnnnnnnnnnnnnnnnnnnnnnnnnnnnnnnnnnnnnnnnnnnnnntaacaccaaaaccagaaacaacaaaatgtccctcaactggtgaggggtgctatggtctgaatgtttctgtccttccaaaatttgtaagttgaaacctaatccccaatgcatgggtatttggaagtggggactttagggtgggattaaattatgaagtcagaccgctcatgaacggggtcagtgcctgatatggttagaatatgtaactcttccaa

SEQ ID NO: 32205 - DNA, 465 bp, Homo sapiens
  misc_feature (1)...(465): n = a,t,c or g
ggtgncctttganntctgaatanccnnnnnnnnnnnnnnnnnnnnnnnnnnnnnnnnnnnnnnnnnnnnnnnnnnnnnnnnnnnnnnnnnnggcacgaggctttgggttgagaaagagggaattgaagctgtagtgatgggggaaggtccacaggggcctgtccatgtagggctctgtaggacatggtaagaagtttgtcctttgtcctgggggcaatggggagccacagaaggattttgagcaggagtgagacagcttagggtttttaagttccagttcaaaagtgtttatcattcatgatgctttttggacctatttaattgtttttcaaactgactgacttctctccctaggaggggcacttattttaaagggtccgttgaaataaaagatctaactgctgaaaatgaaaaatcantttgcaaaaccagngttctgttccgttttctgtagacaattgatgg

SEQ ID NO: 32206 - DNA, 421 bp, Homo sapiens
  misc_feature (1)...(421): n = a,t,c or g
tttgganaccgnnnnnnnnnnnnnnnnnnnnnnnnnnnnnnnnnnnnnnnnnnnnnnnnnnnnnnnnnnnnnnnnnggcacgagtggacagccaccacctaatgttctatagataatcttcctaaatctttttctaatttggctattccctgtcctgattaatgcctgggaagttgtccctgattcttttttcctgtgtttatgggcaacttccagaactcattgccctgttttaaaatattgcaatatcttgtttacagacctgttgtctcattctttacccgcagctgagtaaaaattaactacaaatttaaacatactcttttcattaaccctgaaagcctgaattttataggtcttaattatgttgtattgatgacagttgtccaaaaatgagtttttctctccgcttccacatata

SEQ ID NO: 32207 - DNA, 439 bp, Homo sapiens
  misc_feature (1)...(439): n = a,t,c or g
gnnnnnngnnnnnntnnnntttgaanntntgaanaccnnnnnnnnnnnnnnnnnnnnnnnnnnnnnnnnnnnnnnnnnnnnnnnnnnnnnnnnnnnnnnnnnnggcacgagnnnnnnnnnnnnnnnnnnnnnnnnnnnnnnnnnnnnnnnnnnnnnnnnnnnnnnnnnnnnnnnnnnnnnnnnnnnnnnnnnnnnnnnnnnnnnnnnnnnnnnnnnnnnnnnnnnnnnnnnnnnnnnnnnnnnnnnnnnnnnnnnnnnnnnnnnnnnnnnnnnnnnnnnnnnnnnnnnnnnnntgtagtcttcttagaatgtaatatagtaaactgaattcctcatctttcccccaccaaaacctcctccggcagtttttcccatctgagtaacagcacctgctgtcttttaatcagccttggtgtcaccaaggatgcctgtcctcctt

SEQ ID NO: 32208 - DNA, 414 bp, Homo sapiens
  misc_feature (1)...(414): n = a,t,c or g
tttgaaaccttatgncnnnnnnnnnnnnnnnnnnnnnnnnnnnnnnnnnnnnnnnnnnnnnnnnnnnnnnnnnnggcacgagtgaaagcaaatatcagctttaaaagagagaggacagaaagactgcagatagtctggaagcagcatttttaggccgtctgattagctagcagggagcaaaggggaggctgggaagtcagcccttgagtaggcctgctggatcatcaaaatagcacacatcatttcctgttaaagcctgttggcccgaagtagtcacactgctctacctcatgtgcccaggactgggaggagaggcagacgctggtgaggatcttatgccagttacatcatggttcctaacttactaattccctatgcccatcttttctacttagatagatagaaataggtatc

SEQ ID NO: 32209 - DNA, 434 bp, Homo sapiens
  misc_feature (1)...(434): n = a,t,c or g
gnnnnnntnnnnntttggaantctgaataccctnnnnnnnnnnnnnnnnnnnnnnnnnnnnnnnnnnnnnnnnnnnnnnnnnnnnnnnnnnnnnnnnnggcacgagaaagatgctcaatgttagccgtcagggaaatgaaaaaaccacaaagagatgccacttcttgcccaccaggatagcactcatcaaaaagatgcagtaacaagtgctggaagcnnnnnnnnnnnnnnnnnnnnnnnnnnnnnnnnnnnnnnnnnnnnnnnnnnnnnnnnnnnnnnnnnnnnnnnnnnnnnnnnnnnnnnnnnnnnnnnnnnnnnnnnnnnnnnnnnnnnnnnnnnnnnnnnnnnnnnnnnnnnnnnnnnnnnnnnnnnnnnnnnnnnnnnnnnnnnnnnnnnnnnnnnncttaatgtccctcatctgatgaatgtttaaa

SEQ ID NO: 32210 - DNA, 414 bp, Homo sapiens
  misc_feature (1)...(414): n = a,t,c or g
tttgaaanncnannnnnnnnnnnnnnnnnnnnnnnnnnnnnnnnnnnnnnnnnnnnnnnnnnnnnnnnnnnnnnnnggcacgagaaatgaccttggctcacttgactaactggtaaccctactgggaaaccttcatgaatgactggacgtttgcaaacaaagctggccatagagcctcagcccctgaggggttccttgctggtgttagtgggggtggaggcggtgcaggagcaggataccctgctgctcccagccatgctgctcgcagcaccggggtttggaatcttcatctgaagccttgatgagtagccattttggagaaaaccttaactagaatggcctcattccgatcccttttcaccccagaggctgtagagcttctgaaggtcagggtcagagtactgggtctcaagc

SEQ ID NO: 32211 - DNA, 422 bp, Homo sapiens
  misc_feature (1)...(422): n = a,t,c or g
tttnnaatctgnaaactctnnnnnnnnnnnnnnnnnnnnnnnnnnnnnnnnnnnnnnnnnnnnnnnnnnnnnnnnnnnnnnnnnggcacgaggcttatagtaaaaatggtagaatcagagttttcattctttgagaaatctttctgtaagattggctcatagataaaatgagacaaactactatgtatgataaaacaccttcagagtcatgccttgttttattttatttttttttttgaaacagaggtctcgntntgtcncccaggttgnagtgcagnggngcaatctnnnnnnnnnnnnnnnnnnnnnnnnnnnnnnnnnnnnnnnnnnnnnnnnnnnnnnnnnnnnnnnnnnnnnnnnnnnnnnnnnnnnnnnnnnnnnnnnnnnnnnnnnnnnnnnnnnnnnnnnnnnnnnnnnnnnnn

SEQ ID NO: 32212 - DNA, 414 bp, Homo sapiens
  misc_feature (1)...(414): n = a,t,c or g
tttgaaanncgntatgacnnnnnnnnnnnnnnnnnnnnnnnnnnnnnnnnnnnnnnnnnnnnnnnnnnnnnnnnnnggcacgnnnnnnnnnnnnnnnnnnnnnnnnnnnnnnnnnnnnnnnnnnnnnnnnnnnnnnnnnnnnnnnnnnnnnnnnnnnnnnnnnnnnnnnnnnnnnnnnnnnnnnnnnnnnnnnnncctgtaggtttttaaaatggagaaaaccacaatctcactggccatgttttaaaaaacttaatctgccagnnnnnnnnnnnnnnnnnnnnnnnnnnnnnnnnnnnnnnnnnnnnnnnnnnnnnnnnnnnnnnnnnnnnnnnnnnnnnnnnnnnnnnnnnnnnnnnnnnnnnnnnnnnnnnnnnnnnnnnnnnnnnnnnnnnnnnnnnnnnnnnnnnnnnn

SEQ ID NO: 32213 - DNA, 414 bp, Homo sapiens
  misc_feature (1)...(414): n = a,t,c or g
ttggaaatntgaaaccgttnnnnnnnnnnnnnnnnnnnnnnnnnnnnnnnnnnnnnnnnnnnnnnnnnnnnnnnnnnnnnnnggcacgagccaatctatatttcctaatgctggatcaactagtgataatatcacaacattactctgtctcagaaaaaaatgtcacaggttcatgactgaaagatcacaaaaattggtagcgttcatcagaagtggtatctcaattttaaagtgcttttcagtcattccatctggttcccagaaaggaagctttggcatctttgatatatggtgcaaactcagctctgttcttcagctgtgaatggccatttgttattctgtgtggccactcggatggtcctttaaaaataaacttccgaacattgaagcagagacttctaaggcttctccagc

SEQ ID NO: 32214 - DNA, 426 bp, Homo sapiens
  misc_feature (1)...(426): n = a,t,c or g
gnnnnnntnnnnttttgaanatctgaanaccgtnnnnnnnnnnnnnnnnnnnnnnnnnnnnnnnnnnnnnnnnnnnnnnnnnnnnnnnnnnnnnnnnnggcacgagtctctactagaaataccaaaaattagccggacctctgatgcctgatgtgcaggggccctggcaccctgctcacccacccatcccttctgctgccctttgcctgctctggccacactgccttgctgctccaaaatatgccaggccccgctgcctcctggtctttgtgctatgtgaccgctctgcctggaatattctactctactctgtaggaagcaaagtttcagggctttgctcaaattgctcccttnnnnnnnnnnnnnnnnnnnnnnnnnnnnnnnnnnnnnnnnnnnnnnnnnnnnnnnnnnnncacctataaccct

SEQ ID NO: 32215 - DNA, 410 bp, Homo sapiens
  misc_feature (1)...(410): n = a,t,c or g
atttgaaacntgaatgncnnnnnnnnnnnnnnnnnnnnnnnnnnnnnnnnnnnnnnnnnnnnnnnnnnnnnnnnnnggcacgagatcgtctccttcctagactgtaacagaagccttgcaactggtctccatcaatccaatttgcttcctgccaaactatacacacctgctaggaaaatattaaaagcacaagtctgatcatgtcactatgtgcttaaacacgtgcagttgctgtcagttatttgacaaatttgaccaatcattgtcttttatttgtgtggctgtttgaacttatatgttccccattcctaatttacaacagcccagactgactggtcatcttttaggtgcttgaattcatgtagatggtttactgcataaggcctttgcacatgtgtctgctgtgactg

SEQ ID NO: 32216 - DNA, 429 bp, Homo sapiens
  misc_feature (1)...(429): n = a,t,c or g
gnnnnntnnnnttnnnnnntntgaaacngttatgacnnnnnnnnnnnnnnnnnnnnnnnnnnnnnnnnnnnnnnnnnnnnnnnnnnnnnnnnnnggcacgaggggaagcaaataaaagtttgtcatgcctttacacaggcaaaaatttaggtgcaattctttaaataatttatttagtggactcccaggagtgatagttgtggtaattgtaagttgtgccctaactgagccatctggataggtgagatattattgctctaggtgacatcatccattggtggtggttggtgctagctggaagacatcactaaaattctcttcctgcaacatctggtctagaagagagacacagcttgatcctcaaattgtgtgtgattcatcttgtctggtcattttcagatcactattaggaaattaatcatttatata

SEQ ID NO: 32217 - DNA, 442 bp, Homo sapiens
  misc_feature (1)...(442): n = a,t,c or g
gnnnnnnnnggngnnnttntgttntgtcctaacagaacttcttngnacctgcccnnnnnnnnnnnnnnnnnnnnnnnnnnnnnnnnnnnnnnnnnnnnnnnnnnnnnggcacgagaactggaagctgatttactgaataagtgaaatgtattttaactcaccagccaaatcaatattttttctttgtcttcctagcaattctaattgttaactcttgagtttcactaaaagaagttgggtacaaagtcagcaagttcgaggtacaccaacgtcccaaagctcctagagaggttcttcgaagaggaacgtttctttctttctaattcttaagtatttggtacataaaaagcacttagggtgtcaactcacagaactgacatgctatttctcacctgaattttgccacctaaagcaataaacctntcctaatctcctactctgc

SEQ ID NO: 32218 - DNA, 432 bp, Homo sapiens
  misc_feature (1)...(432): n = a,t,c or g
gnnnnnntnnnnttnnnnnntntgannnnnnnnnnnnnnnnnnnnnnnnnnnnnnnnnnnnnnnnnnnnnnnnnnnnnnnnnnnnnnnnnnnnnnnnggcacgagatattctcatcaacattttaacttatattgaaagtttcaaactcaaagcacgaaaacaagactaattgatcatgcatctaacaacacgtattttagactctactcaatatatgcgagacttggttttcagtactagttatacaaagctgggccgtgatggtccctgcatgttgagggacatcactatttggcagccgaaatttcaatgggtaagagagctgagagcctgcctgtcagggaagcccttgctttatcccctctgaatctctccccaggctcctaccagcacccctgcctatttggtaggaactaccttccccaggtgat

SEQ ID NO: 32219 - DNA, 413 bp, Homo sapiens
  misc_feature (1)...(413): n = a,t,c or g
atttgaaactntgannnnnnnnnnnnnnnnnnnnnnnnnnnnnnnnnnnnnnnnnnnnnnnnnnnnnnnnnnnnnnnnggcacgagattctgagggtgaagccagtgtgtggaataagagttaaattttaaggggtacattcctggatcatgccttgttcaggagtctttttcctgacccaagaaggcctccctcaggatacagtgggcatctcagtctttgtgaactcttaaattcatttcttacccagggtggctaactctgtcagtggactattttgtgaacttcatactttcggaatatgttatacttatgtgattcttggtagtctcaagaaccttggtagaggttcaaatcagtcaatctggttaaaggtatcagtattcagtcttggaatcaagtggcactagagc

SEQ ID NO: 32220 - DNA, 439 bp, Homo sapiens
  misc_feature (1)...(439): n = a,t,c or g
gagnnnttnnnttttgacttccgataccttnnnnnnnnnnnnnnnnnnnnnnnnnnnnnnnnnnnnnnnnnnnnnnnnnnnnnnnnnnggcacgagcagtgattaaaacttcttgaaggtgcagttctctctccccctaccactcacacacttggagtagcaaacactgacctggtttctgatgtctactatggcacctaataactttgtgactttaggcaggttacaagtaagccttgttgaacctctttccttacctattaaatgagatgaataatgacaacttttttgggtgattttgaagactcactgaaattttgtatgtaaagtttctggcacacagaagggtatagatatcagttcctacccccacccccataaacttgctactttatatcttatagaacatacncnttaatataatattaatggaatcccg

SEQ ID NO: 32221 - DNA, 389 bp, Homo sapiens
  misc_feature (1)...(389): n = a,t,c or g
ngngnnnttnnnnattgantttgaataccntnnnnnnnnnnnnnnnnnnnnnnnnnnnnnnnnnnnnnnnnnnnnnnnnnnnnnnnnnnnnnnnnnggcacgaggagaggccatgaagagctgctgttgctgttccctacagccagcccgctgtccagcattcagacctcagaacctcccccttccaggacgtcaggagcgcagcagggcccatccatggaggagccacttctctgtgcccaggaatgataaacacagctaagaggagccatagcacctgcctgaataatgagcgccacctgtgggaggaaagctgcgtcctgcttagttggcagtgtttataagaagccagtttttggttttttacttgtagccaaaaaaaaaaaaaa

SEQ ID NO: 32222 - DNA, 447 bp, Homo sapiens
  misc_feature (1)...(447): n = a,t,c or g
ggannnttgtgcctcgaganntctnttcnttgcnnnnnnnnnnnnnnnnnnnnnnnnnnnnnnnnnnnnnnnnnnnnnnnnnnnnnnnggcacgagaagattacaaactgaagaaggatgcaaatggaaagaattttatgaaagattgaaacataattttaaatttcagaatttctggggtcagaagtaaagagtactacacatattatatctttcctacaatgtagatgaggtggatccgacctgaccttatgtgcttgctccaccttaaggtcttctcttacccacattggttcaaaaaaaaggatctttttgtcaacaacccataagaaacagtttagtttttctacactgtgtgtagaaacttagcattaagaacaagcattttaacctacattantaaaantaagtaattttttaagcttacatttttcnagaaatncttaa

SEQ ID NO: 32223 - DNA, 451 bp, Homo sapiens
  misc_feature (1)...(451): n = a,t,c or g
gggnnnnttntncctcttgantcccgaataccntttnnnnnnnnnnnnnnnnnnnnnnnnnnnnnnnnnnnnnnnnnnnnnnnnnnnnnnnnnnnnnnnggcacgaggatagcatagtgctcggccaccaggtatgctttatacttgcctgatgcgagtattattttgttattatggttaaaaatagttcaaggattagcattgtactttgagtgttgtctaggaaagtcagggtctcaaatattactattacatatctcttccctcaaatcttgttcagatttctgcaacagcatcttatttgttcactttgtttgcctcctccaacccattatcttccttgaagctagagcgttctttccaaaatgcaaatgtaatcaagcattccctgtttaaaacccatggttccccattgcctcgagaaatccagtctnctaagagtgggattcca

SEQ ID NO: 32224 - DNA, 446 bp, Homo sapiens
  misc_feature (1)...(446): n = a,t,c or g
ggnngnnntnnnnnttgantccgnttcnnnnnnnnnnnnnnnnnnnnnnnnnnnnnnnnnnnnnnnnnnnnnnnnnnnnnnnnnnnnnggcacgaggtaaaaacaaaagaaggaaaaaaagcttctaacctagcccttctcagacttgactgtgtgtttgagcccccagggttctggtggttagggctggatggagtctgagcctctgcgtgtctaacaagatccctggtggtgctgctgctgtttcttgggtcatggccagtgagcaagaagagcagggaagtgggctggagaggactgcagaaaccagcacagggcctgttttgcctcctgacatgtgtggatgccagattcctgctttttcctcacctactaggaacagcggctgcacatcctctggnggncttgcgtgggctcctgntnttttgcttncaaccaanccttta

SEQ ID NO: 32225 - DNA, 445 bp, Homo sapiens
  misc_feature (1)...(445): n = a,t,c or g
ggngnnnntnnnnntttganatccgtttgncnnnnnnnnnnnnnnnnnnnnnnnnnnnnnnnnnnnnnnnnnnnnnnnnnnnnnnnnnnggcacgaggagagctacaccatgagcttcaaccctggcccctaccttggagtccccactcccacccagggagcttaggcgttcagagaaataaaatgttgctcctcccaatagtagggatgcgaattcctgatagagagatagaggctcccacagactcagagggagcctgatatttgcattaattcatttaacctttaggaagtttcctggtaaaaagatttaaaaatctgtcggcaatatctttaaatgcattcattgccatttgtttttcacgtggaaaaaattccaagacgtgtatactttccaaacnagaaaagaattaacattttcctggtggctaaggggttcaagaac

SEQ ID NO: 32226 - DNA, 444 bp, Homo sapiens
  misc_feature (1)...(444): n = a,t,c or g
gngnnnttnnnnttgantttgaanaccttttgacnnnnnnnnnnnnnnnnnnnnnnnnnnnnnnnnnnnnnnnnnnnnnnnnnnnnnnnnnnggcacgagcggcacgagcaagtttcacaaatcagacaagggacactgtcatttcataaccaatacaggttaacctctttgggttctaaatgattgttatagtggatcttttcactgaatcagtaggattaaggatgcaatgtccaagagttaatgtagtttcatcatggtgttgataaaaccatggcaaggcacacaatgcacattgttacagtcctataatgtatttggtgggtgcttgctttagactggacatgtggtaagtaccggcgacacagcagtgaacaaaaagagaggggctgtgcctttggaacttatgatttaatgaganaagagaatnanccttnagggaa

SEQ ID NO: 32227 - DNA, 445 bp, Homo sapiens
  misc_feature (1)...(445): n = a,t,c or g
gngtnnnttnnncntcttnanttctntntcccntgnnnnnnnnnnnnnnnnnnnnnnnnnnnnnnnnnnnnnnnnnnnnnnnnnnnnnnnnggcacgaggttccagggcctgcctgagactcagaaccaccccctcactcatctttgagaggtgtgcttttgagagaagcaatgggcaggcgagagtgagctattaggttggtgcaaacatannnnnnnnnnnnnnnnnnnnnnnnnnnnnnnnnnnnnnnnntgctaatacatgatctatcttttccatgtggctgatgcttccgccaggggtttttgagttgagcgagagagaaactgcatctggtacgttgccaccttcactttgggtcacgctctcttggtaatggtgcaggtaaagcctcatgaaagccctgctatctgnctggggaaaanaattaaggaaagtaccttc

SEQ ID NO: 32228 - DNA, 445 bp, Homo sapiens
  misc_feature (1)...(445): n = a,t,c or g
gggnnnnntnnnnttggantttgaataccntnnnnnnnnnnnnnnnnnnnnnnnnnnnnnnnnnnnnnnnnnnnnnnnnnnnnnnnnnnnnnnnnnggcacgagtcaacttggaaatgttaccactatccaagaaagagctgagcttaacataataagaatattgtaaatagacagctattacctacactgttaagtaaccaatgccaaggacaagtaagtatggcagaagagcttgatcagaagctcatgctttccatttcaaaatagtccagcactttgggagagggggtgggtggtgggacctctgcaatttatggatcagtagtttcatgctgaagcacttgaagttttttggtatgcggatccaggaaagccatttttctatatggctttctcttttaagtatcagngtttaagtatcaagtaaagactcaaccnnaacc

SEQ ID NO: 32229 - DNA, 451 bp, Homo sapiens
  misc_feature (1)...(451): n = a,t,c or g
gagtnnntttnnnntttgaantcnnggaatacccttnnnnnnnnnnnnnnnnnnnnnnnnnnnnnnnnnnnnnnnnnnnnnnnnnnnnnnnnnnnnnnnnnggcacgagatgtttctcacactgttgtttttacttttctgtatgtttgaaaaatgtcaacatggaaaatgaaaaaacaaaaaagagatactgttagcacttagaaaagaaatagaggaaaaataaaaagtaatgtttgtgcctttacccagagcagctaaatctttggattggtacccaagttctagttccccaggtagttctgatgtataggccagcttgaaaaaccactgctataaatgagcagttacgaaatgctcaaaaagtcatgaaagacttaaaatggatttttttggtgggatctttnttcttttattttgagacagagtctcactctatgnctaagcttga

SEQ ID NO: 32230 - DNA, 445 bp, Homo sapiens
  misc_feature (1)...(445): n = a,t,c or g
gngtnnnttnnnnnntntganacctntnnnnnnnnnnnnnnnnnnnnnnnnnnnnnnnnnnnnnnnnnnnnnnnnnnnnnnnnnnnnnnnggcacgagagtcaagcggccagggagagatgacatgctggacgtggagaccgatgcctacatccactgcgtcagtgccttcgtcaagctggcgcagagcgagtaccagctgctggccgacatcatccccgagcaccaccagaagaagaccttcgactccctgatacaggatgccctggatgggctgatgcttgaaggggagaacatcgtgtctgctgcccggaaggccattgtgcgacacgacttctccacggtgctcaccgtcttccccatcctgcgacacctcaagcagaccaagcctgagtttgaccaggtgctccagggcacggntgncaacacaaagaacaacttgcttg

SEQ ID NO: 32231 - DNA, 437 bp, Homo sapiens
  misc_feature (1)...(437): n = a,t,c or g
gagtgnnttncncttggaaaccttttgcctgnnnnnnnnnnnnnnnnnnnnnnnnnnnnnnnnnnnnnnnnnnnnnnnnnnnnnnnnggcacgagggtagtttgagatttatgagtttattttactttattaaaagcatgttcaaagattacaaatccagtttatgtgaaatattttaccttcaacattacaattgtagtcaatcttagttctttgtgacaagtatacaaataagaggatttctctagagaatatgcagtctgagtatttgtgaagaccttgacagccacactatgattttattatttattatttannnnnnnnnnnnnnnnnnnnnnnnnnnnnnnnnnnnnnnnnnnnnnnnnnnnnnnnnnnnnnnnnnnnnnnnnnnnnnnnnnnnnnnnnnnnnnnnnnnnnnctcctgcctaancctcctg

SEQ ID NO: 32232 - DNA, 443 bp, Homo sapiens
  misc_feature (1)...(443): n = a,t,c or g
gggtnnnntnnntttgactactganacccttttgacnnnnnnnnnnnnnnnnnnnnnnnnnnnnnnnnnnnnnnnnnnnnnnnnnnnnnnnnnnggcacgagataactatgtttatagttaatccttgaaattataaagtatgtattaaacacacagacctgggagtggaatgagattctcttacaaaggaacaaaaattaggattccctccgtcttctgtactgcagcagtaaatgccagaatcctgtggagcaacatctttagtcttctaaggagaaaagcttagagagcaacaattgtatgcccaaccaagttgtcatttgtgtttagcagacaaacgagcctcagaaagcatgctactggggctctctggaggaggaacagctgtgatccaggagtcaaatgctgtcacaatctccatctctcatcttccatctcttgg

SEQ ID NO: 32233 - DNA, 446 bp, Homo sapiens
  misc_feature (1)...(446): n = a,t,c or g
gngnnnnnntnnnnntttganntttgaanaccntnnnnnnnnnnnnnnnnnnnnnnnnnnnnnnnnnnnnnnnnnnnnnnnnnnnnnnnnnnnnnnnnnggcacgagnnnnnnnnnnnnnnnnnnnnnnnnnnnnnnnnnnnnnnnnnnnnnnnnnnnnnnnnnnnnnnnnnnnnnnnnnnnnnnnnnnnnnnnnnnnnnnnnnnnnnnnnnnnnnnnnnnnnnnnnnnnnnnnnnnnnnnnnnnncaacaacatcaaaaaccaatcatttattatctcccatagtttccttgggttgtgaatttgggtggctctggcttaccatctttcatgaattgtagcccagtgtcagctgggactgtagcaatctgaaagctcaactagggctagaggattcattccaaggttggccctctcgagtagctagcaagttggtgctggcagtt

SEQ ID NO: 32234 - DNA, 446 bp, Homo sapiens
  misc_feature (1)...(446): n = a,t,c or g
gngtnnnntnnncatctgaanaccctnnnnnnnnnnnnnnnnnnnnnnnnnnnnnnnnnnnnnnnnnnnnnnnnnnnnnnnnnnnnnnnnnggcacgagggaaagcccagttgcttaacgaatatgtggctgtcgaaaatatttccaatacaggacaaacagtcatggcaaaatgaatacgaagtctacagtttgcctggaatgaagcatgagaacatattacagttcattggtgcagaaaaacgaggcaccagtgttgatgtggatctttggctgatcacagcatttcatgaaaagggttcactatcagactttcttaaggctaatgtggtctcttggaatgaactgtgtcatattgcagaaaccatggctagaggattggcatatttacatgaggatatacctggcctaaaagatggccacaaacctgccatatctcacaggga

SEQ ID NO: 32235 - DNA, 442 bp, Homo sapiens
  misc_feature (1)...(442): n = a,t,c or g
gnngnnaggtnnntttgactangnatacccttttgactgcnnnnnnnnnnnnnnnnnnnnnnnnnnnnnnnnnnnnnnnnnnnnnnnnnnnnnnnggcacgagaaaactattttgctatctggaatgtctcttgatagaatggctatgtttatttgtttgttttccctgaatgttttataagcagtgtaatatttaagactagtgttagctttttatttgaatttcctgaatatacagcaaggatttttgaatctttattactagattttatttttctctccagttgttgctgtgtatggagtattgtaggtagaaaagagaggaagattgatttgtaaataataggttaatctggctagaccagccatgtataggtcaagctgcttgagggtgacctgctaacattgtggaaagattttattgnactttcattttattgag

SEQ ID NO: 32236 - DNA, 473 bp, Homo sapiens
  misc_feature (1)...(473): n = a,t,c or g
gnnnnnngnnnntttgganaccgctattttgggattccttnagnnnnnnnnnnnnnnnnnnnnnnnnnnnnnnnnnnnnnnnnnnnnnnnggcacgagcggcacgagcaaaacgtaaaatagattttcagaactggaagaaatctttgatactatccactcattaatttaaagtaaaagaattaagacccacagagggtaaacctgttgttgcccaaggttccacagcttgttgttggcagaagactcctgatcccagctatacctctctgaacatgcataaggacacatagtgggttaagaacaaagccgtgggtatacatgagcgtggcttagcaatcccagttcggggaatttatcctcaaaaactatttctaaagaaaataggtcnnnnnnnnnnnnnnnnnnnnnnnnnnnnnnnnnnnnnnnnnnnnnnnnnnnnnnnnnnnnnnnnnnnnnnnnnnnnnnnnnnna

SEQ ID NO: 32237 - DNA, 474 bp, Homo sapiens
  misc_feature (1)...(474): n = a,t,c or g
gnnnnngnnnntttgaanncccnnnctntgganaccgttnnnnnnnnnnnnnnnnnnnnnnnnnnnnnnnnnnnnnnnnnnnnnnnnnnnnnnnnnnnnnnnggcacgagcgtttcaggggcacaggggtggatggggcacaggagttgagaatgtatgggtcaaaggatggaaaatttcagttagactggagaaatacattcaagaaatctattgtacaacatgatgattattgttaataacaatgattgtatacttgaaaattgctgagagattttaaatgttctgtctacaaataaaatgataagtatatgagataacaatgaaagttaattagctcatattagccattccacaatgtatacctatattaaaacatgttgtataccataaacacatatagttcttatcaatcaattaaaataatttaaaataattttttaaatgagtattcccagacataaatactagaca

SEQ ID NO: 32238 - DNA, 469 bp, Homo sapiens
  misc_feature (1)...(469): n = a,t,c or g
gnnnnnnnnnnntttggaanaccnntatnttgnnnnnnnnnnnnnnnnnnnnnnnnnnnnnnnnnnnnnnnnnnnnnnnnnnnnnnnnnnggcacgaggtggggagctcttagcctgcctggtaatacaagattgacagggcaattgggtatataaacccatttcttttaacatttataaaaagttaagaaaaagcattagaggctgaaaccgcgtggccaaatgggtggtaggcagaaggaaatacttggcagcaaaggaagctcgcagacctggagccagcaagtgcttccaggaactcagcctgcacagaggcagcagtgacaaggagccaggcgcagcacaccagagctggcctgatagggaggggcaggaggcgtgcacgaaggtccgcccagcggcagcagggtgagggagcagcacagacaaaaggtggcacagacaaaaagcagcgcctgagcaagcgcaa

SEQ ID NO: 32239 - DNA, 448 bp, Homo sapiens
  misc_feature (1)...(448): n = a,t,c or g
nnnnnnnnnnnnnnnnnnnnnnnnnnnnnnnnnnnnnnnnnnnnnnnnnnnnnnnnnnnnnnnnnnnnnnnnggcacgagctttttttttggacagcaatcttgctcagtgattaagacctggcgctccagtgcgtcacaactaggttcccatgctgtgtctctttccagtgaaatcactttgagctatttcacttctcagtacctcgtttcccagtctatgaaatgggcatagggttgttacaatcaggtaacacacaggctgagttgagtagtgcctgacacatgaggctcaatgataactattattactattacttgtctggacatttgcttcaaagtaaacagcgtacaaatgtcattaatgactcaaacataactagcttagagtatcttttcctgaaaagacaggagaatggccaggccagcaaactttttgcctctagttt

SEQ ID NO: 32240 - DNA, 465 bp, Homo sapiens
  misc_feature (1)...(465): n = a,t,c or g
gnnnnnnnnnnnttttgaanaccnnnnnnnnnnnnnnnnnnnnnnnnnnnnnnnnnnnnnnnnnnnnnnnnnnnnnnnnnnnnnnnnnnnggcacgannnnnnnnnnnnnnnnnnnnnnnnnnnnnnnnnnnnnnnnnnnnnnnnnnnnnnnnnnnnnnnnnnnnnnnnnnnnnnnnnnnnnnnnnnnnnnnnnnnnnnnnnnnnnnnnnnnnnnntaagtataattataaaaaaaaagaatcattatcaagaaaaaaaaatgatagaaagcactaatgtacattacaataagtatgccggactctgtcctaagagttttactttaaataagtcacctaatcctcaaaagaagcctatgaggtacatgctattatttccccttcttacatttgagggacctgaggcacacagaggttaactaaccacctcaagcacggttacaagactggtaagtggcagagctg

SEQ ID NO: 32241 - DNA, 449 bp, Homo sapiens
  misc_feature (1)...(449): n = a,t,c or g
ntttgganaccnnttgttnnnnnnnnnnnnnnnnnnnnnnnnnnnnnnnnnnnnnnnnnnnnnnnnnnnnnnnnnnnggcacgagtatcacactgtcaatgaagatcttttgtgaccatcctatataaaagggcaacatacccctagtacctcctcactcttttcctgatgtatttttctctacagtacttcatacaatctgatatggcctaattcgtttattctttatctgtgttacccaggagcaacataataaagcagggattttatttatgttgtttattgcacctgcagcacagaggtgcataacagatacttaataactatttgttgaataaatgaacaaaggcaaatgattagcaatacagccatagctcttctttctagaccatgcttagctgactcagacaaggtatgagctacatactagataatctaaattatcttca

SEQ ID NO: 32242 - DNA, 442 bp, Homo sapiens
  misc_feature (1)...(442): n = a,t,c or g
ccnnnttggannaccnnnnnnnnnnnnnnnnnnnnnnnnnnnnnnnnnnnnnnnnnnnnnnnnnnnnnnnnnnnnnnnnnnnggcacgaggtgatttggggagtgggtaggtctggagaagcagtgcagagttggggacatttagtgtcccaaccctagggctggcagctgcagacctctaatttctttttttttttnnnncannnnnnnnnnnnnnnnnnnnnnnnnnnnnnnnnnnnnnnnnnnnnnnnnnnnnnnnnnnnnnnnnnnnnnnnnnnnnnnnnnnnnnnnnnnnnnnnnntcctagnanctggnnnnnnnnnnnnnnnnnnnnnnnnnnnnnnnnnnnnnnnnnnnnnnnnnnnnnnnnnnnnnnnnnnnnnnnnnnnnnnnnnnnnnnnnnnnnnnnnnnnnnnnnnnnnnnnnnnnnnnnnnnnnnnnn

SEQ ID NO: 32243 - DNA, 444 bp, Homo sapiens
  misc_feature (1)...(444): n = a,t,c or g
ttgnanaccnctatttcntgattccgaatttaatacnnnnnnnnnnnnnnnnnnnnnnnnnnnnnnnnnnnnnnnnnggcacgaggggaaacatcctgagaaggatgacctaaaggaacagaggtctgtgttttcaatgggggaaatatagcgttcacaaaggcttgtaggtttgttttgttctcttggttttgttattgctttggcttcataggagattgggtatatgagaagtatgtgttgtgaaactcagaatgattgtaaatggtaaataataatttcagcagaaatgcaaatcatttaaatttataaggtagggttataataactataggttaacccactggtgatggcaggatagtcccaaaaatttcagccatatatattgtgaacaacagaaatgtttatattggaaaatgggtaggaaatttaacatatcttgag

SEQ ID NO: 32244 - DNA, 435 bp, Homo sapiens
  misc_feature (1)...(435): n = a,t,c or g
ttggannaccgnnnnnnnnnnnnnnnnnnnnnnnnnnnnnnnnnnnnnnnnnnnnnnnnnnnnnnnnnnnnnnnnnnggcacgagaaagtatgcatattctgagagataccccaaggcatcacaagatcctgaatcatcaaaacaccattgaattgtgttgggcattttgtagccaggaaagtgaagtggttcaatttagaaagggtnnnnnnnnnnnnnnnnnnnnnnnnnnnnnnnnnnnnnnnnnnnnnnnnnnnnnnnnnnnnnnnnnnnnnnnnnnnnnnnnnnnnnnnnnnnnnnnnnnnnnnnnnnnnnnnnnnnnnnnnnnnnnnnnnnnnnnnnnnnnnnnnnnnnnnnnnnnnnnnnnnnnnnnnnnnnnnnnnnnnnnnnnnnnnnnnnnnnnnnnnnnnnnnnnnnnnnnnnnnnnnnnnnng

SEQ ID NO: 32245 - DNA, 431 bp, Homo sapiens
  misc_feature (1)...(431): n = a,t,c or g
ttgaanaccnnnnnnnnnnnnnnnnnnnnnnnnnnnnnnnnnnnnnnnnnnnnnnnnnnnnnnnnnnnnnnnnnnnggcacgaggacagctgctactgccactgccactgctgaatattttctccctctctggaactcttcctaggaatgccttagtacccagttcctggcctcctttctctattgggtgaagcacaagttattttggaaatccttttcattgaacaactcttttcatctttttcttttctttctttttttnnnntttccnannaatttttnttttnantttnntaanntggnnttttaggnccttaannaaaggnagaaccccnngaaaaaaaantggtannngnntngnnggtnnttaaaaacccngggtnggnntnnnnntangggnnaaaannnggaaaantaannccaantgggaa

SEQ ID NO: 32246 - DNA, 444 bp, Homo sapiens
  misc_feature (1)...(444): n = a,t,c or g
nccccnnctttggannacccgnnnnnnnnnnnnnnnnnnnnnnnnnnnnnnnnnnnnnnnnnnnnnnnnnnnnnnnnnnnnnnnnnnggcacgagattttatataagcactaagtaatgcggcagactgccaaaagtccattttccaatagttagctgacaacctttagtagctaaacgcagctaggagccaggaagtagggacagaaagataaagttnnnnnnnnnnnnnnnnnnnnnnnnnnnnnnnnnnnnnnnnnnnnnnnnnnnnnnnnnnnccaaaacctctgagtgtcaatagagagagctttacttatatgaggccctcaggcccccattcacagcctatttagtcttattttatatgcaaccctaacaagcctaattttatttacttctaaaggacagggttgagaaatgcttccttcaaagatggnggtaattt

SEQ ID NO: 32247 - DNA, 437 bp, Homo sapiens
  misc_feature (1)...(437): n = a,t,c or g
tttganacctnnnnnnnnnnnnnnnnnnnnnnnnnnnnnnnnnnnnnnnnnnnnnnnnnnnnnnnnnnnnnnnnnggcacgagggaaagcctcctatccaatatcccccaggtagtcgcgctgcccacacctgtctcgagggccgggtggctcctcacccaaacttctaccttcccttgggttgccagaagcaacagcttcatcttgggggagccgagtgcgtggcgaccctccctgaaactagatcgtatccctctctctgggggtgggggaggcagtattcaccctgggcgcgcgtccactccccggatgttttctgtgcaatcgaggctctttccttccactgataccccgagttctcttttttggtctctagcaaaatccacttcctgttgtgactcaacacccccaaggggcaaggggtggatgcctgagtc

SEQ ID NO: 32248 - DNA, 428 bp, Homo sapiens
  misc_feature (1)...(428): n = a,t,c or g
cttgnanaccgntatgacnnnnnnnnnnnnnnnnnnnnnnnnnnnnnnnnnnnnnnnnnnnnnnnnnnnnnnnnnnggcacgagcacagcaaaatactttttactgatggagcctcaaagatacacaaaagtgttatactgtcctcttgtcatcatttatttattataatcaggactgacaggtgaaacaaaaagactcctattattaaaagaataggaaaccaagccagctggttttttaaaaaatggccaagatgtaagccaaactctctttctctccctttttcatcccccttgtcgtatttctgatttgtgttttcttgtcagcattttctccagcaggtcgattcctcttcagctagtaccagtgatttttaagcaaaggaagaaacctactctttgcaggtgagagataatcaaattaaata

SEQ ID NO: 32249 - DNA, 436 bp, Homo sapiens
  misc_feature (1)...(436): n = a,t,c or g
ttganaccgnnnnnnnnnnnnnnnnnnnnnnnnnnnnnnnnnnnnnnnnnnnnnnnnnnnnnnnnnnnnnnnnnnggcacgagaacctgttttatcttgggtctcagttccctctaagctacgtattttcatgttttagagtcagaagattaatctccttgacagaaaagatggaactgaggtcaaaatagaagttgagttctactaatgtcacactgctggcacaaagggcagtgcccttcctgctcttcttgctctgaactttcctttcagcccgggctggcaatcggttttcttcagcgtctcaggaacgtgtcaaacgtgggcgtcctgttggaagcacgctgttgcaagtttgtcatctagtggtggaagggcactgagctggaatcctgggtctggagtcaatgagatgtccagaacaggcaggactgaa

SEQ ID NO: 32250 - DNA, 456 bp, Homo sapiens
  misc_feature (1)...(456): n = a,t,c or g
gnnnnnnnngnntttgnnncccnnnctttganaccgtnnnnnnnnnnnnnnnnnnnnnnnnnnnnnnnnnnnnnnnnnnnnnnnnnnnnnnnnnnnnnnnnnggcacgaggaaataccagtttgtgaaaaagaaacatgccagcatgtgagacagagtcttcaagaacttccagctggttcacgtgtggagctagttaatacgtcctgccaagatgggtaccagttgactggacatgcttatcagatgtgtcaagatgctgaaaatggaatttggttcaaaaagattccactttgtaaagttattcactgtcaccctccaccagtgattgtcaatgggaagcacacaggcatgatggcagaaaactttctatatggaaatgaagtctcttatgaatgtgaccaaggattctatctcctgggagagaaaaaattgcagtgcagaagtgattctaaag

SEQ ID NO: 32251 - DNA, 455 bp, Homo sapiens
  misc_feature (1)...(455): n = a,t,c or g
nnnnnnnnnnnntttnnnnnccnnnnnnttggannaccnnnnnnnnnnnnnnnnnnnnnnnnnnnnnnnnnnnnnnnnnnnnnnnnnnnnnnnnnnnnnnnnnnnggcacgaggagagctagcaccatgagcttcaataccctgcaacttccagaaaggcctacagagctccccattcagagctgaaagtacatcttttattaattttcaccaaatatcattaatgcttaatgttgcctagtgctcacatgaacaacaacatgaactcatggcttgataactggtggaattatcaagaaatttagnnnnnnnnnnnnnnnnnnnnnnnnnnnnnnnnnnnnnnnnnnnnnnnnnnnnnnnnnnnnnnnnnnnnnnnnnnnnnnnnnnnnnnnnnnnnnnnnnnnnnnnnnnnnnnnnnnnnnnnnnnnctattctaaaaaattaaccaggtgtgg

SEQ ID NO: 32252 - DNA, 440 bp, Homo sapiens
  misc_feature (1)...(440): n = a,t,c or g
ttgganaccntnnnnnnnnnnnnnnnnnnnnnnnnnnnnnnnnnnnnnnnnnnnnnnnnnnnnnnnnnnnnnnnnnggcacgagacatgtaacaaaatatcacatataccccataagtgtatacaaatgtctgtatcaatttttttaaaattctgcaaaaaagtaaatgataaatagggagaaatgttaataggtacatagtatatggatgttttttgtgttttttcagtcttgcaacattacatttaaaaaaaactatcgcccnnnnnnnnnnnnnnnnnnnnnnnnnnnnnnnnnnnnnnnnnnnnnnnnnnnnnnnnnnnnnnnnnnnnnnnnnnnnnnnnnnnnnnnnnnnnnnnnnnnnnnnnnnnnnnnnnnnnnnnnnnnnnnnnnnnnnnnnnnnnnnnnnnnnnnnnnnnnnnnnnnnnnnnnnnnnnnnn

SEQ ID NO: 32253 - DNA, 459 bp, Homo sapiens
  misc_feature (1)...(459): n = a,t,c or g
gtgnnttgnnntttganancgctatgacnnnnnnnnnnnnnnnnnnnnnnnnnnnnnnnnnnnnnnnnnnnnnnnnnnnnnnnnnnggcacgagacaatgtatcaactttgattggagtcttactagcctacagagagaaaaaggaagagagtaaataatttacctgagaaaacaaagtaaattggtttcttgaaaacaaagtaaattgggtgggtggggatgtgtnnnnnnnnnnnnnnnnnnnnnnnnnnnnnnnnnnnnnnnnnnnnnnnnnnnnnnnnnnnnnnnnnnnnnnnnnnnnnnnnnnnnnnnnnnnnnnnnnnnnnnnnnnnnnnnnnnnnnnnnnnnnnnnnnnnnnnnnnnnnnnnnnnnnnnnnnnnnnnnnnnnnnnnnnnnnnnnnnnnnnnnnnnnnnnnnnnnnnnnnnnnnnnnnnnnnnnnnnnnnnnnnnnnnnnnnn

SEQ ID NO: 32254 - DNA, 455 bp, Homo sapiens
  misc_feature (1)...(455): n = a,t,c or g
gatgnttgaanntcttgacnnnnnnnnnnnnnnnnnnnnnnnnnnnnnnnnnnnnnnnnnnnnnnnnnnnnnnnnnnggcacgagagggaatgaatgactaaaggaaggacaaagtggaagaagagaaagaacaagggaatgaaaaatacttttctgtgaatgtaggtgaaccaagtatcttctctggctgagttagcaaaggggaattctatggggagatgacagtgaagcgggaaatttccctgacccctttgcaagtgggaactggagtgcaggcactggagttagccggctgcttcggcactggcaggggcgaactccactcactcgaacccattgctctcagctcctcatgggagggaatgcacaggtgagtggatgcaggaactggggtgagtgctttcaggcaccagcaggagcaaaactttgtgtggccccgtggcagcatctagtg

SEQ ID NO: 32255 - DNA, 461 bp, Homo sapiens
  misc_feature (1)...(461): n = a,t,c or g
gnnnnnttgnnnattgganancnnnnnnnnnnnnnnnnnnnnnnnnnnnnnnnnnnnnnnnnnnnnnnnnnnnnnnnnnnnnnnnnnnnggcacgagagacttccctgctgtggcccgaggctcaggaagttttggagtttgggtctgcttagggcttcgagcagccttgcactgagaactctggtagggacctcgagtaatccactcccttttggggactgacgtgaggctcccggtggggaaggagactgacctctcggttcacgtgtcttgccatagagccactctcctgagtgggtttttctcctgatcgtttgggccaagtgacttctctctgaacctcatatttctcttctgggataataaatggtcaccctttcaaggggttgttttggaagatattgtgaacaatggtaaataagggnnnnnnnnnnnnnnnnnnnnnnnnnnnnnnnnnnnn

SEQ ID NO: 32256 - DNA, 329 bp, Homo sapiens
  misc_feature (1)...(329): n = a,t,c or g
gngnnattganacntnnnnnnnnnnnnnnnnnnnnnnnnnnnnnnnnnnnnnnnnnnnnnnnnnnnnnnnnnnnnnnnnnnggcacgagtgtggcacagggaaaaataaaaaccgcgggcttatgggctttggagcccagccgacctcaatttaagttctatctctagtccagacatgnnnnnnnnnnnnnnnnnnnnnnnnnnnnnnnnnnnnnnnnnnnnnnnnnnnnnnnnnnnnnnnnnnnnnnnnnnnnnnnnnnnnnnnnnnnnnnnnnnnnnnnnnnnnnnnnnnnnnnnnnnnnnnnnnnnnnnnnnnnnnnnnnnnnnnn

SEQ ID NO: 32257 - DNA, 453 bp, Homo sapiens
  misc_feature (1)...(453): n = a,t,c or g
gagnnttganacctnnnnnnnnnnnnnnnnnnnnnnnnnnnnnnnnnnnnnnnnnnnnnnnnnnnnnnnnnnnnnnnnnggcacgaggaaaattctgccgtctgaggttttatacttcaggttagttagtttttggaaggaagaacatttttaggtttgcaagcctcctgatcaggaaaccagaaataccacatttatggaccatgaaaggttggttcttgactctgaagggacttttgagttaatcagcgtaaggggatttctaaagcaggcaatccctgtagccgcagagaataaacgccttcccaaaatggcaacttcccacagccacatttcagacctgctgagactgctgagtgaggaatggcagtgaggtttcttcaattagtctcagttctcttaattttcaggaagaaagggaaattgcagctcctnagcccccaggattgacct

SEQ ID NO: 32258 - DNA, 456 bp, Homo sapiens
  misc_feature (1)...(456): n = a,t,c or g
agtgnatttgaancttnnnnnnnnnnnnnnnnnnnnnnnnnnnnnnnnnnnnnnnnnnnnnnnnnnnnnnnnnnnnnnnnnggcacgagcagctttcttctaacatgaaattgctcactcttgcctctgttggttactgggcagtgtaattggatgaatgaattagactgtgctgagaatttaaacactagttttggcttctgtggctttccctttgggccgaatttcccatcacttatctgtccatgttttctttaccatagctatttatttttattttttgacnnnnnnnnnnnnnnnnnnnnnnnnnnnnnnnnnnnnnnnnnnnnnnnnnnnnnnnnnnnnnnnnnnnnnnnnnnnnnnnnnnnnnnnnnnnnnnnnnnnnnnnnnnnnnnnnnnnnnnnnnnnnnnnnnnnnnnnnnnnnnnnnnnnnnnnnnnnnnnnnnnnnnnnnnnn

SEQ ID NO: 32259 - DNA, 457 bp, Homo sapiens
  misc_feature (1)...(457): n = a,t,c or g
gtnnttgnnnattgganaccnnnnnnnnnnnnnnnnnnnnnnnnnnnnnnnnnnnnnnnnnnnnnnnnnnnnnnnnnnnnnnnnnnnggcacgagacacttgactgtgaacacagaagaatttacgagaccaaactaccaatcattccagtgcatcaggaaatgctttattgagcaaggttttagtatactttatgttgaatgtcagttaatacatttccctaatcattgtattgccttttttaaagtgcctggtgttttgctaggtaacacatagaacaaattaaacaatgtttagacctactagggcatattctgaaacttgacaatggtaacagacagttaattggttataaagaaagaaggctcctttatggagagtttctattttcagttttttagttaattgctagaattagtaactgggtaaagcaggattgtgataaaggagatcttca

SEQ ID NO: 32260 - DNA, 456 bp, Homo sapiens
  misc_feature (1)...(456): n = a,t,c or g
gtgnttganntttgaaancnnttgacnnnnnnnnnnnnnnnnnnnnnnnnnnnnnnnnnnnnnnnnnnnnnnnnnnnnnnnnnnggcacgagcgaatgcaaggaatgttattttttgagtcctttattccagtcacagtattataaactgtgaggacagccaaaagacaaattccccttttttgaggaatttccaatatgaccagtctttatacaataagtaggaatgaaaagaataaaagcaacattaaaaatgcatgaagaacactgaagcacccagaagatttcagtgtggccagcctgggacagggctatgcaggagaacttttgagcggtgagattggagccagtttttgtagttagaaatggannnnnnnnnnnnnnnnnnnnnnnnnnnnnnnnnnnnnnnnnnnnnnnnnnnnnnnnnnnnnnnnnnnnnnnnnnnnnnnnnnnnnnn

SEQ ID NO: 32261 - DNA, 458 bp, Homo sapiens
  misc_feature (1)...(458): n = a,t,c or g
ngtgnatttnnacntctatgacctgattacgaatttaatacnnnnnnnnnnnnnnnnnnnnnnnnnnnnnnnnnnnnnnnnnggcacgagtgatnnnnnnnnnnnnnnnnnnnnnnnnnnnnnnnnnnnnnnnnnnnnnnnnnnnnnnnnnnnnnnngtcatagtactttatcctttgactctgataggtcttcttggcctcatttaatggaatttctagtattgctgctgccttgtgaatggtttactattgtgtaattccctaaaggattacttttgtaaccataatcattctaaatgaaacaaaaattgttgagaaaaattgtatatgggcnnnnnnnnnnnnnnnnnnnnnnnnnnnnnnnnnnnnnnnnnnnnnnnnnnnnnnnnnnnnnnnnnnnnnnnnnnnnnnnnnnnnnnnnnnnnnnnnnnnnnnnnnnnnnnnnnnnnnnnnnnnn

SEQ ID NO: 32262 - DNA, 456 bp, Homo sapiens
  misc_feature (1)...(456): n = a,t,c or g
ngtgnttgaacttnnnnnnnnnnnnnnnnnnnnnnnnnnnnnnnnnnnnnnnnnnnnnnnnnnnnnnnnnnnnnnnnnggcacgagcaagcagcctgcggattccgatgcaatgagtctacagtagattgtctgccatgatggttgcaacaattcttcccattcgtgtacccacactcctttgtagtgtgactttgccactctttcaatcaagagatagagtccatttttcctccttttgaatctcggcttatcctttggcttactttgaccaatagagatcagttgacatgatattatggggcatctgagccttggtcttcaagaggacttgcgttttcggtattcacccttttggaactcagctgccatgtaattaagttgagcctatccttctgggaaaatggagagagaggcagagccgacagccaacaccaaccaccagacacagtatatg

SEQ ID NO: 32263 - DNA, 459 bp, Homo sapiens
  misc_feature (1)...(459): n = a,t,c or g
gagnnttgaacttnnnnnnnnnnnnnnnnnnnnnnnnnnnnnnnnnnnnnnnnnnnnnnnnnnnnnnnnnnnnnnnnnnggcacgnnnnnnnnnnnnnnnnnnnnnnnnnnnnnnnnnnnnnnnnnnnnnnnnnnnnnnnnnnnnnnnnnnnnnnnnnnnnnnnnnnnnnnnnnnnnnnnnnnnnnnnnnnnnnnnnnnnnnnnnnnnngattgacattttaaaatacagcagctaggtggggtggattctattattatcccattgtacaaatgaagaaactgtggcacagagaaattaataataggttacgtagccagtgtaacccagaacatcttagttcatgttgcatgtctctcatttgctggaagcatatcagtcaacaagaaaattattgttttgcttccagtttgagtaatgttcctgtgacttctttaagtgctgnatatttgctgcattt

SEQ ID NO: 32264 - DNA, 457 bp, Homo sapiens
  misc_feature (1)...(457): n = a,t,c or g
gtgnttgaaactntnnnnnnnnnnnnnnnnnnnnnnnnnnnnnnnnnnnnnnnnnnnnnnnnnnnnnnnnnnnnnnnggcacgagcggcacgaggaagatggaggtgtctgtcaggagtgaggactgtgcctgtcccctgcacctggccaccaacttggggcttgtactgtgcccgaggttactcagacaggtgcaggacaaagtggtgaccagtgctgtagggatgattgatcgctgattgatctgtatacaggctttaatattgctttattaggtgtatataagaaataaccacgatacttcctattccacattttgctatgttttcagtgtctttggggagggaatattttagagaaataggtttgctatctagtctccagtctttttggttgaactatagtgctgaatgttgaaacccaaggaatctccattgtcaagcaaatgatgctttaa

SEQ ID NO: 32265 - DNA, 463 bp, Homo sapiens
  misc_feature (1)...(463): n = a,t,c or g
gagnntttnanattgaanancnnnnnnnnnnnnnnnnnnnnnnnnnnnnnnnnnnnnnnnnnnnnnnnnnnnnnnnnnnnnnnnnnnggcacgagcatcattatttgataatatttttaaagatagctaaagctgggtgaagtggcacatgcctgtggtcctagctgctgatgggaatcccttgagctcaggagttcaaggactaacctgggcaacatagtgagacttgtccaaaaaaagaaattgcaaaaaatagctaaataaaaatatgattgttacatgtgataattattttgaaaatcaatatttaaaaaaatgacttgttacaaattctaagcctcaaaaattgtgatacttacagtcagcttcttcattaaggtttagttttttaaaaatacaggcttatatttaaaactgagttgattactgatttcaatactataatttattccaaaatgatttt

SEQ ID NO: 32266 - DNA, 461 bp, Homo sapiens
  misc_feature (1)...(461): n = a,t,c or g
agtggttnaacntnnnnnnnnnnnnnnnnnnnnnnnnnnnnnnnnnnnnnnnnnnnnnnnnnnnnnnnnnnnnnnnnnggcacgagccctgctttagatgaagaaaaccaaggcacagcatgattaaattgtgcaactggtatgctgcagaaccaagatttttcatactggtgtgtacatcaaagttttcattatgtagaaaattatacagaagctgtatattgagaagtaaataggtaaacaatcaactgttgagaattaggatacctgagttattaagagatgtgaaaaggattcaggatacaactaatacttattgaatactgctatgcttttaataccctctaccagaaaggagttaggtagagttcaagttcttagaacagtacctgatacataatgtaacaaaatcttactcatcaattactactattaatgntaccactccactaaatcctgca

SEQ ID NO: 32267 - DNA, 463 bp, Homo sapiens
  misc_feature (1)...(463): n = a,t,c or g
ngtgnttganntttgaaaacnntnnnnnnnnnnnnnnnnnnnnnnnnnnnnnnnnnnnnnnnnnnnnnnnnnnnnnnnnnnnnnnnggcacgaggaagtctcatcatggatgttacctcctgagaaagacattctctgaccagcctggccaacgatggccaggagaaatgtagcgnnnnnnnnnnnnnnnnnnnnnnnnnnnnnnnnnnnnnnnnnnnagtgcagcggtacaactatnnnnnnnnnnnnnnnnnnnnnnnnnnnnnnnnnnnnnnnnnnnnnnnnnnnnnnnnnnnnnnnnnnnnnnnnnnnnnnnnnnnnnnnnnnnnnnnnnnnnnnnnnnnnnnnnnnnnnnnnnnnnnnnnnnnnnnnnnnnnnnnnnnnnnnnnnnnnnnnnnnnnnnnnnnnnnnnnnnnnnnnnnnnnnnnnnnnnnnnnnnnnnnnnnnnnnnnnnnnnnnnnnn

SEQ ID NO: 32268 - DNA, 454 bp, Homo sapiens
  misc_feature (1)...(454): n = a,t,c or g
nnnnntgnnnnntttgaatccctnctntgaanaccgtttgacnnnnnnnnnnnnnnnnnnnnnnnnnnnnnnnnnnnnnnnnnnnnnnnnnnnnnnnnnnggnnnnnnnnnnnnnnnnnnnnnnnnnnnnnnnnnnnnnnnnnnnnnnnnnnnnnnnnnnnnnnnnnnnnnnnnnnnnnnnnnnnnnnnnnnnnnnnnnnnnnnnnnnnnnnnnnnnnnnnnnatttttcatgaaaacattgctgccaaagtgaaacacatttgcaagtacgacagatagatattggggagttagtgacttgatagttaatgtttagtgagttttggattactgttcccagatcagaagcaggttcccatagatttgagtaagtggcttaaattattgggtaaactacgaattccagaagaaatctcattgtccctgggcctggtggctgttttacagatgtgg

SEQ ID NO: 32269 - DNA, 458 bp, Homo sapiens
  misc_feature (1)...(458): n = a,t,c or g
gnnnnnngnnnnnttttgaatcccctnctntgaanaccgtnnnnnnnnnnnnnnnnnnnnnnnnnnnnnnnnnnnnnnnnnnnnnnnnnnnnnnnnnnnnnnnnnggcacgaggtaattcacaaaagaagaaatacaaatgtcctctcctcccgccaccaccccccatgaaaaagaacgtgtgacttcagtagcaaaaacaggtccattaatacagtgagatattgcttattgtatgtctgtactgatctatactgggtgctgggcaaacgggcattcttaaacactcctagtagggaagaaattggtacaacctttccggaggacaatttaactgattgatttaaagcccgaaaaatgtacatacctttaactcagcagtttcgttactgatttatcttaaggaagtaatttagaatctgtgcctaactgtttacaataactcatagatgaaaaagg

SEQ ID NO: 32270 - DNA, 456 bp, Homo sapiens
  misc_feature (1)...(456): n = a,t,c or g
gtnnntgnnnnntttggaatccctnctactgaanacncnnnnnnnnnnnnnnnnnnnnnnnnnnnnnnnnnnnnnnnnnnnnnnnnnnnnnnnnnnnnnnnnnnnggcacgaggcagcagagactttaggaaagcatgaaattcaagatagaaatgtcagtcctaaagctgatgtgaaatcttgcaggtagagtcactctagggctcagatggtgacactgttctctatgcagctgggcttcagatattcatagggccagtcaagttgctcattccgggctgtaatctccttttccagcttttccaaatctgttcggaattggtttagcacagctttgggcttggggcctgagaaatatttttctttgtggtgccccagaggcacctgagacagaacaaaggatcagtcagtttctaaagacaaacgcacctagagcccagcccctcactctgatg

SEQ ID NO: 32271 - DNA, 461 bp, Homo sapiens
  misc_feature (1)...(461): n = a,t,c or g
gnnnnnnnnnnnnnngtnnnnnnnnnntntganaccnttattgatgacnnnnnnnnnnnnnnnnnnnnnnnnnnnnnnnnnnnnnnnnnnnnnnnnnnnnnggcacgagaagccacctggctagaagtctgggaggagtggtccgcaactgtaaacccccagcactgcagccggtggcctagaaaggcgtgtggagcaaaaagccagcacacagaagtgttaattacacctgttattctgactttgtagtcctttgccatacttgcgaataacttaagtgaatttgatgttactggaattagtttgcctttattttgccagttgaaaaaaaagatttctaaaaaactcaatgaaacatgattcaacacaggtttcgaagtaaaataagtctggatttgagttctagttctatcacttactagctgtgtgggcctgaacaagttatttaatttcccacagaa

SEQ ID NO: 32272 - DNA, 454 bp, Homo sapiens
  misc_feature (1)...(454): n = a,t,c or g
gtnnnntgnnnnntttgaancccttntntgaagaccgttnnnnnnnnnnnnnnnnnnnnnnnnnnnnnnnnnnnnnnnnnnnnnnnnnnnnnnnnnnnnnnnggcacgaggagattacaggcatgaactactgtgctcggcctaaaatgaagataatttttaaatgtgcatggtagaaaaatgacaaaacaaaacaaaagccaaacaatatagacatgtataaagaagaagaaaggaaaacccccaaattgtgcattcggaaaaacctagttagcattttatatgctgaagagtcggccatgttggggagggtgtactgtggtatttttagattaggacaggaaggggtttggcctcttctagcaaaaactgtagaagaaataatcatactaaattatcctgaagtaagacatttaaaatatttatactacatggaatgctgttaatttagctt

SEQ ID NO: 32273 - DNA, 452 bp, Homo sapiens
  misc_feature (1)...(452): n = a,t,c or g
gnnnnnngtnnntnnnnctntgatacctnatctgagaccntttgacnnnnnnnnnnnnnnnnnnnnnnnnnnnnnnnnnnnnnnnnnnnnnnnnnnnnnnnnnnggcacgagacttataattcatttctttttattttgtggtgtgaaaattgctatactgaaaggtttattgaactcataattttctggattgtggcacaaatattttaatgccatgtatcgcatgcttcctctagaaaacaagcctaaaacacagtgacaaaaccttctcagtagttgagccccaacgggggagggaggaagcagtggaggagtagaggggcctccgggaacccagtggtctgcaggaactaaacgttctttcttaggtccctccaggcactgtgcttttctgaatctcacactaaagggcaattattaacttcttggaggttgaccacccccagattca

SEQ ID NO: 32274 - DNA, 443 bp, Homo sapiens
  misc_feature (1)...(443): n = a,t,c or g
tnnnntnntnntntganaccgntatgacnnnnnnnnnnnnnnnnnnnnnnnnnnnnnnnnnnnnnnnnnnnnnnnnnnnnnnnnnnggcacgagaaacaatagtctagagaagcatttggtaagctttatcgtatatatattttttaaagaagagaaaaacaccttgagccttaaaacggtgctgctgggaaacatttgcactcttttagtgcatttcctcctgcctttgcttgttcactgcagtcttaagaaagaggtaaaaggcaagcaaaggagatgaaatctgttctgggaatgtttcagcagccaataagtgcccgagcacactgcccccggttgcctgcctgggccccatgtggaaggcagatgcctgctcgctctgtcacctgtgcctctcagaacaccagcagttaaccttcaagacattccacttgctaaaaat

SEQ ID NO: 32275 - DNA, 451 bp, Homo sapiens
  misc_feature (1)...(451): n = a,t,c or g
gnntnnnngnnnnnntttgatnccctctncngaataccctntnnnnnnnnnnnnnnnnnnnnnnnnnnnnnnnnnnnnnnnnnnnnnnnnnnnnnnnnnnnnnnnggcacgannnnnnnnnnnnnnnnnnnnnnnnnnnnnnnnnnnnnnnnnnnnnnnnnnnnnnnnnnnnnnnnnnnnnnnnnnnnnnnnnnnnnnnnnnnnnnnnnnnnnnnnnnnnnnnnnnnnnnnnnnnnnnnnnnnnnnnnnnnnnnnnnnnnnnnnnnnnnnnnnnnnnnnnnnnnnnnnnnnnnnnnaannnnnnnnnnnnnnnnnnnnnnnnnnnnnnnnnnnnnnnnnnnnnnnnnnnnnnnnnnnnnnnnnnnnnnnnnnnnnnnnnnnnnnnnnnnnnnnnnnncaatttttcttccantgtggcccagggaagccannaggatggacccctctgctt

SEQ ID NO: 32276 - DNA, 458 bp, Homo sapiens
  misc_feature (1)...(458): n = a,t,c or g
gnnnnnnngnnnnnntnnnntnnnnntntganaccgttntnnnnnnnnnnnnnnnnnnnnnnnnnnnnnnnnnnnnnnnnnnnnnnnnnnnnnnnnnnnnnnggcacgaggccaagaatctgaaggagcttggatgaagaccctgaggctctcaatgagagcccagtccggctgacaccttgtgagatcctgaacaaagaatccagtcatnnnnnnnnnnnnnnnnnnnnnnnnnnnnnnnnnnnnnnnnnnnnnnnnnnnnnnnnnnnnnnnnnnnnnnnncaataatttactaagtagtgatggagaatggacacacctatgaagtatacttgtcaaaaatgtctatcctnnnnnnnnnnnnnnnnnnnnnnnnnnnnnnnnnnnnnnnnnnnnnnnnnnnnnnnnnnnnnnnnnnnnnnnnnnnnnnnnnnnnnnnnnnnnnnnnnnnnnnnnnn

SEQ ID NO: 32277 - DNA, 449 bp, Homo sapiens
  misc_feature (1)...(449): n = a,t,c or g
gnntnnnngnnnnntttggatnccctctntgataccgnttgacnnnnnnnnnnnnnnnnnnnnnnnnnnnnnnnnnnnnnnnnnnnnnnnnnnnnnnnnnnggcacgagcaggaaactatgaaatttttattttctatattatatgtcatagaagttacattcttaccataggatttatgtttttcctatttttccctacatgtgnnnnnnnnnnnnnnnnnnnnnnnnnnnnnnnnnnnnnnnngagggagtttagaaaccatagaaactatatacgcagtatctcttaaatcattttggcaaaaacagataaggttctagtattaccacctcagtctgtaaggacaatttgatctaaagctgtaagttacataatcatttacataagttcaaatcaattacagtgtgcagcaatctcagaaaaggatggtgagatattctcttgtaa

SEQ ID NO: 32278 - DNA, 464 bp, Homo sapiens
  misc_feature (1)...(464): n = a,t,c or g
gagnnnctttgatantgntatgacntnattacgaatntaatacnnnnnnnnnnnnnnnnnnnnnnnnnnnnnnnnnnnnnnnnnggcacgagtctgaactaacaaacattgtgattctttcatagatgtctaatatttactaaacaaatattgggacttgttttcaataccctctttcaaataccccttataacagggttcatatttctcttcctgaatgttatgaggcttcctctttcctgcctaactgtcccaaggcctctcctcctccaatgaccatgtggcaatcatagagggggtcttagatagtattcctgtatcaaaggaagtatgtctaaggaattggaggatgctggtcgttagcctctgattgataagcacttcttatttatttaatttttttttaaaatagagatgggggtttcaccctcttggcaggttggcttgaactcctgcctcaagtt

SEQ ID NO: 32279 - DNA, 179 bp, Homo sapiens
  misc_feature (1)...(179): n = a,t,c or g
agtgncctctgatnnnnnnnnnnnnnnnnnnnnnnnnnnnnnnnnnnnnnnnnnnnnnnnnnnnnnnnnnnnnnnnnnnnnnnggcacgaggtgtctatagattcgccttctctagaaattttgcataaatgtaatcatagaatacgtagttgattgtgtctcactttttttttttttt

SEQ ID NO: 32280 - DNA, 464 bp, Homo sapiens
  misc_feature (1)...(464): n = a,t,c or g
gattnnctttgaaanntgaataccgtnnnnnnnnnnnnnnnnnnnnnnnnnnnnnnnnnnnnnnnnnnnnnnnnnnnnnnnnnnnnnnnnnggcacgagggtaaaaaaaaatacaaattattggtattttgactgtatttttcacaaatatgtactttgggtagagatgctgctgaacctagaagatactctatctggttaggcacgggggtgagataagcctgcaggtgccacagtgtgatggactttgactcctggttctctcgcttgctacctgtgtgatcttggggatgccatttatttcatctctctgagcttcagtattttcatccttaaaatgaaaagaatgatacttcctgctttacagggtgattatgaggatgaaatacgatgataaggattagtatactctcaacaaatggatggtatggtaattaacagagacgtcagtcattttaaattct

SEQ ID NO: 32281 - DNA, 464 bp, Homo sapiens
  misc_feature (1)...(464): n = a,t,c or g
gatggnnctttgancnctgaataccntnnnnnnnnnnnnnnnnnnnnnnnnnnnnnnnnnnnnnnnnnnnnnnnnnnnnnnnnnnnnnnnnnggcacgaggtcaagaaggcattcggtgtcaaagtcgtaatattcacagccaatgtttatggatgccctagtgtgtgtcaggtactctgctaaggacttcctaggtgcaaattcatctcaacctccagggaagtgctgtgttatccccattttccagatgaaagacatagggcacgggggaactgaaccacttgtctggggaagtggaggggcgggagtcaaacctagattcttacccctgcatctagggtgtgtgatgggaaatgagactgagtggggacaggtcctcatagggagggctcaaatcttgactgtcctcctgctggagtcccttagatggtcccgggatggacagggtggggaagttcatggc

SEQ ID NO: 32282 - DNA, 454 bp, Homo sapiens
  misc_feature (1)...(454): n = a,t,c or g
gnnnntttgannttgaanaccgntatgacatgattacgaatttaatacnnnnnnnnnnnnnnnnnnnnnnnnnnnnnnnnnnnnnnnnnggcacgagccaacatctttgtcatcttagtgttaccatctgttgattgtctttcctcattcagattttttctggtttttagtatgaggagtaatttttctgggttcagatttttctggttcttagtatgaggaataagttttaactttatcctggacactttgagtgttatgttatgaggctgtatgtagttcctgtataaatattctatattagcaggcactcaacctgtttagattcgggttgcactttctgtggccagcagggctctggttctaagatcaatttagttttctaagtttttgcagagctcttctggcctcccacacctgtgtgcaacccagaggccaatttgtttttttgttg

SEQ ID NO: 32283 - DNA, 458 bp, Homo sapiens
  misc_feature (1)...(458): n = a,t,c or g
agagtgcctcnnaacnttatgacnnnnnnnnnnnnnnnnnnnnnnnnnnnnnnnnnnnnnnnnnnnnnnnnnnnnnnnnnnggcacgaggaggacgcaaggagggtttgtcactggcagactcgagactgtaggcactgccatggcccctgtgctcagtaaggactcggcggacatcgagagtatcctggctttaaatcctcgaacacaaactcatgcaactctgtgttccacttcggccaagaaattagacaagaaacattggaaaagaaatcctgataagaactgctttaattgtgagaagctggagaataattttgatgacatcaagcacacgactcttggtgagcgaggagctctccgagaagcaatgagatgcctgaaatgtgcagatgccccgtgtcagaagagctgtccaactaatcttgatattaaatcattcatcacangtattgcaaa

SEQ ID NO: 32284 - DNA, 457 bp, Homo sapiens
  misc_feature (1)...(457): n = a,t,c or g
gngnnncttganatctgataccgtttgacnnnnnnnnnnnnnnnnnnnnnnnnnnnnnnnnnnnnnnnnnnnnnnnnnnnnnnnnnnggcacgagatttaaaaggacattagcgttcataaagttagagatatcaagaacatatatacatggcagaagatgatgctataaagttagactaggaccgcatcattgttaaaaaagcaagtttttattctgaagttaatgggcaatcatggaacatctgtaaacaaggagagagatgttcagacttgccttatacagcaggtgttcgtctgacttctgtttgtacattcatagctatagagagctcattccttaccaaatctgcctgttccaggaaaaagaagtacttcctcaacagagctggacttttccttctgtgatacatatttgttggtaatcctgaccttaggaataacatcagccttctttat

SEQ ID NO: 32285 - DNA, 457 bp, Homo sapiens
  misc_feature (1)...(457): n = a,t,c or g
agagtnccnctganacctgnnnnnnnnnnnnnnnnnnnnnnnnnnnnnnnnnnnnnnnnnnnnnnnnnnnnnnnnnnnnnnnnggcacgagttttgtagtgacatgctttgattcccttctcatttccctttgtgtatattttgtaggtattttctctgtggttaccactgcaattacataaaacacctaaacattgtaacatcctatttgaaacagctaacaacttcattcatgtataaaaactctactcctttacatctctgcccccctccactttgtaattaacacaattttctctttttataatgagtatccattactcagatatataattactttttacacttttgttttttgtattcaaaactggtacctgnnnnnnnnnnnnnnnnnnnnnnnnnnnnnnnnnncagagggttnnnnnnnnnnnnnnnnnnnnnnnnnnnnnnnnngacc

SEQ ID NO: 32286 - DNA, 460 bp, Homo sapiens
  misc_feature (1)...(460): n = a,t,c or g
gancncctttgatnntnngataccctnnnnnnnnnnnnnnnnnnnnnnnnnnnnnnnnnnnnnnnnnnnnnnnnnnnnnnnnnnnnnnnnnggcacgagaactggaagacattctccttctacaccagtgggagttctcttttgaggaatcagaagtataactggtttcacagtttcttgtgtttgataaccttgaagaaaactatttaattgtgaatcagtaacagaaacttcattcttttttaaaaaaagaccattttcctccaatagtattggagaatggaaaatcgggctttctggagtcaggatatcaaccccatgtgaatcactgctttgtttcatagtacctacagtcttaaggtccaaatgatctatcttagtcgctcctaaagggtgctgttcagcaggaaaaggaatgtgacactccttctgaaaagagttcattgagttctgntggact

SEQ ID NO: 32287 - DNA, 453 bp, Homo sapiens
  misc_feature (1)...(453): n = a,t,c or g
nnnctntnanaccgttatgacnnnnnnnnnnnnnnnnnnnnnnnnnnnnnnnnnnnnnnnnnnnnnnnnnnnnnnnnnnggcacgagaaaaataaaaataaaaataaattgaaaatttttaaaaatatatcttgctcttacctagcaattcttataaagttttagtaaaggaagttgaacttggaagcttacaggatgtttggttattagtaatttcccttttatctggcaccgagtttaccaagaagaaggaagaaacaaatatcagttgtgtgccaggaactttgtataaaagcattcccacatgccatgtgattaatctgctccacacttctctgctttttacaaaggaggcaactgaagttgagggagttaaataacttgcccatgatcactcaattaataaataacaaacctgggattaaaattcagatttgtccagcttcaaaggat

SEQ ID NO: 32288 - DNA, 454 bp, Homo sapiens
  misc_feature (1)...(454): n = a,t,c or g
gagnnncttgacnntgataccctttgacnnnnnnnnnnnnnnnnnnnnnnnnnnnnnnnnnnnnnnnnnnnnnnnnnnnnnnnnnnggcacgagcacatataacaatatataatatatattgctaataatatgtaatttaatatttcaagaaaagcctgaccatataaaagtgttaaaatattggactataatactgagactcctaaataatatgtaactactatttccaagatgatataaataggagtcttttatcttctggaataattcttcttttcgtcattttactactaattatttgataacccttatttgtgttttagctgcatattaaaatgagtggcaaattaatatagatataatgatttggcagtgttgaataaggctttttcttttcttcacccaaagtgattgtatttaaaatgcatgttaatcaaaattcagtgactcatc

SEQ ID NO: 32289 - DNA, 459 bp, Homo sapiens
  misc_feature (1)...(459): n = a,t,c or g
gannnnnctttgannnctgataccgtnnnnnnnnnnnnnnnnnnnnnnnnnnnnnnnnnnnnnnnnnnnnnnnnnnnnnnnnnnnnnnnnnggcacgagaaacatctcagagcctgtttgagtattgatggcatagtcacagatactccatttcctttctagggaagtctgcctgcattaccacgtaaccccaagccagaagtgtaaccacttttctctgacttgcattgagcttttgttatcctcttttaatatttcattctgtagtagtctgtatttatgtgttttccttattaagaagtgnnnnnnnnnnnnnnnnnnnnnnnnnnnnnnnnnnnnnnnnnnnnnnnnnnnnnnnnnnnnnnnnnnnnnnnnnnnnnnnnnnnnnnnnnnnnnnnnnnnnnnnnnnnnnnnnnnnnnnnnnnnnnnnnnnnnnnnnnnnnnnnnnnnnnnnnnnnn

SEQ ID NO: 32290 - DNA, 456 bp, Homo sapiens
  misc_feature (1)...(456): n = a,t,c or g
gagnnnnttgaatntgataccgttnnnnnnnnnnnnnnnnnnnnnnnnnnnnnnnnnnnnnnnnnnnnnnnnnnnnnnnnnnnnnnnggcacgagtgattccatcacgagaatatcttgagtgaggacacagatgatgtgtgttcacatggccctgctccccatggcctccctaatgcttaatgccgtccttgcattgggtcagtgagtggaagaggaatcactccacctcctcattagtaggaaaacccaggtgacactggaacaggttacgttctagtttctccaaaggtaattcaatggacctcgtttggaatactctggtggaggtcagatctgaaatggaagcttctcccatgctttgtgatctgagccatgatctgtccgctcacctgtttctcacttttcccactccaccctgtgtctcatgatgacgtttgcttttcctcccgactca

SEQ ID NO: 32291 - DNA, 458 bp, Homo sapiens
  misc_feature (1)...(458): n = a,t,c or g
ggtgnnttgnnttcgataccgntatgacnnnnnnnnnnnnnnnnnnnnnnnnnnnnnnnnnnnnnnnnnnnnnnnnnnnnnnnnnnggcacgagctggaagatgacaatgtgattacagagttcatttggaattgtaaatgtgaatagctgagagcatttttaaattgaagaataatgtggcaggtcctgctgttcaaatactaaagcctagtttataatgctacaataatctaaatagcataatattaaagagagaaatataaaataaattaaggaaacagaacaaagtccagaaacacatctatgaatgtgtgggaattttatatatgataaaataatannnnnnnnnnnnnnnnnnnnnnnnnnnnnnnnnnnnnnnnnnnnnnnnnnnnnnnnnnnnnnnnnnnnnnnnnnnnnnnnnnnnncaatgntgnataaccatcaccactatctattt

SEQ ID NO: 32292 - DNA, 460 bp, Homo sapiens
  misc_feature (1)...(460): n = a,t,c or g
ggtgnnttgnnttcgnnaccgctatgacnnnnnnnnnnnnnnnnnnnnnnnnnnnnnnnnnnnnnnnnnnnnnnnnnnnnnnnnnnggcacgaggaaacaacgatcctaatttcatgtgaaaaagaatattttaataataacaaaaagggtgggtggggggacaagctcaccctagagcaaaggacagtcttttaaattatataagcttagctttagttaaaaacttgactcttcagtcttgtttctaccattctaatagaaaccagtgatgcctgccacttatttgagtgtatatggctcatttcccatcctccttataagctctggattctgnnnnnnnnnnnnnnnnnnnnnnnnnnnnnnnnnnnnnnnnnnnnnnnnnnnnnnnnnnnnnnnnnnnnnnnnnnnnnnnnnnnnnnnnnnnnnnnnnnnnnnnnnnnnnnnnnnnnnnnnnntaaa

SEQ ID NO: 32293 - DNA, 460 bp, Homo sapiens
  misc_feature (1)...(460): n = a,t,c or g
ggtgtnttgnattcnataccgtttgacnnnnnnnnnnnnnnnnnnnnnnnnnnnnnnnnnnnnnnnnnnnnnnnnnnnnnnnnnnggcacgagnnnnnnnnnnnnnnnnnnnnnnnnnnnnnnnnnnnnnnnnnnnnnnnnnnnnnnnnnnnnnnnnnnnnnnnnnnnnnnnnnnnnnnnnnnnnnnnnnnnnnnnnnnnnnnnnnnnnnnnnnntaataataataataataataattgggaggaaataaagtggttaagaagagaaaaaaaaaaaaananggtccttgnttcccnttnacnttnnggccntnatngtaagtttcntganccntttccagccacgngnaactgggagtcanttaaactttttcntttataaattncccannntgggccaggtgcgggggctaaagcctgtacccagnanttngggaggntgaggcgggtggatcacaaag

SEQ ID NO: 32294 - DNA, 456 bp, Homo sapiens
  misc_feature (1)...(456): n = a,t,c or g
ggtgtctttgatccttatccatgacnnnnnnnnnnnnnnnnnnnnnnnnnnnnnnnnnnnnnnnnnnnnnnnnnnnnnggcacgagcatcatgtaaaacaaaaatcattacatattttgatagaaatccatcagttattttagcaggttgttggtggtggaaatagtaggaattctggttaagtggagtttccacataattaaagcgtaacattaacagttggaatacaacttgtaatcatttcaagtgaaaatttcttaaatatatttacagttccctgctgtagtaaacataaggaatagagtgtaacttctctgcagtggttatgtttaagaaaatctgttactctgctgtantgtggtgcttgagatattctaaactctttgccactgcattaaacgtgattctagtggngnttcttctgcatctccctcttggctgccttcattctgctgc

SEQ ID NO: 32295 - DNA, 449 bp, Homo sapiens
  misc_feature (1)...(449): n = a,t,c or g
tgaaaatcnttatgacnnnnnnnnnnnnnnnnnnnnnnnnnnnnnnnnnnnnnnnnnnnnnnnnnnnnnnnnnnggcacgagaaaaatgtttgagtccttttttaatatgtggatctctctggtactgtttttagataaataaaagagtagcctagaagaatacataaatcaaaaactgaccaattcagaattaaatgagatagtcccagcttgaattaataccagtctttaaaaaaataaatgtgagtttttacttttaattataaaaggtaatctaaattaccttaaactaaggtaattgccaagaccagttatggtagatttacttttataaatataataattgtaaaataaatattgtttataagcaaatagatgcagctaaagtcctttttaaaggctcacagaaagctttccaaagatgattaaatattctctaaaatctatt

SEQ ID NO: 32296 - DNA, 456 bp, Homo sapiens
  misc_feature (1)...(456): n = a,t,c or g
ttggaaattcgaananccttatgacnnnnnnnnnnnnnnnnnnnnnnnnnnnnnnnnnnnnnnnnnnnnnnnnnnnnnnnnnnggcacgagcattcatttccttattttctcaatcaatatgtttgattatgtattaagtattttgttaggtgctatgggcacaaaaataaatttaatgtagtctatgcccttgaagagatcagattctaatgatagagatgaacaactaaacagataattaaaatattgtttgaaaagtgctgtgatagagatacgaacaaggtgtgccggattagagatcaaacagtcaacttcatatgtgtctgacaaaaagtttttttgcagcctttgaagtgcttttaagccttgcaggaaggttatcttctatgccaggtggagaaagtattagggagagtatttcatggattgggtagagtatgtgctcaaatttaaag

SEQ ID NO: 32297 - DNA, 451 bp, Homo sapiens
  misc_feature (1)...(451): n = a,t,c or g
tttgaaaatcctnnnnnnnnnnnnnnnnnnnnnnnnnnnnnnnnnnnnnnnnnnnnnnnnnnnnnnnnnnnnnnnnnggcacgagcggcacgagaataaatattaaaacacacggaaatgtattttcctggctgcagcacctgccatcttgcctcggtaggactcattttcaaaaacagcagcttcttgaagccccagaacgcattcctgtgctacggaagacggaagagtagctctcggggtcagaaggcgaaggtcagaaggccgaattggcgggagaataggtttggtggtccgagatccgaggcaacggtggctcctcgaggtccacggtcccgggtgaggggcgttgggatttgttgatggggaggggagtgccgagagggaggagggtggccatcaaggaaatgaactgagcacctgttcccgatgaactgtgaaagcagcggtg

SEQ ID NO: 32298 - DNA, 449 bp, Homo sapiens
  misc_feature (1)...(449): n = a,t,c or g
tttgaanancntnnnnnnnnnnnnnnnnnnnnnnnnnnnnnnnnnnnnnnnnnnnnnnnnnnnnnnnnnnnnnnnnnggcacgaggaggctagcaccatgataccctgaaaagcattatatcatatactccaagagagtgagatgaatatttgaaaccagagataaacttaatgccacacattaaaatagcacttttcaaaaacagtgagattatctcctttgctcttcatcctcacccagtggggtagatgggacaccaaaaggaggaaactaagtaataatcaacttgcccaggtggctacagagatagtttttggaaaagctacaatacaacctagaattcctgattttcaattctgataagtcatttgacagtagccaaaagttaataagaaaatagtttttaacatgacttacatgggcctttcatttcatgggaaattaaaac

SEQ ID NO: 32299 - DNA, 449 bp, Homo sapiens
  misc_feature (1)...(449): n = a,t,c or g
aaatcnnnnnnnnnnnnnnnnnnnnnnnnnnnnnnnnnnnnnnnnnnnnnnnnnnnnnnnnnnnnnnnnnnnggcacgagagtctttttatgtagtatcatgaaagtggggtgcccctggttcccacaggaggatgagattggcttgtttgaataattatataggttggcaaggaactgaaactcaatatttaagcataagcagaaattgtgcctggtcgctttgataaagagtatttggttaagggaccctctctgtggaagtagagtggggaggagaacttgtggttaggctgttcaaagtcctcccggttttaccagaatcaaggcagtacataatattgaacctcaattctaggccatatacctccccatttattttctaatattcacagaggcatgtgtgtctgtgagtgtatctttttgatcataaataagattttttttttt

SEQ ID NO: 32300 - DNA, 458 bp, Homo sapiens
  misc_feature (1)...(458): n = a,t,c or g
ggnggncttgaacttngagancgtnnnnnnnnnnnnnnnnnnnnnnnnnnnnnnnnnnnnnnnnnnnnnnnnnnnnnnnnnnnnnnnnnggcacgaggttgtttctttgttctgatacaagcagtctttgaatttggaatattacaatggtaggtatttcaacaccctaaacacgcttccctgtttgtagtgcctccctcgtcacgtgtccctccccttcatgactttgccatgtgctccgtgtttagacgttagatcagatgtgcatcccattacgtgcatgcccacgagtctcctgtgtctcttccccccttctctgatgccaatacgagagatcggtgaagtgcctcgtgttgaccccagcacacattagaggagagagggcctgagagtattccctgagagggagccacacagacagccctctgcctgtggaatgagggatttgggggcgagtt

SEQ ID NO: 32301 - DNA, 458 bp, Homo sapiens
  misc_feature (1)...(458): n = a,t,c or g
gtgnnnttganacctnnnnnnnnnnnnnnnnnnnnnnnnnnnnnnnnnnnnnnnnnnnnnnnnnnnnnnnnnnnnnnnnnnggcacgagagatnnnnnnnnnnnnnnnnnnnnnnnnnnnnnnnnnnnnnnnnnnnnnnnnnnnnnnnnnnnnnnnnnnnnnnnnnnnnnnnnnnnnnnnnnnnnnnnnnnnnntatccaacctctcaatctttactaccaccctatggcataggtcctaccccttttactgatgaaaaaactggaacacaggcacattaaacatattgctctaggttacaaaccagtaagtggtagaaccaggatgaggaatcagcaaagaggaaaaaaatccctttttgttaataggtttgtgtagattttttcaatataatttgggcttccttgaaacaaaccatctgacttctcaacacgaacttgtaaactcatcctattcct

SEQ ID NO: 32302 - DNA, 455 bp, Homo sapiens
  misc_feature (1)...(455): n = a,t,c or g
gtggncttgaaacctnnnnnnnnnnnnnnnnnnnnnnnnnnnnnnnnnnnnnnnnnnnnnnnnnnnnnnnnnnnnnnnnnggcacgagctttacccctttgctttttggcaataacccttgtgcagagccaaccccattctcctgacctaaccagttctcacctggccatgcggcctttccgggtgtcaggcaggtctctccggttaggtaagggaggcctcatccttcttacctgactgctctgagtgcagatctatgctgcttcccatcttctccaggagcctgatctattaccttgggcttggaacgcacctaacaaaggctaccatgaggaggcccctcggtacctgttcatctggacacatcgtgcagacccccgcaccccgtgtggctcccggttaatcttcagggtgcaatcaatttcttcctcagaggccagacttcattgtctaac

SEQ ID NO: 32303 - DNA, 459 bp, Homo sapiens
  misc_feature (1)...(459): n = a,t,c or g
ggtgnncttgaanntctnnnnnnnnnnnnnnnnnnnnnnnnnnnnnnnnnnnnnnnnnnnnnnnnnnnnnnnnnnnnnnnggcacgagtttaagttaaggactgctgacagaagtgtcaaggtcaggtgtcatcacagaatggccttccagcatagtgttttcttggtgacttcctcatggctacagtctgaccctctacttgcagcccagagccaacatactctgggcagtcttgtttaagctgcgtggatacacaagaaactgaagtatttgtttaagtcagaatgtcactttagtaagttgtgtgataatactgactggtagactccctatattgaaaagattttttatctaatttgataggctatgtattatttctgcagagacctatcaaattagataaaaatattttaaatactaacagttatggacattcctatataaaacagatgtgactg

SEQ ID NO: 32304 - DNA, 462 bp, Homo sapiens
  misc_feature (1)...(462): n = a,t,c or g
gggnnntttgannttggatancnnnnnnnnnnnnnnnnnnnnnnnnnnnnnnnnnnnnnnnnnnnnnnnnnnnnnnnnnnnnnnnnnnnggcacgaggatttggctattattggaccatctttttgtattatttatacccatcttccttgaaaaaggatttgtggcagctattaaatcatatgcttcattatccttaataaatcaccttggtagagcagacaatggattattgtacagatggttagtttctatgagaaattttttaaaatatgcataatcttggcctcattttgagtgatattttatttcaaggcttttaaaaacgatagaaacctttaaaaagtataccaaactgctcagtgactattgttcatattaaataaaaaatatgcttagtaaaaggaatgtaaatgtgattaacaattttttaaaatatattaagaggcctggtaccttttctg

SEQ ID NO: 32305 - DNA, 458 bp, Homo sapiens
  misc_feature (1)...(458): n = a,t,c or g
ggtgncttgaanccnttgacnnnnnnnnnnnnnnnnnnnnnnnnnnnnnnnnnnnnnnnnnnnnnnnnnnnnnnnnnnggcacgagagcaaagtcttttagtctataaaactatttaagagtacaaatggtttcatttaaaattcaatatcaaaacacttaatccttgcatgtgtaaagatgaaagaagtaccattctattacagtattatataattaaaataactaactgagacatactgtggcttgtagttttcatgaaacgtcccttgttcccaccaccatgaaatgacattttnnnnnnnnnnnnnnnnnnnnnnnnnnnnnnnnnnnnnnnnnnnnnnnnnnnnnnnnnnnnnnnnnnnnnnnnnnnnnnnnnnnnnnnnnnnnnnnnnnnnnnnnnnnnnnnnnnnnnnnnnnnnnnnnnnnnnnnnnnnnnnnnnnnnnnnnnnnnnnnnn

SEQ ID NO: 32306 - DNA, 465 bp, Homo sapiens
  misc_feature (1)...(465): n = a,t,c or g
ggtgncctttnanntttnataacnnnnnnnnnnnnnnnnnnnnnnnnnnnnnnnnnnnnnnnnnnnnnnnnnnnnnnnnnnnnnnnnnnnggcacgaggaagtgtttacatcaaaagaagaagcaaactttttcatacatagacgccttctgtataatagatttgatctggagctcttcactcccggcaacctagaaagagagtgcaatgaagaactttgcaattatgaggaagccagagagatttttgtggatgaagataaaacgattgcattttggcaggaatattcagctaaaggaccaaccacaaaatcagatggcaacagagagaaaatagatgttatgggccttctgactggattaattgctgctggagtatttttggttatttttggattacttggctactatctttgtatcactaagtgtaataggctacaacatccatgctcttcagcccgtctat

SEQ ID NO: 32307 - DNA, 411 bp, Homo sapiens
  misc_feature (1)...(411): n = a,t,c or g
ttgaaatttnnnatgacnnnnnnnnnnnnnnnnnnnnnnnnnnnnnnnnnnnnnnnnnnnnnnnnnnnnnnnnnnggcacgagcacccacatcaagaaaagtctattgannnnnnnnnnnnnnnnnnnnnnnnnnnnnnnnnnnnnnnnnnnnnnnnnnnnnnnnnnnnnnnnnnnnnnnnnnnnnnnnnnnnnnnnnnnnnnnnnnnnnnnnnnnnnnnnnnnnnnnnnnnnnnnnnnnnnnnnnnnnnnnnnnnnnnnnnnnnnnnnnnnnnnnnnnnntaacaatcatttattatgtctcctggtaattgggggggactggcacattcattcccactcctggaccaagttgacaaccccagcttggcttggcttctgactgacccatttccctttctctcccatatgt

SEQ ID NO: 32308 - DNA, 407 bp, Homo sapiens
  misc_feature (1)...(407): n = a,t,c or g
anaaccgntatgacatgattacgaatttaatacnnnnnnnnnnnnnnnnnnnnnnnnnnnnnnnnnnnnnnnnnggcacgagtactttccttccactggccagcattctcctctattagactagaactgtggataaacctcagatgtgaatttcttcggagtaagaaatcctcagaggaaattacccagtatattcaaagctacaagggatttgttgacataacgggagaacattttgtgaattcctgggtccagagagaattacctatggcatcagcttattgcaatgacagcatctttgcttacgaagaactacggctggactcttttaaggactggccccgggaatcagctgtgggagttgcagcactggccaaagcaggtcttttctacacaggtataaagga

SEQ ID NO: 32309 - DNA, 409 bp, Homo sapiens
  misc_feature (1)...(409): n = a,t,c or g
anaccnnnnnnnnnnnnnnnnnnnnnnnnnnnnnnnnnnnnnnnnnnnnnnnnnnnnnnnnnnnnnnnnnnnggcacgagccgctccttaaactcctttgaatgactcccaagctgttttcttgtccctccccctcccctcagactccgcacaaagagcgcccccataacttccagcccctagacaagtttttttaaaaaacgagtctcaccaaatgtttgcttcacttcagcagccctcttcaggtgacagagtttctttcctctattttgagggttatctttttcttttcttttcctttcttttttttttttnanccgnggganaaanncngggggcctttnttngttacccnngccnaaatccggnagctnaaangcngaggcttttaaaantttnntttnccctc

SEQ ID NO: 32310 - DNA, 413 bp, Homo sapiens
  misc_feature (1)...(413): n = a,t,c or g
ttganatntgaaaccttatgacnnnnnnnnnnnnnnnnnnnnnnnnnnnnnnnnnnnnnnnnnnnnnnnnnnnnnnnnnnggcacgagcagaatgtttgggttttgcaacatctctaaactgagatgatacgaaaacacctacccaacaaagctgtttctaggatttaagaaagcgtttttctataagagtgctataagatggagcccaggaccaaaatacatcaaagcgtgtagatgttaaatggagctaagtcccaaattgggtgactaaaggaaggtgtaatgatggaatcctgggtgcttctaatggaccaccaatttggaaaacaaaatttagaaatcgatctgtgagatcctgagagaacgagaccattgatataatatgatctccagtttcancctgtgcnaggat

SEQ ID NO: 32311 - DNA, 418 bp, Homo sapiens
  misc_feature (1)...(418): n = a,t,c or g
tttgaaatncgttnaccgttatgacnnnnnnnnnnnnnnnnnnnnnnnnnnnnnnnnnnnnnnnnnnnnnnnnnnnnnnnnnnggcacgagtgtcatgtttcattgcttttcatcttgaatccctgtgttgatatctgagcatctggtggaacagttgcctattccaattttgtagaggggctttcgttggggaagactttcacctgcagatgtgttttagggtctcagttgggtggggtatgatgctttgttttgaaggggtancatancgtantctccatgcagtnttttcagntgtantcagtgttgncaaatgcctgcaagtgtctcagtggnttaagctgcagagntgtgtgaggctggcctacctactcagggtctcctcccttganagtngggcacttgnctggntaatgg

SEQ ID NO: 32312 - DNA, 415 bp, Homo sapiens
  misc_feature (1)...(415): n = a,t,c or g
atcgntatgncatgattacgaatttaatannnnnnnnnnnnnnnnnnnnnnnnnnnnnnnnnnnnnnnnnnggcacgagaaaatgtctctggaatccccttatctctaccttatctcaactggacatgccagagcaccctcttctggcctccaaaatgctacgccctgcatggcaaccaacacctgagnnnnnnnnnnnnnnnnnnnnnnnnnnnnnnnnnnnnnnnnnnnnnnnnnnnnnnnnnnnnnnnnnnnnnnnnnnnnnnnnnnnnnnnnnnnnnnnnnnnnnnnnnnnnnnnnnnnnnnnnnnnnnnnnnnnnnnnnnnnnnnnnnnnnnnnnnnnnnnnnnnnnnnnnnnnnnnnnnnnnnnnnnnnnnnnnnnnnnnnnnnnnnnnnnnnnnnnnnnnnnnnnnnn

SEQ ID NO: 32313 - DNA, 467 bp, Homo sapiens
  misc_feature (1)...(467): n = a,t,c or g
ngtgnttgaaacntcttgacatgattacgaatttaatacnnnnnnnnnnnnnnnnnnnnnnnnnnnnnnnnnnnnnnnnnggcacgagtggggctcaaagattgcatgaaggcgtctcaacccctctttgcctcttgaggtcttgtggagatagggaaaatccagtgttttttctactctcaaatgccactcagcagagagcgcttcacttctggtcaaccgaatgggtggggatttctacgcaccaacaaccagtttttcagtggccatctaatagttttctatgatgcctttctgatattatgtatctggaattagagtcagatcccacaggcaaagggctgagttcccaaacacgtcccctacctcagcaaccaatcacaagtagcaggttgtcacctttccttcttaccaaccagctacaggttgggggtccctcaagccccttcttggggttgatacttttg

SEQ ID NO: 32314 - DNA, 449 bp, Homo sapiens
  misc_feature (1)...(449): n = a,t,c or g
nnnnnnnnnnnnnnnnnnnnnnnnnnnnnnnnnnnnnnnnnnnnnnnnnnnnnnnnnnnnnnnnnnggcacgaggaacaagatacatatgggaaaattaaatgaaaactgaaaacattttaggagaaaacataggtgaagtatttggtgtaggcaaagattccttagatatgtcaccaaaagcatgaaccataaaagaaaaaaatgataagttgttctttatcaaagttaaaaactttagctattcaaaacataccatttaaaaaattaagaaccaagccacagtatggcagaattacttactgtacataaatctgacagaatttatgtccagaatatgtaaagaactcttagaattcagtaataagaatacaactnnnnnnnnnnnnnnnnnnnnnnnnnnnnnnnnnnnnnnnnnnnnnnnnnnnnnnnnnnnnnnnnnnnnnaaac

SEQ ID NO: 32315 - DNA, 284 bp, Homo sapiens
  misc_feature (1)...(284): n = a,t,c or g
ngtgnttgaaaccnnnnnnnnnnnnnnnnnnnnnnnnnnnnnnnnnnnnnnnnnnnnnnnnnnnnnnnnnnnnnnnnnnggcacgagcaggatagggcagtcctccgcttctggtcctccagaagtggactaactaacatctcctccaaagtcattcttcttccatgtttacggtgacctctgtgttctaatcctcggagaagccctaagctgagctcacgggagctgggagaccctgctgccaagctgagtctcaccatctttggcccatttttttttttttt

SEQ ID NO: 32316 - DNA, 469 bp, Homo sapiens
  misc_feature (1)...(469): n = a,t,c or g
agagttctnaacnnnnnnnnnnnnnnnnnnnnnnnnnnnnnnnnnnnnnnnnnnnnnnnnnnnnnnnnnnnnnnnnnnggcacgagaattagtaatatccctatccactcaattcaataatgaagaaattacagaagtttctgagaaatgaggtgactctaatagtgttacacactgtacacaatcaaaagacaacaggaaattctaagagaaaacatgttgcaagtcaataaggactgtcaaaattgattttccatagaaaaaatacgatgtacacttctgacaagtaaacttaatagcctacattttaaagaaatgacaacctatattaagtcaaaaaatatttattgagcacctttgttagagaccttttaattagacaatgacacacggtactgattaagaaaatcatatctaacatttaatgaatgcctacaatgtgccaggtactgnattaagcatttaaatg

SEQ ID NO: 32317 - DNA, 469 bp, Homo sapiens
  misc_feature (1)...(469): n = a,t,c or g
agtgnttggacntctnnnnnnnnnnnnnnnnnnnnnnnnnnnnnnnnnnnnnnnnnnnnnnnnnnnnnnnnnnnnnnnggcacgagaaaaattactatcagctcacccttatctagcacattccagttaggtattattattgtctaattttacagacagggaaactgaggccaggagaggttatgtttcttgtccatgatttcaaggtagtcaaagtagtagaagcagtatttgaaccaaacaaggtgactccacagtgttccagcagctctcaactgctagatattcaaatatgacccctttcccgtgaaacttgaggccccccgccatctggcttcaatgtacatttccaaccacacctcattcctgtcacattcctcgtctgctcccatttaccccaatttctcatggttccctaggccttcctagctccccagggaaagcctttgctgnttcccttgctttcttt

SEQ ID NO: 32318 - DNA, 469 bp, Homo sapiens
  misc_feature (1)...(469): n = a,t,c or g
agtgnttganntttganaacnnnnnnnnnnnnnnnnnnnnnnnnnnnnnnnnnnnnnnnnnnnnnnnnnnnnnnnnnnnnnnnnnnnggcacgagctagatagactggaccattgatatttttcacatagaattatttgagactgcatgacctcgacttcagataataccatgattgtctttggggttcattgggtagactcttgcctctctgagtgggtggtggaggttcctctgggcattagtggtccttttgtcagtcatcctgttgtcagagtacacctgacttctgggagtgatttctcttcatcttggtaaactggtcccttccacgtaggggcaggccaggaaataggcagagtggtgccctttcatccatgtgtgagtgcccacctggctgttaatagtatggctggagcatgggtaccttgaaggacaagtggagaaaaggtagcgganaaagtgcctgc

SEQ ID NO: 32319 - DNA, 450 bp, Homo sapiens
  misc_feature (1)...(450): n = a,t,c or g
tgaaacttgtatgacnnnnnnnnnnnnnnnnnnnnnnnnnnnnnnnnnnnnnnnnnnnnnnnnnnnnnnnnnnggcacgagctggaagaataatcatcagtttagaatcatattaaattaagcagatataaatatgaagaaaaaattcaggactaggaaaaacggtaagaagtacacactagcacagatagttgataggagaaaatagtaaagcagcagatacgtgtgacatgaggtttatttataacttagccccacaagaagatgcagttaaatatctgtgttagtggaaattaattagaaggtcacaaaaatgtttttgagttaaataattttagagtcaagactcaacaatacagcagtgtcagaaataggtgtcaaaatcctatcattattggaagaaatattattagttcaaacctactgcaataatctattttctggntcatc

SEQ ID NO: 32320 - DNA, 413 bp, Homo sapiens
  misc_feature (1)...(413): n = a,t,c or g
gagnnnnttganactnctatgacnnnnnnnnnnnnnnnnnnnnnnnnnnnnnnnnnnnnnnnnnnnnnnnnnnnnnnnnnnggcacgagggctgcgagagtcggcgccttcctcaagaatgcctgggacaaggagccagtgctggtcgtgtccttcgtcgtcgggggcctcgctgtaattctgcccccattgagcccctacttcaagtactccgtcatgatcaacaaggccacgccctacaactacccagtgcccgtccgtgatgatgggaacatgcccgacgtgcccagccacccccaggatcctcagggccccagcctggagtggctgaagaaactgtgagcacctccactgacagaggcggcccctcccacggctcccaataaaaatgtgaaaaccaaaaaaaaaaaaaa

SEQ ID NO: 32321 - DNA, 458 bp, Homo sapiens
  misc_feature (1)...(458): n = a,t,c or g
gagnnnnttganacttntatgacnnnnnnnnnnnnnnnnnnnnnnnnnnnnnnnnnnnnnnnnnnnnnnnnnnnnnnnnnnggcacgagcaagaattgctaaatttctctcacttagatgtaatctttttattgcgtacccaccccatcccagttaagctgagtcacacgaacataattgtcggtcataaattgaggagcaacgacatagtcacccatattagggcaattttctaacaagacataatccactacagtgaaactttctttggcaaaatcatccatggtgcacgagcaggggcttgcagcccatgagcctcagatgcaggctaccactgctgccacctccagttcttcatgtcagccagatggcaggagggagcaagtgggcctattacagnnnnnnnnnnnnnnnnnnnnnnnnnnnnnnnnnnnnnnnnnnnnnnnnnnnnnnnnnnn

SEQ ID NO: 32322 - DNA, 452 bp, Homo sapiens
  misc_feature (1)...(452): n = a,t,c or g
nttgnaaacttntatgacnnnnnnnnnnnnnnnnnnnnnnnnnnnnnnnnnnnnnnnnnnnnnnnnnnnnnnnnnnggcacgagnnnnnnnnnnnnnnnnnnnnnnnnnnnnnnnnnnnnnnnnnnnnnnnnnnnnnnnnnnnnnnnnnnnnnnnnnnnnnnnnnnnnnnnnnnnnnttttgtgaaaataatagcattacctatatttctgtgcctcgctgttttctagctaacatttccttagagctcactgaggggctgctggccgttctgtgttgctgttcgtgcgtgtcttgtcctctagcactgctgcgtggcaccccatcacgtgggggggtctgtgtccctggtggtgggcatggccactgcttgtctctctgaagggagtctgagcagggcccttcagcccctccttggctcgcttgtcccccgaggccccagatgctgtataa

SEQ ID NO: 32323 - DNA, 459 bp, Homo sapiens
  misc_feature (1)...(459): n = a,t,c or g
gangggcntcnnaantnttatgaccttacnnnnnnnnnnnnnnnnnnnnnnnnnnnnnnnnnnnnnnnnnnnnnnnnnnnnnggcacgagcaataacaagataacagtataaaagataattgagaaaaggcaaaatgttccttggtgaggaaggcctctgaatgaggaaaatccattccaaattaacctggagctgatacgttgagcaggcctcttgctggtggcatagggtgtgtcgagccccatccatcaacctgcgtaccttgcacccctgaccaagggccgcctctgcatcccctggctgctcccacagaatgaacaagcctgaggcaggagcaattctgcccttaaccgcactccaggcttattctgcacgtctgactttgaatcctttctcttccaatccagtggttgctctaggctacctacaacacaggccaaacccctctaggtggctta

SEQ ID NO: 32324 - DNA, 459 bp, Homo sapiens
  misc_feature (1)...(459): n = a,t,c or g
gagnnnnttgaaacttgtatgactgattacgaatttaatacgactcnnnnnnnnnnnnnnnnnnnnnnnnnnnnnnnnnnggcacgaggaaatcttgaatataaatgtgattttgtagtgcaaatgtacattaaacaaaactttttattttgggaagatttgcattaaaggaaaaaacagtataacattatagctttaagttgtgtcattcatatgacaaatcatggcagctaactagtattttctctgtatttatgtggaagagtatccatattttgtagtttgactaagttaagaatttggatggaatatgatcagtagaattgataagactatggctagcatttgtaacaggcctcatctttcattggctcaaagatagagagactgtaagactgccctaggttcttgnttctctctcatcactactgtttcagtgntcatcccaggcatgttact

SEQ ID NO: 32325 - DNA, 375 bp, Homo sapiens
  misc_feature (1)...(375): n = a,t,c or g
tttgannantncttcnnnnnnnnnnnnnnnnnnnnnnnnnnnnnnnnnnnnnnnnnnnnnnnnnnnnnnnnnnnnnggcacgaggttaaataagcagcttttatcacagttaagccatctgaaatggaaacgagtatgtatgggcatggcttgaaattgtttgtattttacagttcttgtatatccttcaagcctaacaaaaaattgtatgtgccagagattcctaaactttctgtgttcagggtgccattagttgtcttggtacttttttcatggtgccccaggtcaaaatatatacttaatagttcagtgttttaagtaattaggtcccaacagcttaataatagcagtttgcacagtgtcctgcatatatca

SEQ ID NO: 32326 - DNA, 428 bp, Homo sapiens
  misc_feature (1)...(428): n = a,t,c or g
ggngntnnntnttgactntgatgcctttggaagaacccnnnnnnnnnnnnnnnnnnnnnnnnnnnnnnnnnnnnnnnnnnnnnggcacgagagcacctgattcaataccctgaaagtgtatatactgtaatttactaaattatcattgctttggaccttcctttcaactgtgctctctttaaaagtaaccccttggagtgctttcacttctacatggttccctgaccttacggtgaaacaccacacttctgcacctgctctgggatctgacgccatcccccgcaaaccccgtccaaacaattttagatggagacaactgctatttcatgatgaaaacttataaaaggaaggccagagatgaagagactgtggcccactgatctcctcacattcctgatgatggttctactcagctggaggacagtttt

SEQ ID NO: 32327 - DNA, 436 bp, Homo sapiens
  misc_feature (1)...(436): n = a,t,c or g
ggggntnnntttganatttgaataccngtttgacnnnnnnnnnnnnnnnnnnnnnnnnnnnnnnnnnnnnnnnnnnnnnnnnnnnnnnnnnnggcacgagttacagcatactgatatctaacataaaaaactgctttggatagcttttcattcattcaaatatttgagtgatagtgtgtgtcatgagaggcacactgatgactttggggctacaaaaaatagatcataattttcacttaaaattgcttcattcatgttctttccaaagagaatatatgaaaaaaataaagtaaaagaattgtcagannnnnnnnnnnnnnnnnnnnnnnnnnnnnnnnnnnnnnnnnnnnnnnnnnnnnnnnnnnnnnnnnnnnnnnnnnnnnnnnnnnnnnnnnnnnnnnnnnnnnnnnnnnnnnnnnnnnnnnnnnnnnnnnnn

SEQ ID NO: 32328 - DNA, 431 bp, Homo sapiens
  misc_feature (1)...(431): n = a,t,c or g
gtgtgnnnnnnctttganactngatgacnnnnnnnnnnnnnnnnnnnnnnnnnnnnnnnnnnnnnnnnnnnnnnnnnnnnnnnnnnggcacgagaagaaaaaagagagcagcagcagagcattaaaccaagggcagaggccgtctgagcacagagcatatgtgaattatacaggtcacacacccatgaagctaaccctggatttgtactcaaatttcttagctctgacgataaatatgttctcttttctacctgtttgtggggtgccttcaaaagagtactgacataataaaagagtcctgaattatgatagagatttttgaagtaaggagactgaattttagggcagcctgtcttttttttttttnaanccagcnttnaantngttnccanttnnttngcancggngnnaangttnatntgccncnggaa

SEQ ID NO: 32329 - DNA, 438 bp, Homo sapiens
  misc_feature (1)...(438): n = a,t,c or g
gtgtgnntnnntttganacttnnnnnnnnnnnnnnnnnnnnnnnnnnnnnnnnnnnnnnnnnnnnnnnnnnnnnnnnnnnnnnnnnnnnnnnnnnggcacgagaagcactttcacattatactaaatgcaatcatggcatcttctcaagatgtctgtggcatctcaacccttgggcattcctgcacaatgaccatcccccatataataggaattgccctgggatgctcttcacatccaagtagccaatccataggtgaggcagttatcagcaggcattccctctcttgtgtaagatggaaatcttatttcccaatagtttgagatatgtgaagcagctaattaaactatcctctttgtacccagactctgtccatagaaggcaaggctttggggaaattgatagcctctgcacaaagcagtattacagaaatgnggaa

SEQ ID NO: 32330 - DNA, 436 bp, Homo sapiens
  misc_feature (1)...(436): n = a,t,c or g
gtgtgnnnnnncttgganactttgnnnnnnnnnnnnnnnnnnnnnnnnnnnnnnnnnnnnnnnnnnnnnnnnnnnnnnnnnnnnnnnnggcacgagggtggaaatgcattaagctgggactggtgacacttgacactgtcactatttgtgtgaccttgagaaaatgattgagcctctctgggtctcaatttccacaactgtaaaattacagaattgttaggatattgcatatgtaaagcaattaacataatgtttcttcataagcaaatggagctgctattattattattggtattgggcatagctcttttgagttcaaatgagaaaaacagactcaaactatcttaagtaaagatgagaattaatgggctcatataactagaaagtttaaggaggagatcaaacttcaggaagggctggatccagggagtcaaaa

SEQ ID NO: 32331 - DNA, 435 bp, Homo sapiens
  misc_feature (1)...(435): n = a,t,c or g
gngtgnntnnccttggnananttgatgacnnnnnnnnnnnnnnnnnnnnnnnnnnnnnnnnnnnnnnnnnnnnnnnnnnnnnnnnnnggcacgagcaggctttaaacacttggtcaagtcatccgagagttctttagtagacaggataacttggtacaggtactggcctgaacagaggttggactgaaggaaagttttactgtctaagaggggcagcatccatagaggatggctgaaagcaattatatcaaataagatagcaaagtcaagacagagattaatggcaagttgaggtggagttgtggaatatggtgattgataacctctaaaggagtaagaggagttgttgatttgacaccctgtactaactcagagactgtgttcagcatgcggataaaatgctggaccgagacactggaagagaggcaaactcat

SEQ ID NO: 32332 - DNA, 438 bp, Homo sapiens
  misc_feature (1)...(438): n = a,t,c or g
gngtgnntnnnntttganncttggannaccnnnnnnnnnnnnnnnnnnnnnnnnnnnnnnnnnnnnnnnnnnnnnnnnnnnnnnnnnnnnnnnnnnnggcacgagtgctaacgtcatcagggtaacaggacccccatctttctgcctaaaacactggagtggtttcccatggctctcaggacaaagacccaattcctcatcataacttcagagtcccaccgtgtactccgggccccttgccctgcatgcagcatctcctgatcatacacagctccccagcccggccatgttccggcctgtgcagctctgacccactcttctctctgctggagtgctgcctgacaccttccccaccgtctcctccgccaagctgggcagcatcacgcctcaggtatcctcacgtctgttctccctcctggcgtcgtctgggtgctgaaa

SEQ ID NO: 32333 - DNA, 438 bp, Homo sapiens
  misc_feature (1)...(438): n = a,t,c or g
gngtgnntnnnntttgannnttggatnnnnnnnnnnnnnnnnnnnnnnnnnnnnnnnnnnnnnnnnnnnnnnnnnnnnnnnnnnnnnnnnnnnnnnnggcacgagaaagcataagaagaaaattctttatggaaaataaacctttggtttcactgaagttaattgactaaattaactcaaccacaatttgagcataaatcacaattgaaaagactgactcggcagagtaaatggaaaaggctcaaagagccgactatatttagcatctacttgggtttggtgtgggatgcaagtgagttttaaaatcaggaaaaggaaaaaaccatcaagtcagagtagagcctagagatttgtttatgctttctcatgccagaaacttgagatcgctttccttctttgaggaagaaaagtatgatttgtaattttgcacagctgaga

SEQ ID NO: 32334 - DNA, 434 bp, Homo sapiens
  misc_feature (1)...(434): n = a,t,c or g
gtgtgtctncctttgannnctgaagaccntcntgacnnnnnnnnnnnnnnnnnnnnnnnnnnnnnnnnnnnnnnnnnnnnnnnnnnnnnnnnnnggcacgagccttgtgcacatcagtgctccaacacccccggcagcttcaagtgtatctgtccaccaggacaacatttattaggggacgggaaatcttgcgctggattggagaggctgccaaattatggcactcaatacagtagctataaccttgcacggttctcccctgtgagaaacaactatcaacctcaacagcattacagacagtactcacatctctacagctcctactcagagtatagaaacagcagaacatctctctccaggactagaaggactattaggaaaacttgccctgaaggctctgaggcaagccatgacacatgtgtagatattgatga

SEQ ID NO: 32335 - DNA, 428 bp, Homo sapiens
  misc_feature (1)...(428): n = a,t,c or g
ggtgnntnnctttganactttgatacngnttgacnnnnnnnnnnnnnnnnnnnnnnnnnnnnnnnnnnnnnnnnnnnnnnnnnnnnnnnnnnggcacgagcctaaatgagagggatgggcaggttccctttgggacagtcgcagagggaagtgtgtgtgcagcagctgtgctggtggaggagtgtgttcttcgagcgaggcttcccgaggacatgcatgctgaagcgtgaggtggtctgtagggggcgctgccccagcgtggtggggaggaaggtgagaggaggcctgcatgcatctgggtcctcactggcttcctggagtgggttgctgccacaggctgagaccccagcgggtgtctagagcctaaggtgcagccaagagcctggctcagggcgccagggttgggagtgcggtggactcaggtgaat

SEQ ID NO: 32336 - DNA, 422 bp, Homo sapiens
  misc_feature (1)...(422): n = a,t,c or g
ggtgnnnnncttganactcttgacnnnnnnnnnnnnnnnnnnnnnnnnnnnnnnnnnnnnnnnnnnnnnnnnnnnnnnnnnnggcacgagtttctgcgattcactcatctctaatgctcagaagttcaaagtcactgtaagaagtgcccaagtcagaggaggtcattacacttgggaggaaactcacagcaccattgaatgctgtttctgagtggatccatgtctttgagcaagaaaagtctctcctcctcatacctgttctttagaaacttgtggttctcagactgctgaggcaagcccagagctcgagcccccgggagtgtggtcatgacatggcaagagccacacgctatgggaggcgaagatggagatgacaggtctgcactgctagttactgccatgctccagtccctctttctaat

SEQ ID NO: 32337 - DNA, 428 bp, Homo sapiens
  misc_feature (1)...(428): n = a,t,c or g
ggggnntnnntttganncttnnnnnnnnnnnnnnnnnnnnnnnnnnnnnnnnnnnnnnnnnnnnnnnnnnnnnnnnnnnnnnnnnnnnnnnnnnggcacgagcacaagtatatgagacctggtataaacttagaagtaggccacagtttgaaaagtgtgctctatgaggctttagacgcctcagaagcctccttggagttaagatggggattaggaagagacccggtaggtagacagacttatgcctcttcgaatcccagcccttcctctgaccagtgtaacttccctgtatctgttctagatactggcattcaacataagacttaatttgctggaagagttccatttcttataaaataaataaataaataaagtgtgaaagcccttgataaatccaacctcttcattttgcagatgagaaaacaaag

SEQ ID NO: 32338 - DNA, 419 bp, Homo sapiens
  misc_feature (1)...(419): n = a,t,c or g
ggggnnnnnnnttgannctttganacngctnnnnnnnnnnnnnnnnnnnnnnnnnnnnnnnnnnnnnnnnnnnnnnnnnnnnnnnnnnnnnnnggcacgaggtggcaggatagggtaatggttaaggaaaannnnnnnnnnnnnnnnnnnnnnnnnnnnnnnnnnnnnnnnnnnnnnnnnnnnnnnnnngctgagcaaattacttaaactgtgcctcagtattctcatctataaaatggggatgattgtacagcaacccttacagggtgttgtagggcttaaatgtgttcgtacatggaaagcacttagaacagtgacagtagttgtgggtggtggtctgcagnccttaactggngggggaaatggtccttttaaccaggagtcaggacactaggtttccaacacttgcccattggccg

SEQ ID NO: 32339 - DNA, 423 bp, Homo sapiens
  misc_feature (1)...(423): n = a,t,c or g
ggtgnnnnnnntttganactctatgacnnnnnnnnnnnnnnnnnnnnnnnnnnnnnnnnnnnnnnnnnnnnnnnnnnnnnnnnnnggcacgaggaagtatctggagggcaaaaggataacgaaaaaagtttgcttagaatgcaggataaaaaaatcaactatatacctgaggaagaaaatgaaaaccttgaagccagccgggaagattctttttttttgcaaaaattgaaaaaaaaggagtacccaaagatagagactgtgaaggaagttgaagcctttacttttgctgatcatgaaatgggttccaatgaagttcatctgatagcaagacatgtcaccacatctgtggtcacatatttgaagaactttgaaactacaggtaagcaagagagaacgtacctaaaaatttgcatgatttaggaa

SEQ ID NO: 32340 - DNA, 427 bp, Homo sapiens
  misc_feature (1)...(427): n = a,t,c or g
ggtgnntnnntttganacttggannnnnnnnnnnnnnnnnnnnnnnnnnnnnnnnnnnnnnnnnnnnnnnnnnnnnnnnnnnnnnnnnnnnnnnnggcacgagaaactgtagatagagactttaagatcgtgaatatatagaaagctaaaagtggtttcagaatgggaactataagagtgctctcaagagtagtgcaattattttttaaaatagcggtatgaggtttgaaaatgtttaatcagaatattaatatctgnttancccatantnngtttaccantntgttcncagtggatgccagcaggttattcagctgggaccaaacaatcctctgtgaggccgacttcaacttctccttctctaagcaagctgggatgcctgccacaaaaccaggccaactccgtgaaggcgcttttagatgcaaat

SEQ ID NO: 32341 - DNA, 429 bp, Homo sapiens
  misc_feature (1)...(429): n = a,t,c or g
ggtgnntnnnnttgganacttgaannnnnnnnnnnnnnnnnnnnnnnnnnnnnnnnnnnnnnnnnnnnnnnnnnnnnnnnnnnnnnnnnnnnnnnggcacgaggggagataaagcagggaatggggttaaaagagtttctcttatacttttagtcttcaaaatggaaatatctgcattttgttaagacttgaggtcatacagaaaagtttaaagaacaagatgtcaatcaaaggtaacagccattgattagcactttgatgcacattctatacataaaaacacttacacttacaaaaatgggatcatgttacatatagtgttttgttacctgatttcatcacttaaaattgtgtcatgaacatatctctcaggatagactaggttacgctgtggtatccggcaatccccaattctcaatgtcttaaaca

SEQ ID NO: 32342 - DNA, 419 bp, Homo sapiens
  misc_feature (1)...(419): n = a,t,c or g
ggtgntnnctttganacttgannaccnnnnnnnnnnnnnnnnnnnnnnnnnnnnnnnnnnnnnnnnnnnnnnnnnnnnnnnnnnnnnnnnnnnnggcacgaggtatttatatcattctcctgcattctggattattttcacatttaattttctaatttctaattctgtcttcagctctatctgttctactttatggctctttaaaaaatggtttgtcgtaattattgtgtttgtttataaattttttggcatttaaaaatctgcctgtttttactttatgggttctattccttcagctctttgaacatctttgactttttaaaactttatattggaattgctaaaactcattgatggaaatntcatacatacaaanaaanangaatantagtgacccntctgggntctttaatcagctt

SEQ ID NO: 32343 - DNA, 424 bp, Homo sapiens
  misc_feature (1)...(424): n = a,t,c or g
ggtgtnnnncttganacttgatgacnnnnnnnnnnnnnnnnnnnnnnnnnnnnnnnnnnnnnnnnnnnnnnnnnnnnnnnnnnggcacgagataattaagaaaatccttcaaggaatttattttgcctggctcccaagaatatgaatgatcttagcctctgcttctttcaacttttataacattttctcactgcatttcccatcaggtgaacatcagatggagctacttgattatgtagcagcaaagttccatgaagaagctggcatcttcaagctattgattatcgattcaataatggcactttttcgagtggatttcagtggccgtggggagttggccgaacggcagcaaaaattggcccagatgttgtcacgactccaaaaaatctcagaagaatataacgtggctgtttttgtgaccaat

SEQ ID NO: 32344 - DNA, 384 bp, Homo sapiens
  misc_feature (1)...(384): n = a,t,c or g
aanttctntannaaccttcnnnnnnnnnnnnnnnnnnnnnnnnnnnnnnnnnnnnnnnnnnnnnnnnnnnnnnnnnnnnnnnnnggcacgaggttggaaatggccttgggccagccacgttatttctctggacctcaggtcacccatctctgaaatgggagcattgaactggctgatccctgaagccccttgaggctctggggttctagggagtatgtgacccctgaactgcctggaatatcttaggtatgccaggtgctacaggggttgagaggggaggaggtacggaccctgccttccatgtccttacagtcatcttggggccataaattcaggccagaaaacccattcaaggacaggatataaggaagaacagtatagcat

SEQ ID NO: 32345 - DNA, 375 bp, Homo sapiens
  misc_feature (1)...(375): n = a,t,c or g
gnannatnnnnnnnnnnnnnnnnnnnnnnnnnnnnnnnnnnnnnnnnnnnnnnnnnnnnnnnnnnnnnnnnnnnnnggcacgagcaagggtggatgaattttcattatttttggtcctgtttagggaaaaagaaaatgaaatgtgatatttatatcattggtcaacaattttccaatattatatatttaattattttctcttctactgacatttatggtattctgttaaatctttgaatataactacactataacattttacaatgactatctaccaatttgaaaaataacttgaatggtttaagaattactattaagtcattcagtaaaaatgacttaattgagtgcatactattgngccagctatgatggtag

SEQ ID NO: 32346 - DNA, 374 bp, Homo sapiens
  misc_feature (1)...(374): n = a,t,c or g
gaannnttgnntancacntgattacgaatttaatacnnnnnnnnnnnnnnnnnnnnnnnnnnnnnnnnnnnnnnnnnggcacgaggaaattatttccatcaacaaatgtcagctttggaattctccttataaaagctcatttcaggcttccttggaattcttaaataactaagcaagcatttgagatctgatacgcacaggaaagcactggcataggaagagataatctgccttaaatgcatacacactcacaaaacagacattgttctcagcactttcttttaatattttgggggccaggctacctagtcaaatgctgcacagtaggcttcttctgaaatcagcctccagcaagggattagcaccaattctga

SEQ ID NO: 32347 - DNA, 369 bp, Homo sapiens
  misc_feature (1)...(369): n = a,t,c or g
annttngnaancncttcnnnnnnnnnnnnnnnnnnnnnnnnnnnnnnnnnnnnnnnnnnnnnnnnnnnnnnnnnnnnnnnnnggcacgagccaagggctttcccaccttagagttatccacatgctcttccttctctaagtaaagttctgccccctgctcttgttgtgactggttcctttcatccttcaaattcctatcttctctgaaaagcctttcagaagctccgttgttagtttcattcacctctttgtgttcccagtctctagggcagctcaggaacatagtagatgcttaagaaatgtttgcatgaacaactgactagttctgcaaatgaagcgcttctcccttctgcctgaatttgntttata

SEQ ID NO: 32348 - DNA, 341 bp, Homo sapiens
  misc_feature (1)...(341): n = a,t,c or g
nnnnnnnnnnnnnnnnnnnnnnnnnnnnnnnnnnnnnnnnnnnnnnnnnggcacgagtgtcaacatgctgcagaaattattacagaccttcttcgaagtgttcaggctggtaatcctggtggacctggacctggtggtcgaggaagaggtagaggtcaaggcaactggaacatgggaccacctggtggactacaggaatttaattttattgtgccaactgggaaaactggattaataataggaaaaggaggtgaaaccataaaaagcataagccagcagtctggtgcaagaatagaacttcagagaaatcctccaccaaatgcagatcctaatatgaagtt

SEQ ID NO: 32349 - DNA, 378 bp, Homo sapiens
  misc_feature (1)...(378): n = a,t,c or g
ttggnnnttggannacnnnnnnnnnnnnnnnnnnnnnnnnnnnnnnnnnnnnnnnnnnnnnnnnnnnnnnnnnnnnnnnnnnnnnggcacgagcgcattgaaaacactgctgtggccttattatctcatacctttgaggatatttttagaaattaatcatcctaagacattttgtgaatcaacagctaaaagaattctatgtttaaaattggctcctaggtatttttgcatgatgaggctcagagtgtgtagtgaatgaagggtgggaaaggcgattacttttagtgtcacttcctaggaagtgctaagggatatttttgctggtatgtaagcaactacttatctgaggtttatgaagttttcattgtcaatggaata

SEQ ID NO: 32350 - DNA, 462 bp, Homo sapiens
  misc_feature (1)...(462): n = a,t,c or g
ggtgnnnttgaaaccntattngtgatnccgaatttaatacgactcnnnnnnnnnnnnnnnnnnnnnnnnnnnnnnnnnnggcacgagctctgatcaagatactgaatatcagagtatccattattcaagaaatctttattctacgcatagaagttctatactggccactccctattttgaaaaactaactttggtgtacattctaattgctaattactgtccttattgtacatgaggaaagtggatttaaagagagtcttcataattccttgctacagcccagaaatacagccatttccaaattagattgtttcaaattgaaaagatgatgaaacaattatatatttaaagtctttcaaatcctagcatagctatttttatttttacgcattccacatgaatcatatttttatatagttcatcatcaaacatctgttgaatactggccgtgtgccagacaac

SEQ ID NO: 32351 - DNA, 465 bp, Homo sapiens
  misc_feature (1)...(465): n = a,t,c or g
ggngnnattgatnccttntttgaaacccttatgacnnnnnnnnnnnnnnnnnnnnnnnnnnnnnnnnnnnnnnnnnnnnnnnnnnnnnnnnnnggcacgagaatgaggctctctctctctcctcatctcagttaaaggatatgttatctcaccaggaggggcaggttgccaacttttctcatacctctcagcaataaattgcacaggctaaattcctaacatttgaagctagaggttggggtttttcttcattcactcaaccccgtctagtagagtggaggctcactgctagtcatggcaagccaaaaaaaattgaggaaatgattgtccctctccagctccctcacagagtggaagatacatgtgggggaggcagcctgcgaagatgagcagttaccttccctaccaacatgataagcccttggagatgcctgtaggcactggttctgaacgtcatccctaatt

SEQ ID NO: 32352 - DNA, 460 bp, Homo sapiens
  misc_feature (1)...(460): n = a,t,c or g
ggtggntntgaaccttntttgggatnccaatttaatacgactcnnnnnnnnnnnnnnnnnnnnnnnnnnnnnnnnnnggcacgagactggatccagtagcatattaaaaggattatccaccactaccaagtgggctttagcctaagaatacaatggtggttcaacacatgaaaatcaatgtaatacaatgtaatcatattaatagaatgaaggggaaaaatcccagaatgatttcaattcatgcagaaaaagcatctgaaaaaatagtaataatcttttaagataaaaacactcaacaaatgaggaaaggaagggaacttcttcaaaatgataaaggacatatatgataaagcgcacagctaacatcttactcaacagtaaatgactgtttactgactgaaagttttcccgctacgatcatgcatgagacaagaatgctgctctcactacttccgttcag

SEQ ID NO: 32353 - DNA, 465 bp, Homo sapiens
  misc_feature (1)...(465): n = a,t,c or g
ggattnatttgattccttntntgaaaccctnnnnnnnnnnnnnnnnnnnnnnnnnnnnnnnnnnnnnnnnnnnnnnnnnnnnnnnnnnnnnnnnnggcacgagtgtgatgtggagtcaggaggtcaggacccagccctaccctccctaccacctgccagctgtgtggccttgagtgagccaacaactttgccaggagtcatttgccttatctttaaaataaaagatcactaccatgtcctgggttgtttaagtgagattatgtagtattagtagggtgcctcccaccacaggtcctcagtacattgaggtttctttccctgcctcctgcctccttgcaaggaaagccagagcactttgacttagaattgtgtctgaattcagctggtgtgttgcataagcttggttatctgcttttcctctcagttcttcctaggtagaggtgagggtgancgggggagcttcat

SEQ ID NO: 32354 - DNA, 461 bp, Homo sapiens
  misc_feature (1)...(461): n = a,t,c or g
ggtnnnntttgaanccttanttnnnnnnnnnnnnnnnnnnnnnnnnnnnnnnnnnnnnnnnnnnnnnnnnnnnnnnnnnnnggcacgaggaaacctttttgctacaataataccnnnnnnnnnnnnnnnnnnnnnnnnnnnnnnnnnnnnnnnnnnnnnnnnnnnnnnnnnnnnnnnnnnnnnnnnnnnnnnnnnnnnnnnnnnnnnnnnnnnnnnnnnnnnnnnnnnnnnnnnnnnnnnnnnnnnnnnnnnnnnnnnnnnnnnnnnnnnnnnnnnnnnnnnnnnnnnnnnnnnnnnnnnnnnnnnnnnnnnnnnnnnnnnnnnnnnnnnnnnnnnnnnnnnnnnnnnnnnnnnnnnnnnnnnnnnnnnnnnnnnnnnnnnnnnnnnnnnnnnnnnnnnnnnnnnngtagtgctttttcttaaccctttttgctttgaaattgtattacttttcttaactt

SEQ ID NO: 32355 - DNA, 457 bp, Homo sapiens
  misc_feature (1)...(457): n = a,t,c or g
ggtgnatntganccttntntgaaacctttgacnnnnnnnnnnnnnnnnnnnnnnnnnnnnnnnnnnnnnnnnnnnnnnnnnnnnnnnnnnggcacgagggcacgagaatggattaataggtatgaatatttttttaacagtcctaaattgttttccataaaagttatgctatgagtatgcaatttcagtaagaccctaatctgccagaaatattttcttttttttaatgccttaatttaatatgttttttttcgttngttttttttttngaaacanagtctnnntttgnnnctnaaacngctccntngcnctcnanccngggcannaananngaanctntgtctcaaaaaantaantaangtaaantaaantaaaatanngttncttntaaancccngntcaatnnttctccntttnngccttcaaaantaccccntatcctaaatangattntgta

SEQ ID NO: 32356 - DNA, 456 bp, Homo sapiens
  misc_feature (1)...(456): n = a,t,c or g
ggtgnatttgaacctttttngnacccgaatttaatacgactcnnnnnnnnnnnnnnnnnnnnnnnnnnnnnnnnnnggcacgagtaaaacagttgatcagaatataaatacatactgagtcagaatttaggattttgcctaagaaccagactggagagattttgatttggttaaataaggaatattctttgtttcttaaattgatagctttgatctttaaacagtatagataattgtcattttttattacggctattggtatgtggtgaaatggtgtatatttgtatcaagcaaatgaaaatataaatcaaggtattagttacttaaatggtaggtttggagtgacctccaatattctgttgagttacatggctctaaaagtttatacctttttaatgacttgacagttaaatttttgtgtgtcttaaaccttttgatgattccagaaaatatgag

SEQ ID NO: 32357 - DNA, 458 bp, Homo sapiens
  misc_feature (1)...(458): n = a,t,c or g
ggtgnatntgaaccttanttngnaccnnnnnnnnnnnnnnnnnnnnnnnnnnnnnnnnnnnnnnnnnnnnnnnnnnnnggcacgagctgactcattagtttgaaatggatccatctgattgtgtgttgaaagttcacagtaaaggagacaggggtgtcaatgtaggagaccaggtggaggtcaccatcaggtgagagatggtggaggcctgatcaggaagttttccctgcagttgcagctggagtggaatgttaaaataaatgtaagaaccctccaagcattttaaggaaatcttgacatgtaagacacatttctacagtagcaaagctaaagcttttcctgaaacaaaatggcattctttagggactaaaagtagataccagatatagcattcccccaccattgatctgtaccatatcagctaaattctttatcctatgttcccttttaagttattc

SEQ ID NO: 32358 - DNA, 465 bp, Homo sapiens
  misc_feature (1)...(465): n = a,t,c or g
ggtgnnnnnnnattggaanccctnttggaaatccttnnnnnnnnnnnnnnnnnnnnnnnnnnnnnnnnnnnnnnnnnnnnnnnnnnnnnnnnnnnnnnnggcacgagagcttcaataccctgttctagctctgataacttaaatatttatgctgtttacttactctaaaatgactgatttaataaatttcagagaaatattagactctctcagatctataattttggaatctattttctagttgaatttccataagtaaaatcaaccaaaatgaaatattcaaatctgagaaacttcagggtagaagagtgtatctgaaaagtacattaatgctttaagtcctcactgcaccaaaggagtaagttttaaaatactactaaatgtcctcaaagagttaacgcaggccaaccgtggtggacctgtaatcctagaacttttggaggcttgcctagaacttttggaggc

SEQ ID NO: 32359 - DNA, 463 bp, Homo sapiens
  misc_feature (1)...(463): n = a,t,c or g
ggtggtnnnnntttgannncctntntgaaacctttgacnnnnnnnnnnnnnnnnnnnnnnnnnnnnnnnnnnnnnnnnnnnnnnnnnnnnnnnnnnggcacgagaccctgtaatttctaagtacacataattactgcttcaggggctaaattctacattcacaagtatctacaccccagccctccaaaacaaaagacatcagctagctaaatacaattaccatattataaaatgtacaaatttcagcaataaccatggcttaagaatattcaaacatagacactcttcctcaaggatttcttcctagtgaaatataggctttgttttaacaattttgacttcaggatacctctttaataagtggccagtctccannnnnnnnnnnnnnnnnnnnnnnnnnnnnnnnnnnnnnnnnnnnnnnnnnnnnnnnnnnnnnnnnnnnnnnnnnnnnnnnnnnnnnnnn

SEQ ID NO: 32360 - DNA, 459 bp, Homo sapiens
  misc_feature (1)...(459): n = a,t,c or g
ggtgntnnnnatntganaccttattnatgacnnnnnnnnnnnnnnnnnnnnnnnnnnnnnnnnnnnnnnnnnnnnnnnnnnnnnggcacgagctttatagatttcccaattttgttgactaatctcttcatctgaaatgtttccctccgtgtatgaattttctctctgtctttttaagtccagtgtagaatcgatttggtatctaccgactttccagattcctccaagttgggataaatcatcatttcctcctctgtgttcctagtgcatagaaataaaatcatttatcacaatctttggttactgatgatggtggggaggtctttacagtgtgatggcttgaagtacaaagtacaaacttgaaagtcagattaccacttactttgnnnnnnnnnnnnnnnnnnnnnnnnnnnnnnnnnnnnnnnnnnnnnnnnnaggacttaataatagtagctaagc

SEQ ID NO: 32361 - DNA, 460 bp, Homo sapiens
  misc_feature (1)...(460): n = a,t,c or g
ggtgntnnnnatttgaatccttnttgatgacnnnnnnnnnnnnnnnnnnnnnnnnnnnnnnnnnnnnnnnnnnnnnnnnnnnnnggcacgaggagagctagcaccatgaactgatctttatgacatgagtgcatcacaaactattgaagtggtgagaagctagtttctcacagctgccactttagcaattgtgagttttctttggtttatttgaattgaacattgggagagtgtaaggtctttctagctgttgacaaatgggatcacgaagattaagacaaattaagacagacctatggtgcccatttagttatctaattgtccctgtaagccttcaaaaatgttagaaatgacctttggcacataaaaactgtccccgaaattgcttcttgcatctttgcttcatctgacttgcaaccctatttttgattcagaatgttttaagttttcaacaggttgg

SEQ ID NO: 32362 - DNA, 463 bp, Homo sapiens
  misc_feature (1)...(463): n = a,t,c or g
ggtgnttnaaaatntgaaaccttatttgaagatccctnnnnnnnnnnnnnnnnnnnnnnnnnnnnnnnnnnnnnnnnnnnnnnnnnnggcacgagtggtcgtagacccttgaacatggtctcctgcaggcacactgtgcagacatcatctcttctgccaggaatgccaccccatccttctccataagccctcctgtttctcaaggctcccgtcccatctcctgcaaggaacatctccttcctctgctactgtgtgtgcctctgccggctgaaactggttgtgccccgcactcatgggagccaggctgtgtccgcatgctgaagggtctggatctgaacacagggtgcctggggtttgcccctggccctgacacttggtaacttggatcttgagccaacccttccctccttccttctccataggctggaggttaaacaaggctgatgaagaaggcctttgaaga

SEQ ID NO: 32363 - DNA, 459 bp, Homo sapiens
  misc_feature (1)...(459): n = a,t,c or g
gtgntnnnnnatttgaatnnccttatntgaaatcctttnnnnnnnnnnnnnnnnnnnnnnnnnnnnnnnnnnnnnnnnnnnnnnnnnnnnnnnnnnnnnnnggcacgagggaaggtccttctctggcctcaattcccgtctcaaggccacgccttccacctacagtggagtcttccgcacccagcgcgtcgacctttaccagcaggcctccccaccagatgccctgcgctggatacctaagccttgggagcggacagggccgccacctcgagaagggccctcccgacgggcagaggagcctgggtcccgaggggacaaggagcctgggttgcccccaccccgctgagggagttcctcttgccccctacccccggggcttgtatatagattataaatatataagggggaaaggggtgggcggggaggggntntttanntttnttaaacttgnatntttct

SEQ ID NO: 32364 - DNA, 464 bp, Homo sapiens
  misc_feature (1)...(464): n = a,t,c or g
gtgntnnnnatttgannncctatntgaaanccttatgacatgacnnnnnnnnnnnnnnnnnnnnnnnnnnnnnnnnnnnnnnnnnnnnnnnnnnnnnggcacgagagtaaatcgcttactactgaaacacacaggtggtatatagcaagtgttcaaaaaatgtaagctgttgttactgctcttagggcttaggtctgagtgcctcctttcaggtggtctgactctaggacccagactttgatagcacagcccctccccactcttgtccactagagcaggactagttgctgtcttagctagggcagctacctcctgggacccagtcagaggacacaggatcttgctgctgttggctcaagtattttatcttcctaggaagtcaaatcaaataaagctattgaccaatacgaagttaccttgggattcacaatgcaatttaagtcagcgtacactctacttgagat

SEQ ID NO: 32365 - DNA, 465 bp, Homo sapiens
  misc_feature (1)...(465): n = a,t,c or g
gngtgtttnnanatctnanacccttattnganganccctnnnnnnnnnnnnnnnnnnnnnnnnnnnnnnnnnnnnnnnnnnnnnnnnnnggcacgagcctaaagcacagagacggcaagtaacgtgctcaacgtcacagagcaaggaagcatcaaagttggatcctgttatttctctccatctctggggcttatgctcactgtacacttggaagtatgtggtctgggtgcctaaaagggtcttgtcattttaagtgctgacatttcaaactgtactaggtgtgggaagccttggtattgtggcccagaggcttcgatgatactctggagtgtggagtcagaggctcctaccctgcaaatgcatcatgcatctcccaaagtggtgctgcgtgcctctgtaatgcccttgctttaaaagcctctttctgacccgaggtgaacttgctttgggtagctcttggtatga

SEQ ID NO: 32366 - DNA, 460 bp, Homo sapiens
  misc_feature (1)...(460): n = a,t,c or g
ggtgnttnnaatntganaccttattgangaccctnnnnnnnnnnnnnnnnnnnnnnnnnnnnnnnnnnnnnnnnnnnnnnnnnnggcacgagcggcacgagaggccgagactnnnnnnnnnnnnnnnnnnnnnnnnnnnnnnnnnnnnnnnnnnnnnnnnnnnnnnnnnnnnnnnnnnnnnnnnnnnnnnnnnnnnnnnnnnnnnnnnnnnnnnaccgnnnnnnnnnnnnnnnnnnnnnnnnnnnnnnnnnnnnnnnnnnnnnnnnnnnnnnnnnnnnnnnnnnnnnnnnnnnnnnnnnnnnnnnnnnnnnnnnnnnnnnnnnnnnnnnnnnnnnnnnnnnnnnnnnnnnnnnnnnnnnnnnnnnnnnnnnnnnnnnnnnnnnnnnntagggtgatctcagtgttccttccccaaatcggaggcagcagaggaggggatcttagtagtggctgtggccaa

SEQ ID NO: 32367 - DNA, 470 bp, Homo sapiens
  misc_feature (1)...(470): n = a,t,c or g
gtgngnnnnnnttttgatnncctnatnngggaaacccttnnnnnnnnnnnnnnnnnnnnnnnnnnnnnnnnnnnnnnnnnnnnnnnnnnnnnnnnnnnnnnnggcacgaggatagagtgatttcctctattttcttcttttgttaaacttgttttagctattctagctcccttacctttccataaaattttagaatactcatgtttataattgcaaaaaaatcttgctggatttttggtaggaattgcattaaactttatatcagttatgtatctccatgtatttaggttgtcttttgtttgttttatcagcagttagtagttttcagtacataagtcctgtacatgtttaatcaatttatagttcagtatttagatttcttttgaacaagtataagtgctactgtactttaaatctcaattttcatgtgtccatgatagtatatacttttgtatgctgatcttatagcc

SEQ ID NO: 32368 - DNA, 418 bp, Homo sapiens
  misc_feature (1)...(418): n = a,t,c or g
tttggaccccnttgaaanccttcgaannnnnnnnnnnnnnnnnnnnnnnnnnnnnnnnnnnnnnnnnnnnnnnnnnnnnnnnnnnnnnggcacgagcatatggctttttaaataattggatcatgngtctatcgagacatattattcttaaatagagtttatcatcagttttattcttttttttaggtgtagacattggaaatccttgtttatctaaataaataaactggaaggagtttattatagtcattttacctaaatatttggacaccttctccattgtaagcctaaaattagttagcgatcttcaccaaaagtgattaagcaacttgatgacttgctctttctattttattgaaatcagaaacctgggttttacctgatttgcaagaatttttgtcactcaatcattagaatc

SEQ ID NO: 32369 - DNA, 414 bp, Homo sapiens
  misc_feature (1)...(414): n = a,t,c or g
nttgacccctttgnnnnnnnnnnnnnnnnnnnnnnnnnnnnnnnnnnnnnnnnnnnnnnnnnnnnnnnnnnnnnnnnggcacgaggagacactacaccctcctagttttcacccatcattcactggcttttcaccttcagtttccttcttagctttcctttcctcttaagaaacacaagattctcagagctgggtctggggctttgttttcttctatgtgtgatatgattgtatgagcccatcatgctcacagttttaagtgtgataatatcttcatagtttatatacaggtcagatttcccatctgaattgcagacttaacttatatccaaacaatttctgaacatcttctctgcatgtctcacaggcatctcactcataatgtgtctgaaacagaaatcttgacttcacccc

SEQ ID NO: 32370 - DNA, 418 bp, Homo sapiens
  misc_feature (1)...(418): n = a,t,c or g
tttggacccctntgaagccttctnnnnnnnnnnnnnnnnnnnnnnnnnnnnnnnnnnnnnnnnnnnnnnnnnnnnnnnnnnnnnnnggcacgnnnnnnnnnnnnnnnnnnnnnnnnnnnnnnnnnnnnnnnnnnnnnnnnnnnnnnnnnnnnnnnnnnnnnnnnnnnnnnnnnnnnnnnnnnnnnnnnnnnnnnnnnnnnnnnnnnnnnnnnnnnnnnnnnnnnnnnnnnnnnnnnnnnnnnnnnnnnnnnnnnnnnntgttgacccaaacctcacatcatgcacaaaaatcaattttaaatagttcacagacccaaacataaaaggttaacatgttcttctataaagtaccttcatgacattgggataggcgaanatttcttaaaaggacacacacggaaaaaacaattattccgac

SEQ ID NO: 32371 - DNA, 408 bp, Homo sapiens
  misc_feature (1)...(408): n = a,t,c or g
ttgacncntcttgacnnnnnnnnnnnnnnnnnnnnnnnnnnnnnnnnnnnnnnnnnnnnnnnnnnnnnnnnnnggcacgagttcatttctcagatatgtatgcattggcttagtgctggattgtcttanagtaaggcaggcctgtgaatctaaataatactattttctttttaatttgccccatagttaatgacttcgggtagagagggtgagaaatcactacatgttttgaagtgctttttaaaacttagaggaatgtattagattatgttcagtgactagaaatactgagatatggcccatgacccctagtttggaaaaaaattgacaaataaatttagacagttaaagaattcaatnnnnnnnnnnnnnnnnnnnnnnnnnnnnnnnnnnnnnnnnnnnnnnnnn

SEQ ID NO: 32372 - DNA, 411 bp, Homo sapiens
  misc_feature (1)...(411): n = a,t,c or g
tttgaacnncttctatgacnnnnnnnnnnnnnnnnnnnnnnnnnnnnnnnnnnnnnnnnnnnnnnnnnnnnnnnnnnggcacgagttacagatcaggacacaacagctcttagaggtgagaaccaggccatggtcagacagtgagtaggggcagggcccagagggaagtccaggcctgagttcaaagtcctctccacacagggagacttccaccaatctgggcataggaacaaaattactgattggtctccctccatgttattaactggtcctagctgtcctcccccggaaggctcactaacctcagagagggcatttatagaagccaatacagggatcaatggcaaagtggcaccaccgtgagagctgcaaccaggctgctcagcccaggacaggggtgggctgacaacc

SEQ ID NO: 32373 - DNA, 412 bp, Homo sapiens
  misc_feature (1)...(412): n = a,t,c or g
ttggacccctttgacnccttnnnnnnnnnnnnnnnnnnnnnnnnnnnnnnnnnnnnnnnnnnnnnnnnnnnnnnnnnnnnnnnnnnggcacgagactggcttatgttcttcctactgcatatgctatatcttccaggaagaaaaaagtatttacagtgtcctaaaaggtcgtcatagttggaaaggaccttatggataatccaggcagaagtctctccctttttacattaagctatataaagtcttaaacggaactaaggctcaattatgttaactgaaagacgttatcccgtcgtgtgatccaagatgaccctagcggtgctcggaagttgctttgccgggcagcagccgttcgccagtcccctccttggccccaagccccccggtgactgtcatatggcctcacacttat

SEQ ID NO: 32374 - DNA, 411 bp, Homo sapiens
  misc_feature (1)...(411): n = a,t,c or g
tattnaccccctttgnnnnnnnnnnnnnnnnnnnnnnnnnnnnnnnnnnnnnnnnnnnnnnnnnnnnnnnnnnnnnnnnggcacgagtgggaggttcacagagcagtatcttgggtcggggaatttgcctgtaattacacgagctgttcgatgtagcctgactttgttgaagcctcaaatgtgccaatagtttttatctacccaacacccccaccccttttcttcccaaagaggagtaaagcaaacatgccttcggagagattctgactgacttgtccaccctggtacacatttaattgtgctgcaagcccccaggtccaagttcagggtacagattacttctgcagtctctggggtattgggagttttgcaagctgtgtgaacatacagtgacacaaatagtagctggag

SEQ ID NO: 32375 - DNA, 408 bp, Homo sapiens
  misc_feature (1)...(408): n = a,t,c or g
tttgancncctttnnnnnnnnnnnnnnnnnnnnnnnnnnnnnnnnnnnnnnnnnnnnnnnnnnnnnnnnnnnnnnnnnggcacgaggatattgatggaccaatgaactgcacttcagatatggagatcaaccctttgagaattaagatctcatctttgcaaacaactgaaaagaatgacacggttgccgggcaaggtgagcgggaccatctcatcactaagcgggatcttgccctcagtgaaggagatattcacactttgggttgtggagttgctcagtgcttgaagattgtctgccaagttgggagattagacagaggaaagagtgcaatcttgtacgtaaagtcattactgtggactgagacttttatgaataaagaaaatcagaatcattcctattctctgaagt

SEQ ID NO: 32376 - DNA, 400 bp, Homo sapiens
  misc_feature (1)...(400): n = a,t,c or g
tttgacnnctnctatgacnnnnnnnnnnnnnnnnnnnnnnnnnnnnnnnnnnnnnnnnnnnnnnnnnnnnnnnnnnggcacgagcaaggaataaggtagagaaataagaaaatggatctggtgttgaaactgaagtaaaaagaaaggatgaggaaaggttttctctctaaaaagcttttgcattgtacctaaaggcactattttaatcacaatgaaagccatttttcttttgcgatttggataatatttcaaaactagtctgtatgctgtacattcctttcatcaaaatgtgtgtgattttatacccttgaactctgagctagcccataaagatgaagaaatgagtaagatatgatccatccatgctttttcttgggagagtgaaacaagcaagcctatg

SEQ ID NO: 32377 - DNA, 411 bp, Homo sapiens
  misc_feature (1)...(411): n = a,t,c or g
tcctttgacccctttgaacccttctatgacnnnnnnnnnnnnnnnnnnnnnnnnnnnnnnnnnnnnnnnnnnnnnnnnnnnnnnnnnnggcacgagatttagatgttcgaattgggtatggacaaatgaggtcactttgagttccccattacttctcggaactgccttcaggacacttaccccaaaaacccacacctctgcaaaaacaaagaaatacctcactccagaccaaacaaaagccagaggacagatttagctgcctaggatgtcagacaagaaatttgggggccatttaaagggaactaactgatgctgtgagccgtttaactcagatttggagatagcactgctgatatggccttattaagtagcaaacaggagaggaaaatgaaattgaggagtaaattaatt

SEQ ID NO: 32378 - DNA, 407 bp, Homo sapiens
  misc_feature (1)...(407): n = a,t,c or g
tttgaacaccttnnnnnnnnnnnnnnnnnnnnnnnnnnnnnnnnnnnnnnnnnnnnnnnnnnnnnnnnnnnnnnnnnnggcacgagcggcacgaggctgtattggagctcatgcagtcttcagtggataataccaaaatggtgagtgccgttttgaacggcatgttagaccagagcttcagggagcgagcaaaccagaaacaccaaggactgaaacttgcgactacaattctgcaacactggaagaagtgtgattcatggtgggccaaagattcccctctcgaaactaaaatggcagtgctggccttactggcaaaaattttacagattgattcatctgtatcttttaatacaagtcatggttcattccctgaagtctttacaacatatattagtctacttgctgac

SEQ ID NO: 32379 - DNA, 409 bp, Homo sapiens
  misc_feature (1)...(409): n = a,t,c or g
tttgnccccctttgacncctnnnnnnnnnnnnnnnnnnnnnnnnnnnnnnnnnnnnnnnnnnnnnnnnnnnnnnnnnnnnnnnnnnnggcacgagcccttttgttccctccatcgttgttgagttggaagtgtccagagatcctccagtgggaacacttaatgatgcagatgaaaataaagaacaaaggtgggctgggaggattaccattaacttgactattaaatatgcatgaggtagggaaccagtcaccaggaagctatctgttctttttatttcactcctttatttcactatttttcataatgactgggatatcattatgaccagagagaaatcatagtgaaagaaacatgtttgttactcataatacagtggtacctctgataatacattttgctgtattacta

SEQ ID NO: 32380 - DNA, 403 bp, Homo sapiens
  misc_feature (1)...(403): n = a,t,c or g
ccctttgannncctnctatgacnnnnnnnnnnnnnnnnnnnnnnnnnnnnnnnnnnnnnnnnnnnnnnnnnnnnnnnnnnggcacgaggcaagagaagtataaatagtatagactggcatgtaattaaggactagagtctgctatataggtcgtaaggccaagtttgaggaagaatggagaaatctcagggacatgtaaagtcccatttaaaaaattaaaaaccttaaagcctgtcttaaattaagacagctgaaaaattttcaagataaattaatggagagatcaatgtctttttcagtgtttcagaactgtggaaaaaaagagctcggcttcccaaagtgctggaattgcaggcatgtgccatggcccctggccacccatggcttttaaaagtcattatag

SEQ ID NO: 32381 - DNA, 402 bp, Homo sapiens
  misc_feature (1)...(402): n = a,t,c or g
cccttgannncctnnnnnnnnnnnnnnnnnnnnnnnnnnnnnnnnnnnnnnnnnnnnnnnnnnnnnnnnnnnnnnnnnnnggcacgagtttgttttggggtaatgggaaaaacaatagtgctgttttaaatcttttaaataacctggcagtttattccctagtcatcaaaaatctgcaaggatagctgacagattataaaacacagctaaaattagatgctgccatttggtctgctcttcagatacaatttgttcatgcaggcgtcttctgagtttgagttgtgtacttctctcctctgaattgggtggagtggggtgaagtatcatattaatatatgcatgtgtgtagttgtataaatatattgtattcatgtattaacgtgtatgtattggctgggcgcg

SEQ ID NO: 32382 - DNA, 406 bp, Homo sapiens
  misc_feature (1)...(406): n = a,t,c or g
tttgacccctttgnnnnnnnnnnnnnnnnnnnnnnnnnnnnnnnnnnnnnnnnnnnnnnnnnnnnnnnnnnnnnnnnggcacgaggtccaagctcacaacaaatttgttttagaccaagacaaagacccagatttaagccccctaatcctactgtatggcctccgctagtattaacacatcaatttgtataaataagtatctgacacgtcctatatacaataatatattacagaaacaagagttgtnnnnnnnnnnnnnnnnnnnnnnnnnnnnnnnnnnnnnnnnnnnnnnnnnnnnnnnnnnnnnnnnnnnnnnnnnnnnnnnnnnnnnnnnnnnnnnnnnnnnnnnnnnnnnnnnnnnnnnnnnnnnnnnnnnnnnnnnnnnnnnnnnnnnnnnnnnnnnnnn

SEQ ID NO: 32383 - DNA, 406 bp, Homo sapiens
  misc_feature (1)...(406): n = a,t,c or g
tttgaaccctttnatgactnnnnnnnnnnnnnnnnnnnnnnnnnnnnnnnnnnnnnnnnnnnnnnnnnnnnnnnnnggcacgagnnnnnnnnnnnnnnnnnnnnnnnnnnnnnnnnnnnnnnnnnnnnnnnnnnnnnnnnnnnnnnnnnnnnnnnnnnnnnnnnnnnnnnnnnnnnnnnnnnnnnnnnnnnnnnnnnnnnnnnnnnnnnnnnnnnnnnnnnnnnnnnnnnnnnnnnncaacacacacatatatatgtattattaaaaattttaaatatatatagtcttctaaatcttgcaaaaagttaccataatgcaacttgactataaaactgaatatttataagtactattgaattgcatacacctggccataaagatggaaacaacagacactgaggactac

SEQ ID NO: 32384 - DNA, 407 bp, Homo sapiens
  misc_feature (1)...(407): n = a,t,c or g
tttgacncctttntatgacnnnnnnnnnnnnnnnnnnnnnnnnnnnnnnnnnnnnnnnnnnnnnnnnnnnnnnnnnnggcacgagattagaggtgtgtgagtgagagagaaagatggggaaaaggggagaaggggaagggagtagggggaagaggatgcgagagaggagggaacaagaaggaacgtgaatgccatattgttggcatctcaaggttcctggttggtgtccataaggcatgacacagaagtggttttgaactccggagatgccttggtttttgtccccaggggcttgttttagtggagaattgaaatggatcctgtccctcttctgttggtcccaccccctttttccctctctcctctctcccctgaatctggctgtcctcttctgtaagaccctgttc

SEQ ID NO: 32385 - DNA, 407 bp, Homo sapiens
  misc_feature (1)...(407): n = a,t,c or g
gganccccttgaanncctnnnnnnnnnnnnnnnnnnnnnnnnnnnnnnnnnnnnnnnnnnnnnnnnnnnnnnnnnnnnnnnnnnnggcacgagagagctacaccatgagcttctcgaaggtcatttccaaatgacatgaaggaaaagtaaaatccttccagatggctttttaaaaagaagtttcattattttctaaacatttcagaatagtcagttccactatttttaacacagttctttttcttacatttctttaaaacttgttgtctctttcagttggctctcaggagtctcagcagatgccacccctgccaccctgctctgagccacatcagtgcgtccctggcggatggtggcagcctcctaactggtcccctcactcctgcccttgccctgcagctctatct

SEQ ID NO: 32386 - DNA, 460 bp, Homo sapiens
  misc_feature (1)...(460): n = a,t,c or g
gngnnnntnnnntttgnnnanttggaanaccgnttgacnnnnnnnnnnnnnnnnnnnnnnnnnnnnnnnnnnnnnnnnnnnnnnnnnnnnnnnnnnggcacgagnnnnnnnnnnnnnnnnnnnnnnnnnnnnnnnnnnnnnnnnnnnnnnnnnnnnnnnnnnnnnnnnnnnnnnnnnnnnnnnnnnnnnnnnnnnnnnnnnnnnnnnnnnnnnnntttttgaaaagttgggagagatttgaacacagacgcacacccagggagaacaccatgggtagatgaaggcaaagattggggtgatgcttctacaaatcaagaaatattgaagattaccaacaaactaccagaagcaagaagaaaggcatagaccaaattctccctcacacttagaaggaaccaagtctcctgacactnnnnnnnnnnnnnnnnnnnnnnnnnnnnnnnnnnaacaattaactttc

SEQ ID NO: 32387 - DNA, 436 bp, Homo sapiens
  misc_feature (1)...(436): n = a,t,c or g
actttgnnnnnnnnnnnnnnnnnnnnnnnnnnnnnnnnnnnnnnnnnnnnnnnnnnnnnnnnnnnnnnnnggcacgagcaaaaaaagtcaatctctctctctctccactgagtgacagagctgtgaactggggagagcagactccgcagggtgtaaaggtacctgaggtgtcagcacaggcctggcatgtatcaggactcagttcatgtgggtgcagaccctagggggttgtggaagaactcaggattgggcctctgacaggcaggactggcccctaactcttcacttcctaccatgtgaccttttgcagggcccataacccctgagcttcccttctctaagtaggcattgtcagccctaccctggggggttggaaagggacaatattgtttttttgttaaagggcctggaccagggcagacactcagaagatatt

SEQ ID NO: 32388 - DNA, 459 bp, Homo sapiens
  misc_feature (1)...(459): n = a,t,c or g
gngnnnnnnnnnnttgnnnatttggaanaccngnnnnnnnnnnnnnnnnnnnnnnnnnnnnnnnnnnnnnnnnnnnnnnnnnnnnnnnnnnnnnnnnnnggcacgagcaaggtattnnnnnnnnnnnnnnnnnnnnnnnnnnnnnnnnnnnnnnnnnnnnnnnntgtcagttctgcgtgtttnnnnnnnnnnnnnnnnnnnnnnnnnnnnnnnnnnnnnnnnnnnnnnnnnnnnnnnnnnnnnnnnnnnnnagcnnnnnnnnnnnnnnnnnnnnnnnnnnnnnnnnnnnnnnnnnnnnnnnnnnnnnnnnnnnnnnnnnnnnnnnnnnnnnnnnnnnnnnnnnnnnnnnnnnnnnnnnnnnnnnnagagtatggggggcattattcatcctgtaacacagaacaggggtggaaagtgcaggagggattgtgtgcagagtgcagtctccattgtcagcta

SEQ ID NO: 32389 - DNA, 463 bp, Homo sapiens
  misc_feature (1)...(463): n = a,t,c or g
ggngnnnnntnnnntttnnnnantttgaataccntnnnnnnnnnnnnnnnnnnnnnnnnnnnnnnnnnnnnnnnnnnnnnnnnnnnnnnnnnnnnnnnnnnggcacgagtaagtcataccattaacagaaagtcaggatgggataccgtgctgtggaccacgggtaagtcctagtctcaggcagactccaggaatcagtgcctaaccaagagcaaaccacagatgtaggctaccttcatttctcccacagcattaatccctgatgctgaagctcattcacatctactcatttctgcattcaaccccagaccattttggatcactccccagcttcggcatgtggaccacatctctcagaaaagtctcctggttctctagggctgggatggtgctcagccatcctgaagagagcttccctggttcccagcaataggttgggctcacacagggctcctgatgaatg

SEQ ID NO: 32390 - DNA, 457 bp, Homo sapiens
  misc_feature (1)...(457): n = a,t,c or g
gnggnnnnttnnntttgnnnacttggnnnnnnnnnnnnnnnnnnnnnnnnnnnnnnnnnnnnnnnnnnnnnnnnnnnnnnnnnnnnnnnnggcacgnnnnnnnnnnnnnnnnnnnnnnnnnnnnnnnnnnnnnnnnnnnnnnnnnnnnnnnnnnnnnnnnnnnnnnnnnnnnnnnnnnnnnnnnnnnnnnnnnnnnnnnnnnnnnnnnnntgggatgttattacttgtttttcatgacacctttctgtattttcagaagacacacatgtcttttgtgcatgtgtccattttctctcaggcaacagcatttgctgaatactctgcaggctaagcctgagtacaaaattaggtttctgggtgtgtggaaagaatactttaacaattagaatctatctagttattcactcttgtgaaaggacttaaacattcatacaggatgaaagaactgacaacatag

SEQ ID NO: 32391 - DNA, 459 bp, Homo sapiens
  misc_feature (1)...(459): n = a,t,c or g
ggggnnnntnnnnttgnnnntntggannaccntnnnnnnnnnnnnnnnnnnnnnnnnnnnnnnnnnnnnnnnnnnnnnnnnnnnnnnnnnnnnnnnnnnggcacgagaaataaaataccatataatgcctggaccattgctcttatcaggtctgcatcttgcaggcatactgtgaaacacgtgatatgtgcatcttacaaataggtgactgtagaaaatgtatgtctgataggaaagacatgacaaactttacatttaagcattattagatcaattttaacaagctataaattagtatgttttaattcctattcctgtctcattcatctgtgtggttgcgtaataggattgcattagattttgtaagtatttttctatgtggagtgggtctggatggttggatggtccatgcatcagctagaggtattacaagttagggaaatagtttaatttgatctt

SEQ ID NO: 32392 - DNA, 458 bp, Homo sapiens
  misc_feature (1)...(458): n = a,t,c or g
ggngnnnntnnnnttnnnnnntntgaanaccntnnnnnnnnnnnnnnnnnnnnnnnnnnnnnnnnnnnnnnnnnnnnnnnnnnnnnnnnnnnnnnnnnggcacgagagaaaaagaagtcaccctcctcagacctctggaaagcatacctgtgttgggggcatcggcgagccagtgtgtgtcccaaggagtccagggcagaagtggggacattgtgacaggcagtggctttctacttatcccagccaggcacctttccctgcatccactgacacagagcttggcttttcctgaattttagtgaagctgagaaccacagctgtggcctcaggggcctcgataaggctctggaagtttggaaacatgaggcaggacctgagcttacagtgccctctaaggatcctctgtgctgcagtctgggtagcatagagacaaggggcggngggagacatctaagaaa

SEQ ID NO: 32393 - DNA, 453 bp, Homo sapiens
  misc_feature (1)...(453): n = a,t,c or g
ggtgntnnnnnnttgnaanactttgatgacnnnnnnnnnnnnnnnnnnnnnnnnnnnnnnnnnnnnnnnnnnnnnnnnnnnnnnnnnnggcacgaggaacagagattttcaagaaaaatagtgtatcatcatagttaaaagcatggagctagactgctgtattcaaatcccagatctgccacaagtgatttaatttccttagctcccacacccagccagattccttgttttgaattgctaaannnnnnnnnnnnnnnnnnnnnnnnnnnnnnnnnnnnnnnnnnnnnnnnnnnnnnnnnnnnnnnnnnnnnnnnnnnnnnnnnnnnnnnnnnnnnnnnnnnnnnnnnnnnnnnnnnnnnnnnnnnnnnnnnnnnnnnnnnnnnnnnnnnnnnnnnnnnnnnnnnnnnnnnnnnnnnnnnnnnnnnnnnnnnnnnnnnnnnnnnnnnnnnnnnn

SEQ ID NO: 32394 - DNA, 454 bp, Homo sapiens
  misc_feature (1)...(454): n = a,t,c or g
ggtgntnnnnnntttgaanaccttttatgacnnnnnnnnnnnnnnnnnnnnnnnnnnnnnnnnnnnnnnnnnnnnnnnnnnnnnnnnnnggcacgaggatttttttttaaaaagaccatctctcacatggacattaaatactaacatccaaacatgttaactgtttagtaaaacctttttactttgaaataactgcaggtcannnnnnnnnnnnnnnnnnnnnnnnnnnnnnnnnnnnnnnnnnnnnnnnnnnnnnnnnnnnnnnntgacgccagttcaagatagccctagccaacacggcgaaaactcagtctctatannnnnnnnnnnnnnnnnnnnnnnnnnnnnnnnnnnnnnnnnnnnnnnnnnnnnnnnnnnnnnnnnnnnnnnnnnnnnnnnnnnnnnnnnnnnnnnnnnnnnnnnnnnnnnnnnnnnaaagatcctgctctacaaa

SEQ ID NO: 32395 - DNA, 456 bp, Homo sapiens
  misc_feature (1)...(456): n = a,t,c or g
ggggnnntnnnattgaannctttgaanaccgnnnnnnnnnnnnnnnnnnnnnnnnnnnnnnnnnnnnnnnnnnnnnnnnnnnnnnnnnnnnnnnnnnggcacgagcaacattccagagactctgtcgcccaaggccaagtgcctcatccgaagcattctgcgtcgggagccctcagagcggctgacctcgcaggaaattctggaccatccttggttttctacagattttagcgtctcgaattcagcatatggtgctaaggaagtgtctgaccagctggtgccggacgtcaacatggaagagaacttggaccctttctttaactgagctcatgccccacggagacttagcaggttccaggagtgagcgagggcagcggaaaggagttcttccgggggacacgaattgcctggctgagtagcaagaaagacacactcttaagtttcttggttcagagc

SEQ ID NO: 32396 - DNA, 452 bp, Homo sapiens
  misc_feature (1)...(452): n = a,t,c or g
ggtgnntnnnttgaannctttgaanaccgcttgacnnnnnnnnnnnnnnnnnnnnnnnnnnnnnnnnnnnnnnnnnnnnnnnnnnnnnnnnnnggcacgagtgaacgtctcctctaccagaatataggtttcaggagacacagatttttgtcatttcgttcattgcttgctagatttctagtacctacagcagtgcctggcgcacagtaggtacttgataactcttttgaattaacccaataaagcaagctgctttatgttaatgcacagatggggagtaactgcaaagattatgcagttgacatttgtaatgatgagagtctcaagtgaagtttgggaggagggagatactcccgacaggagggacccgattttggcagccttcaatgacgagtctaggcggctatctcttatgccttgtctgtcgcttcatgctctttgcaccttggcat

SEQ ID NO: 32397 - DNA, 453 bp, Homo sapiens
  misc_feature (1)...(453): n = a,t,c or g
ggtgttnnnnnnctgaanaccttgnnnnnnnnnnnnnnnnnnnnnnnnnnnnnnnnnnnnnnnnnnnnnnnnnnnnnnnnnnnnnnnnggcacgagtctgtagaaagaaatggtgttaggaaaactgtaatactttgatagtgatgattattaaaggatgttttcagccaggaataatgcgaagtactgtttcagcattatttactccttataacaactttgtgacataggcaattatcaatgtatgagggaactgagacctacaacattagatacnnnnnnnnnnnnnnnnnnnnnnnnnnnnnnnnnnnnnnnnnnnnnnnnnnnnnnnnnnnnnnnnnnnnnnnnnnnnnnnnnnnnnnnnnnnnnnnnnnnnnnnnnnnnnnnnnnnnnnnnnnnnnnnnnnnnnnnnnnnnnnnnnnnnnnnnnnnnnnnnnnnnnnnnnnnnnnnng

SEQ ID NO: 32398 - DNA, 452 bp, Homo sapiens
  misc_feature (1)...(452): n = a,t,c or g
ngtgttntnnntnnganaccnttgnnnnnnnnnnnnnnnnnnnnnnnnnnnnnnnnnnnnnnnnnnnnnnnnnnnnnnnnnnnnnnnnggcacgagggaagaggaggatgaagaggccgaggaggagcgcctggctctggaatgggccctgggcgcggacgaggacttcctgctggagcacatccgcatcctcaaggtgctgtggtgcttcctgatccatgtgcagggcagtatccgccagttcgccgcctgccttgtgctcaccgacttcggcatcgcagtcttcgagatcccgcaccaggagtctcggggcagcagccagcacatcctctcctccctgcgctttgtctttagcttcccgcatggcgacctcaccgagtttggcttcctcatgccggagctgtgtctggtgctcaaggtacggnacagtgagaacacgctcttcattatct

SEQ ID NO: 32399 - DNA, 451 bp, Homo sapiens
  misc_feature (1)...(451): n = a,t,c or g
gnggnntnnnttganncttgaanaccgnttgactgattnnnnnnnnnnnnnnnnnnnnnnnnnnnnnnnnnnnnnnnnnnnnnnnnnnnnggcacgagggaagaggtgcaaggactgaaccatgagatatggaagtcaggaattaccagtggtgctacgtgctccaattaggtgaagtaagttaggattgaacaaggaccattatgtttagcaacattggggtcatttgatctcaaaatttacaagaataaatacttgagaaaagccaaagaaaatgtgaaaagttgtgactgagacttactagatatcagaacatactatgtacaccctctataattaaatcaatgctgaattgatacagaaatggacaaagagaccacaactgaaaactcagaatgttatgtgnnnnnnnnnnnnnnnnnnnnnnnnnnnnnnnnnnnnnnnnnnnnnn

SEQ ID NO: 32400 - DNA, 453 bp, Homo sapiens
  misc_feature (1)...(453): n = a,t,c or g
ggtgttntnnntntganactttgnnnnnnnnnnnnnnnnnnnnnnnnnnnnnnnnnnnnnnnnnnnnnnnnnnnnnnnnnnnnnnnnggcacgagagactttttttgtgtggttggtcaaccacaaaactcctgggtaagaatgctacaaagctacgagcaataagcaatgttatgattaagcctggaaataaatacaataataaatacaatcctaaagtaaactacatcaaactcagtgtcggtccaactatatttgcttgaagacaacactaaggaagggggagaatcaatcatatccacagaagagacattaatatgctccattcatcacagtaaacgctataaaagtgcgttgcgatattgtgtgctaccagtttaggtgatccgggagaagtgatctgttagggaataaatgctttttctcaaaggggactgctgaagaccagaacta

SEQ ID NO: 32401 - DNA, 457 bp, Homo sapiens
  misc_feature (1)...(457): n = a,t,c or g
ggngtntgnntttgatnctacngnanccctnttgacnnnnnnnnnnnnnnnnnnnnnnnnnnnnnnnnnnnnnnnnnnnnnnnnnnnnnnnnnnggcacgagaactgggctttacatatccaatctcatttaaacatcacaatgaccccacagggtatttttatttctagttcacaggtaaaggaaaacaaaattcaccatactttataaaaaataaacaggacaaagtcttcaaatttataagcacatattatccataatattttgtattcaaaaggcttaatgtcttacatttcaacttttttgagttattctgaactctaactagactaccctggaaggaagaaactcaggaccaaagcatacacgttttacatccatctgggttcccagaaagtgctacgcacacaaatgtttaatgaatatttgataatatctcaatgctcttgagtgctaa

SEQ ID NO: 32402 - DNA, 409 bp, Homo sapiens
  misc_feature (1)...(409): n = a,t,c or g
tttgaaannccttgatatccnttgattacgaatttaatacnnnnnnnnnnnnnnnnnnnnnnnnnnnnnnnnnnnnnnnnnggcacgagggagacagagaagtagaaagaaagcaatatgctagggcacatggcctctttgctgtgttctaatttctttcagcattccctcatatactctatcttggctggtatgccctggccttgttatgtagccataaatttctatttgcattcttcttcaatcaacacactaggcaagagtttagagatacagataaaagtatgcaaagaagccaagcagcattcctgagggtcattgttttagctggaaaagggtaatttctaaagcgttttcaaagaagaaaaaaaattacacttnnnnnnagtggngctaacatattctaaat

SEQ ID NO: 32403 - DNA, 406 bp, Homo sapiens
  misc_feature (1)...(406): n = a,t,c or g
tttgaannncttgnnnnnnnnnnnnnnnnnnnnnnnnnnnnnnnnnnnnnnnnnnnnnnnnnnnnnnnnnnnnnnnnnnggcacgagcggcacgagagggattgaaatgacttggatgtggagggagatggagggtccagaatcaccctggtgtctggggtcgtgagcagctgggtgcagtccctgggttgaggaaatgctcttgaggaaggatcatgcatttggatttaggtgtcatgagtatgggtttcttttgagatagctgggaaaaactaactggaaggccgccggacacttgggtctagagttgaggagaacccaggctgaagaccctggagcatcataggcattttgatgttctctgaagcgctnnnnnnagaaaaactgcctaagggaaaagcgtgga

SEQ ID NO: 32404 - DNA, 399 bp, Homo sapiens
  misc_feature (1)...(399): n = a,t,c or g
ttgaannctgattnnnnnnnnnnnnnnnnnnnnnnnnnnnnnnnnnnnnnnnnnnnnnnnnnnnnnnnnnnnnnggcacgagatggttttgagtgacatgatacggtgtgaacacgttagaaagtttgtgattcagttgagttgtgaagaacatgtatggatgaagtcttcggtgctcaagattatgcttgccagaatctactgtgatatatgggtaccaggttagaggattttctgaagctgttttttaccagccactcttgattatatagaagcgccagttaccttttgcctcataacagaccatcatagaatttagtgatggtttaaacatctccaggcatttattttgcttatgagtctgtgattgaggcnnnnnnnggcaagggtgnaacttgt

SEQ ID NO: 32405 - DNA, 402 bp, Homo sapiens
  misc_feature (1)...(402): n = a,t,c or g
tttganncnttgattcctnnnnnnnnnnnnnnnnnnnnnnnnnnnnnnnnnnnnnnnnnnnnnnnnnnnnnnnnnnggcacgagggcatgagccactacgcccagcaaggtattttctgaaaaggtggattgctgcttcaaaggacctggacccagaggccctgtccatgaatgtttcttgcttggttccgaggccaccaaacatactggctgagccttctgtattcaccctggcctatcaatgccatctatgagagcagccacactgagagagcagcagcatggagcctactcaagggtttgtttcaaaaatatatggaaaacaagaaaaaccaaaagaggaaaccatttctaatgaggagactagnnnnnnnnttctnganncaaanccttgctaatcaa

SEQ ID NO: 32406 - DNA, 396 bp, Homo sapiens
  misc_feature (1)...(396): n = a,t,c or g
anncttgattcatnnnnnnnnnnnnnnnnnnnnnnnnnnnnnnnnnnnnnnnnnnnnnnnnnnnnnnnnnnggcacgagggcttttgggaaatatttgttgactgaatgactgaatcagaccaaagtccccctgtttagggatggccagactcattccagcaagaggaagtcagctgcccagcccacagccagccagcagtggcacagttgagactggaacgctaggtcaggccctttctgctccacctcacagcctggcaaagacagaccgagaggtcgcccagggttggtgggggatggagctcacaagaatattacatatgcttcatagcttacgtgacagttcccttctcctggccatggnnnnnnacccttgngggccctggggtctttga

SEQ ID NO: 32407 - DNA, 398 bp, Homo sapiens
  misc_feature (1)...(398): n = a,t,c or g
tttgaannccctnnnnnnnnnnnnnnnnnnnnnnnnnnnnnnnnnnnnnnnnnnnnnnnnnnnnnnnnnnnnnnnnnnnggcacgaggagctaatgagcttcaataccctgcagaggctttagaaaatcatcnnnnnnnnnnnnnnnnnnnnnnnnnnnnnnnnnnnnnnnnnnnnnnnnnnnnnnnnnnnnnnnnnnnnnnnnnnnnnnnnnnnnnnnnnnnnnnnnnnnnnnnnnnnnnnnnnnnnnnnnnnnnnnnnnnnnnnnnnnnnnnnnnnnnnnnnnnnnnnnnnnnnnnnnnnnnnnnnnnnnnnnnnnnnnnnnnnnnnnnnnnnnnnnnnnnnnnnnnnnnnnnnnnnnnnnnnnnnnnnnnnnnnnnnnnnnnntcaagcctggga

SEQ ID NO: 32408 - DNA, 402 bp, Homo sapiens
  misc_feature (1)...(402): n = a,t,c or g
tttganncntgattcncnnnnnnnnnnnnnnnnnnnnnnnnnnnnnnnnnnnnnnnnnnnnnnnnnnnnnnnnnnnggcacgagggaccaaacgtggacagttctacagacatgttagtggaagataaggtgaagtcagtaagtgggccccaaggtcatcatagatcttgccttgtaaatagtggcaaggacaggcttcctcagaccatggaacccagcccttcagagacaagcctggtcgagaggccccaagtggggtctgtggtgcataggacttcccttggcagcactctcagcctgacacgttccccttgtgccttgcctttagccgaatgtaaagaggggcttgtgtgcaatggtgccccnnnnnnnngaaaaccagggcctaaaaagcagccccca

SEQ ID NO: 32409 - DNA, 399 bp, Homo sapiens
  misc_feature (1)...(399): n = a,t,c or g
anncttgannncctnnnnnnnnnnnnnnnnnnnnnnnnnnnnnnnnnnnnnnnnnnnnnnnnnnnnnnnnnnnnnnnnnnnggcacgagatcattaggattttttaattttaaggtctataaaaaaataactatttaaggaagaagcaccctcacctgcccccaccttttttatttgtttgtttttgagacagagnnnnnnnnnnnnnnnnnnnnnnnnnnnnnnnnnnnnnnnnnnnnnnnnnnnnnnnnnnnnnnnnnnnnnnnnnnnnnnnnnnnnnnnnnnnnnnnnnnnnnnnnnnnnnnnnnnnnnnnnnnnnnnnnnnnnnnnnnnnnnnnnnnnnnnnnnnnnnnnnnnnnntctcaccttgttgcccannnnnnnnttgaacttcttgac

SEQ ID NO: 32410 - DNA, 404 bp, Homo sapiens
  misc_feature (1)...(404): n = a,t,c or g
tttgaannccttgnnnnnnnnnnnnnnnnnnnnnnnnnnnnnnnnnnnnnnnnnnnnnnnnnnnnnnnnnnnnnnnnnnggcacgaggaacatacaacagtgaatgaaacagagcttctgctgcatggagcctacattctaatgagggaagacaaacagtaaacaagtgaataattaaacatatatgccaattggcggtaagagcagtaagcatagtagggagaatacagagggccaagaagtgattgcgcagcaattgctgtaatgtgcagagcacaggtgttgggggacaaggcagaagcagagagggcaggtaggagactgttgcagtaatctaggcataaggtgagggtggctcaaagcnnnnnnnntncagnggaaggaaactggcggtatttaaattc

SEQ ID NO: 32411 - DNA, 399 bp, Homo sapiens
  misc_feature (1)...(399): n = a,t,c or g
ttgaannntgatncctnnnnnnnnnnnnnnnnnnnnnnnnnnnnnnnnnnnnnnnnnnnnnnnnnnnnnnnnnnnnnnnnnnnggcacgannnnnnnnnnnnnnnnnnnnnnnnnnnnnnnnnnnnnnnnnnnnnnnnnnnnnnnnnnnnnnnnnnnnnnnnnnnnnnnnnnnnnnnnnnnnnnnnnnnnnnnnnnnnnnnnnnnnnnnnnnnnnnnnnnnnnnnnnnnnnnnnnnnnnntcttacattcttatctaagacccctaatactcataaaaggggaccagtttaaatatgcatttaatttgttctcttgttgataatgcttactaatctgtttattatacatgattgaaatattgtatattaggtcatgnnnnnnnatctggtaanggaaaa

SEQ ID NO: 32412 - DNA, 403 bp, Homo sapiens
  misc_feature (1)...(403): n = a,t,c or g
nntttgaanncttgatatcacnnnnnnnnnnnnnnnnnnnnnnnnnnnnnnnnnnnnnnnnnnnnnnnnnnnnnnnnnnggcacgaggtggcgtacactggagccttctccgtcctggctccctgcagggcctgtgctctgggcctctctcctgcccgggatgaaggacaccagtgagcagccctccccagagtaccccccaacacccatcccagtacacacccctgggggccatgctatgtatatgtggagggctcactgtcctccctgcctacaagcactgccactgcagcctccggccccccgacactggcatttggctcctccccaggcctgttccccgtctcctgtgggaatgagccagnnnnnnnncaaaaatctttganacaagggccttgcattg

SEQ ID NO: 32413 - DNA, 402 bp, Homo sapiens
  misc_feature (1)...(402): n = a,t,c or g
tttgaannccttgannnnnnnnnnnnnnnnnnnnnnnnnnnnnnnnnnnnnnnnnnnnnnnnnnnnnnnnnnnnnnnnnggcacgagcggcacgagaactggaggttagccaagcggccgtagtgnnnnnnnnnnnnnnnnnnnnnnnnnnnnnnnnnnnnnnnnnnnnnnnnnnnnnnnnnnnnnnnnnnnnnnnnnnnnnnnnnnnnnnngctactgcactctattctgggcaatagagtgagacttcatttctaaataaaaggagctagagaaacaagggaaagagagatctaagtattactgattttcaagctcatttcaaaaatgaaggtgataattgccaagtttaaatgaaaaannnnnnnnaaaatccantaagtcggccaggcgtggtggctc

SEQ ID NO: 32414 - DNA, 402 bp, Homo sapiens
  misc_feature (1)...(402): n = a,t,c or g
gaanncttgaanncccngctnnnnnnnnnnnnnnnnnnnnnnnnnnnnnnnnnnnnnnnnnnnnnnnnnnnnnnnnnnnnnnnggcacgagaaattagtccaaaattgctaaaacatgggtagtgaaaagtctgcctcccatgctgccctcctttctccactatctctcccgtgcatagaggaccccagagataaccactattattagtttcttatgtactcttctagacacaagaaaatttgaatatatactatctccctatccttttacacaataggtaagttgactctatttaatagaaattgaataaaaggagtatttagaaatatatgcaaaatcagtaaaacattcagttttatatnnnnnnnggactttttcanttcnttttaccgggaaaaaat

SEQ ID NO: 32415 - DNA, 406 bp, Homo sapiens
  misc_feature (1)...(406): n = a,t,c or g
tttgaaancntggntatcacntgattacnnnnnnnnnnnnnnnnnnnnnnnnnnnnnnnnnnnnnnnnnnnnnnnnnnnnggcacgagattttatactttatttaatggaactatatggtatatactcttgtttctggcattcttcacaacaggtttgtgatattcaactatctttttgcatgtagttgtaattcattctcattattagtgggggatactctacagtatgaagttttacataaatgtcatacttttaatatttagtaatttatattaaagatgattgcccattaatagggtatttattttgaagcagataaattttctcttgtttattcatttatactgtctcagccttagnnnnnnntaagaagacntnnaaaattggggncccntatngtagtt

SEQ ID NO: 32416 - DNA, 405 bp, Homo sapiens
  misc_feature (1)...(405): n = a,t,c or g
tttgaannccttnnnnnnnnnnnnnnnnnnnnnnnnnnnnnnnnnnnnnnnnnnnnnnnnnnnnnnnnnnnnnnnnnnnggcacgnnnnnnnnnnnnnnnnnnnnnnnnnnnnnnnnnnnnnnnnnnnnnnnnnnnnnnnnnnnnnnnnnnnnnnnnnnnnnnnnnnnnnnnnnnnnnnnnnnnnnnnnnnnnnnnnnnnnnnnnnnnnnnnnnnnnnnnnnnnnnnnnnnnnnnnnnnnnnnnnnnnnnnnnnnnnnnnnnnnnnnnnnnnnnnnnnnnnnnnnnnnnnnnnnnnnnnnnnnnnnnnnnnnnnnnnnnnnnnnnnnnnnnnnnnnnnnnnnnnnnnnnnnnaccgtgtcagaagnnnnnnntgnnaagancggaaacttctggagttggatagg

SEQ ID NO: 32417 - DNA, 403 bp, Homo sapiens
  misc_feature (1)...(403): n = a,t,c or g
tttnanccntgagntcatnnnnnnnnnnnnnnnnnnnnnnnnnnnnnnnnnnnnnnnnnnnnnnnnnnnnnnnnnnggcacgagcggcacgagagacacaggtcagtctctctagctttccttgcctgcctccctacagcaccatccacacatatacaccctttgcctggttaattcctattaagtcttccatcaagtctcagattagtaatatactgtaagggccagtctcaaacatgattgtaattatttaatatccattttgttcactgccgtatcctcgatgccaagcgtacatgtttaataaatagttgcctaatgattaaactttactgaaaagcttattgaagannnnnnncagtgacatggangtntccnatncngtcccantattgtcacagat

SEQ ID NO: 32418 - DNA, 483 bp, Homo sapiens
  misc_feature (1)...(483): n = a,t,c or g
nnnnnnnnnnnnannnnntnnnnnantannnnngnnnagnnnnnnntnnnnnnnnnngnnnnnagnnnntngnttntncntttggaancttgantcnttgattacgaannnnnnnnnnnnnnnnnnnnnnnnnnnnnnnnnnnnnnnnnnnnnnnggcacgaggatttttagcttttgtgtaccatttgctataattactttctgatagaatttgaatttgtaatgtaatggagttaattttaaaatatttgagaaatggctttatatatataatatcatattaattttttagacacataggattctgtaattgtttcatcctaacagatttttaaaaggaagcatataaagtaaatgaaacacactcttattatattcttctacttgaggtagaagaattctaaattaaaacttggaaaaaagaatttttatccgnnnnnnnnaattgagggatgnacctatanntttaataatcaccagaa

SEQ ID NO: 32419 - DNA, 450 bp, Homo sapiens
  misc_feature (1)...(450): n = a,t,c or g
ngtgnttgannntganaccgttatgacnnnnnnnnnnnnnnnnnnnnnnnnnnnnnnnnnnnnnnnnnnnnnnnnnnnnnnnnnnggcacgagcctgatcatagtcaacaccaacattgtcttccatttgacaaggcaggaaatctcaagtgtttcaccctgttaaaataattctactctagggccttctccaatccattctccacagaacagaaaaacaattctcttaaaacaaatttcctgatatgtggtgtgattcactgtcagcaaaataaatccaaatcctttccatggcctacaaggtcctacgtgatccagtccctgctagatgtccaggcttatttccttcccttgtattgctgcagtccctcaggtcttccaactccttgagtaccaaccaaactcccacctgaaattctgtgttgcatttcctccaccaaaaatatctct

SEQ ID NO: 32420 - DNA, 449 bp, Homo sapiens
  misc_feature (1)...(449): n = a,t,c or g
ggtntttgaacnttagancnnnnnnnnnnnnnnnnnnnnnnnnnnnnnnnnnnnnnnnnnnnnnnnnnnnnnnnnnggcacgagggtatcccttcagaagttgcccgtacggttgcctgaaggagaggccctgcagtgtttgacagaacgtgctatgagttggcaagatagagcgcggcaggctctagccacagatgaactatcctctgccctggccaaactatctgtgttgagccagcgtatggtggaacaggcggctcgagaaaaaactgaaaagatcatcagtgcagaactccaaaaagcagctgccaatccagacttacagggacacttacctagtttccagcagtctgcttttaaccgggtggtgagcagtgtgtcatcttctcctcgacaaacaatggactatgatgatgaagaaacagactctgatgaagacattcgagaga

SEQ ID NO: 32421 - DNA, 401 bp, Homo sapiens
  misc_feature (1)...(401): n = a,t,c or g
ctttggacttcgnaancccttggaaaacaccattacgattttnntaannnnnnnnnnnnnnnnnnnnnnnnnnnnnnnnnnnnnnnnnggcacgagttcactggnnnnnnnnnnnnnnnnnnnnnnnnnnnnnnnnnnnnnnnnnnnnnnnnnnnnnnnnnnnnnnnnnnnnnnnnnnnnnnnnnnnnnnnnnnnnnnnnnnnnnnnnnnnnnatccctttcctgatcacagttttagttaatttatttgtatcagtgtgtgcttatgagcccgnnnnnnnnnnnnnnnnnnnnnnnnnnnnnnnnnnnnnnnnnnnnnnnnnnnnnnnnnnnnnnnnnnnnnnnnnnncaagtaccccccttcaagtatcttttgacatgggcatcccttgatcatactg

SEQ ID NO: 32422 - DNA, 391 bp, Homo sapiens
  misc_feature (1)...(391): n = a,t,c or g
ntttgaacttcgaanncctnnnnnnnnnnnnnnnnnnnnnnnnnnnnnnnnnnnnnnnnnnnnnnnnnnnnnnnnnnnnnnnnnnggcacgagcacatcaaagtttcttgacaaaatagtttatgatgatctgttattccttcctcaagcccatctcattcacttctcaatctgtagcatctggctgctatcacctcttcactgggccacaatgactacccattagcccaacttattaaagaattcagtttttatcttccttgatttctctagagcatgagacactgtgaacatttccttctttcaaattctctttggcgtccaggaattaactttttttttcccttggcattcttcaacctctgggtanatccttatccattttttcaca

SEQ ID NO: 32423 - DNA, 396 bp, Homo sapiens
  misc_feature (1)...(396): n = a,t,c or g
tnnnntntttgactttgaannccttnnnnnnnnnnnnnnnnnnnnnnnnnnnnnnnnnnnnnnnnnnnnnnnnnnnnnnnnnnnnnnnnnnggcacgagtggaagaagggccttggtgcacactggcttttcttcctgactgcaatgtggcattgtgccagctacctcctctttctcggcctcaggaaaatggagagaaagcagccctgaaggtggctgtgacgagggaaggggcagagggcctgacagtcaaccacgcgctatattttcctgttcttccttagggcaagaactgcatggccagactcaggcaaggcctaggtgtgggctgggcattgcctacacgtgaagagatcactccgcgtccctactgcacctgtcacaaagtgccttctg

SEQ ID NO: 32424 - DNA, 404 bp, Homo sapiens
  misc_feature (1)...(404): n = a,t,c or g
gnnngnncttggntnttggactcggtnanncccttctnnnnnnnnnnnnnnnnnnnnnnnnnnnnnnnnnnnnnnnnnnnnnnnnnnnnnnnnnnnnnnnggcacgagcagccagggatggcaagtgtccttgtttaggcgaaagtagcttcctgtgggaggaggaacacacagaagacccgcagccaatcacttgctttctccatgtgggcggtggtcaccggtttagcttcgtgtgggatacacctaagcctggacctggcctagtaataggcgtccagttaacaaggatggcaattgacactcatcgggcagtcttgtgtgcctagtatccccttcaatcctcacgacgacccttagaaacaggtgtcactatttccattttgtagatgaggaaacagagg

SEQ ID NO: 32425 - DNA, 384 bp, Homo sapiens
  misc_feature (1)...(384): n = a,t,c or g
ttgactttgannccctctatgacnnnnnnnnnnnnnnnnnnnnnnnnnnnnnnnnnnnnnnnnnnnnnnnnnnnnnnnnnnggcacgagatttaacattagtgtagttttataatatcctgtgtatattctacaggataaaggataaagtaaaggatttgggctttaaacttttgctgttcattgctagggttataatacacatgtctttaacatgtgcatttaaaaatttagtagataatgtaatataaatttatttgtgtgcctatcctctaacttcacagcaagggtcacctgttcctatgggtgagagattcagcttttggtagggggagcgggatttatcccattacatttggactggcctccttttaggaattgctgc

SEQ ID NO: 32426 - DNA, 398 bp, Homo sapiens
  misc_feature (1)...(398): n = a,t,c or g
tnnnntntttgantttnggaancccttnnnnnnnnnnnnnnnnnnnnnnnnnnnnnnnnnnnnnnnnnnnnnnnnnnnnnnnnnnnnnnnnnnggcacgagagcagggatttttgtcttttttatttatctattttatctacttcnnnnnnnnnnnnnnnnnnnnnnnnnnnnnnnnnnnnnnnnnnnnnnnnnnnnnnnncgttataaccatccattggagtgaaagtgaacatctccaaatatttccataatgtgaaatgtaaaaagcaagttgcagcagactacatgcctttttataaagtttagaaacaagtaaaatnnnnnnnnnnnnnnnnnnnnnnnnnnnnnnnnnnnnnnnnnnnnnnnnnnnnnnnnnnnnnnnnnnnnnnnnnnnnn

SEQ ID NO: 32427 - DNA, 389 bp, Homo sapiens
  misc_feature (1)...(389): n = a,t,c or g
tttgantcnnnnnnnnnnnnnnnnnnnnnnnnnnnnnnnnnnnnnnnnnnnnnnnnnnnnnnnnnnnnnnnnnnnnnggcacgagtgactattgtgctcctttataattctgaaaactaatcagcactttttaacaatgtttataatcctataagtctagatgtatccaaaggtgaagtatgtaaaaagcagcaaaatatttatttcaaagacttcacttctgtttcctgaatctaaagaaagacaacatgctgctttttaatcataggatggagaattttaaagaacnnnnnnnnnnnnnnnnnnnnnnnnnnnnnnnnnnnnnnnnnnnnnnnnnnnnnnnnnnnnnnnnnnnnnnnnnnnnnnnnnnnnnnnnnnnnnnnnnnnnt

SEQ ID NO: 32428 - DNA, 467 bp, Homo sapiens
  misc_feature (1)...(467): n = a,t,c or g
gnnnngnnnnntgntttgntnncctnnggaatacccntnnnnnnnnnnnnnnnnnnnnnnnnnnnnnnnnnnnnnnnnnnnnnnnnnnnnnnnnnnnnnnnnnggcacgagcttaagtgctagaaggctgagatgtgccttatggagaaggtatgttagataagcttcattcaggtatcagttaaatgtttgcaaatcaacaacatattaaataaggtacctttaaacggaaacacgcataaaaccaagttacttatgcactggtttactacagtgttgtgaccagaattttgcaggaacctatccctatatattctctatagcactgatttagtattttatttcagtgttctaggtgactatagaacataactgctgtgaataatgaaaactatgcttagcactttgtttggtacattataataataacatttgttcagtgaataagtggatgaatgatctgttgt

SEQ ID NO: 32429 - DNA, 444 bp, Homo sapiens
  misc_feature (1)...(444): n = a,t,c or g
tttgnanaacngttatgacatgattacgaatttaatatnnnnnnnnnnnnnnnnnnnnnnnnnnnnnnnnnnnnnnnnnggcacgagaaagaggggcccatgtagtaaaaaggatgaggatttgaaaaggaaataaaatgggttttacctattttaaattttgcaacaatatgccactatgacaatggccagatagcttctgtagcttgcttagctctttttgataaaagaagttcacagaagatggaccccaccctggctgctgattgaaagattcatgatgcaggcagctgcccagcagcctctgagaaccaccctgcatcccagctcccatctcattgtaagtttttgtcgtcaatctcactgtcccttatagagtcagggctcttcctcctcgatgttttcacaacctggggactgtagtcccttaggganacaatgaat

SEQ ID NO: 32430 - DNA, 440 bp, Homo sapiens
  misc_feature (1)...(440): n = a,t,c or g
gnannnnnnnnnnnnnnnnnnnnnnnnnnnnnnnnnnnnnnnnnnnnnnnnnnnnnnnnnnnnnnnnnnnnnnnnggcacgaggagaagggtgagaaaggacagtctaagaagaaataaaagaacgagaagcaagcatgtcttcacatggcagtgggagtagggggaggtgctacacacttttaaaaacaagcagatctcatgagtattccatcacgagatagcactagggggatggtgctaaactattagaaaccactnnnnnnnnnnnnnnnnnnnnnnnnnnnnnnnnnnnnnnnnnnnnnnnnnnnnnnnnnnnnnnnnnnnnnnnnnnnnnnnnnnnnnnnnnnttatagcaggcagggacctgtttctttctgtggtggcactgtatttggttaatttggctaaagtggaaatatgtttccaaaatttcttcat

SEQ ID NO: 32431 - DNA, 461 bp, Homo sapiens
  misc_feature (1)...(461): n = a,t,c or g
gnnnngnnnnntgnnntnnnnnntntgataccgtttgacnnnnnnnnnnnnnnnnnnnnnnnnnnnnnnnnnnnnnnnnnnnnnnnnnnnnnnnnnnggcacgaggatattgatcgtgaagaagacctgtggaaataagaggtacagggctacccccaccccttggattgggaggctgggggtgcaaggctgcctctaccccaaagtagaacagggtgatagggccctacttgtgccattctcacagaagggggtatttttaaatggaatcatctgtggtaaccctgcccactttgcttactgtgcccgggaaaagaatttaatattcctacgctctcctcattcactttgttattatgtaaagactacaaactcccttagaaatgggggcctcagtagggcataattcagagcataaatcttacacaagaactatcatggtaccattcactgcctaaaag

SEQ ID NO: 32432 - DNA, 447 bp, Homo sapiens
  misc_feature (1)...(447): n = a,t,c or g
ttgganacntttnnnnnnnnnnnnnnnnnnnnnnnnnnnnnnnnnnnnnnnnnnnnnnnnnnnnnnnnnnnnnnnnggcacgaggggctcggcgtgggagtgggcggagggtgaggcctgctctggcttcaggctgttggcaaaggcgtgcaggtgcttcagcagcaggcgcaccaccaacacatgctcctcagtaggcgtgaacgactcctgggtggagaaggaggggtgagggcctgggaaggagcgtggcacccatatcactccgcctccaggtctgaccacatcccgccctgagccagttgctctgctgcccccacgggaggcatgagccaggccaggagtggggccaccccatggggcaccactgtgcctggcacccagatgtgccttgcactgcttggtctgaactgtgaccagctttgtggtatggaagtgcttggccca

SEQ ID NO: 32433 - DNA, 445 bp, Homo sapiens
  misc_feature (1)...(445): n = a,t,c or g
tttgatacctttnngaccnattacgaatttaatacgactcnnnnnnnnnnnnnnnnnnnnnnnnnnnnnnnnnnggcacgagatctgtgcctatttaaaggtggaaacttttgaacaggaatctaagaaaaaataggaatttatcagattgtcaggggacgggaaagatgttccaggcagaaggaatagcactttgagaggcacgggatagaaagatggcacaagaggatttttaacttattccatctggctaaaatgtagggggtaggccaggaaatagagagtgggagttgatcatgataggttgtgtatgtaatgctgagtaactgatattttaaattctataaatgaaggttttgagtagggaaatgatataataaggttgattaatgtattttattaaaagaatagctatttgtgtgtatttatttaaattgaagtttgc

SEQ ID NO: 32434 - DNA, 461 bp, Homo sapiens
  misc_feature (1)...(461): n = a,t,c or g
ggnagnnnngtgtnttgtnnnttnagatactcttangactgccnnnnnnnnnnnnnnnnnnnnnnnnnnnnnnnnnnnnnnnnnnnnnnnnnnnnnggcacgaggcaattagccttataaagggggcatggagaagtgaagtctagagagcagggcaaagaaagaactggtaaaatgtgaaaaggcgatatttagagagaaagtctcattttgctggactttcagcgtattctggttaaaatgtaaacaacatggtacattttcacattcatgggaaatctattacataaaccttgtatatgaatatggcaaagaagtttcaccaaaagtaaaaaaaaaaacnccttaaatntncatactttaaagtttttaattgatgccttnttacaaanacttnttactaacaatcagggttggccacagttgggcctcantccgtctatttcttntntcacctgatc

SEQ ID NO: 32435 - DNA, 459 bp, Homo sapiens
  misc_feature (1)...(459): n = a,t,c or g
ggnagnnnngtgnnttntgnnnagnataccctnnnnnnnnnnnnnnnnnnnnnnnnnnnnnnnnnnnnnnnnnnnnnnnnnnnnnnnnnnnnnnnnnggcacgaggtcatatgttaattgctccttcacatgagtaaagtgttttcacatttattattctgtttgattcttatagcaggctttattttaattgaagctctgagattaagtgatttccctaacaatagcttttttgtgtttatgtttgnnnnnnnnnnnnnnnnnnnnnnnnnnnnnnnnnnnnnnnnnnnnnnnnnnnnnnnnnnnnnnnnnnnnnnnnnnnnnnnnnnnnnnnnnnnnnnnnnnnnnnnnnnnnnnnnnnnnnnnnnnnnnnnnnnnnnnnnnnnnnnnnnnnnnnnnnnnnnnnnnnnnnnnnnnnnnnnnnnnnnnnnnnnnnnnnnnnnnnnnnnnnnnnnnnnn

SEQ ID NO: 32436 - DNA, 442 bp, Homo sapiens
  misc_feature (1)...(442): n = a,t,c or g
ttggaanaccagntnnnnnnnnnnnnnnnnnnnnnnnnnnnnnnnnnnnnnnnnnnnnnnnnnnnnnnnnnnnnnnnggcacgagtgaccagccactgctgtatgtgaggcaataccttaaggataaacaagcatggtgatgatgttcccaagattgcttggacatggttatggagtgggtggactcggcattgagaacacagtagtagctgctgcatctcatgacactattggatgggtgtcagcatggcatatgaatactgacggactgtgtgcacattctttcagcagtaatgattcattcttttcaaccttttctggatcggctcattcctttttgccaaaaaaaaccaaacaaacccaaaaaactatggtttagtgaaattgcatatgaacaagagttctaaacgagggatctgaaaactttttctgtgaagagctt

SEQ ID NO: 32437 - DNA, 506 bp, Homo sapiens
  misc_feature (1)...(506): n = a,t,c or g
nnannnnntaanatatcgnnncaannattnannntnnnnnntnnnnagntngnanatatttnanatatanggnngtttngnntntgaatcccttttgaatgannnnnnnnnnnnnnnnnnnnnnnnnnnnnnnnnnnnnnnnnnnnnnnnnnnnnnggcacgagactgggtacaataatttgataacacgaagctaggccaccaaagtatgtgctgtgttcataggccaggaaagaagaaatggatggtttactagagtaagggaacatggctaaagaaggcatgagtagggccacaaccagaatttctccacacacctctcataacactcccaacaccaaatatcctaattcctgcaggcagaaaatnggtanattttaaataaaacaattgaaccaccaggtacaaaaaagaaggcttcttggggatcacacaaatgacatataaaaacagnacttcctgggttctgcctcccactccacaaaacctggagctggntacttgta

SEQ ID NO: 32438 - DNA, 467 bp, Homo sapiens
  misc_feature (1)...(467): n = a,t,c or g
ggnagnnnngtgnntttgtntctcngnatacccttatgactgncnnnnnnnnnnnnnnnnnnnnnnnnnnnnnnnnnnnnnnnnnnnnnnnnnnnnnnggcacgagctggaattttctgtttcattgtcggtgtcctctgctccctgagaccatatgctctgtggggaggaactgtgtgacacactgtataccatgcaacttcaagggaaatcaatcatgttaggccactgctgaatacctccaagggtttcccatagcactgaaaccccaaacttaggaccctgcttacaaaggtgggtctggtggtagatgccacccacctcagccctccctaggacaccaattgcactggcctaccttctgccccagggcctttgcaccaaccaggccctaagcctgctgtgttccctgccttcttcaaggtcaagtcaggtcacagcctaaatgttaccaccttaaagattta

SEQ ID NO: 32439 - DNA, 477 bp, Homo sapiens
  misc_feature (1)...(477): n = a,t,c or g
aanaaccgtnnnnnnnnnnnnnnnnnnnnnnnnnnnnnnnnnnnnnnnnnnnnnnnnnnnnnnnnnnnnnnnnnggcacgaggtatcttttgttttaatacttggaactcatttcaagttccgagttggcccaggcaaccctgggagacagtgggaggtcattatattctggtaaccctcacttttgagttaagagcctaacttatttcctactcactatttctcctgtagctcttcaggcaagctgaattgaactcatgttgctttttccctttttgtttcagctcagtttgcaggggaagacccagtggtagctttggaagctgctttgcagtttgaagacacccgggaatccatgcacgcattttgtgttggccagtatttggaggtgaggctgtatgccttgagtgatgcagaggatggcaggggataccctctgtgtgtttgtgataggaatatttggatctagaantactg

SEQ ID NO: 32440 - DNA, 470 bp, Homo sapiens
  misc_feature (1)...(470): n = a,t,c or g
annaacagntnnnnnnnnnnnnnnnnnnnnnnnnnnnnnnnnnnnnnnnnnnnnnnnnnnnnnnnnnnnnnnnggcacgagtgggctcggcgtgggtgtgtatggactggggatgaggagtgtgaactgatggaaggagactctagactcagtgctctgcttggcacctgttccctggctggagggaactgcatcacaggctgcctaaggcaagggcttccctatgggcatctgtggcttttcaagatattctagttaccacggatgacactcaggtaagtttaataaccgtggactccatagctgacaccaagccggggcagaaagtggggccctgatcagccaggatcgttgggaaatacattgccctcaccgtgcaacttccttttctttccttggttttctgtggtgtttttttaaatctctctggtaggctgccttccttaacatctaaatcttgaaaaaaggaa

SEQ ID NO: 32441 - DNA, 495 bp, Homo sapiens
  misc_feature (1)...(495): n = a,t,c or g
gnngnnnnntnnntttgannnctttgaanacngttnnnnnnnnnnnnnnnnnnnnnnnnnnnnnnnnnnnnnnnnnnnnnnnnnnnnnnnnnnnnnnnggcacgagcagagctgggtggggcaagccttggactggagaaggtggtatgcatcccagggctggggcaggctggaggtgatggggaccagacctttcgctctgggcctttgatgtccctcaggtgctcctgaagagaaaaaatgaatccctttcctgctatttttccctcttcctaagatgtcatcggtgggctccaagggggacttcctgctggtcagcgagcatgtgattgaactgctgaccaaaatgtaccgggctgtgctggatgccacgcagaggcagcttacagtcaccgtgactgagaagttctcagtgaggttcaaggagaacagtgtggctgtcaaggtcgtccagggccctgcangtggtgacaacagcaagctncgcttcaaaaa

SEQ ID NO: 32442 - DNA, 491 bp, Homo sapiens
  misc_feature (1)...(491): n = a,t,c or g
gnnttnnnnntttgnagaccgtnnnnnnnnnnnnnnnnnnnnnnnnnnnnnnnnnnnnnnnnnnnnnnnnnnnnnnnnnnnnnnnnnggcacgaggcattaacaaactagaaactactacttcacattccaaaagtgtatctccacttagagattgcctctcttttcatttgtttcccttttccctgaacctccaataggaaaaatgatagtaaaaaatcagttgtggagacctaatcttaatacttagagtttaaattccaatccatacaccaggggcaaagagcaaagaagttgtgtctgtcacttaaaaaaacaaaacaaaaaactgattgagatgatccctgtagtgcttttaaagtgacaaatattttaccattttctctcatttttatcacacatgccgatgcggtagtattcctcgtctcttagagcttctggtagccccaagtgttcctttgcttgnggcaccataattcagtctctccctcc

SEQ ID NO: 32443 - DNA, 470 bp, Homo sapiens
  misc_feature (1)...(470): n = a,t,c or g
annaccgtnnnnnnnnnnnnnnnnnnnnnnnnnnnnnnnnnnnnnnnnnnnnnnnnnnnnnnnnnnnnnnnnnggcacgagattcacctaccatacaggccacctatttaaagtatacatttcaatggcttttagtatatagagttgtgcagtcatcacctctatctagatatttcatatcatctttatcacctcctaaaaaaccccatacacatcagcagtcacttcccctttccctctctcacatccctccagggcaggttcatataacagccaagcagaaagatagtaattgtgtctccaggatgatgagtgtttacatccccaaccccattcttatttcatcttcccagcagcacacagtcagagatggccattctgaattagaaagtctcaagttaaacagatttttcaggactgaaatgtaatttaatcatttccttctttgcaacttgccttttttaccttcc

SEQ ID NO: 32444 - DNA, 466 bp, Homo sapiens
  misc_feature (1)...(466): n = a,t,c or g
nnnnnnnnnnnnnnnnnnnnnnnnnnnnnnnnnnnnnnnnnnnnnnnnnnnnnnnnnnnnnnnnnnnnnnnnggcacgaggagagagctagcaccatgagcttcactgatcagaacacaggacttcaacccgaacactgccctgtcctgcaaagcaacaaatgcagtttgctgaaggctacagcaagatgcaaaggtcatttttaagacagagatcaatccgtaaattatttttcttagagaaatatttcttgcctgtgagggttgatgaaggacggatgtaaacatggttctttcttgagctctgtttctgctgatggcagcagtgattacagcaaatgcacttaaacgatgagcacgccagtctcccggtcccctaatcggaaatcgcctgctcagcttcagtttccctgaaaatgcttgaggccactgactgccttctcctcagaaaggggctctcttnaagc

SEQ ID NO: 32445 - DNA, 496 bp, Homo sapiens
  misc_feature (1)...(496): n = a,t,c or g
gnnngnnnnnntgnntntnnntttgagaccgtttgacnnnnnnnnnnnnnnnnnnnnnnnnnnnnnnnnnnnnnnnnnnnnnnnnnnnnnnnnnnggcacnnnnnnnnnnnnnnnnnnnnnnnnnnnnnnnnnnnnnnnnnnnnnnnnnnnnnnnnnnnnnnnnnnnnnnnnnnnnnnnnnnnnctttaagttagagaatagtttagtttaatatgtctgtgtaatactcagaatccacatacatgtatacatgtgttgtaaaatcatcagatatnnnnnnnnnnnnnnnnnnnnnnnnnnnnnnnnnnnnnnnnnnnnnnnnnnnnnnnnnnnnnnnnnnnnnnnnnnnnnnnnnnnnnnnnnnnnnnnnnnnnnnnnnnnnnnnnnnnnnnnnnnnnnnnnntttnnnnnnnnnnnnnnnnnnnnnnnnnnnnnnnnnntcttgcggggnnnnnnnnnnnnnnnnnnnnnnnnnnnnnnnnnnnnnnnnnnnnn

SEQ ID NO: 32446 - DNA, 474 bp, Homo sapiens
  misc_feature (1)...(474): n = a,t,c or g
naccngnnnnnnnnnnnnnnnnnnnnnnnnnnnnnnnnnnnnnnnnnnnnnnnnnnnnnnnnnnnnnnnnnnggcacgagtgtacttgtaatgttgggtgatcaggatatgtttgtagaatgactcttcaaaccctcctgacagccacgaagtgggtgttcattctgttttcccatctgtaaatggggagcggcacccatcccagtgggggaggcggggtgagagtgggcttggcacagctgctggtgggacaggcctggcgcccgggttccacggtcagcgcatcctcggccccgccctgttctctgccgcttgctttttatgttaatttgcctttgttttcttctgtgcctttacgtggtgcagctgacgtgttcctggatgtttatatgtggttgaattcttcgtgcattgaaaacgtgtggaagtctaaaaacattctgatagcaccttctgaaagcagtgaattggatg

SEQ ID NO: 32447 - DNA, 479 bp, Homo sapiens
  misc_feature (1)...(479): n = a,t,c or g
tttganaccttnnnnnnnnnnnnnnnnnnnnnnnnnnnnnnnnnnnnnnnnnnnnnnnnnnnnnnnnnnnnnnnnnggcacgagatgaagctcagctctttgctgataatgaggtttaacattgagataactggtttttaatctactttaagcagacttgctgtcaaacatctactgaaatatatttcactctaactactagcctgaggtagaggttatatagggacaacttcatctcatccaaacaaatgaactgcttcctacagtcggggtgctgcctttaacatagtcccaatatttgaatggcacacatggataaaaggatgctgtcagtcaggggctgcttgtgtgtcccaattcctaataggaataataggcatatctatgacctattcactgtgccccttggttggggaaggttttcagctgttcttaacttggcttgggccgttggaatcacctggggagctttacaagta

SEQ ID NO: 32448 - DNA, 492 bp, Homo sapiens
  misc_feature (1)...(492): n = a,t,c or g
gnngnnnnntgnnnttgtgnntatgaagactcntnnnnnnnnnnnnnnnnnnnnnnnnnnnnnnnnnnnnnnnnnnnnnnnnnnnnnnnnnnnnnnnnnggcacgagattcatttgctcattaatttagccggtctgtattgaacacatactcatgtgttttaggcacaatgtgttttggtacacatcagtacttttgatagatatttagaatgtcgcagtgttccacgagtccctgtcaagactgtcagcaggggaatttaagacataaaactcttctggttttaacttcctcctttttctagacagtgagaggactcattccctgttgtgaccactggataaaagtgataatgctttaaaaaaaaatgctactttattgctttttgtcctaatcttgttcacatagacttattggagatgctgtcacttgaacaaggagngaatctatgctctgtaggtagcctggcttgcctaaggacttgctgccaaa

SEQ ID NO: 32449 - DNA, 472 bp, Homo sapiens
  misc_feature (1)...(472): n = a,t,c or g
naccnttnnnnnnnnnnnnnnnnnnnnnnnnnnnnnnnnnnnnnnnnnnnnnnnnnnnnnnnnnnnnnnnnnggcacgaggtatgataaagtcaaagtttgattttctccatgttcattaaagttacgtaactgtgtaagtatgagattcataaagattttttgacatgcgttattttgtaacattactgacacactaaaattgttagttgtgtcttaattagtgattaactggaagcaacttatagtgacaaagaatcagtgcttatactaaagagcatttattactattttcctcaataaatgactttaagaatatattatcttnnnnnnnnnnnnnnnnnnnnnnnnnnnnnnnnnnnnnnnnnnnnnnnnnnnnnnnnnnnnnnnnnnnnnnnnnnnnnnnnnnnnnnnnnnnnnnnnnnnnnnnnnnnnnnnnnnnnnnnnnnnnnnnnnnnnnnnnnnnnnnnnnn

SEQ ID NO: 32450 - DNA, 492 bp, Homo sapiens
  misc_feature (1)...(492): n = a,t,c or g
gnngnnnnnntnnntttgnnnnctttgagaccgttatgacnnnnnnnnnnnnnnnnnnnnnnnnnnnnnnnnnnnnnnnnnnnnnnnnnnnnnnnnnggcacgagcagccatttaatccttatattttttgaggcacctgtcctaaacacaactacattggcatttaaacaaaagaggattttatgcttagaagtcaattggtcccattctctgggaaatcagggctttgctagggccacagtaagagaagccagggacagagtcaagacactccttccattaaatggtcttactcaaatccaattactgcacaatccctcctgggcccctggggtaccatgggagccttttaggtcgagtaggtctgggatacccagagataggtagagagctagggaatctcacaggtaaacatgactactcctgctgactagctcctctggatccatgggtggtaatgcttgcatccatgggcagcacaattgatggcc

SEQ ID NO: 32451 - DNA, 416 bp, Homo sapiens
  misc_feature (1)...(416): n = a,t,c or g
nnnnnnnnnnnnnnnnnnnnnnnnnnnnnnnnnnnnnnnnnnnnnnnnnnnnnnnnnnggcacgagtccagttaggcgatgggatcctgcagtggtctggtggcatttcttggaaccagatttacgtgaggagctctgtcctgctccctgtggagggctccagatagctcagaaatgaccagccaatggccttttgtttgggggcctgaggtcaagagagctgagagtattcgctcgactgagcacattcaggaagatcagggcaggcgtgtgggaggtccctcactccacgggacagaggcccctggacagcagaggaaacctacagctctgggtgaggggacacttggctttggtgtttgcactttacagatcctgcggtccacgaggggcctcaggagaggacgtgtcaggac

SEQ ID NO: 32452 - DNA, 415 bp, Homo sapiens
  misc_feature (1)...(415): n = a,t,c or g
nnnnnnnnnnnnnnnnnnnnnnnnnnnnnnnnnnnnnnnnnnnnnnnnnnnnnnnnnnggcacgagagactagtgtggcttcctgaatgagaaccagatggaagaaagttctatgaaatcaatgttgtaaatacaccagattgctactgggatgtcccttgctatttgtgggtagaatttataggatttcagtgtaactttgtaactgcaattcaattctgagtatgtctgtttgagctggtttgtctattctttgtgtctaaactaatgttacacagaaattaaaaagctaatttgtctttctttttgtttaaaaaaaaacaaccaacaatgtctttctcagctgaccttctgttcctcactctttggtctctggttgattggaaacctgcttctcctgcttcatttctccctc

SEQ ID NO: 32453 - DNA, 458 bp, Homo sapiens
  misc_feature (1)...(458): n = a,t,c or g
ggaggnntgnnttntnctcnnaanctntgatnaccatnnnnnnnnnnnnnnnnnnnnnnnnnnnnnnnnnnnnnnnnnnnnnnnnnnnnnnnnnnnnnnnnnnggcacgagcacacattgcctctcttgctatgtctcctgcgtctcttcttgtccttctcccaccattttttcccacgaataaattcattaatcagtaagaagtctgaggccctgtgaaaatctttccagagaagatctgttgcctgctttatttctcccaggctgtccaaagattcagcacctcttactccactgtttataacttcacccaggctgatgagatgaggacacaggaaaatgaatgaaaactactttctccccagtgaactagaaaaaaaatggaaaaggcaagggccaaaagaagccaggcaatagagtgagatttgagtcccagaaaataaaaagtggccttcaaa

SEQ ID NO: 32454 - DNA, 454 bp, Homo sapiens
  misc_feature (1)...(454): n = a,t,c or g
ggaggnttnnntntncctcggnatacncttatgacnnnnnnnnnnnnnnnnnnnnnnnnnnnnnnnnnnnnnnnnnnnnnnnnnnnnnnnnnnggcacgagcaaaagcataactttttaagagaaataaaaatcaatgtatatattttttaaatagaatttttaaaggtaaattatattaaagtgtttttcattggttctaatcaaggagggaaggcaaatgtttttcttttagtgaacaatattctttaaaactcttaaactgggagcagaggaacgtgaagaattctttcagaagggcttcatgtcacctcttcaacgaatcttttcttggcagaattatcaacaagtagcagcagccatgagtgctactaagtgtatattgaatatcactctcctgcgtgcggagaatctcgcctcaaacaaaatggacaaagactttcccttcctagagc

SEQ ID NO: 32455 - DNA, 435 bp, Homo sapiens
  misc_feature (1)...(435): n = a,t,c or g
tttganactctnnangccctntgnnnnnnnnnnnnnnnnnnnnnnnnnnnnnnnnnnnnnnnnnnnnnnnnnnnnnggcacgagnnnnnnnnnnnnnnnnnnnnnnnnnnnnnnnnnnnnnnnnnnnnnnnnnnnnnnnnnnnnnnnnnnnnnnnnnnnnnnnnnnnnnnnnnnnnnnnnnnnnnnnnnnnnnnnnnnnnnnnnnnnnnnnnnnnnnnnngactcagcannnnnnnnnnnnnnnnnnnnnnnnnnnnnnnnnnnnnnnnnnnnnnnnnnnnnnnnnnnnnnnnnnnnnnnnnnnnnnnnnnnnnnnnnnnnnnnnnnnnnnnnnnnnnnnnnnnnnnnnnnnnnnnnnnnnnnnnnnnnnnnnnnnnatcaatacttctttcatggatttacttattttttgctccctccttaccctaaaaactc

SEQ ID NO: 32456 - DNA, 439 bp, Homo sapiens
  misc_feature (1)...(439): n = a,t,c or g
tttganncnttgannccctntnnnnnnnnnnnnnnnnnnnnnnnnnnnnnnnnnnnnnnnnnnnnnnnnnnnnnnnnnnnnnnnnggcacgaggagaattttgtgaataacagcttactcgataaaaagtaattaacaacgcagagctcatattaaatgtcccataggtggtagctaagattgtcgactgtggtcagtcagtttagcttaggtaaagagcctttgttgaactttaatggaatacttttattttgaagagattcatgttttatgaattaagaattagagggcccagcctagtaatttttaaataatgaaatttaatctgctgaaannnnnnnnnnnnnnnnnnnnnnnnnnnnnnnnnnnnnnnnnnnnnnnnnnnnnnnnnnnnnnnnnnnnnnnnnnnnnnnnnnnnnnnnnnnnnnnnnnnnnnnnn

SEQ ID NO: 32457 - DNA, 396 bp, Homo sapiens
  misc_feature (1)...(396): n = a,t,c or g
tttganccttgnnnnnnnnnnnnnnnnnnnnnnnnnnnnnnnnnnnnnnnnnnnnnnnnnnnnnnnnnnnnnnnnggcacgagtgatgttaatctgtcctgatgtctttgtggccttgggcaagttatttaacctccttaggtctcagttccttgacgtgtaaaatgataatacctcttgtataggggttttatgagtattaaaaataatagatttaagttgatcagtatggtgcttgacattcttctttttcttatttctgatagcctaacccatcctgttccaactggggtgtattatcaatgtagcagaaaagacaaattatgctttgtaatgtttcatttgagtgtaccaatatantaaaaagggggctaaaggaagatttttttttttttt

SEQ ID NO: 32458 - DNA, 510 bp, Homo sapiens
  misc_feature (1)...(510): n = a,t,c or g
cnnannnnnaannnnnnnnnnnnnnnannnnnnnnnnnnnannngnangnannnnaagaggnagnnntcncnctttgaancctgggaancccctcttgacatgcnnnnnnnnnnnnnnnnnnnnnnnnnnnnnnnnnnnnnnnnnnnnnnnnnnnnnnnnggcacgagaactggaggatctactgcaatgaggagaaggcagtaactgcttaaggattagtactaatagtgattattagaaacagctgtgtactcagttgtagaacacatccagcagtagctggcaaaaggcacatgacattctgggtttttgcattttttccctttatccacccctttgggggtttattctccaataactggaagataatcaattacaactgagatttggngaaanattgatattgattggtaacctgtgagcacacactcctgtgttatctttcccatgagacagatttacaggagtgctggggagggatggggaggtcgggcttccaggaggagctg

SEQ ID NO: 32459 - DNA, 451 bp, Homo sapiens
  misc_feature (1)...(451): n = a,t,c or g
ggntgngttgtgctcnaatctctgnatgccctcnnnnnnnnnnnnnnnnnnnnnnnnnnnnnnnnnnnnnnnnnnnnnnnnnnnnnnnggcacgaggccatcatcctggcggccgccattgatctggggaatgggggatgaatggtaagtggacaagcgaaagcaccataccatccttttaccaaaatttcccagcctctttcctcattaagaactcccctggttactatgagttttgattagctttcagagttctgaaaaagttgattttgttagtttttgccagcttaacagtcacttcagtgaagagaaatttttggagccccctactctgctatgttttgtaatgatancccctccatggtggtgtttttaaatacttggggattttccagaaaactttttaaaaaattggnttctaatttaattattttatgggcagagaccatat

SEQ ID NO: 32460 - DNA, 452 bp, Homo sapiens
  misc_feature (1)...(452): n = a,t,c or g
tnnnttntnncttnnannctctnnatgccctctnnnnnnnnnnnnnnnnnnnnnnnnnnnnnnnnnnnnnnnnnnnnnnnnnnnnnnnnnnnnnnnggcacgaggaaaaacctggcttccaataaccttaaatatatggtacctatttgatcaatcccagtgtatgtaacttatctcccatcttccctgccactccctccctgctctgactctgattcccattgcaagccactctcccataagatgccttccttaactggcttgggctctgacactccgcatcaggacacactccttcctcacattaacactgtcttcacccagtgcaggttctgacacccataccaggctatgttagctctgtaccacctcccataccaaagatggtttaggattgaattgttcaggaagggatgggaaaggagagaaagtgagaaaaaatacangaaatc

SEQ ID NO: 32461 - DNA, 443 bp, Homo sapiens
  misc_feature (1)...(443): n = a,t,c or g
gagtagnttctctttgaantcngantcctnnnnnnnnnnnnnnnnnnnnnnnnnnnnnnnnnnnnnnnnnnnnnnnnnnnnnnnnnnggcacgagccctgacggtcaggatcttggcttattcattcgtcagttctccggcctacccccaccatccaccctgaaaggacctancctcaaggtcttgctnacaatgttctccagngttcactcaatgaaagcaagatatagcgcctggcancattccccaggggccanacatggtggcgagactccagttaantgtgcacgcncagaacacatcanaaagcattctggganaggagggctctgcagtcacccatctcanaccagccctgagcctgaaaacaccacttttgaccanagttccttatttttttcagtnagtgaacatgccannntacatctganggagacaagaaa

SEQ ID NO: 32462 - DNA, 427 bp, Homo sapiens
  misc_feature (1)...(427): n = a,t,c or g
ttganatcgnttccnnnnnnnnnnnnnnnnnnnnnnnnnnnnnnnnnnnnnnnnnnnnnnnnnnnnnnnnnnggcacgaggcaattgcagtgagagggaaggtaccttgtagaaaacctctagattttatgagcttgtttccctgactgcattccagagccacgtgtgagacttgggtttaacgtgacctgtccgtaaatcattttgctgaaattgcagtgagagggaaggtaccaggtagagaacctctagattttatgagcttgcttccctgactccattccaggtgatcttgatccaaaaatgacgaggctgggtggttgccattggtgtcacacccacatcccttgctgtgcaggtgcactgctcccagctgctgtgctggctgctagctgctcacagtggcccgtcctttggtctggaaagg

SEQ ID NO: 32463 - DNA, 429 bp, Homo sapiens
  misc_feature (1)...(429): n = a,t,c or g
ntttgaanaccngnnnnnnnnnnnnnnnnnnnnnnnnnnnnnnnnnnnnnnnnnnnnnnnnnnnnnnnnnnnnnnnnnnggcacgagcccttgtcaaatcttctgatctagatgttcctctgcctagaatgttcttcccagatgcttgcatggctcacttctttacttcctcgtgtcttttcccagctgccaccatttcagtgatgccttatcaggacatcatctctgccaacagtctcacttcattcttttctagaatacttaccaccttttaatgtactatatatattgacttatccattgtttttttgtctccctcgctgaatgcaagccctatgaaggcagggatttgtggttcctctggttcatcatcctttccctcacactccagggactagattgcatgtcgtcatggtgacagccaacatg

SEQ ID NO: 32464 - DNA, 253 bp, Homo sapiens
  misc_feature (1)...(253): n = a,t,c or g
tttgantccgattcccnnnnnnnnnnnnnnnnnnnnnnnnnnnnnnnnnnnnnnnnnnnnnnnnnnnnnnnnnnggcacgaggaagagaataaggagtggagactgtctctgtgttggaggttcagtgtcagtaggggagtcacttctgtgtctggggtgaggtaaggtagtagcagtaagcatcccatgagaggacctggaaggtgaggaaaaacttgggaagggcactagagcctgatttttttttttttt

SEQ ID NO: 32465 - DNA, 432 bp, Homo sapiens
  misc_feature (1)...(432): n = a,t,c or g
gggntnnntttganatctggaagaccntnnnnnnnnnnnnnnnnnnnnnnnnnnnnnnnnnnnnnnnnnnnnnnnnnnnnnnnnnnnnnnnnnnggcacgaggagagagctagcacctgagcttcaatnnnnnnnnnnnnnnnnnnnnnnnnnnnnnnnnnnnnnnnnnnnnnnnnnnnnnnnnnnnnnnnnnnnnnnnnnnnnnnnnnnnnnnnnnnnnnnnnnnnnnnnnnnnnnnnnnnnnnnnnnnnnnnnnnnnnnnnnnnnnnnnnnnnnnnnnnnnnnnnnnnnnnnnnnnnnnnnnnnnnnnnnnnnnnnnnnngtnggccnnaggggttannncnngaannccnancntttnggnngnccagggggggggnaaaccnnggggccngnatttcaaaaccaccnngcnaanngggggaaccccct

SEQ ID NO: 32466 - DNA, 431 bp, Homo sapiens
  misc_feature (1)...(431): n = a,t,c or g
ggtgntnncctttgatatctgatacctntnnnnnnnnnnnnnnnnnnnnnnnnnnnnnnnnnnnnnnnnnnnnnnnnnnnnnnnnnnnnnnnggcacgaggatgtcatcagaagcccacgagacttcttatgtatagaatgtggagtctgagggaaagggagacaccaagatgactccaaagcttttggcatgagcaattgctaaaatgaattgagatatcatttattgagatgaggaagagttgagacagagcagacctggagtgagggcagtgtgtgcaggaagaaaattaatagacttctggggggacatgttaagttttctatgtctattagaaatccaaatggttgtaagtaaataataggatatgagatgagttcagggaagagaacacagttagggaagtaaatgtgtacagcttgaatggggg

SEQ ID NO: 32467 - DNA, 465 bp, Homo sapiens
  misc_feature (1)...(465): n = a,t,c or g
gtgntnaaaatntgaaatccttattggagaccctnnnnnnnnnnnnnnnnnnnnnnnnnnnnnnnnnnnnnnnnnnnnnnnnnnggcacgagaactgggagtgtatcagcaaaataagggataaaattatccttactatatctacaatcaatatgaaaacacagtctaatggaaaaataaacatggccatagacagaatacagttattatattagatgttcaacttcactagccaatcaaaaaaccacacattaataaaaactttttgctcatcagataaatgacaaagaccattaatatacaatgccaaaggtgtgtgagaaaaagggtactttttctcactctcatgtgttactgttgggaatgaaattagcataaaggcaattcagcagttcttacaaatattaaaaatgcaaacatcaccgcttgaacctgaaatttcactctgaaaacttccattcatat

SEQ ID NO: 32468 - DNA, 461 bp, Homo sapiens
  misc_feature (1)...(461): n = a,t,c or g
ggtgntnnnnattgaanccttttaatgatcnnnnnnnnnnnnnnnnnnnnnnnnnnnnnnnnnnnnnnnnnnnnnnnnnnnnggcacgaggtattttaatgtattccctaaannnnnnnnnnnnnnnnnnnnnnnnnnnnnnnnnnnnnnnnnnnnnnnnnnnnnnnnnnnnnnnnnnnnnnnnnnnnnnnnnnnnnnnnnnnnnnnnnnnnnnncttannnnnnnnnnnnnnnnnnnnnnnnnnnnnnnnnnnnnnnnnnnnnnnnnnnnnnnnnnnnnnnnnnnnnnnnnnnnnnnnnnnnnnnnnnnnnnnnnnnnnnnnnnnnnnnnnnnnnnnnnnnnnnnnnnnnnnnnnnnnnnnnnnnnnnnnnnnnnnnnnnnnnnnnnnnnnnnnnnnnnnnnntaaaaactgtgtggtgccaactatgaaggactctgatctgacaataagcttgtactt

SEQ ID NO: 32469 - DNA, 460 bp, Homo sapiens
  misc_feature (1)...(460): n = a,t,c or g
ggggnntnnnntttganncaacnnaanctcttnnnnnnnnnnnnnnnnnnnnnnnnnnnnnnnnnnnnnnnnnnnnnnnnnnnnnnnnnnnnnnnnggcacgagattttgatacctggctttagggtctcagtgtattctaaacctgttaggctagagttgttcacttagccaagaagcaggtgtcagggttgatcagatacttgggtattccaaagtgagtgtttgtattagtctgttttcacactgctagtaaagatacaccttgggactgggtaatttataaaggaaaaggtttaatgggctcannnnnnnnnnnnnnnnnnnnnnnnnnnnnnnnnnnnnnnnnnnnnnnnnaggcacatcttacatggtggcaggcgggagagaaaatgaaagccaagtgaaaggagtttccccttataaaaccatcaagatcccgtgagacattcactaccatg

SEQ ID NO: 32470 - DNA, 458 bp, Homo sapiens
  misc_feature (1)...(458): n = a,t,c or g
ggtgttntnntncacngatcttcngagtccctcntgannnnnnnnnnnnnnnnnnnnnnnnnnnnnnnnnnnnnnnnnnnnnnnnnnnnnnnnnnnggcacgaggttgaggacccatcaactgtcatgaacatgattctagaagcacaggagtatgaactgtgtgaagagtggggctgcctgtaccccattccaagagaacatttaatcagccttcatcaaaagcatcttctccaccttctagaaagaagagatcatgacaaggctctgcaactcctgcgaagaatccctgaccccaccatgtgccttgaagtgacagagcaatccctcgaccagcacactagcttggccacttctcacttcttggccaactacctcaccacccacttctatggacaactgactgctgttcgacaccgtgaaatncaggcgctgtatgtgggatccaagattctgctg

SEQ ID NO: 32471 - DNA, 454 bp, Homo sapiens
  misc_feature (1)...(454): n = a,t,c or g
ggtgttntnntnatgatctcttgnnnnnnnnnnnnnnnnnnnnnnnnnnnnnnnnnnnnnnnnnnnnnnnnnnnnnnnnnnnnnnnnggcacgaggaagaacagggcccatggagcatgagagtcagattacatccctcctctggctgccatcctccatggctcccacctgtcttggtttcaaggcctgaggagattaggcagaagtggctgtgagatggggagatggtggggtgcggggagccagagagggaaggggcccagggaggagggagggctgctggcaacctgttgtgccagctggtggggctgcagggctgagcactgtggagtgaggaaggcgaggtcgctggtcaccctacagctgattggggggtaggagaaacacagcagctacagccagtacttcttgagatggagncttgntctgcacctanactgnaatgcantgcgtg

SEQ ID NO: 32472 - DNA, 455 bp, Homo sapiens
  misc_feature (1)...(455): n = a,t,c or g
ggtgtnnnnnntttgaannnctgaanaccctntnnnnnnnnnnnnnnnnnnnnnnnnnnnnnnnnnnnnnnnnnnnnnnnnnnnnnnnnnnnnnnnggcacgagnnnnnnnnnnnnnnnnnnnnnnnnnnnnnnnnnnnnnnnnnnnnnnnnnnnnnnnnnnnnnnnnnnnnnnnnnnnnnnnnnnnnnnnnnnnnnnnnnnnnnnnnnnnnnnnnnnnnnnnnnnnnnnnnnnnnnnnnnnnnnnnnnnnnnnnnnnnnnnnnnnnnnnnnnnnnnnnnnnnnnnnnnnnnnnnnnnnnnnnnnnnnnnnnnnnnnnntggcaccttattctttaccagtgtgcacttgcagtaaaatagagaagacagtttcacttaaggaagtccttgaggacacagaanaaatattaattttcctacatctcaagcctgagtgcatctttttaatattctg

SEQ ID NO: 32473 - DNA, 457 bp, Homo sapiens
  misc_feature (1)...(457): n = a,t,c or g
ggtgntntnnnattgannnntgaancnctntnnnnnnnnnnnnnnnnnnnnnnnnnnnnnnnnnnnnnnnnnnnnnnnnnnnnnnnnnnnnnnnggcacgaggaaatgcaattaacattaaaggattaagtgtgagatttcgatttatgctatttgtgtatcccatactcctcccttttaataaacagtttccactgatgatatgaagggccggtataaagaagtctttaaatgagtaagctttcttggtaagattaaatcttacaaattatttttaaaaccttgtgatatatacaatgtttagctgagttttctaattttctggatgtaaaacaaaaggtttaacctatacattccttgagctgttagtgctatttaaatcttttgccctgtttaggtcctaaacacttttagttgagtaggatatgagcttttttgggtctcatatcatgctttt

SEQ ID NO: 32474 - DNA, 459 bp, Homo sapiens
  misc_feature (1)...(459): n = a,t,c or g
ggtgntntnnnnntgaanactntgaatgccnnnnnnnnnnnnnnnnnnnnnnnnnnnnnnnnnnnnnnnnnnnnnnnnnnnnnnnnnnggcacgagctggaagattgtttagaattttcttaaattcttgagaaagataacttccttacttaaaagattttcacttaaaaggattgcctaaccagataattctcgaagtggtttggttaaccagttttagagagggatctaagcacgtttacaacagtacatgaaaggtgcctccctcatggttgagggctttaacccagaccggtacatttttgctagggatttttttgtctgaaaaataacggaagtggatgaccaggtgctgcttactaatcagtggtttttaaaatttgaaatgttttatttctcctgttaccttcagcatttaaaagcaggcatttcaaacaccattctgcattttggcttctg

SEQ ID NO: 32475 - DNA, 462 bp, Homo sapiens
  misc_feature (1)...(462): n = a,t,c or g
ggtgntnnnnnattgaanncntggannaccctctnnnnnnnnnnnnnnnnnnnnnnnnnnnnnnnnnnnnnnnnnnnnnnnnnnnnnnnnnnnnnnnggcacgagaaattcagagcagatagagcctgcgcaatggaataaagtcctcaaaattgaaatgtgacattgctctcaacatctcccatctctctggatttctttttgcttcattattcctgctaaccaattcattttcagactttgtacttcagaagcaatgggaaaaatcagcagtcttccaacccaattatttaagtgctgcttttgtgatttcttgaaggtgaagatgcacaccatgtcctcctcgcatctcttctacctggcgctgtgcctgctcaccttcaccagctctgccacggctggaccggagacgctctgcggggctgagctggtggatgctcttcagttcgtgtgtggagacag

SEQ ID NO: 32476 - DNA, 453 bp, Homo sapiens
  misc_feature (1)...(453): n = a,t,c or g
gtatgctttganacntnnnnnnnnnnnnnnnnnnnnnnnnnnnnnnnnnnnnnnnnnnnnnnnnnnnnnnnnnnnnnnnnnggcacgagggaatctgtagacacgctatcataaaatcaactttagcaatcactgcctttctctccactctattctctcctgggaagagtcaatgtgaataaacaatttcatcacctagaaagtggccagactttgaggccatcaatctgttcctgtaaaataaacattcccaggaagcaacctttccctggaggtacttatctagcagggagccagctagagagtgattattgaaatgtgaaaactgtttgaatagagaagctggaattgcagtttctccagtttgctctttgtcagtgggctttaactgataaatgacagttttagccacagactgaggtgttaggtaattttgtttatgtggtggaaagc

SEQ ID NO: 32477 - DNA, 451 bp, Homo sapiens
  misc_feature (1)...(451): n = a,t,c or g
ggtctttgaaccntnnnnnnnnnnnnnnnnnnnnnnnnnnnnnnnnnnnnnnnnnnnnnnnnnnnnnnnnnnnnnnnggcacgaggaagaattctttctgttaaaaataagtccaggcacaaagaggggaacnnnnnnnnnnnnnnnnnnnnnnnnnnnnnnnnnnnnnnnnnnnnnnnnnnnnnnagtaactattgagtactaggcttagcacctgggttacaaaataatctgtacaacaagaccctgtgacaggagagtttatgtatattacaaacctgcacatgtgcccaccaaaacctaaaataaaagtttgggggaaaaagtnnnnnnnnnnnnnnnnnnnnnnnnnnnnnnnnnnnnnnnnnnnnnnnnnnnnnnnnnnnnnnnnnnnnnnnnnnnnnnnnnnnnnnnnnnnnnnnnnnnnnnnnnnnnnnnnnnnnnnnnnnnn

SEQ ID NO: 32478 - DNA, 454 bp, Homo sapiens
  misc_feature (1)...(454): n = a,t,c or g
ggtgctttganacntnnnnnnnnnnnnnnnnnnnnnnnnnnnnnnnnnnnnnnnnnnnnnnnnnnnnnnnnnnnnnnnnnggcacgaggaaaggacaaagtggacacagacaaagacaatatgataggctgtgttaggggagctgccctcgtggtgccaggggcctgaggaccctggggatacttgagaccctaattggtatacttctctatggtcaggagttggagtacagccttgccagagttaactgtcataactcttgttactggccatgggtatttcatttcacactttctcctctactgatttattaattcaggaattgatacattaacttactagctatagttgaataaagcttaaattgtatattcagtattatgttttgaaatttttttagttttctcaaattgcacttacatttgcattcagatgctgagtttaatctgttaaa

SEQ ID NO: 32479 - DNA, 448 bp, Homo sapiens
  misc_feature (1)...(448): n = a,t,c or g
ggtntcnnaanctagaccgacacgaatttnnnnnnnnnnnnnnnnnnnnnnnnnnnnnnnnnnnnnnnnnnnnggcacgagaaaatgggaaaataatttattattttcccttgttatgttcttagtttgaagggtaagagcagcaataacaaaggatcaaaaatgggaattgactttagactaaagaacaaaacttcagaaattcaggtgaattgcaacattttcagcagaaagcaaacaagataatgaagaagagtactcttactctggacctatgagaaatctctgactacggaagagctaactagtcttaggaggtgggacctgacctctggcccacgagccaggctgccttgcacaactcagcaccaacaggtgctagtctaacacacctactcatctcagtggcttacctggacggtgacatggcaactgtaggtttcctcaa

SEQ ID NO: 32480 - DNA, 446 bp, Homo sapiens
  misc_feature (1)...(446): n = a,t,c or g
ggnnnnnttntntntntgnattnncnttnccatnnnnnnnnnnnnnnnnnnnnnnnnnnnnnnnnnnnnnnnnnnnnnnnnnnnnnnnnnnnggcacgagagcaagagaggaatgctcgctaccgaacccccaaagatcttggagcccacagccttccaggaacccccacccaagcccagccgacctaagtacagaccccctccgcaaaccaacctcctggctccaaagctgcagttccaggttcctgagggtctgtgtgccagctctcctacgctcaccagccctatggagtatccatctcccgttaactcactgcacaccccacctctccaccggcacaatgtcttcaaacgccacagcatgcgggaggaggacttcatccaacccagcagccgagaagaggcccagcagctgtgggaggctgaaaaggtcaaaatgcggcaaa

SEQ ID NO: 32481 - DNA, 436 bp, Homo sapiens
  misc_feature (1)...(436): n = a,t,c or g
ttnnntntttgatttcanttccacnnnnnnnnnnnnnnnnnnnnnnnnnnnnnnnnnnnnnnnnnnnnnnnnnnnnnnnnnnggcacgagggaacgtctgaggttatcaataagctcctagtccagacgccatgggtcatttcacagaggaggacaaggctactatcacaagcctgtggggcaaggtgaatgtggaagatgctggaggagaaaccctgggaaggctcctggttgtctacccatggacccagaggttctttgacagctttggcaacctgtcctctgcctctgccatcatgggcaaccccaaagtcaaggcacatggcaagaaggtgctgacttccttgggagatgccataaagcacctggatgatctcaagggcacctttgcccagctgagtgaactgcactgtgacaagctgcatgtggatcctga

SEQ ID NO: 32482 - DNA, 411 bp, Homo sapiens
  misc_feature (1)...(411): n = a,t,c or g
gnnnnngnnnntngtnnntttgannancngatgccttggaacgaccnnnnnnnnnnnnnnnnnnnnnnnnnnnnnnnnnnnnnnnnnnnnnnnggcacgaggtgattacaggcatgagccatcgcacctggccatgagggcttttagatgggtctggagcttggaggagaagtctgaactaaggataaactaaagagaggccaatgagacttgaaccctgagcctaagttgtcaccagcaggactgatgtgcacacagaaggaatgaagtatggatgtgaaagaacgcaggccttactgctccctgaccaagagcagacgagagaaggaacggcgctacacaaattcctccgcagacaatgaggagtgccgggtacccacacagaagtcctacagttccagcgagacattg

SEQ ID NO: 32483 - DNA, 392 bp, Homo sapiens
  misc_feature (1)...(392): n = a,t,c or g
aannntttgaanccctnnnnnnnnnnnnnnnnnnnnnnnnnnnnnnnnnnnnnnnnnnnnnnnnnnnnnnnnnnnnnnnnnnggcacgagcaaggtttacataggtttttaattcagcagggaaaattaaaattgaacatgtcttcagaattacactttatgggatttgaatacattcttcattcagagcaggcatttagttgtgagattttggattcttaactaagacaatatggaaagatttctcaaaagcnnnnnnnnnnnnnnnnnnnnnnnnnnnnnnnnnnnnnnnnnnnnnnnnnnnnnnnnnnnnnnnnnnnnnnnnnnnnnnnnnnnnnnnnnnnnnnnnnnnnnnnnnnnnnnnnnnnnnnnnnnnnnnnnnnnnnnnnnnn

SEQ ID NO: 32484 - DNA, 392 bp, Homo sapiens
  misc_feature (1)...(392): n = a,t,c or g
aanncttgaanncctnnnnnnnnnnnnnnnnnnnnnnnnnnnnnnnnnnnnnnnnnnnnnnnnnnnnnnnnnnnnnnnnnnnggcacgagcaaaaaggagctgcaagagagtatggttgatccaacaagccagactttttaaattaatgtagttattcattattcaataaatacttatacatctgccaggtaccaggtatgctagggaataggggaaaataaagaaaatccacagatcttactcatgtagggtgaaaggtaccaagtaatttcatctctctgcacatcagttttctcatctgtgcgatggagatctgtaaaaattgggacagtttttacaatttcttttttacaatttatactgtttacaattcagtcgttgttaaaggaga

SEQ ID NO: 32485 - DNA, 387 bp, Homo sapiens
  misc_feature (1)...(387): n = a,t,c or g
cttggaanacnnnnnnnnnnnnnnnnnnnnnnnnnnnnnnnnnnnnnnnnnnnnnnnnnnnnnnnnnnnnnnnnnnnnnggcacgaggtaaggattgtggtttatagaaatgctcttatgtattggtttagtaatcctggtttatagtttattttgaacttgatttatgaacagaagtattactctcatttattaaggctgatgggtttctctccccaccctctcttcagaactttctgctttgtcctttctaataaatttgggagtgtggaacacactgtccatgattcttccttccaacattagattttagactaattaacagaagaaagcaagcatctttcaaaaacttgactttaagtacttgggtatatataatcaggacca

SEQ ID NO: 32486 - DNA, 391 bp, Homo sapiens
  misc_feature (1)...(391): n = a,t,c or g
ttgaanacttgannnnnnnnnnnnnnnnnnnnnnnnnnnnnnnnnnnnnnnnnnnnnnnnnnnnnnnnnnnnnnnnggcacgagaccactgcaccagaagccacggaggcacagaccactcaacccacagccacggaggcacagaccactccactggcagccatggaggccctgtccacagaacccagtgccacagaggccctgtccatggaacctactaccaaaagaggtctgatcatacccttttctgtgtcctctgttactcacaagggcattcccatggcagccagcaatttgtccgtcaactacccagtgggggccccagaccacatctctgtgaagcagtgcctgctggccatcctaatcttggcgctggtggccactatcttct

SEQ ID NO: 32487 - DNA, 394 bp, Homo sapiens
  misc_feature (1)...(394): n = a,t,c or g
gaannctttgaanncctnnnnnnnnnnnnnnnnnnnnnnnnnnnnnnnnnnnnnnnnnnnnnnnnnnnnnnnnnnnnnnnnnnnggcacgagagacagtccagccagccaggaaacgaagaaatgatagagtatctaatacatgaatttaagcatggaacatccatgactattagcactaacaaaaagagaagcacccagacattacacatctcctgaaagaccactctaacacccatgaagtgatcttgcccatcctcaaataattcaaactcaaatctgattaagacttgcccccctgccccacggcaaaaaaatagacaaaagaaaatttagcctagaatctgatcaaggctctatatccaactatcaatttataagcgggcagaggaaca

SEQ ID NO: 32488 - DNA, 392 bp, Homo sapiens
  misc_feature (1)...(392): n = a,t,c or g
tttgaanacnttgannnnnnnnnnnnnnnnnnnnnnnnnnnnnnnnnnnnnnnnnnnnnnnnnnnnnnnnnnnnnnnnggcacgaggaagaagatagcgggatggagcagggaggcaacaaaattctcaatcagtacagcagcagcagtacctgtggtgaaggtactattcccctctccactttataagtgagtaaacagaatcagagaggtagagcaatttacccaggcttacacagcaagcgattggtgaacctaggcatcaaatccagttctgtccatttccagggcctatgtgtcagcctctgttcccaccactcatttcttctaagtcctgagtgctaggactgggaggggatgtgtcactggggatgtccgtctgtgtgtgccgtg

SEQ ID NO: 32489 - DNA, 470 bp, Homo sapiens
  misc_feature (1)...(470): n = a,t,c or g
atanngnnaannnnnnannnnnnnnnnnnnnnnntntnnnnnttnnnntnattanaannnnggnagnnnagnnnnntannttgaaancntgaagcctcntgacatgannnnnnnnnnnnnnnnnnnnnnnnnnnnnnnnnnnnnnnnnnnnnnnnnnnnnnggcacgagggaaaacgagttttccaggcacagactacaggggtaaactggcttcaaactagagagggagaaagggggtctctgagcatggggcagttgagctgaaagagatctcaggggaccagagcaagcaaaagtgttccaggcagagggaagagcatgtgtgaggtctctgagacaaagacctggtcatttcagaatcccagtggccactaaaatagagggattccaacctaaaaaggaggaagaggaggctgctggaaagcaaagtactctgtgtaagaatcataatagtgggggtggagccaaa

SEQ ID NO: 32490 - DNA, 388 bp, Homo sapiens
  misc_feature (1)...(388): n = a,t,c or g
annntttgaannccntnnnnnnnnnnnnnnnnnnnnnnnnnnnnnnnnnnnnnnnnnnnnnnnnnnnnnnnnnnnnnnnnnnggcacgaggcctcagtcatcatgggtctctctcccatcttgggcaaagacaacaccatcgagcacctcttgcccctcttcctggctcagctgaaggatgagtgccctgaggtacggctgaacatcatctctaacctggactgtgtgaacgaggtgattggcatccggcagctgtcccagtccctgctccctgccattgtggagctggctgaggacgccaagtggcgggtgcggctggccatcattgagtacatgcccctcctggctggacagctgggagtggagttctttgatgagaaacttaact

SEQ ID NO: 32491 - DNA, 384 bp, Homo sapiens
  misc_feature (1)...(384): n = a,t,c or g
annctttgaancctncttgacnnnnnnnnnnnnnnnnnnnnnnnnnnnnnnnnnnnnnnnnnnnnnnnnnnnnnnnnnnggcacgagcacgagagagactgtggcccatcaacagacgttgatatgcaactgcatggcatgtgctgttttggttgaaatcaaatacattccgtttgatggacagctgtcagctttctcaaactgtgaagatgacccaaagtttccaactcctttacagtattaccgggactatgaactaaaaggtgggactgaggatgtgtatagagtgagcgtgtgattgtagacagaggggtgaagaaggaggaggaagaggcagagaaggaggagaccagggctgggaaagaaacttctcaagcaatgaag

SEQ ID NO: 32492 - DNA, 389 bp, Homo sapiens
  misc_feature (1)...(389): n = a,t,c or g
tttgaanaccttgannnnnnnnnnnnnnnnnnnnnnnnnnnnnnnnnnnnnnnnnnnnnnnnnnnnnnnnnnnnnnnnggcacgagagactgcatagggtcggcgtggtggcaaggggaacccttcttcccggaaggtccttcctatttctaacgtggtggcaaggggaacccttcttcccggaaggtccttcctatttctaacgtggtggcaaggggaacccttcttcccggaaggtccttcctatttctaacgtggtggcaaggggaaatgccccttgtcttgtccaccctcattcgtccccttccctccccagtaatggccactggttgccctaggaaccacccaggctcttcccagaggacccgaatgggcaggtagccacagtg

SEQ ID NO: 32493 - DNA, 386 bp, Homo sapiens
  misc_feature (1)...(386): n = a,t,c or g
tnctttgatncctnnnnnnnnnnnnnnnnnnnnnnnnnnnnnnnnnnnnnnnnnnnnnnnnnnnnnnnnnnnnnnnnnnnggcacgagcggcacgagaagaaaaacttgtaatcacactgcagtagtcaggataggctaagttgtgccacaggaacaagcaagtccaaaatcctagtgacctaaaaacagcaggtttattcctcactcacactgtgtgtccatcgaaggttggatgagagttttgtttccacttcaccatcctctgggacccagactgatgtgaaatcaccatctgggatgttgccagttgccaaaacagaaggaagactaatggagggtctcatattagcaagacacattttggcctctaagtgacatatatcag

SEQ ID NO: 32494 - DNA, 382 bp, Homo sapiens
  misc_feature (1)...(382): n = a,t,c or g
aanctttgaancctctnnnnnnnnnnnnnnnnnnnnnnnnnnnnnnnnnnnnnnnnnnnnnnnnnnnnnnnnnnnnnnnggcacgagcggcacgaggtggaattaatgtgaggaatcgtatgcaacacacttgcactcctgctctaaactgatgattggaaagttctctaaagtgactgctaacagcgtttatttcttttgtccctgagtcaaacatatacgttgtaaccatctatgtgtggagttaacacccataaacctggtgctcaagagggacctcagaattagagcagctaatgaaaaacagggcaggaacattgaggaagccgtgggggtctccagcctcctggaactctgctcttcacagtccacacagtcacgt

SEQ ID NO: 32495 - DNA, 404 bp, Homo sapiens
  misc_feature (1)...(404): n = a,t,c or g
gnnnnnttnnntnnaaatttgannctctgannnnnnnnnnnnnnnnnnnnnnnnnnnnnnnnnnnnnnnnnnnnnnnnnnnnnnnnnnnnnnnnggcacgaggtttcacttgctacaaaggagtattttgaatataactccatgggagtttgtttcaaactcacattaaaataggaatgaatgcaaaaacagcctttcctgggagcaggctttgtgggcggtgggaggaaggagtgccaaggtgtccaaaggggaaggaatagagaaaggaagatacctggtgggtgattgagggcccgaaagacagaccctccctgcttccaatttgtttttcccctggagccagcctgcggactagccctattggatattccatggcaggcatcttcccctgaaccctaaat

SEQ ID NO: 32496 - DNA, 384 bp, Homo sapiens
  misc_feature (1)...(384): n = a,t,c or g
cttggaanncnnnnnnnnnnnnnnnnnnnnnnnnnnnnnnnnnnnnnnnnnnnnnnnnnnnnnnnnnnnnnnnnnnnnnggcacgaggggagattaagtttcttctgaggataaaaaaagattagaagttagattggtattgtcttagggggaaaacaggcaagtagaatgataatagaactttgttgccatagaatatacaactaagtaatactgtttataatgttccaatttactacaggttgtgcatgcaagcagtcctctgtttatctcctcatcctccagtgtcacatgtcaattgccctgtcactaactaatcacaaaccacactggccttttattagtttcttgaatggcattaaattctttctgtctcagtcaggg

SEQ ID NO: 32497 - DNA, 383 bp, Homo sapiens
  misc_feature (1)...(383): n = a,t,c or g
ctttgaannncctnnnnnnnnnnnnnnnnnnnnnnnnnnnnnnnnnnnnnnnnnnnnnnnnnnnnnnnnnnnnnnnnnnnggcacgagctaacatagagtgatctcttttactgtaagaaagatacatgtattatgtatgaattagtaaggttgtcatctcctgtttttcagggtcctcattctccatttgaaacgatatagcttcaatgtggctctctcgcttaacaataagattgggcagcaagtcatcattccaagatacctgaccctgtcatctcattgcactgaaaatacaaaaccaccttttacccttggttggagtgcacatatggcaatgtaagtccttgagagactatgtctttatattcccttttgaaataga

SEQ ID NO: 32498 - DNA, 385 bp, Homo sapiens
  misc_feature (1)...(385): n = a,t,c or g
ttgaanacttgannnnnnnnnnnnnnnnnnnnnnnnnnnnnnnnnnnnnnnnnnnnnnnnnnnnnnnnnnnnnnnnggcacgagagaaaagaaagaagtacggttagggttataagatattcatgacatgctgttaaaggggaagcgcagactgaagaatagcataatggtattcctcatattaaaattttgtgtatctagtctatatttagaaagctgannnnnnnnnnnnnnnnnnnnnnnnnnnnnnnnnnnnnnnnnnnnnnnnnnnnnnnnnnnnnnnnnnnnnnnnnnnnnnnnnnnnnnnnnnnnnnnnnnnnnnnnnnnnnnnnnnnnnnnnnnnnnnnnnnnnnnnnnnnnnnnnnnnnnnnnnnnnnnnacgggg

SEQ ID NO: 32499 - DNA, 385 bp, Homo sapiens
  misc_feature (1)...(385): n = a,t,c or g
tttgaanacttgannnnnnnnnnnnnnnnnnnnnnnnnnnnnnnnnnnnnnnnnnnnnnnnnnnnnnnnnnnnnnnnggcacgagccctgaagagactggacaccttgctctgggagacatgggccagaacttttgaaaggactatgatgagatcctctttcctggagctcttgataatggtcccaccctctgagcctccctacccccaccattaaataaaagtcttccctagaaatggtggagtcgggatagacaagatgacccaataatggctggctggtgcactcatcattatttatatgttgagtgtatgtctcctgtccaccatgggtggaggcaatttatggactttggggtcagttcagattctgcctcttccactca

SEQ ID NO: 32500 - DNA, 385 bp, Homo sapiens
  misc_feature (1)...(385): n = a,t,c or g
aanncttgaannccatctatgacatgattacgaatttaatatnnnnnnnnnnnnnnnnnnnnnnnnnnnnnnnnnnnnnnnnnggcacgagtagttatgtcactctgcataattttatatttagagttacctgtgttgtagcatgtatcagtattccattcctttttatatctaatatttcactgtatgcatacaccacctttggtttatctgttgattaatttatggaaaattggtttccactttttgtgtggatgtgttttcactctcctgggtgttaagtgtttcacattttgaggccctgccactgtttcccatagcggctgcactattttccattccctctagcagtgtgcgagggctctgattctccacatcgttcccg

SEQ ID NO: 32501 - DNA, 385 bp, Homo sapiens
  misc_feature (1)...(385): n = a,t,c or g
tttganncnttgannnnnnnnnnnnnnnnnnnnnnnnnnnnnnnnnnnnnnnnnnnnnnnnnnnnnnnnnnnnnnnnggcacgagctgggtactcaagtaaaggtgggtacgattttttttagggcaaagtactcttggaaaaaaaagtgacatgaattggcatgaccgttcaggaaggatgatggtctgtttggaatgcaggctcagggagggaagagggaagaaatggaggaccagatcatggaagatctaacatgtctcattgacatctcagactcaacatacatactccaagccaaatttgtgtttcccacgtgctcttcccctaaaagggaacatcgttcctccagctgttcaggccccaaaccttggactcctgttcac

SEQ ID NO: 32502 - DNA, 386 bp, Homo sapiens
  misc_feature (1)...(386): n = a,t,c or g
gaanncnttgannccctnnnnnnnnnnnnnnnnnnnnnnnnnnnnnnnnnnnnnnnnnnnnnnnnnnnnnnnnnnnnnnnnnnggcacgaggtgtgaaataagcaagtgtggtcttgaggtgggagtagggcagatggtaaaggattgattaaaggctgagatgtagaaggagctgttgagtgtactgtcaagcattttcagattacatccatagggaatacaactgttaaataatcaggttgatggacttttttttgcactcactggtctaaatgtatacatggagacagtgggtgctgctttggaagaaccatgaagtggtgggcaagagagtcattttagaattgtgaagatgtgtcattttaaaatgacaggagagtcattt

SEQ ID NO: 32503 - DNA, 387 bp, Homo sapiens
  misc_feature (1)...(387): n = a,t,c or g
ttgaanacttgannnnnnnnnnnnnnnnnnnnnnnnnnnnnnnnnnnnnnnnnnnnnnnnnnnnnnnnnnnnnnnnggcacgaggctctaatttagtcctggcacatcagcagcagcaagtgttgtctaggtttcccataacacctaaggttaagaagtggcacaggacgataacagtagcctgagaaggaaagacaaaggaaaaactgggtttttgtcttctttcttcttaggagtaggccactgttgctgctacccctgaaggcaaaggcagacctcttgggaataacatgctatcatgctcccctcagagaccacaaaccttcctcttccattgatctgtgatacttctgcttcttattctctgggggactttttgcatctggg

SEQ ID NO: 32504 - DNA, 479 bp, Homo sapiens
  misc_feature (1)...(479): n = a,t,c or g
ntcgnnatnnggtnnnggnngacgnanganngncnctctagcnntnntannantnnannatntgnnnatngtcnngngatgnngannnnaattgaaancnttgaaanccctctnnnnnnnnnnnnnnnnnnnnnnnnnnnnnnnnnnnnnnnnnnnnnnnnnnnnnnnnnnnnnnnggcacgagatttaatgttgagtatgtaagaggagcagggttatttgctttcttactgctctaaatacagtgtttataggaagttataatatcttcttttatctggttctcctcacccttttcaaaatactgggaaaacaagctcttaaggcttaagcaaattcatgttagttgtttgtgaccctgatctcaaaagagataatacctttggttaatgatatacatagtacctttggttaatgataaacgtcgaatttttttttctaattttactacagctaatgttgagaaactattcatatac

SEQ ID NO: 32505 - DNA, 387 bp, Homo sapiens
  misc_feature (1)...(387): n = a,t,c or g
tttgaanacntgannnnnnnnnnnnnnnnnnnnnnnnnnnnnnnnnnnnnnnnnnnnnnnnnnnnnnnnnnnnnnnnggcacgagtgcatcagacccaggcactcatgggccaccatgccggattgctgccgtggccaccgctcagcaacaatatgatagtgacacctcctgtcattataaagtcgagctcagctatgagaatttcatcacctctggcccagaccctcacccgcctcccattgcagatgatgaaagcgatgatgatgacgatgatgacatccctcaggaggaccactacgccctgctggtgaaagcatgggagaccaaggtttttcctaccatccgaagacgcttccgcaatgaagcagagcggaaatcgggcctgg

SEQ ID NO: 32506 - DNA, 387 bp, Homo sapiens
  misc_feature (1)...(387): n = a,t,c or g
tttgannccntgannnnnnnnnnnnnnnnnnnnnnnnnnnnnnnnnnnnnnnnnnnnnnnnnnnnnnnnnnnnnnnnggcacgagtnnnnnnnnnnnnnnnnnnnnnnnnnnnnnnnnnnnnnnnnnnnnnnnnnnnnnnnnnnnccagaaaacatactctgtgtgttttaattccttggacttgattgagacttgtttcatgattcagcatatggtctgccttgcaggagtctaaaaactcaaacgtatctaaaagccatgacacagaaggcctggagactgcatggaatgatgaggactgcagtgaactctgaagtgcctacccatgtgaaacgaacaagtgctattcggaagaagcaggttgtgttaatctgaggcctttgaga

SEQ ID NO: 32507 - DNA, 457 bp, Homo sapiens
  misc_feature (1)...(457): n = a,t,c or g
nnnttntnntatttgaaacccntttgaaatcctnnnnnnnnnnnnnnnnnnnnnnnnnnnnnnnnnnnnnnnnnnnnnnnnnnnnnggcacgannnnnnnnnnnnnnnnnnnnnnnnnnnnnnnnnnnnnnnnnnnnnnnnnnnnnnnnnnnnnnnnnnnnnnnnnnnnnnnnnnnnnnnnnnnnnnnnnnnnnnnnnnnnnnnnnnnnnnnnnnnnnnnnnnnnnnnnnnnnnnnnnnnnnnnnnnnnnnnnnnnnnnnnnnnnnnnnnnnnnnnnnnnnnnnnnnnnnnnnnnnnnnnnnnnnnnnnnnnnnnnnnnnnnnnnnnnnnnnnnnnnnnnnggatatcctactcttaagctcaggaaagggaactttcctggagtcaataaccttatcctctgtaaaacagttanaagtacctatcacttanggttccaaaatgcatgaagggagat

SEQ ID NO: 32508 - DNA, 440 bp, Homo sapiens
  misc_feature (1)...(440): n = a,t,c or g
tttgaanaccgtnnnnnnnnnnnnnnnnnnnnnnnnnnnnnnnnnnnnnnnnnnnnnnnnnnnnnnnnnnnnnnnnnggcacgagcccagtggaaagcacaggtgtctcccactttgcaacctacgtggcagccatgagggccatcaacatcgcagatgagctgccccgctcccgtgcccgaaaactggcggatgaacagctcagttctgtcatccaggacatggccgtgcggcagcacctgctcactaacctggtagaggtagacgggcgcttcgtgtggagggtgaacttggatgccctgacccagcacctagacaagatcttggctttcccacagaggcaggagtcctacctcgggccaacactctttctccttggtggaaactcccagttcgtgcatcccagccaccaccctgagattatgcggctcttccctcgg

SEQ ID NO: 32509 - DNA, 446 bp, Homo sapiens
  misc_feature (1)...(446): n = a,t,c or g
tttggaaacccntttnnnnnnnnnnnnnnnnnnnnnnnnnnnnnnnnnnnnnnnnnnnnnnnnnnnnnnnnnnnnnnnggcacgaggcctttggtaattcctcctaattccaagtgtcccatagtaaactcatatcacttctgtttagcaagggataaatgcgtccatcagctgagagcctgtatatgtattcttgtcattctgcctaatgatggtgctcaagaatactttagaactttgggtgagctctgttaatatttgtctctcagcagtgaatatttgttgcttgcactagtcactagggaaacagcagggaattaagacctagcttctaggaacttacagcttcacagataagataattaaagtttggtgggataaggttgctgagggtgccactagaccttcaagagtcacccatacaggttgggttaagagagagaagg

SEQ ID NO: 32510 - DNA, 439 bp, Homo sapiens
  misc_feature (1)...(439): n = a,t,c or g
tttgataccnttgacatgnntacgaatttaatacgactcnnnnnnnnnnnnnnnnnnnnnnnnnnnnnnnnnnggcacgagttcaagaaaaatggaatgttgtactgcatgacattgaatatcaaatggagtcagcgatgcaaataattgtctagattttnnnnnnnnnnnnnnnnnnnnnnnnnnnnnnnnnnnnnnnnnnnnnnnnnnnnnnnnnnnnnnnnnnnnnnnnnnnnnnnnnnnnnnnnnnnnnnnnnnnnnnnnnnnnnnnnnnnnnnnnnnnnnnnnnnnnnnnnnnnnnnnnnnnnnnnnnnnnnnnnnnnnnnnnnnnnnnnnnnattgtgtagattttagtagttggaagaagttggagtgttaatgtgtaattagagaacagtgagaaataaaattctacagattgntttattctggngtgctg

SEQ ID NO: 32511 - DNA, 443 bp, Homo sapiens
  misc_feature (1)...(443): n = a,t,c or g
ttgaanacccnttgacnnnnnnnnnnnnnnnnnnnnnnnnnnnnnnnnnnnnnnnnnnnnnnnnnnnnnnnnnnggcacgagtgagcttcaataccctgtgtttgtggtcatgatcgcagtaccataacctgtgagagagtcattagaagccagtattcttgggcagcatgatgaaggatgtagcctaatgagttttgatgcaatcagcattaaataaatgcagggcaagaagatctatgttgtttcaatacattaagataatgaagaaccatggtggcatgtgagtaataacagaatgctacttgtttctcacagtgggagacatgaaactaaacaggaatgatacattgacaataaagaacatgaagagatggttcctggacactacaagaaacctgtggtcccagctactcgaagactgaagtgagaggatcacttgacc

SEQ ID NO: 32512 - DNA, 444 bp, Homo sapiens
  misc_feature (1)...(444): n = a,t,c or g
tttganaccnnttnnnnnnnnnnnnnnnnnnnnnnnnnnnnnnnnnnnnnnnnnnnnnnnnnnnnnnnnnnnnnnnggcacgaggcaagtcctaatcgatgtgactggcttttggttgttagacaagcatgtcatatgtatgtatgtatgccttcatttcatccctgtgctcttttgtttaaataaattatgttaagagaaaactgaaatggcaggagcttaccaatgcctgggggtgtgtgaaacggccctcattccccataactgtgggaaatcattccaccatgggcccagaccagaatactagctttagtgacttgcactgttttaggtagcagtgtgaagactagtcataggttttattgctgtaactcagaacttatttaaattatgagaccccgtgtttatcacttgaaagtagaattanaaatgacttggctggcc

SEQ ID NO: 32513 - DNA, 445 bp, Homo sapiens
  misc_feature (1)...(445): n = a,t,c or g
ttganaccctttgagacctttgacnnnnnnnnnnnnnnnnnnnnnnnnnnnnnnnnnnnnnnnnnnnnnnnnnnnnnnnnnnggcacgagagcagaaccattctaggatccagtcatttcctttcctttttttttcttttttaactctctattttggaaaacttcaagaatacacaaaagtaaagagannnnnnnnnnnnnnnnnnnnnnnnnnnnnnnnnnnnnnnnnnnnnnnnnnnnnnnnnnnnnnnnnnnnnnnnnnnnnnnnnnnnnnnnnnagaagaaagagactagtacagtgaaccctcatatacccattactcagctacaacagttttcaacaaatgaaaacttctgtctcatttatatccccaaccccttcagcacacaaccaaattattttgaaataaattccagacattatttattttatccacaagtattt

SEQ ID NO: 32514 - DNA, 442 bp, Homo sapiens
  misc_feature (1)...(442): n = a,t,c or g
ttganaccnnttgacnnnnnnnnnnnnnnnnnnnnnnnnnnnnnnnnnnnnnnnnnnnnnnnnnnnnnnnnnnggcacgagagagggggtgcaaggagcaatgcaaggccttttatgacctagccttagaagtgatacactgtcactggcttcatactttgtcagaagcaagtcactaagtccagcccacactcgggagggaaattaggccccatctttggaagagattagtctgaaacatttgtggtcatactttgacttaccatagggcaatatggtcttgattgtcttttcccaaagcaacttggttaagctcctagtgaagacgcattaaaaacatacatcgagtggcctctgaagaggagactttttataaccaaatcccactgatacaaacctttctgatggttggcttttccatgtatcaagggctgcatgtgga

SEQ ID NO: 32515 - DNA, 455 bp, Homo sapiens
  misc_feature (1)...(455): n = a,t,c or g
tnnttggaanncccntattgaanacccgtnnnnnnnnnnnnnnnnnnnnnnnnnnnnnnnnnnnnnnnnnnnnnnnnnnnnnnnnnnnnnnnnnggcacgaggtcagagtcagcatttgagagcagttttgtattgaaataaagagcaatttctgattcttcagagtgattatatatgcaaacgaaggtgtctgtgtgttttattgaaatcaggacattttgaacctaatatcctgataagctaaaatactatcaattgggtaaaattggttatttattatccctaatggtttatgacagctttactctgtatacattcccttgtagcccagtgcatgtgccaccagtgcctgtgctctttacatagctgaaagattgaacttaaccacaattcaaacacacacatacacacaactagagtggtttctctacctataaaataggcctcttatgaa

SEQ ID NO: 32516 - DNA, 202 bp, Homo sapiens
  misc_feature (1)...(202): n = a,t,c or g
gaanaccnctttgacatgcntacgaatttaatacnnnnnnnnnnnnnnnnnnnnnnnnnnnnnnnnnnnnnnnnnggcacgaggctagttctagttctagctcttgatcaataaattctcacttaagctttggtggaattagcacaatatagctatccattggctatatatggctatatattgntttatttttttttttttt

SEQ ID NO: 32517 - DNA, 450 bp, Homo sapiens
  misc_feature (1)...(450): n = a,t,c or g
tttgaananccctttnnnnnnnnnnnnnnnnnnnnnnnnnnnnnnnnnnnnnnnnnnnnnnnnnnnnnnnnnnnnnnnggcacgaggattttaaaaactttatggttttaggtgatggttttaacccatcttgggacttggggaaagcttttaagactgttttctagagagccagaagccagcaggcccctgtctattacacatgacaggcaagactgttaggaagcaaagccacacggactttccagcccctctgtggagcctcagagcgtttacagatttggcagtctcaagggcaacatgtgggtggctgatgctggtggactgctgctgtcagggataataaaaccattatggttagcagcttgtacggtagcacgcaaatggatcagctcagtctccacacagttaagttggagcataagaaatccaaaccatgactgatctcaa

SEQ ID NO: 32518 - DNA, 469 bp, Homo sapiens
  misc_feature (1)...(469): n = a,t,c or g
gnnnnnngnnnnntntttgaannccntctgaanaccgtnnnnnnnnnnnnnnnnnnnnnnnnnnnnnnnnnnnnnnnnnnnnnnnnnnnnnnnnnnnnnnnnnggcacgagtcaaatgatgctgtttggaaaaatttcccagcagttgtgtggcgtaaagaaactcccatggtcatgtgactccagatacttctggggctggttgaatgcagtgtttaataaggtggattatgatcgcatcagggatgttggccctgacagggcggcatccgagtggttgctgcgctgtggggccatggtgcgctaccatggccaggagaggtggcagaaggactacaaccaccttccaacaggccctctggacaaatacaagattcaggcgatcgacgccaccgactcttgtatcatgagcattggatttgatcacatgggtaactaccctatcgttttgctaatagaaaatgcagat

SEQ ID NO: 32519 - DNA, 445 bp, Homo sapiens
  misc_feature (1)...(445): n = a,t,c or g
tttgaaaccttnnnnnnnnnnnnnnnnnnnnnnnnnnnnnnnnnnnnnnnnnnnnnnnnnnnnnnnnnnnnnnnggcacgagtcagatattaaagttaaaccatccactccctcaccttcagccttcagtgaatgtgctttctagttgtcaggaatgctgaagaattaacactttgactcctaaatgtgatactggtttgtagattcccttagagcagaaaggagaggggcacatattaatttgtatcgcttttgcttctctttggtcttttgtgtcttagaatttggaagtggttcatttctgttgctggtatgaggatttcgaatacttagtaatcgaaaaccatatcctgtaatttaataaaaaaaactaaggaagaaaaaaccctccaattttcccaaatgcaatcagtgtaactaggggctgggttctgcattaaaataa

SEQ ID NO: 32520 - DNA, 456 bp, Homo sapiens
  misc_feature (1)...(456): n = a,t,c or g
tnttttgaatncccntattgaagacccctnnnnnnnnnnnnnnnnnnnnnnnnnnnnnnnnnnnnnnnnnnnnnnnnnnnnnnnnnnnnnnnnnggcacgagtcagatggtgtagccaatcttgtaactcacgacaaagcactgttgctgagatactgtgatttattttccttaatgagcagtttttttatatatatacgttccattttcagacaggtggtgctttgagttgaatttgcaagttcagtgaaacatggatctcttttttatttaactcccttttcttctcctaaggtgcttaatttccatgcttgacatcgtaccagtatttgccagccaaaataaatgccaatattgtgattctgtagggaaagaagcaggtcatttattaattcaactagaacatactgcactgttcctttgttcaaggacctgaataggacaaacatggccctt

SEQ ID NO: 32521 - DNA, 454 bp, Homo sapiens
  misc_feature (1)...(454): n = a,t,c or g
tccccctnttaaaaccctttnnnnnnnnnnnnnnnnnnnnnnnnnnnnnnnnnnnnnnnnnnnnnnnnnnnnnnnnnnnnnnnggcacgaggnnnnnnnnnnnnnnnnnnnnnnnnnnnnnnnnnnnnnnnnnnnnnnnnnnnnnnnnnnnnnnnnnannnnnnnnnnnnnnnnnnnnnnnnnnnnnnnnnnnnnnnnnnnnnnnnnnnnnnnnnnnnnnnnnnnnnnnnnnnnnnnnnnnnnnnnnnnnnnnnnnnnnttnttacccnttgaggcngggntttantccncntaangnngcctttttgttaattaattccngnttttntgancccanngttttggggnancntggnancaccnntgnntntntaggcaggcaaggnaaanccttgttngtaaaacccagccaanagnggnaaatgtnttangcnttaaccnnaaactaggggaa

SEQ ID NO: 32522 - DNA, 447 bp, Homo sapiens
  misc_feature (1)...(447): n = a,t,c or g
ttganacccctnnnnnnnnnnnnnnnnnnnnnnnnnnnnnnnnnnnnnnnnnnnnnnnnnnnnnnnnnnnnnnnggcacgagagaagcggctcagttagagtccagcaaaaggtttgccaaagagtttatggacagacatggaatcccaaccgcacaatggaaggctttcaccaaacctgaagaagcctgcagcttcattttgagtgcagacttccctgctttggttgtgaaggccagtggtcttgcagctggaaaaggggtgattgttgcaaagagcaaagaagaggcctgcaaagctgtacaagagatcatgcaggtaggctgggtcttctgaaaaaatttacttttctattcatactgaataaataccgttttaagtttaaaaaatgttcctcacaataaggaaaatctattttgcaaacatatgggtaagttattttttataa

SEQ ID NO: 32523 - DNA, 446 bp, Homo sapiens
  misc_feature (1)...(446): n = a,t,c or g
tttgaaaccnntttgaaatgcctnnnnnnnnnnnnnnnnnnnnnnnnnnnnnnnnnnnnnnnnnnnnnnnnnnnnggcacgagcggcacgagaactggaagcctgggctgagagcctcttagctaagcactgactctcaagctttaaggtgaatataagtcatctggcactccacaaccgactgtaataatgtttgattctgcaggtttgaggtagcatttataaattggcatctttaacaagttccctgttaatgccaatgtttctcccctcggacccattgtcagaagcactgagctacagaaggcatgccctgcacaccagagccccttccacccaaatatctgctctcagcacagatactgttggttcccaggggagaccataaatcacagtcttgaaaagtcactttctcttttttttttctttctttttttcaaagggag

SEQ ID NO: 32524 - DNA, 492 bp, Homo sapiens
  misc_feature (1)...(492): n = a,t,c or g
gggtgntnnnnnnntttgaatncccttntttgaanancnnnnnnnnnnnnnnnnnnnnnnnnnnnnnnnnnnnnnnnnnnnnnnnnnnnnnnnnnnnnnnnnnnnggcacgagggattataataaagtataaaataagtatctgagtccacatgatacaaataaattattggataaattagtatggcggaagagacaaatctcccataaagaagaattcctaagaaattatgtaatactccactctaagaactgagagtactccctcagtattggctgtgtataatggcttctttccaaagtacagtatgcaaaagggaaaatattacagtggagaaacctgacaaacaccacctcagggaggtgatcaagggcatgcttacaatatattccttcccaatcaacccaaactccagtagaggggcatcctacaatacacctgtccagtactcctcgaaactgtcagtccaaaacaaaggaagttcgagaaaac

SEQ ID NO: 32525 - DNA, 482 bp, Homo sapiens
  misc_feature (1)...(482): n = a,t,c or g
ggtgnttnnnnatcnganaccctttttnngacccnnnnnnnnnnnnnnnnnnnnnnnnnnnnnnnnnnnnnnnnnnnnnnnnnnnggcacgagnnnnnnnnnnnnnnnnnnnnnnnnnnnnnnnnnnnnnnnnnnnnnnnnnnnnnnnnnnnnnnnnnnnnnnnnnnnnnnnnnnnnnnnnnnnnnnnnnnnnnnnnnnnnnnnnnnnnnnnnagaatgaaggggaaaacattgtgaaatgaaggaaaacaaaagaatctgtcagtaagagatttaccttgcaagaaagacaaaaggaagttctttaaaccaggcgtcaccannnnnnnnnnnnnnnnnnnnnnnnnnnnnnnnnnnnnnnnnnnnnnnnnnnnnnnnnnnnnnnnnnnnnnnnnnnnnnnnnnnnnnnnnnnnnnnnnnnnnnnnnnnnnnnnnnnnnnnnnnnnnnnnnnnnnnnnnnnnnnnnnnnnnnnnnnnnnnnn

SEQ ID NO: 32526 - DNA, 478 bp, Homo sapiens
  misc_feature (1)...(478): n = a,t,c or g
gggtnntntnnntttgaanccctatttgagatccctnnnnnnnnnnnnnnnnnnnnnnnnnnnnnnnnnnnnnnnnnnnnnnnnnnggcacgagtattaggttggagctattattgtcctttttcacagatgaggaaaacaggtacagaggctacagagttaatcactgaaggtcataaaactattaaattgcagaactggacttcaaacccagacaactaggttcccaagtccaaccacttgaccgttaaactagagtgctccaagcaaatatccaatttgaagatatagcatagtcaccttctggttattcagaatgggtgtgtggagaagataaaccaaaataccaaaaggcatagggatgaggttgtgtgtcagtcagaactaaaattaaaagaaagctgggtaatatccagtatagaaaacataaactatgcttcgtattatttaaaatattagaggcntgttttaattcaag

SEQ ID NO: 32527 - DNA, 474 bp, Homo sapiens
  misc_feature (1)...(474): n = a,t,c or g
gggtggtntnncaagtnaacccttgtttgagancccnnnnnnnnnnnnnnnnnnnnnnnnnnnnnnnnnnnnnnnnnnnnnnnnnnggcacgaggacaggggacaccagatgcagggcatgctttatgatcagatgtataattgaggaaagccaggcattcttaaattgtatattgggtttaagtggttgcttttcttctctaattaatttagattttgagtctctcagtcttcctccctgtcagagcttttaaaaatagctactaatgatcaagtgcttattgtgtgccaggcactgggcacagtgctttgctcacatttaacagacaaggtagatggcatgtgccagagaggtaaagtcacttgtcaaagtcactgagcaagtcattagtgcagctgaggttcaaatcctggtctgtctgattctaagccatttctgttttcacaagcccgcttcacttcacactttcttat

SEQ ID NO: 32528 - DNA, 476 bp, Homo sapiens
  misc_feature (1)...(476): n = a,t,c or g
gggtgtnttntnnntactanaccctntttggaganccctnnnnnnnnnnnnnnnnnnnnnnnnnnnnnnnnnnnnnnnnnnnnnnnnnnggcacgagcagtgaaaaacttggttctcattacctgtaatacacttatttgctcatacatactatacatataaagtggctttgcttaatatgtatacatatgaagtgaagtggatagtatacatgtaaaggattgctagcccatatccctgtgagaaacagacttattaactagagtaagaattttgtgtacagtctttttgtctttagccttacagtatctagtcaaaatactgttttccaaagttactttcaattgttttacaaaccaaatagttgttagaattgtcaaccataggaataactgaaggaagataggaaaagaggaaaaataggtancaaatgaaggcattaagcctattttctgaggaaaatgtgtgtgtgtttt

SEQ ID NO: 32529 - DNA, 476 bp, Homo sapiens
  misc_feature (1)...(476): n = a,t,c or g
ggggnngnnnnntttgannccctntttggaaaccnnnnnnnnnnnnnnnnnnnnnnnnnnnnnnnnnnnnnnnnnnnnnnnnnnnnnnnnnnnnnnnnnnggcacgagtgggattacaggtgtaagccaccgcgcctggccgtagtttttaaattttctgtttagaattagttttttaaagtttcagttttatatcattagattaatatatttgccatcatatgatattgtgtctttttaatccagaaattgtagttaatttgcagaagattgcagttactctgcagataaaattgtatacgttttctttgaatctacaaaaagagtccctttgaaagaaaaacatttttaaatgttctaactgaacatccattccctattgaattaagaatcaatcgtggaacataataggcggtggagtgtttctagggtatattgctttctatatttttgttttttttggaatatagtggcac

SEQ ID NO: 32530 - DNA, 475 bp, Homo sapiens
  misc_feature (1)...(475): n = a,t,c or g
ggntgntnnnnnntntgaaaccctnttnnnnnnnnnnnnnnnnnnnnnnnnnnnnnnnnnnnnnnnnnnnnnnnnnnnnnnnnnnnnnggcacgagctcctgacacaacccctgagcctggactgcggccacagcttctgccaagcatgcctcactgcaaaccacaagaagtccatgctagacaaaggagagagtagctgccctgtgtgccggatcagttaccagcctgagaacatacggcctaatcggcatgtagccaacatagtggagaagctcagggaggtcaagttgagcccagaggggcagaaagttgatcattgtgcacgccatggagagaaacttctactcttctgtcaggaggacgggaaggtcatttgctggctttgtgagcggtctcaggagcaccgtggtcaccacacgttcctcacagaggaggttgcccgggagtaccaagtgaagctccaggcagctctgg

SEQ ID NO: 32531 - DNA, 476 bp, Homo sapiens
  misc_feature (1)...(476): n = a,t,c or g
gggtgnntnnnnnntttggaaacccctatttnnnnnnnnnnnnnnnnnnnnnnnnnnnnnnnnnnnnnnnnnnnnnnnnnnnnnnnnnnnnggcacgagccctccctctctcttcccttcctcttctcttcccttctccaccccgtaccggccaccaaagccacgagagtaatctttctgagatgtgtgcttctccacttctcctttataatcaaagccgactgctgacttgtctgccctgtccctctcaactccgtacttgcccccaaagcctttggagcatccgtctgagaagagtgcttctccacctcggcaacatactcatggcccactgcactcttgtccattcggtctctttctactccaaaccgacctccatagccatgggatgctttgggccctgactccatctctttcttcctgagaacatcatgctcctctgatactttgttcctcagctggtggatgttgatgtg

SEQ ID NO: 32532 - DNA, 471 bp, Homo sapiens
  misc_feature (1)...(471): n = a,t,c or g
ggntgnttnnnnntttgaancccttttggagatcccnnnnnnnnnnnnnnnnnnnnnnnnnnnnnnnnnnnnnnnnnnnnnnnnnnnggcacgagcggcacgagttgacatccatttgacatctgcctctgccactcattggggtcagagcaagtaatttaatccctgagttcttgtttattatctgtaaaatcggaataataatacttgcctcaaannnnnnnnnnnnnnnnnnnnnnnnnnnnnnnnnnnnnnnnnnnnnnnnnnnnnnnnnnnnnnnnncagccacaggaagagtcctatctctatacataaataacacttatctcaggcattactgagaagattaaatttcataaagtatattaaaacttagacattttatttgcagttgcagctctgctattattgtttgaggattgttttggttttgctgctgctgttatttatggaataaactgagtaccagaa

SEQ ID NO: 32533 - DNA, 472 bp, Homo sapiens
  misc_feature (1)...(472): n = a,t,c or g
ggntgtntntgnntngnnaanccctntttgagatccctnnnnnnnnnnnnnnnnnnnnnnnnnnnnnnnnnnnnnnnnnnnnnnnnnnggcacgagtggagaggactgtatagctgtttgggtcaatggtcccagctgagccttccacctatccctgccaagccaccagacatatgaataaaatcttggatcttctagatcaggggtcagcaaactacagcctgtaggccaaatctggctaccacctatttttattaatagttgtactggaacactgctatgtctattgtaaattattatctatggctgcttttgcagtgcaatggaagagttgaacagctatgatggagactgcatggcctgcaaagctgaaaacattttctatgtggcctttcatagaaaaaactgcttgactcctgctctagatcagcactgtccaagaagaatatanaacaggccaggtgtggtggct

SEQ ID NO: 32534 - DNA, 469 bp, Homo sapiens
  misc_feature (1)...(469): n = a,t,c or g
ggntnntttnnnaacnnaaccctntttgagatccctnnnnnnnnnnnnnnnnnnnnnnnnnnnnnnnnnnnnnnnnnnnnnnnnnnggcacgaggtcaatgaacttttctgttccttttatatgtgtaagtttttctgtgcttttgtctctcttttccccaggaaatttcctcttgatctttccccacttatgctttacccgtgtgccctttctgtattgtcaccttaaaatgtacacagcactttctaaatgcttagtattttccagaacactttgggtattacaaaataattaaatgattctgccctcagggagtttactgtctagccagggagtagcccaatatctatgttttgttttagccctgccactaaaaatttactaattcccctgagactttaactaccagtcttgatagattagctaagggaggtggggtgtaagcctgggcttggatcaaggactttc

SEQ ID NO: 32535 - DNA, 477 bp, Homo sapiens
  misc_feature (1)...(477): n = a,t,c or g
ggnaggnnngnnangtntgatncctttnnttngaanttnttngaatgaccnnnnnnnnnnnnnnnnnnnnnnnnnnnnnnnnnnnnnnnnnnnnnnnnnnnnnggcacgaggtttcagagtttcctgaataagtttttcccaagttctgtgttattctttttgatgaaaggatactggcttccctacaatcatcttttcaacttctaaaatgtttaattttttaaattgaggtaatgctttaaaaatcaataaagctataatacaattctaaatagaacttctctacaatatgtttatttctttcctaagcttttaattctggtgctacacccaggttaatttaaaatgtattttctgttggtattgnnnnnnnnnnnnnnnnnnnnnnnnnnnnnnnnnnnnnnnnnnnnnnnnnnnnnnnnnnnnnnnnnnnnnnnnnnnnnnnnnnnnnnnnncctcttgctccaactgtcttc

SEQ ID NO: 32536 - DNA, 471 bp, Homo sapiens
  misc_feature (1)...(471): n = a,t,c or g
ggagtnggnnnntttgatnccttttntnnactcnttgacnnnnnnnnnnnnnnnnnnnnnnnnnnnnnnnnnnnnnnnnnnnnnnnnnnnnnnnnnnggcacgagtattgttccaaatctctttctaagtgggctctgtttttcagagtatcatctacaaaatgtacatataaagaaggagtgatttgctttaccataagagtgtttattcactagaatattttatgtaggattcttttaaatcaagactcactaacccaagtacttataggggtcaggtagaatatataagtaagtaaagggggctggatggagaactagctagacagttcaatccacttgctagaactagtctcatatgttcattcacctatctctagctggtgtggtaaaaataacaatggcctcagagtttacagatttgagttttgggttgagctctttcacttattggctctataactttggaca

SEQ ID NO: 32537 - DNA, 466 bp, Homo sapiens
  misc_feature (1)...(466): n = a,t,c or g
ggtttntnnnntannaaccctatntgagacccnnnnnnnnnnnnnnnnnnnnnnnnnnnnnnnnnnnnnnnnnnnnnnnnnnggcacgaggagtaactccaagtctgagctcagcagagctacaagacttctggatgtgcagagcccaagtttcccatcatttcatccctgctagtgctctgggctgggctgaagcagcttgttctgctagatttggaacaaacacaagcgcctagaggagaccgagcaacacatactgatcctatcaggcctagctgagcccaagagtttcctagctttgccccatctaaccatactctttcaggcgtcttatctggttcctgtaagtcttggcccccagtccatctccatgcaagcaaaaatcccttggaccccgaaagctaatgaaattttaaaaataaaaaaattaaattaaaaacagaagaaatccgaaaaaaaaactgag

SEQ ID NO: 32538 - DNA, 475 bp, Homo sapiens
  misc_feature (1)...(475): n = a,t,c or g
ggnattnttntgaatactnaacccttttttnngatccnnnnnnnnnnnnnnnnnnnnnnnnnnnnnnnnnnnnnnnnnnnnnnnnnnnnggcacgagcagacctggcccattgtcaaatggcagacttgcagagcaaataagggacctggcctagttcacaaggcagtcagaagtgatccaaagttcaggctccccctcccttttatcactccaccctgcctctactcctccgcctcctattcttccggcctttccatctggaaaccatgagcctcatggattccaggcacaaattctcagatttcagatgtttgggaaatttctcagcttgggtcattcttcaagagtaagaaattgaatttgtgagaaaaaaaaacagctgagactgtttcacagaagagaaaataaataaggtgtggtgcgtatccatcctcttcccaactcagctccaaaaccacacacaatgtctaactt

SEQ ID NO: 32539 - DNA, 474 bp, Homo sapiens
  misc_feature (1)...(474): n = a,t,c or g
ggaggngngnantttnatnccntancagngaacnctttgacnnnnnnnnnnnnnnnnnnnnnnnnnnnnnnnnnnnnnnnnnnnnnnnnnnnnnnnnnnggcacgagcttggccttggnnnnnnnnnnnnnnnnnnnnnnnnnnnnnnnnnnnnnnnnnnnnnnnntcttaaaacaatttgctgactgaaaaagaaactccagagtgtattattgtctctctgccaaatgggataatgcatggaaagcactctgagtggtgcctggctcgtggtgaatggtcagtatatggaagtaatggtcactgctgtgatggacccatctgtatagcagggagctctgagaagggatataaaattcaccctcctccagccctgtcttatgagccagggtgtggccctgggggtgactcttccatcctcagcctggcgctatgtgttcctccttctcagcctccttctgcctttgtattgtt

SEQ ID NO: 32540 - DNA, 476 bp, Homo sapiens
  misc_feature (1)...(476): n = a,t,c or g
ggaggnnnnnnnntttgatnccctatncngnaatcccttnnnnnnnnnnnnnnnnnnnnnnnnnnnnnnnnnnnnnnnnnnnnnnnnnnnnnnnnnnnnnnnggcacgnnnnnnnnnnnnnnnnnnnnnnnnnnnnnnnnnnnnnnnnnnnnnnnnnnnnnnnnnnnnnnnnnnnnnnnnnnnnnnnnnnnnnnnnnnnncctcggcctcccaaagtgcnnnnnnnnnnnnnnnnnnnnnnnnnnnnnnncctcagaattcttggagttaccgctgttgcctttttttgttgttaggaaattctctcaactgtgaatatcgtatgggcctagtgaatgaaactcatagaacatgtgaagatcttatctgctccagcaaccacagcttccttctcactcttgtcctctttcccttttgtccacctgccagtaatgtgcacatccaagagactaagtcaggataaaatcatcaagtgt

SEQ ID NO: 32541 - DNA, 465 bp, Homo sapiens
  misc_feature (1)...(465): n = a,t,c or g
ggnttttnntntctnaaccctntnggnaaaccctttgactgatcacgaatttaatacgactcnnnnnnnnnnnnnnnnnnnnnnnnnnnnnnnnnnggcacgagatcctgtaggtgagccaaggttctctgtttttctgatttctcttattcattccctataatttcagcattttcgttctcattgacttaatattcctgagggtattattgtgaatgtctttgtttatgttaactccatacttcaatactttatgtagttttctaataacaccttcagtatgtgttctaatgaaaattttagcagagcacctgccctttctgggtaggtaattatttttttttgttatgaacttttcctatgccatttgaatttctgtgataaataagggcttttcattccacttggcacacatttatgaatgctgtcatgtatgtcanacactgancaagatttgagaatgcc

SEQ ID NO: 32542 - DNA, 467 bp, Homo sapiens
  misc_feature (1)...(467): n = a,t,c or g
ngtttnttnnnntntgaacccctttctgatncgaatttaatacgactcnnnnnnnnnnnnnnnnnnnnnnnnnnnnnnnnnnggcacgaggatgtgcacggatcaagaaaatgtggtaaatatacaccgtggagtattatccaagcttggaaaagggagaaatcctgttgtttgnnnnnnnnnnnnnnnnnnnnnnnnnnnnnnnnnnnnnnnnnnnnnnnnnnnnnnnnnnnnnnnnnnnnnnnnnnnnnnnnnnnnnnnnnnnnnnnnnnnnnnnnnnnnnnntggagtggtggttacaagaggctggcaggtgggtggggagannnnnnnnnnnnnnnnnnnnnnnnnnnnnnnnnnnnnnnnnnnnnnnnnnnnnnnnnnnnnnnnnnnnnnnnnnnnnnnnncccaggcaggtgactgtagttaaccagtaccatgtgataggcttgaaattggctgagagg

SEQ ID NO: 32543 - DNA, 479 bp, Homo sapiens
  misc_feature (1)...(479): n = a,t,c or g
ggaggnnggnnnnntttgnatnccctntacngatacccntnnnnnnnnnnnnnnnnnnnnnnnnnnnnnnnnnnnnnnnnnnnnnnnnnnnnnnnnnnnnnnnggcacgagtcnnnnnnnnnnnnnnnnnnnnnnnnnnnnnnnnnnnnnnnnnnnnacttgtttctaaaaaaagaaaaaaaaagtgtgtgtttgaaatttgaggctctgtggctagaattttcacttaagaggaaatatatatctgcatttaaaattctttaatttataaacattcttgtgtattcttaggccagtgccccacaaaagtatgggccatgcaccagtgctgttctgcacaatgttaaccaagcaagaggaggagctaaacatagaaaatgggattggtgtttagaaacttctgtagtttgacattggcaggatgacatccaaatgggcgattggtggcttcatctcgaacagcgtgtgggccagggtga

SEQ ID NO: 32544 - DNA, 418 bp, Homo sapiens
  misc_feature (1)...(418): n = a,t,c or g
tttgaanacctttgnnnnnnnnnnnnnnnnnnnnnnnnnnnnnnnnnnnnnnnnnnnnnnnnnnnnnnnnnnnnnnnnggcacgnnnnnnnnnnnnnnnnnnnnnnnnnnnnnnnnnnnnnnnnnnnnnnnnnnnnnnnnnnnnnnnnnnnnnnnnnnnnnnnnnnnnnnnnnnnnnnnaatcaacaaatgtttactgagcatctaccatggaccaggccctagtctgggcactgagggggagaaaggacaagactacattccagccatcgagcagctcacagaccaatggaggaggctgacgtggacaggctgttactgtgctgcagtagctgaggactcgatgggtgtggtgtggccactcttgccangttatgaaacnnaaaaaggaggcagggganatttcactgagggctcaa

SEQ ID NO: 32545 - DNA, 372 bp, Homo sapiens
  misc_feature (1)...(372): n = a,t,c or g
nnnnnnnnnnnnnnnnnnnnnnnnnnnnnnnnnnnnnnnnggcacgagatgaagtactgatacatagcacagatgaaagaagctagtcactaaagagcacatcttatgtgattctatttatatcagatatttagaataagtaaatctgtagagagaaagtagattagtgtttacctaagattaggtggtggtgaggaagggttagggctaaatgggggtggtgttgactgctaatagttactaggtctctttctggagtgatgaaaatgttcacaaatcaattgtcatggttgcacaactctgtgactgtcttaacgacaccattaacctntctgtggcangttgancacttattgacngtcctgaaattct

SEQ ID NO: 32546 - DNA, 498 bp, Homo sapiens
  misc_feature (1)...(498): n = a,t,c or g
nnnnntnnnnnnggnnnnnnntcnnngnnaggngnangnnnnnagtnnnnatnntnnannnnnnnggngagnnnnttcngnnnnnnttganncttgatgactgatacgaattaannnnnnnnnnnnnnnnnnnnnnnnnnnnnnnnnnnnnnnnnnggcacgagccctgctgccttggcgttatcaatcagccaaagttccagtccataaaatcctcagcaagcctgtttccctgcattcagcttctcttctgctgacctgcctgttgctgcctcgcaacgaattttcatactttctccgataaacctgccttcctttacctacaattgtcttggtaaatacttttacccccggcgcaccactgccccagatagtcatagctcacccgcgacgaggcaagaggcgaggaggcaaaagaggagtgggtaacctgtctttgcntccactttggcanaaccttggtcctgnaanttctttaaancccaacccaaaacatcg

SEQ ID NO: 32547 - DNA, 369 bp, Homo sapiens
  misc_feature (1)...(369): n = a,t,c or g
nnnnnnnnnnnnnnnnnnnnnnnnnnnnnnnnnnnnnnnnnggcacgagttcaaagggggctctgaattaggaaaaaaatgttgcttatttttatttaaagacactgtaattgagattttcccttctaaatattctatgccaattttgatttgctgggatgtgcttaagttcaatcctgtatgagtttgcattcatattccagctcatcttgttatcaactaagtatcatctgcatactttggagcttttgagtcttgnnnnnnnnnnnnnnnnnnnnnnnnnnnnnnnnnnnnnnnnnnnnnnnnnnnnnnnnnnnnnnnnnnnnnnnnnnnnnnnnnnnnnnnnnnnnnnnngtttaccaggacctc

SEQ ID NO: 32548 - DNA, 373 bp, Homo sapiens
  misc_feature (1)...(373): n = a,t,c or g
nnnnnnnnnnnnnnnnnnnnnnnnnnnnnnnnnnnnnnnnnggcacgaggggataatgggtagggagtggaagactttaggaaagaggtgccccagtttctgagtcacttcatggcttcaatattcattgactatcaatcaacagatgaatggatatacaaaaggtggtatctctgttgcagcaggtagttagtcagagctgagcagggaaggagaggctcctccgccccatcaggagatgatcaggcagttgttaaactgtctctctcaaataatcattggttgcagccgatgccagggaaagacagtctcccagtagatagaaacgccagaaactggtgatcagcagcttnccagtaaaaatctcaggagg

SEQ ID NO: 32549 - DNA, 390 bp, Homo sapiens
  misc_feature (1)...(390): n = a,t,c or g
nnnnnnnnnnnnnnnnnnnnnnnnnnnnnnnnnnnnnnnnnnnnnnnnnnnnnnnggcacgagctttatgttaactgttagtgaggcaaagcaacgcccatgaagacctaagggaaaacctaaagggaaaaaaaggaaacccaacctaaaagaaaaaaagataggggaggcaagaggaggcaaagagagacaaaggaagacaccacagagaacaggaaagcaaaagaaaaggagaaaatacaggagaattggtagaagaaattataggtaaaataaatgtgaggaactgaatgtgggaggctacagagtgccaaaagaaattagcttannnnnnnnnnnnnnnnnnnnnnnnnnnnnnnnnnnnnnnnnnncaagggccttgaagtagct

SEQ ID NO: 32550 - DNA, 415 bp, Homo sapiens
  misc_feature (1)...(415): n = a,t,c or g
tttgaannctttgatncctnnnnnnnnnnnnnnnnnnnnnnnnnnnnnnnnnnnnnnnnnnnnnnnnnnnnnnnnnnnnnnnnnnggcacgagtggcatttgagccataatctgctctttccagccccgcacctagctcagcttcatagaagctccactgtgggtggatgtggtcaagaagatggggctcactctcccttcctctatcaaacaagggataaggtgtctcacaagaaggcgaaggttgcaagcatttctcatccactccaactccaagtttaacgctaaattctagctaactgtggccaagaggcaggaggctcccttcctccaccaagctcccactcatggatggagactatacactaggcataacaggtctggaatacaggggccctaaatggccttanttcaa

SEQ ID NO: 32551 - DNA, 425 bp, Homo sapiens
  misc_feature (1)...(425): n = a,t,c or g
ngnntgncnctngnagatccnttgatgacctgattacgaatttaatacnnnnnnnnnnnnnnnnnnnnnnnnnnnnnnnnnnnnnnnnnggcacgagctggagaagtagttagcatgtgccccaggcgcagataaaaaggcaacgcaagacagagctaagggagttattggcttgtggtcaccatgagtcaacagcagcaaaatttgatcaagagcctccacatcttaaaagttcttaggccattacctaagcacacagacatcaagctatgttgttcagtcctcaacctaggtgtcatccttgatttctccctttccacatccaatgaataattaaaaaataagcaaatgtgtattgattaccattttctcaaaattgtcatggagctttacatggagtaaatattaatgncttaattctcata

SEQ ID NO: 32552 - DNA, 409 bp, Homo sapiens
  misc_feature (1)...(409): n = a,t,c or g
tttganaccttgatgacctgattacgaatttaatacgactcnnnnnnnnnnnnnnnnnnnnnnnnnnnnnnnnnnggcacgagagactgcatagggctcggcgtggtggaaacatgttgtattgtgactattgatgcttaagatcttggtaataaatgcacattgtgtatgggtgtgtcaaaggcctgtcaatgagcacctctgttaggctcaagtagtgactcaaagaggagtttggctggagaagctgttgaggagatagaaaggggtcatcttgtggggtagaaagagatcagtatataaaccccagagaggaagcttaggggcagggtcagcttatgggtggctttgagtaagtggcagaagagtggggatgtcttgggataatggagtcatggcaggcttctga

SEQ ID NO: 32553 - DNA, 371 bp, Homo sapiens
  misc_feature (1)...(371): n = a,t,c or g
nnnnnnnnnnnnnnnnnnnnnnnnnnnnnnnnnnnnnnnnnnggcacgaggtttaaaagggacacgagacaattttgtatgtgattttctgaatcacataattccacatnnnnnnnnnnnnnnnnnnnnnnnnnnnnnnnnnnnnngggctgcctgggagtctcagctctagttctcagtcctcagcagccattcctttcctcagtggggcgtcagtgctgccttccaaagtccagggctgccttgagacctgatcaggaccggctattttgccaggtgcagtgcatgatgttcaagaccattcagaatttcaagaccctgacagcagagcaagatagcaggcggaggccattctnagtgtggggccccgc

SEQ ID NO: 32554 - DNA, 480 bp, Homo sapiens
  misc_feature (1)...(480): n = a,t,c or g
nnnnnnannnggnagnnnnnngnnanngnnnnnnnnanncntcnnnnnnggnnngnnggntncntnccctttgaanccttgaancctctatgacatgatacgaattannnnnnnnnnnnnnnnnnnnnnnnnnnnnnnnnnnnnnnnnnnggcacgagaaaggataaaaacaaaactaaagtatcacaaagatagacataacaggcggcagctgctgcccatagggctcagggaccaaagggaatgagaaaacattaggaacttagaggaaagtccccaaagaaatgacacttagacctctgagaagccgctgcatgattgatgctggtatctgagcttggcagaggggttctgtgagattgggacccagaccttgctggctgatgctgctgtctctcagaggtttatgatgaagctagttctgcaagtgntggaaacactgcaagctggattcacttggttgccggtggaaggacctgc

SEQ ID NO: 32555 - DNA, 377 bp, Homo sapiens
  misc_feature (1)...(377): n = a,t,c or g
atttaannnnnnnnnnnnnnnnnnnnnnnnnnnnnnnnnnnnnnnnnnggcacgagtaacaatcaacaaagtgatctataagccttgctccaagcagattgctgagtgctgagaaggaaaaaagaacccgggtgagaggcccctgcctttcaggagcttccagtctagttagccaaggaggtgaggcccacacacagtcttacaggaaacagagaacaaagacaggtagaatttggggtgtaggctgtgtaaaccaatgggtctggaaaggatcggccattgctaactttggaacttcgagacacgtggtctgtgtgtgaatgatgaagcagggatcagggcttcgactgcagacaggaaagcaagaantgagggtc

SEQ ID NO: 32556 - DNA, 418 bp, Homo sapiens
  misc_feature (1)...(418): n = a,t,c or g
tttgannncgtttcccnnnnnnnnnnnnnnnnnnnnnnnnnnnnnnnnnnnnnnnnnnnnnnnnnnnnnnnnnnggcacgaggttttatgtgatcctctttcttccccacctttacctgccaagctccactttttcttttaaagttcttctcatttgagaagcttcttgcgggcaggagctgtgtcttgcccacctttctatctcccgtggtgggagaatcctccaagttgtcttgtagattctttccaatctcttctctcttatgcctaggctctgtttatttcccggtatccacttcccaagagattttttcgtgttttgaaggcctgcttggagtacatgcccaggacttttagtatttctgattcccggcttccccatgtccatcccacccagcccccataagcagcagcaggg

SEQ ID NO: 32557 - DNA, 419 bp, Homo sapiens
  misc_feature (1)...(419): n = a,t,c or g
tttgaaatccgtttccnnnnnnnnnnnnnnnnnnnnnnnnnnnnnnnnnnnnnnnnnnnnnnnnnnnnnnnnnnggcacgaggaggtccctgccctccccacctccctcccctgaaacaagttgaaaatatcttaatgaacatagaacagtgataaaggaagtgtttgaagtcctctttgtacagagagagagagaaagagaatgccaaagctaggttggaggaagtagaagggtatacggtgggctcaggcccatgggggccacacagaggagctctgtgcacttcagagaccagagcttccagggagcttctggccaccacaggaagcagcctagtcaggcattttatttcaatggataattcagtggtcttactcagaaatcaagaacgagacagaaaagtgataggctaagtgta

SEQ ID NO: 32558 - DNA, 419 bp, Homo sapiens
  misc_feature (1)...(419): n = a,t,c or g
aantttgaanacnnnnnnnnnnnnnnnnnnnnnnnnnnnnnnnnnnnnnnnnnnnnnnnnnnnnnnnnnnnnnnnnnnnnggcacgagggcnnnnnnnnnnnnnnnnnnnnnnnnnnnnnnnnnnnnnnnnnnnnnnnnnnnnnnnnnnnnnnnnnnnnnnnnnnnnnnnnnnnnnnnnnnnnnnnnnnnnnnnnnnnnnnnnnnnnnnnaaaccagagccttttaaatgctacaagagtaggtccctgtcatcaggagccactattctatctgtgatgggagctaatgaacaatttagtaatctgtctgaataaccagcacaagcctgtgtggttcctgagagctgactaggttactaccaaccctgctgaaccctagggaggaaagtcaaggtccttccctgcccatgcctccttgc

SEQ ID NO: 32559 - DNA, 420 bp, Homo sapiens
  misc_feature (1)...(420): n = a,t,c or g
ttgaanatccgtnnnnnnnnnnnnnnnnnnnnnnnnnnnnnnnnnnnnnnnnnnnnnnnnnnnnnnnnnnnnnnnnnggcacgagtattaagtcataaccttttgtcctctgattgtatttctgcatgactgtccgtaaaaatacatgnnnnnnnnnnnnnnnnnnnnnnnnnnnnnnnnnnnnnnnnnnnnnnnnnnnnnntttatatgaagtaaatttgtattattttctcctgttaatctgtctcctgttatcggagtcccagccatcagccttgcagtgactgacggaaagatcttactttttctcctctgtcctttgtttctgctttctgggtcctggcaagcccgtgaaggctgatgtctgtgcccacctcttgctcgccaggcttttgagggagggaaattctcagcgtcctt

SEQ ID NO: 32560 - DNA, 414 bp, Homo sapiens
  misc_feature (1)...(414): n = a,t,c or g
tttgaanaccgtnnnnnnnnnnnnnnnnnnnnnnnnnnnnnnnnnnnnnnnnnnnnnnnnnnnnnnnnnnnnnnnnnggcacgagccatgtgttactttggcgccaagtagccatatccaaaccaaactcaaatcttcacccatgccaaaacattccttggcctatctaaagtccctttgattcctctctttcttacaccttcatgcagtcctaaggaggccccgtcagctcacctatttctaagcacagaccatttctcaccaccttcaagttaacatcctggcccagcctacctggtgagcctctaattctctttactgtcaccttaggtcctcactccccatccaccatctatagtttttctggacacagagtgattcttctttcttnnnttttttttttttnggtttttt

SEQ ID NO: 32561 - DNA, 418 bp, Homo sapiens
  misc_feature (1)...(418): n = a,t,c or g
tttganaccgtttcacnnnnnnnnnnnnnnnnnnnnnnnnnnnnnnnnnnnnnnnnnnnnnnnnnnnnnnnnnnggcacgagtttatttaaagcatttatgtatgtatgtatgtaagtatttannnnnnnnnnnnnnnnnnnnnnnnnnnnnnnnnnnnnnnnnnnnnnnnnnnnnnnnnnnnnnnnnnnnnnnnnnnnnnnnnnnnnnnnnnnnnnnnnnnnnnnnnnnnnnnnnnnataaagcatttccatattaacttttaaagacataagattaaattggatagatttccaaactctgatttctccttttcttgttttgaaaatgtgtatttgtcatgttgaatgtgatgtgatagctactgatgtatctcatagtacagtaaaagtagtctataaacacaggaagaaaagatg

SEQ ID NO: 32562 - DNA, 421 bp, Homo sapiens
  misc_feature (1)...(421): n = a,t,c or g
ttggantttgaanaccntttgacnnnnnnnnnnnnnnnnnnnnnnnnnnnnnnnnnnnnnnnnnnnnnnnnnnnnnnnnnnggcacgagcggcacgaggaattcccaccagtaaaatgatggtattagattcagtcaacacagaggtaatggcacttaaaacagtgcctggctattactatcagatgctatatagatgttattcactggttcccagtatttatgtagtctagcccccacagaactaagaatatatctaagtgtcttgagactcctgtattaacaaagctcattttctacacatctaagacagggcttgaaagatcacatatagaagtctaaggttaatgtggatataggaccttaggcattttgcactattgttttcccttaaacatgtactatcccatacatatctcaag

SEQ ID NO: 32563 - DNA, 418 bp, Homo sapiens
  misc_feature (1)...(418): n = a,t,c or g
tttgaaancgtttccnnnnnnnnnnnnnnnnnnnnnnnnnnnnnnnnnnnnnnnnnnnnnnnnnnnnnnnnnnggcacgagatctctgtattctatgtaatcccacagttgaaggctgttcttatagtggaattaattatacctcactccaaaaacttgaccctgatttccgtctacaaacccaaagcagcaaatacaatttacttttatatttgaattattttctttgtaatggtgtctgttgacagccaaagcctcttgtatggaaacataccaccactgccacaagtaaaagctataaagcagtgttaaatactgtatatagagctcacatttgtatatgcatttcttttaggtcttatgtagtgtgtgtactgtggaagatcgagaaagtgcgttaggttgttagacaaaagac

SEQ ID NO: 32564 - DNA, 421 bp, Homo sapiens
  misc_feature (1)...(421): n = a,t,c or g
tttgaanaccctnttnnnnnnnnnnnnnnnnnnnnnnnnnnnnnnnnnnnnnnnnnnnnnnnnnnnnnnnnnnnnnnggcacgagcaacgagaggttcgacgtagccaccagcctcccccgttacttctgggtccctaaccgaattctggacagtgaggtcaggagagcatttggccactttcatcagggccgtggaccgcgcttgtcctggcatcaccctgggggcagtgatcttctccgctgtggaggcttctatacagccagtgaccctaacaaggaggatatcagagcagtggagttgatgctccaggctgggcattcagatgttgtcctggtagacactatggatgagctgcccagccttgcagatgtccaacttgcccacctgaggctgagggccctctgcctgcctgattcatc

SEQ ID NO: 32565 - DNA, 422 bp, Homo sapiens
  misc_feature (1)...(422): n = a,t,c or g
ttgaactttgatacccttttgacnnnnnnnnnnnnnnnnnnnnnnnnnnnnnnnnnnnnnnnnnnnnnnnnnnnnnnnnnnggcacgaggaaagctgcctcgtctgatttgataagattgagatagccatattgcatactgcttttccatttttggaaggtatacattattagctcaacttcccttttcttctgccttatttgtccagaagccagaaacgtgaagagaagacctcgccttgatttgccagatgacccctggcctttttagtcaagttcctggagaagttagggtggagacttatttgtcctgtgtttggggcaataaaaggggaggggccgcctcctccagcctgttctaaaaagccaaaaagcaaggctatttactcagacctgggctactaagtgctggggtggcccatg

SEQ ID NO: 32566 - DNA, 420 bp, Homo sapiens
  misc_feature (1)...(420): n = a,t,c or g
tttganatcgcttcactgattacgaatttaatacgactcnnnnnnnnnnnnnnnnnnnnnnnnnnnnnnnnnnggcacgagaaaataacttccttaatttggcaaaagatacccaataaaaacctagatgtatcgtctcttttttcagcatggtagtggaggcctgagccagcattgtaaaataagaaaaagaaaagattggaaatcagggaacaaaactgtaatgatttgaagaaatgatttttacataggaaactcaagagcatctgcagacacattattagaaataaaagatttcagcaaaatatctggatataggttcaatatacatcaatcagttatgtttctgtactttagctgttagaaaattaagtcttaacctacagccatgcattacttaacgatggggatatattctga

SEQ ID NO: 32567 - DNA, 233 bp, Homo sapiens
  misc_feature (1)...(233): n = a,t,c or g
antttganaccntttgacnnnnnnnnnnnnnnnnnnnnnnnnnnnnnnnnnnnnnnnnnnnnnnnnnnnnnnnnnnggcacgagccgaggcaggaggactgcttgagtcaaggggtnnnnnnnnnnnnnnnnnnnnnnnnnnnnnnnnnnnnnnnnnnnnnnnnnnnnnnnnnnnnnaggcgtggtgactacaagcgcatgccgctgcgctcagctgaatttttttttttttt

SEQ ID NO: 32568 - DNA, 420 bp, Homo sapiens
  misc_feature (1)...(420): n = a,t,c or g
aanatccgnnnnnnnnnnnnnnnnnnnnnnnnnnnnnnnnnnnnnnnnnnnnnnnnnnnnnnnnnnnnnnnnnnggcacgagaactggggttaaattaaacatatcattatgtgatattgctatacgtttaaccaactgcccctgtattactatatggctactcaattgccactatattgctatctggttacccaactgttataaatcaacagagaggcacggggagagcattctgtagagcagtgacagtgctggtaacccttctgtcaagacctggctaaaacaagggacagctgtatgagcatcaggctcaagggtttacaggcaatatgggcccagctttcccaacctttttttgcaagggccactcttagttcttgctgtttggccactggctaccacccatattatcactctaa

SEQ ID NO: 32569 - DNA, 425 bp, Homo sapiens
  misc_feature (1)...(425): n = a,t,c or g
tttgacttntgaataccttttnnnnnnnnnnnnnnnnnnnnnnnnnnnnnnnnnnnnnnnnnnnnnnnnnnnnnnnnnnnnnnnggcacgagggaagaaccatctagaagcctccataggccagcaccccttctttccagaccactccccatcctgcccccacctcctgtctagcagtaactatcacagtctaagctgttttttggggggnnnnnnnnnnnnnnnnnnnnnnnnnnnnnnnnnnnnnnnnnnnnnnnnnnnnnnnnnnnnnnnnnnnnnnnnnnnnnnnnnnnnnnnnnnnnnnnnnnnnnnnnnnnnnnnnnnnnnnnnnnnnnnnnnnnnnnnnnnntgttggctttattcccctgctgtgtcgccaaggcccagccctgacctgacatgtacaagtcaattggagaatatct

SEQ ID NO: 32570 - DNA, 427 bp, Homo sapiens
  misc_feature (1)...(427): n = a,t,c or g
tttgaanacctttngtttgnattcctnnnnnnnnnnnnnnnnnnnnnnnnnnnnnnnnnnnnnnnnnnnnnnnnnnggcacgagcttcacatttgatctttttaaagagagattccattcagttaaataacacagtcaagttcttgtaatttctttttctcccaaccttttattttgaaaaattttaaacctacaaaaaagttgaaagaaacgtataataaaacacttgtnnnnnnnnnnnnnnnnnnnnnnnnnnnnnnnnnnnnnnnnnnnnnnnnnnnnnnnnnnnnnnnnnnnnnnnnnnnnnnnnnnnnnnnnnnnnnnnnnnnnnnnnnnnnnnnnnnnnnnnnnnnnnnnnnnnnnnnnnnnnnnnnnnnnnncctgcctgtagtcccagctacgggaagctgaggcagaaggattgctt

SEQ ID NO: 32571 - DNA, 433 bp, Homo sapiens
  misc_feature (1)...(433): n = a,t,c or g
ttggaanncccttccntttgaanaccctnnnnnnnnnnnnnnnnnnnnnnnnnnnnnnnnnnnnnnnnnnnnnnnnnnnnnnnnnnnnnnnnnnggcacgagctaattgtcatggatggcaaactgtgcccccaaacttgtaccaagcctcaaagccttggtttaatactcctgaaggagtaatagacccaatgtgacattttgcatgcaggaaccccttaacagctacctccatattatgcgtgcttcatgaatggagacacctacgttatatgaagttctctattgggctgtaaacttcctgagacaggccttctgggaaattactctctacatcccagtactgcaatgtccagtgcagacccgtgcatttagatgtttccaaaatagcagttgtttccgcggcattatgttctgctggcctanaggtctt

SEQ ID NO: 32572 - DNA, 414 bp, Homo sapiens
  misc_feature (1)...(414): n = a,t,c or g
tttgaanacctttcntttgaatcctnnnnnnnnnnnnnnnnnnnnnnnnnnnnnnnnnnnnnnnnnnnnnnnnnnggcacgaggagccacggcacctggccccaaatgttttcttaaaaagaaaattaagtccgtagttaaatcttataacaccctgcttctgccatgtttgtacgaaatatctccttaaaactcacccagtaggtttcttcctaacaaaagtttcttcacaaacaaatagggttaaagatggtattcagcatgtcagctgcaggggaaaaggtgacccttctcccattttcaaatgacatgttttagaaataaacaggatagataggacttatctctaaagaatgttctagcttctctctaaagacatttctggctctcccagggaacactgannnggttaga

SEQ ID NO: 32573 - DNA, 381 bp, Homo sapiens
  misc_feature (1)...(381): n = a,t,c or g
nnnnnnnnnnnnnnnnnnnnnnnnnnnnnnnnnnnnnnnnnnnnnnnggcacgaggaaacttttgaagaattaattgactgctctgggnnatgtattctacnaggtttggtggatgcacacacacatccagtatgggctggtgaaagagttcacgantttgcaatgaanttggcaggagccacctacatggaaattcaccaggccggaggagggatccactttaccgtggagcgcacgcgccaagccacagaggaggagctgttccgctccttgcagcaacggctccagtgcatgatgagggctggcaccacgctggtggagtgcaagagtggatatggcctcgacctggagaccgagctcaagatgctgcgcgtgattga

SEQ ID NO: 32574 - DNA, 426 bp, Homo sapiens
  misc_feature (1)...(426): n = a,t,c or g
tttgaancccttcctttgaanaccttnnnnnnnnnnnnnnnnnnnnnnnnnnnnnnnnnnnnnnnnnnnnnnnnnnnnnnnnnnnnnnnnnggcacgagcacaaagaggttaactagagaggtattaatccttactgacataccccaggcaccatactagactctgggaatatgctatacagggaaagtggggcagtggcttaagggtcagagaagatttgggaaaggtttgtttgtttttttcggttgtaaactgcagacccggcgcggtggctcannnnnnnnnnnnnnnnnnnnnnnnnnnnnnnnnnnnnnnnnnnnnnnnnnnnnnnnnnnnnnnnnnnnnnnnnnnnnnnnnnnnnccacatagtgagaccctgtctcttaaaaaaagattaacgggtggagcatggtgcagaaggaggg

SEQ ID NO: 32575 - DNA, 509 bp, Homo sapiens
  misc_feature (1)...(509): n = a,t,c or g
nannannnnncannnancggnagcnnnagaggnnnnnancncnntntnnnncnnnnnacctgngagcngtnnnnacntccntccncctttgaagcctncnntttgaaancctaantcnnnnnnnnnnnnnnnnnnnnnnnnnnnnnnnnnnnnnnnnnattcggcacgagctacaggattaactctgggaacgccagccactacgatctgcagctacaacaggcttcagcttaggattcaataaacctgcagcatctgccacaccatttgctctacctattacctctacctcagctagcggtctgactctttcgtctgctctgacatcaactccagcagcatccacaggatttactctaaataattagggtgggacaacagccacaactacaactgcatcaacaggcctctctttagggggagccttagctggtatgggaggttcactttcccagagtacaaacacaggaacaatcaggacttggacagaangctttaggggntgactc

SEQ ID NO: 32576 - DNA, 421 bp, Homo sapiens
  misc_feature (1)...(421): n = a,t,c or g
tttgaanacccttttgttgnnnnnnnnnnnnnnnnnnnnnnnnnnnnnnnnnnnnnnnnnnnnnnnnnnnnnnnnnnggcacgagcgcgagccggtgtctgacaactcaatccctaaggcaaacggggaattctctgcgccagagggagggctcctgctagttggggttcccctggctccgctgacagattcactgtttgtaggtttaacgaagcacacacaatagggctggaccgaggagccagggtacagaccagatggggcgaagaacggatattttctgacagcgaagaaatataaacaaaagaaagtttgagattcgcagcgaatttcctctctcgctttccgtgctgcaatctcaacgatgcatttggagtggattacggtggcaagattgtgatcagcattgtttaaagaaatg

SEQ ID NO: 32577 - DNA, 419 bp, Homo sapiens
  misc_feature (1)...(419): n = a,t,c or g
cccnnnctttgaaanaccntnnnnnnnnnnnnnnnnnnnnnnnnnnnnnnnnnnnnnnnnnnnnnnnnnnnnnnnnnnnnnnnnnnggcacgagggggtggatccacgaagtaccttctatgtcctgaaccctcacaataacctgtcaagcacagaggagcaatttcgagccaatttcagcagtgaagctggctggagaggagtggttggggaggtgccaagacctgaacaggtgcaggaagccctgacaaagcatgatttgtatatctatgcagggcatggggctggtgcccgcttccttgatgggcaggctgtcctgcggctgagctgtcgggcagtggccctgctgtttggctgtagcagtgcggccctggctgtgcatggaaacctggagggggctggcatcgtgctcaagtaca

SEQ ID NO: 32578 - DNA, 420 bp, Homo sapiens
  misc_feature (1)...(420): n = a,t,c or g
tttgaatacctttntttgngatcctnnnnnnnnnnnnnnnnnnnnnnnnnnnnnnnnnnnnnnnnnnnnnnnnnnggcacgagagatgagcaactactggaaggagggacaaaaagcatttcctagaggccagacactcagacatctcatccccacagtagctctcatctcaggaaacagctttgtcttcaggggaggagaaataccaggggcagggcactactgaaattcaggtctgtccagcttcaaaactcatgctcttgaccccctccgtacttctgtttcaggatgtaactgctctggcccaaagttttctcatctgtaaaatgtgggtaataataactttccccttacaattgtcgtgaaaagtaagtaactcctaaaaattgtcttgctcagtgccagaccccanagttagtg

SEQ ID NO: 32579 - DNA, 420 bp, Homo sapiens
  misc_feature (1)...(420): n = a,t,c or g
aantccctnnntttgaanaccnttnnnnnnnnnnnnnnnnnnnnnnnnnnnnnnnnnnnnnnnnnnnnnnnnnnnnnnnnnnnnnnnggcacgagcagtcttaaataagtcttggatttggactagaaattatatggctacctctttatgtgggaactaaaagtaattcattgagacaggaacatagaggtgaggtgccaaaagaaaaagctagaaaggtaagttttgatcatgttatcaagggcattgtaggcaggctaaggagtgtggagatagtgggaaagccgtggatggtttttaatgaggggaatgataaaaatagagatatattttaaaaataatctaggaaaagagtggagaatgaattggagtggagtgatcagagatggggacaatagggaaatcagagaaggccaatgg

SEQ ID NO: 32580 - DNA, 426 bp, Homo sapiens
  misc_feature (1)...(426): n = a,t,c or g
tttgaaancccttnntttgaaacaccattnnnnnnnnnnnnnnnnnnnnnnnnnnnnnnnnnnnnnnnnnnnnnnnnnnnnnnnnnnnnnnnnnggcacgaggagctagcaccatcaataccctggataccaccggataaagacctacacttctctccttgttgtgtgcacctgttcactggagcacatgcgcccggacatgctctcagaccttgcttcctggccatgagctttaaggaatggtctctgaaaatgcactacttttaagagctgggtctgaagcagagctaactggtctgcagggcaatgacacccttgacctcggcctcattagctccatcctcttacctactgagctcacaaccaccaacatcataatacttgagagaaagctcattacagcgtatgcggtggcacatctgtaat

SEQ ID NO: 32581 - DNA, 417 bp, Homo sapiens
  misc_feature (1)...(417): n = a,t,c or g
aantccntnntttgaanaccntnnnnnnnnnnnnnnnnnnnnnnnnnnnnnnnnnnnnnnnnnnnnnnnnnnnnnnnnnnnnnnnnnggcacgagagtggattcatgatgatgaagaactgcatggatattgatgagtgtcagagagatcctctcctatgccgaggtggtgtttgccataacacagagggaagttaccgctgtgaatgcccgcctggccatcagctgtcccccaacatctccgcgtgtatcgacatcaatgaatgtgagctgagtgcacacctgtgccccaatggccgttgcgtgaacctcatagggaagtatcagtgtgcctgcaaccctggctaccattcaactcccgataggctattttgtgttgacattgatgaatgcagcataatgaatggtggttgtgaaa

SEQ ID NO: 32582 - DNA, 418 bp, Homo sapiens
  misc_feature (1)...(418): n = a,t,c or g
tttgaanaccctttctttgagatccctnnnnnnnnnnnnnnnnnnnnnnnnnnnnnnnnnnnnnnnnnnnnnnnnnnggcacgagggctggagagggatttggagtatggaggtttagaaggaattaattggctatgacttaggatgcatgtggtgagtgtggctttgctgttgtggtagagtagagtgctgcctgtgtgggtcaagagactgtcttggctgacatctttgaaataggtatatttgtgtggcccttgcctaattgtcatctctgccatagctgcccccgccttccccaccaacccatggccctacttgagctgcctgctgagcctactctgttgtggccacagtatcctcctgctgcccagagtttgagtttctcgctacttctgccactcatcacacttgcttcccg

SEQ ID NO: 32583 - DNA, 422 bp, Homo sapiens
  misc_feature (1)...(422): n = a,t,c or g
ttgaatnccttnntntgaanaccctnnnnnnnnnnnnnnnnnnnnnnnnnnnnnnnnnnnnnnnnnnnnnnnnnnnnnnnnnnnnnnnnnnggcacgagggggacactgtggaagaacttcttgcttggggagttctgcagcagtcgaaggtacaagaatataaaaactggtatctcgacacagctcttacagcatattctcaacacaaggaacagtaatgtgccgcagcaattccttcggtgaaaaaaactgactgtatccgcgtaagaggagtaattcttttttgaattttatgaggcttcagagctgtatttcggccaacccagtctttgttcagtttctagcggcttcaaggttgcccagttttacgccttctcgctcaaaacagacactagttttctttgatagcctggtctcacat

SEQ ID NO: 32584 - DNA, 421 bp, Homo sapiens
  misc_feature (1)...(421): n = a,t,c or g
ttgaatccctccttngaanaccctntnnnnnnnnnnnnnnnnnnnnnnnnnnnnnnnnnnnnnnnnnnnnnnnnnnnnnnnnnnnnnnnggcacgagggaggtggagtggcaatactttatgataattaatgatgttagttgcataaaagtagcgtaagagtagaaaaaaaggagagtatattactcagatttccaccatctaaatattaacatttttcaaactttgtattccatatatgtgaatatgtacattgatttttatagttataattgtgatatacattatacttgactttctgctttcatacttaacattatgtgataagtatttcccacattgcatcatggttcaatgaaacattttaaatggtcttataatatcctatagaattcttatactgttgtgcatttacctactcg

SEQ ID NO: 32585 - DNA, 410 bp, Homo sapiens
  misc_feature (1)...(410): n = a,t,c or g
ttganaccgntttctgatcnnnnnnnnnnnnnnnnnnnnnnnnnnnnnnnnnnnnnnnnnnnnnnnnnnnnggcacgagctaggatgaaacctgttctgaaaattaccctagccctcctctccccggggatgatcacttctttgcttcacactcgcagcagagcctgtacttcttactttttagaagtgagaaaattcggcactgagttaatattttatgatttcccttgatgtgtctcagtggcccctgtcctcagactctggtcacaaatgtgtcaactgttactaaagtacccacagttggcttttgtcaggacacagtgtcctcagaagcacagcttttgagaaaacgagcaaatcagggtacaaagcagctggggcaaatctcatgatctttttttggnctctat

SEQ ID NO: 32586 - DNA, 427 bp, Homo sapiens
  misc_feature (1)...(427): n = a,t,c or g
ggntnncgtgtntntngnatacctagagaacttntggaaaatccctacganttacgntaaaggaaccnggccctcgaggccaagaattcggcacgaggtcatttaattgacatagcaactcgatgaagttgatcctactcttattcctgtattacagaaaaggaaatttaggttcagcaagaccaagtaatttgcccagtatcataccagctctaaagaggctaccggaggattctaggcttctggtcagtgctctcaaccactgaacacaaaaatgtctttcttattccttttagtctgctgcaagtaattgggaggatatagaataactttttaagtattgacactgtattttttggatgangtaantntgantgcnttggntatgttttnagacagnantctcactcttcgcccaaggctggag

SEQ ID NO: 32587 - DNA, 424 bp, Homo sapiens
  misc_feature (1)...(424): n = a,t,c or g
gnntngnntnnntnatttgatncctnnganacnctctnnnnnnnnnnnnnnnnnnnnnnnnnnnnnnnnnnnnnnnnnnnnnnnnnnnnnnnnnnnnnnnggcacgaggaacacttttcctagcaatgatgcggccattttagaaaggagggtgttaacatttggaaaaaataatctgctgattatattgaatggcgtgatgtccttgagtggatcgtcttccaagtactgtttttgtacctaatcttaattcagtacctcgtcaaacctgcatggaagagctttagataaatgtctgttgggatttgcggaagaccagaatggggcatacggaaaaggagaatggatgaagaaaagggtagaagggcagtggggtagttgttgcatatcgggaaggcggaagtctanacctttnaaaaaaaaa

SEQ ID NO: 32588 - DNA, 424 bp, Homo sapiens
  misc_feature (1)...(424): n = a,t,c or g
tnnnttntnnntntggnagaccctttggagacncgattacgaatttaatacnnnnnnnnnnnnnnnnnnnnnnnnnnnnnnnnnnnnnnnnnggcacgaggttagaccaaaccattaagagattggcgatttttttcccccttgagcattattgaaatttgacaacattctcatagtctctgctttcttttaaggatttggctatcaaaaatacgggtaagtaaaaggaaccaagagaaactaatgaccaaatgaatagtagtatttaaagtctcaagttgctatgatacaggcttcaccgtgacctgagtggataaatgctaaacgggatttgctttccggagaatctgggtgcctgttccaccaattctgtttgtctctagcctggtttttttttgcctcctccctttcccagnaccattta

SEQ ID NO: 32589 - DNA, 465 bp, Homo sapiens
  misc_feature (1)...(465): n = a,t,c or g
gggttnnngngcttcctaangaagactaagtgaacttaatgggaaaatacccnacgactttctgtanngaatnccggccctcgaggccaagaattcggcacgagcaacannnnnnnnnnnnnnnnnnnnnnnnnnnnnnnnnnnnnnnnnnnnnnnnnnnnnnnnnnnnnnnnnnnnnnnnnnnnnnnnnnnnnnnnnnnnnnnnnnnnnnnnnnnnnnnnnnnnnnnnnnnnnnnnnnnnnnnnnnnnnnnnnnnnnnnnnnnnnnnnnnnnnnnnnnnnnnnnnnnnnnnnnnnnnnnnnnnnnnnnnnnnnnnnnnnnnnnnnnnnnnnnnnnnnnnnnnnnnnnnnnnnnnnnnnnnnnnnnnnnnnnnnnnnnnnnnnnnnnnnnnnnnnnnnnnnnnnnnnnnnnnnnnnnnnnnntaggtcaaatgatagttttgntttaagttctttgagaaatccc

SEQ ID NO: 32590 - DNA, 446 bp, Homo sapiens
  misc_feature (1)...(446): n = a,t,c or g
tnnncttgtagccttgtnatacnctttgacnnnnnnnnnnnnnnnnnnnnnnnnnnnnnnnnnnnnnnnnnnnnnnnnnnnnnnnnnnggcacgaggacacattgaaagtgtggaactcagactttgtataaggcttttgtatcttgagaaggaaaatttaaaaccttaggaggattgggagcttcacgagttcatgatccttctctgcaccaagtttacacgtgctaacctttctgctttagtagctaaacttttgattccatgaaatcaaaaccttttaattgctttctctattggtgatctttaagagataacttgggcttattggtgtcagtctgtaaagaaaccaaactctgaagtgtgatactatctattgaattagacaggggaaaagctaattagtactatagtgagactggagtgcttctcagatgttacctagtgg

SEQ ID NO: 32591 - DNA, 452 bp, Homo sapiens
  misc_feature (1)...(452): n = a,t,c or g
tnnnnttcnccccttttgaaaccntnnnnnnnnnnnnnnnnnnnnnnnnnnnnnnnnnnnnnnnnnnnnnnnnnnnnnnnnnnnnnnnnnggcacgagatggnnnnnnnnnnnnnnnnnnnnnnnnnnnnnnnnnnnnnnnnnnnnnnnnnnnnnnnnnnnnnnnnnnnnnnnnnnnnnnnnnnnnnnnnnnnnnnnnnnnnnnnnnnnnnnnnnnnnnnnnnnnnnnnnnnnnnnnnnnnnnnnnnnnnnnnnnnaagttgattagtggttgcccggggctggtggaaggggagaatgagtgactgctaatgggtgtggggtttcttcnnnnnnnnnnnnnnnnnnnnnnnnnnnnnnnnnnnnnnnnnnnnnnnnntgttgtaaaatgnnnnnnnnnnnnnnnnnnnnnnnnnnnnnnnnnnnnnnnnnnnnatgtgttatattaattat

SEQ ID NO: 32592 - DNA, 446 bp, Homo sapiens
  misc_feature (1)...(446): n = a,t,c or g
tnnnnttncccctttganacnttnngaccnnnnnnnnnnnnnnnnnnnnnnnnnnnnnnnnnnnnnnnnnnnnnnnnnnnnnnnnnggcacgagagaacctgaagctcaccaacttgaccactataatcctatcaaagccaccatcatctctccctagttattgcggtgtctatatctggtcaccccacttttcctttcacttttctccatagcagcaagtgtggggatcttcataagtcaaacctctcttgtagctcttacatgtcagtcgggataaaattcaaaattctggccatgctttactagtcccaacataaactgccccacatttccttactaaactcttctattccccgtgtcctcagctcactgtgctctggccagctgttctagcaccctccttcctcaaggcctttgaatatgccgttcgctttcccttgaacac

SEQ ID NO: 32593 - DNA, 445 bp, Homo sapiens
  misc_feature (1)...(445): n = a,t,c or g
tcccctttgnnanctnngtnataccctnnnnnnnnnnnnnnnnnnnnnnnnnnnnnnnnnnnnnnnnnnnnnnnnnnnnnnnnnnnnnnnnnggcacgagccagattctagtattttccatctattgggagaatgcctttccctgacgccggttgagacgaatgattattttagatagtttaacaacttgcctgaccatcacctgatagtcgcttgacattcctgggcggggtgggggaggttttctcctgccctgcccaagtctgcctagctacctattctaagggaatgtagacaggaagtaataaagacaccaatacgccaaactccctcatgttaagtttaccctaagtcttgatgtgttcccagtaaccctaaggcactgtctcaaacttaagatagatatttgtttttcttttttctctacttgtctgaaagttatttg

SEQ ID NO: 32594 - DNA, 443 bp, Homo sapiens
  misc_feature (1)...(443): n = a,t,c or g
tccctttgaancnctngatacccttatgacnnnnnnnnnnnnnnnnnnnnnnnnnnnnnnnnnnnnnnnnnnnnnnnnnnnnnnnnnnggcacgagtaccctgtgtaaatgaacttatggtaaaataacaaaagggttgactaaataaaataacaaaacaataaaacacacacagatagacatgcaatgtttactacacaatttggctagctggtgctcatctttgcagtgtcttttcatcaaaatgtacatacctgtgaaagcaaaacaggatgaattttagtgtgagtgaaaggatgtacaactgctgggatgtttggggcactttaaaactttctccaacaggtaagatttctaagacctctaggatgctattctgacaaaactagacattgaggtgcctaaaagcccgcaaggcagccaggcacagtggctcacacctg

SEQ ID NO: 32595 - DNA, 451 bp, Homo sapiens
  misc_feature (1)...(451): n = a,t,c or g
tnnnnttnttgnctntnggaaactntnnnnnnnnnnnnnnnnnnnnnnnnnnnnnnnnnnnnnnnnnnnnnnnnnnnnnnnnnnnnnnnnnnggcacgagggtcttcagagcagccaccgtctctgatcgttcagggcttggcatgaggaggtgctcaatatagtcatggagaagaactcatggactgaacttcctggtgaaccagagggatggtgcagagatttaagattgcaacaggaacccccaagccaatgtaagcaaaacatctatttcatgactatgggaatgttttgtaaaatccaagcaccagcctgaagaaagcctggaactgcaaactaggagctttgagacctctatcttttgatgtctagttttctccttcctcagcagaccaaatctcactctgagtacaagatgggcagaggatggctgccccagagtccccaagtc

SEQ ID NO: 32596 - DNA, 440 bp, Homo sapiens
  misc_feature (1)...(440): n = a,t,c or g
tttgnaaaccttgnnnnnnnnnnnnnnnnnnnnnnnnnnnnnnnnnnnnnnnnnnnnnnnnnnnnnnnnnnnnnnnnggcacgagggaagataaagaaactctaacatttaaattgttacttagcacagacaattaaaaattgatagtgagctaaagccatatatttctttcatagtcaatagccttctaagcctagtcttttggggctgacactggattaaacactcttccctcttcctattcttttacagagaaagcggtattcaatgtatactcagtttttcattttcaattacaaaaagtaaccacagtgtgaaaatgaaatctgaagtaattttgttagttttcttagtactagattctacatactgaaaataccattttctcttttgtattttacaacacatatttattttttaaaaattattccaacaatgcg

SEQ ID NO: 32597 - DNA, 405 bp, Homo sapiens
  misc_feature (1)...(405): n = a,t,c or g
ttgacnccttgatgacnnnnnnnnnnnnnnnnnnnnnnnnnnnnnnnnnnnnnnnnnnnnnnnnnnnnnnnnnnggcacgaggacatctgaagggctctaaatggtcatcaggcttctgtttctagagggacaagtaaggaggccatgatcttttaggcatcttttagtagcatagcagatttatagacgtctgaggggcatctaggtgcttggtttgtccacttgaaatgtgtactatcttattaatctttataataaaattctgtcctacatcttgtgattaaaagcaggaaggaaatgatgaatttaatgcacagcatagttgttaagatagacttgtatgtgttagggccagtggggaaatacagggtgattttcttttcaattttgcattgctggggcca

SEQ ID NO: 32598 - DNA, 434 bp, Homo sapiens
  misc_feature (1)...(434): n = a,t,c or g
gnnnnnnngnnnnnttnnnttnnnnntttgaancctnnnnnnnnnnnnnnnnnnnnnnnnnnnnnnnnnnnnnnnnnnnnnnnnnnnnnnnnnnnnnnnnnnnggcacgagcggcacgagagatgcacatgctggtgccacgcatcctgtacaatctgcagaatcgtgagccaaatgaacctcttttataaattatccagcctcaannnnnnnnnnnnnnnnnnnnnnnnnnnnnnnnnnnnnnnnnnnnnnnnnnnnnnnnnnnnnnnnnnnnnnnnnnnnnnnnnnnnnnnnnnnnnnnnnnnnnnnnnnnnnnnnnnnnnnnnnnnnnnnnnnnnnnnnnnnnnnnnnnnnnnnnnnnnnnnnnnnnnnnnnnnnnnnnnnnnncannnnnnnaaatgaaaagaatnactgggancccaggtttgagggtt

SEQ ID NO: 32599 - DNA, 481 bp, Homo sapiens
  misc_feature (1)...(481): n = a,t,c or g
cnagannnnngncnnatgnacgtnnngangntgannnatnnnatnnanaanncnannnnagantctnnnnggnaagtgantnaattanaaattggaanccttgaagcctnaannnnnnnnnnnnnnnnnnnnnnnnnnnnnnnnnnnnnnnnnnnnnnnnnnnnnggcacgagtcacaaggttgtgcaaccatcaccacaatcgcaatttgagaatattttcatttcccctaaaagaaattccatactcagaagcagtcctttccccaccccgccccccaggtgtaagcaatcacgaatctactttctcttctatgggtttgcccattctggatattttcatataaatgaaatcatgcagcatgtggggggtatttgtctgacttcgatctctnnnnnnnnnnnnnnnnnnnnnnnnnnnnnnnnnnnnnnnnnnnnnnnnnnnnnnnnnnnnnntngggnncntnttggncnggncaggg

SEQ ID NO: 32600 - DNA, 469 bp, Homo sapiens
  misc_feature (1)...(469): n = a,t,c or g
tcagnanagntnntnannngnnangaggagnnnncattncncnnnnnanttntgcncattntnggnagngggngntnntnattgaancntgaaacctctatgactgatacgaannnnnnnnnnnnnnnnnnnnnnnnnnnnnnnnnnnnnnnnnnnnnnnggcacgagtggggaagagaattttaattcgggtctggacattttataagagaagacattttagatccttgactagcttgtgaataatatgtattaagcaaaatacactcccagtatgaaaacagtttatagggccttttcatattattatcttattagatattctcagatagcggtatttcctcattctacagcaaacagacctgagaatcagagaagttaaatgttttggttaaatttatacagtaggaccgtgcttaaacaagtatctcctgagnntaagtgaaaaanagcctttgagactggggga

SEQ ID NO: 32601 - DNA, 473 bp, Homo sapiens
  misc_feature (1)...(473): n = a,t,c or g
cnncnannanngannnnnnngntnannannnaangnncatnntnnnatannnnnnnnnaanncagngngggnannngtgnaaatnggaacctgaaacctcannnnnnnnnnnnnnnnnnnnnnnnnnnnnnnnnnnnnnnnnnnnnnnnnnnnnnggcacgagaaaaactccaaaatgtgcactaaaaatgggggattttgagagtgtaactcctaaattagaacactttggtatctctgaatatactatgtgtttaaaggaagattacacaatgggacttaaaaatgcgaggaataataaaagcgaggaggccatagatacagaatccaggctcaatgataatgtttttgccactcccagccccatcatccagcagttggaaaaaagtgatgccgaatataccaactctcctttggtacctacattctgtnactcctgggnttgaaaattccatctacaanagaacagcata

SEQ ID NO: 32602 - DNA, 477 bp, Homo sapiens
  misc_feature (1)...(477): n = a,t,c or g
ggntgnttnnnnntctgaanccctattacnnnnnnnnnnnnnnnnnnnnnnnnnnnnnnnnnnnnnnnnnnnnnnnnnnnnnnnnnnggcacgagcagagcttcaataccctgactatagtaacaagttacttctaattccttccagaattagcactggttccaataggggaattcttcatggaatccccaaatttgtgcaaacggtatagaatcactaaactttagtattagaagccatatatatgtatatacatacacacacacacactctacaatagccctttttacaataatctttttttaatgtannnnnnnnnnnnnnnnnnnnnnnnnnnnnnnnnnnnnnnnnnnnnnnnnnnnnnnnnnnnnnnnnnnnnnnnnnnnnntaacaacnnnnnnnnnnnnnnnnnnnnnnnnnnnnnnnnnnnnnnnnnnnnnnnnnnnnnnnnnnnnntaatacctggctaacagtcta

SEQ ID NO: 32603 - DNA, 480 bp, Homo sapiens
  misc_feature (1)...(480): n = a,t,c or g
ggnntgatganatttganatcctatnnngnanaccctttgannnnnnnnnnnnnnnnnnnnnnnnnnnnnnnnnnnnnnnnnnnnnnnnnnnnnnnnnnnggcacgagggcctctccactcccccagcctcctagcccactgtactcaggttcccccctgctcatagcttgtgggcgtggactttgtaccccccgggcttggagagggcaaggtgactgggggagtccagctgctgctccttaagttgagttgtctgtcactgacttaccctccctccctctctccctactgtctccattcttctctttcccccttctttctcctgcaccctctttttccattcctcccttcccccttcctttctccgctctctctttccttcactcccttcctcccattcatctggtgcttaccgggggccaccaggtaggcacgtcgcacactacttctgcttcatgtgaggggnntcatggnggctt

SEQ ID NO: 32604 - DNA, 484 bp, Homo sapiens
  misc_feature (1)...(484): n = a,t,c or g
gtnngnnnnnntttggatnccctntnnnnaaacccttnnnnnnnnnnnnnnnnnnnnnnnnnnnnnnnnnnnnnnnnnnnnnnnnnnnnnnnnnnnnnnnggcacgagcgatttaaaaagagatcagtgttttccattctcttttcatagctatgtattattccattttgggttttactcctgtttatgcaacattccttgatggataacaatctatgggttagatccaaggcttaaattttacgtagttgtgtttttataagtcattatcagggttttagatgttgaatggggtgatgacttgatggttgttcgttgttccatcttaaacgtatgtacatgttaaatgaagaaaaggccaagcaccaatcagtgatatgaatggattgattgatcagttttatgattaaattcatttctgcacccctgcaatttatttaaaagggagatttggtatattaaatctatggaaatttcaatggag

SEQ ID NO: 32605 - DNA, 289 bp, Homo sapiens
  misc_feature (1)...(289): n = a,t,c or g
ggtgntnnngnnttgaaanccctatttgaaatccntnnnnnnnnnnnnnnnnnnnnnnnnnnnnnnnnnnnnnnnnnnnnnnnnnnnnnnnnnnnnnnnggcacgagaagaacagctcccagaacaccctaaaaaaagcagcaaacaagactaagaaaaatcagaatctacaatgcatgcacctcccccagaatatcagcccttgcttgcatatataagttctttttaagaggtcaagcagaaccctaaacactatctgaggataggatgtagaatttttttttttttt

SEQ ID NO: 32606 - DNA, 440 bp, Homo sapiens
  misc_feature (1)...(440): n = a,t,c or g
gtnngngnttnnnttttgaccaacnagatcccctttgtnnnnnnnnnnnnnnnnnnnnnnnnnnnnnnnnnnnnnnnnnnnnnnnnnnnnnnnnnnnnnnggcacgagctttaactcacttctccaggtatcaaaagtcttttaagtcttttttctgccaaaggtgaatctatgctaacgccttctagtactgattctcctttccattttcccatgcaccctactgctttctgtctccctttgcaattcaacagaaagagaaatcatgaggcagtatgaaatgaaggacttttctgggctgattttccttttgaatcagaatggaaatttatggtcatagtgctttccatgaggtatttagaagtttccagtcaatcattgctcttatcaggggttcttaaaggctttgggagatactaggttagctttcttacaatata

SEQ ID NO: 32607 - DNA, 448 bp, Homo sapiens
  misc_feature (1)...(448): n = a,t,c or g
gagnnnntnnnctttaanactctgaatncctttgnaaancccnnnnnnnnnnnnnnnnnnnnnnnnnnnnnnnnnnnnnnnnnnnggcacgagcagagaaaagggccactccgagctgaccactccacctcctagacagtttgctggaggcacggacagcctgtcctgtgagcagcccagcagccagggcctcgcaagttagagaagtgtagcagagaaaatggagacatgagtcctggagacacatgtctcatgacatccaggtcctcatggctctgaggcagcagtagctagtgggaaataagggcacaccaggtcacccacagggtgtgggacatggaatgaactggggaagcaaaggacagaaatccatggncttgngggnctggccctncacccaacagtnganacagatatgggttnnggataanacatnnnggnanaacgg

SEQ ID NO: 32608 - DNA, 391 bp, Homo sapiens
  misc_feature (1)...(391): n = a,t,c or g
nnnnnnnnnnnnnnnnnnnnnnnnnnnnnnnnnnnnggcacgagagcaagagccaatgtctaaacaaaggtctttgacttcggagttttggttctttttgaaattaatgtgaaagacatttttgagtgtgtgtatgtgacatctgtgttgatgattctgaaatgtagctacctgttaacctatttataaactagattgctggaaaataaggtgcctagatcagtcaagccactgatcatttgtctcccttgccttctcttgngtggttctgtncccacngaagttcaatntaatnatatcantctattgaatggnttgntnattggtcccctnctgtcnnnctcncnnncccnccncttnccttnnctntnnttcnnnctcacccctcttg

SEQ ID NO: 32609 - DNA, 408 bp, Homo sapiens
  misc_feature (1)...(408): n = a,t,c or g
nnnnnnnnnnnnnnnnnnnnnnnnnnnnnnnnnnnnnnnnnnnnnggcacgaggaataataatgcctgcctcaaaaaacccaaaccccagccttgctgggttgtgaggcttcagtgaggtgagaagcaattagcacagagcctggcacatgacaagggtgcaataaatgccagcatgactgcctttcacccgtatctcctgccaagcctgtctctcgagctttggattcatgtcttcaacttggcccagacttctggccagatcctccctcctgtgccaggtgctccgcatgacccaaaccaaacatatcacacccctcacagatctccctgccctgcttgtccaggggacaccccacccacccagctacccagccaggagcttgcacatcgcaccaaatgtctctgc

SEQ ID NO: 32610 - DNA, 407 bp, Homo sapiens
  misc_feature (1)...(407): n = a,t,c or g
nnnnnnnnnnnnnnnnnnnnnnnnnnnnnnnnnnnnnnnnnnnnnnggcacgaggagagatgtgtgacttttcctttcacttggtcgcnnnnnnnnnnnnnnnnnnnnnnnnnnnnnnnnnnnnnnnnnnnnnnnnnnnnnnnaatagggagacccaaggaaggggagagagacgggggaattgcctgccagtcagtggagcaattggaatacacataacatttttnnnnnnnnnnnnnnnnnnnnnnnnnnnnnnnnnnnnnnnnnnnnnnnnnnnnnnnnnnnnnnnnnnnnnnnnnnnnnnnnnnnnnnnnnnnnnnnnnnnnnnnnnnnnnnnnnnnnnnnnnnnnnnnnnnnnnnnnnnnnnnnnnnnnnnnnnnnnnnnnnnnnnnnnnnnnnnnnnnnnn

SEQ ID NO: 32611 - DNA, 404 bp, Homo sapiens
  misc_feature (1)...(404): n = a,t,c or g
aatacgactcnnnnnnnnnnnnnnnnnnnnnnnnnnnnnnnnnnggcacgagactgcttcagcccnnnnnnnnnnnnnnnnnnnnnnnnnnnnnnnnnnnnnnnnnnnnnnnnnnnnnnnnnnnnnnnnnnnnnnnnnnnnnnccaggtgcactcggaagnnnnnnnnnnnnnnnnnnnnnnnnnnnnnnnnnnnnnnnnnnnnnnnnnnnnnnnnnnnnnnnnnnnnnnnnnnnnnnnnnnnnnnnnnnnnnnnnnnnnnnnnnnnnnnnnnnnnnnttctttttaacactgtcatatatccatctcaactttctatatgtatacatctcttttacaaaaagaggccataacatactcaaggctgtttttgtatttaatgagtcataaatatagtgtcatgtc

SEQ ID NO: 32612 - DNA, 401 bp, Homo sapiens
  misc_feature (1)...(401): n = a,t,c or g
nnnnnnnnnnnnnnnnnnnnnnnnnnnnnnnnnnnnnggcacgagctggctcattcaggttgttggcaggattcagttccttttgagggaggaaccgagatccccatttcttgttggctgtggggatgggagtggcttttaactcctaaaagctgcctttgagtcctggtcacatgcccctctcacaacatggaagcttattctttaaagccaacaggagaatctttctccaggatgctaagaaggagtcttatataacttaatgtaatcacttgagtaactatacaaactttgctatgccattagcatcattaatcatattaatggtgccacccccagtcaagagtatgaaattatacatggtgggcatgccagggggcaggaatttggggaccatctta

SEQ ID NO: 32613 - DNA, 405 bp, Homo sapiens
  misc_feature (1)...(405): n = a,t,c or g
cgnnnnnnnnnnnnnnnnnnnnnnnnnnnnnnnnnnnnnggcacgagaaaaacaaaaaagataacttatccctgcctcacaccacacatgaaatcatttccaagaaaattaaagacataaatgtaagaggcaatattacaaaatgttttaggagataacattaggaaaatatatttataatctctaggtataggatttctaaagatacaaaaaggataccaagcacaaaaagattggtttatttgaatacattaaatttaagaacttctgttcatcaaaagacacaatgaaaatatgacttagctgaatcctgtcacacatacaagtatttattatcaagccacctcataaatagccactcaagtttttctggaagctccttgaaatcccagttgctgctgacat

SEQ ID NO: 32614 - DNA, 403 bp, Homo sapiens
  misc_feature (1)...(403): n = a,t,c or g
nnnnnnnnnnnnnnnnnnnnnnnnnnnnnnnnnnnnnnnnnnnnnnnggcacgaggtctgcaaagaaatagcgtgtgggtaaaggaagcaaggtagagagagaacaccatcttgctgcaagtgaccagcacgctgggaacaaggcaaccctgtaacatcctccctgctttgctgatcctgaaaccacttctcccctgtgttggggctacgtgtccttcatcagtggacatgatgggccagctcactactgcctcttngctcagggcacagttaccctgattgtgcagcatttagggaatgagctgggaagtccaggtgctcagcatcctaggcacccatcacactcattagtggtgtgtccctgggcagcgggaagaatgggnttttgttttattttttaaag

SEQ ID NO: 32615 - DNA, 401 bp, Homo sapiens
  misc_feature (1)...(401): n = a,t,c or g
nnnnnnnnnnnnnnnnnnnnnnnnnnnnnnnnnnnnnggcacgagaatggagggctgatcggttgattgtccagcatggagctccggccctgcaggccaggaagtgatggctagagcaccaagcatcatcttggatgagaaaggggaggcgtggaancanaagggcatgtgttccanctgtgantnaactccctttaaacagccttcctgaaagntccacactaccctcctctgtgtgtctcatggctaagacaatctnatggacacatcatnctgnaagggantttgngagttgtaanctnaacntnttgnnntgnagccnttnatgtgaactgggnctttttccnnnangncatcncgncnaccnttcctgtngccttantntcttgcttancnggctg

SEQ ID NO: 32616 - DNA, 408 bp, Homo sapiens
  misc_feature (1)...(408): n = a,t,c or g
nnnnnnnnnnnnnnnnnnnnnnnnnnnnnnnnnnnnnnnnnnnnnnggcacgannnnnnnnnnnnnnnnnnnnnnnnnnnnnnnnnnnnnnnnnnnnnnnnnnnnnnnnnnnnnnnnnnnnnnnnnnnnnnnnnnnnnnnnnnnnnnnnnnnnnnnnnnnnnnnnnnnnnnnnnnnnnnnnnnnnnnnnnnnnnnnnnnnnntcaaaactaaaagattcttccctttttagtgggagctttgggagataacaaagagtataattggaaaaaaaattactgagggtggcgtgatctcttccagctggctatctaggtcaagacccatttctttgtcactgtgccatgttccactctgccatcagttccaccctgcctgttcacctttctctcttgcttatctggctggg

SEQ ID NO: 32617 - DNA, 463 bp, Homo sapiens
  misc_feature (1)...(463): n = a,t,c or g
gnagtggtnttgaaccccctttgnaaaccctatgacnnnnnnnnnnnnnnnnnnnnnnnnnnnnnnnnnnnnnnnnnnnnnnnnnnnnnnnnnnggcacgagctcaagaaagaaaaaggactattttgagaagagtagctgtggttgtaaagcagtaccctaccctgattgtagggtctcattttctcaccgatattagtcctacaccaattgaagtgaaattttgcagatgtgcctatgagcacaaacttctgtggcaaatgccagttttgtttaataatgtacctattccttcagaacgatgatacccccaaaggagcctatggccctcatttccacttctaagggcgctagattggctctatcctgaggtatngcntcnatntnnnnactcctatangnctcncttcttncattagcnnanccactccntggaaccntattagatctgtggnactnccct

SEQ ID NO: 32618 - DNA, 462 bp, Homo sapiens
  misc_feature (1)...(462): n = a,t,c or g
gnngatgnncnttnaaccctattacnnnnnnnnnnnnnnnnnnnnnnnnnnnnnnnnnnnnnnnnnnnnnnnnnnnnnnnnnnggcacgagtcggcgtggtccttatctaatcaattgaaaagcattaagagtaaagctgaggttttcctgaggaataataaattatgcctcaagactgcagcctaagacttctggcctgccccacagatttcacacttgccatctccacagctgcatgagccaattcattgaaataaatctcttcatatatatcatctaatgattctatttctctggagaaccctaactgatacagagattacactagaaagatanagatnnaanctcagaaaggccaggacaacngtttttgaatatttgaatancctgctatgtgaaanatgagccactggatgggcggcnatgggacnacataantcgggcttnccatganccaaaac

SEQ ID NO: 32619 - DNA, 463 bp, Homo sapiens
  misc_feature (1)...(463): n = a,t,c or g
gntgnnnnnttgaanccctntttnnnnnnnnnnnnnnnnnnnnnnnnnnnnnnnnnnnnnnnnnnnnnnnnnnnnnnnnnnnnnnnnnnnnnnnnnnggcacgagtgaaaacatgggtaaagataaaatcataaagttttagaatccttaaaagaatcagccaaactagaatctctacgctaccacactcacattagatgataaggaaactaaggaccccaagaagttaattgtcatgattgaggtacaagctaacaaatccaaaactcactctcttgacttgtggcctgattttccttaagggtaatattgtaaatataggccagtgcaatggtgtacacatgtaataccagcattttgggaggccagggcaggattgcttaagcccaggaattcaaggacagcatgggcaacataaggagtccctatctctataaaaaagtttaaaaattagctggagtgg

SEQ ID NO: 32620 - DNA, 456 bp, Homo sapiens
  misc_feature (1)...(456): n = a,t,c or g
gagnnctttgaanccctattnnnnnnnnnnnnnnnnnnnnnnnnnnnnnnnnnnnnnnnnnnnnnnnnnnnnnnnnnnnnggcacgaggctcctcacccacacacacatacacacatatacacatacatatatatgtgtatatatgagaaaacaactacgtagaacaagggaaggggaagggaattaataggttcagctactaacagttacatgcactgaatataaggctggggtttctaggtaaagaaatggaaggggcacaataaagcaatcacagaaaggctcctgaagccattatgtccaaaccatatgcagaggcaaagatcagactgtcgttattcattctgtttgataaacacctctggtccacaggacttttggcctagcattacagtatgcaatgtttttttcccttctgtaaatagccttggtcaaaaagcaaggaaacttgtgaa

SEQ ID NO: 32621 - DNA, 455 bp, Homo sapiens
  misc_feature (1)...(455): n = a,t,c or g
gngnnnctttgatncccctntttgnaganccnnnnnnnnnnnnnnnnnnnnnnnnnnnnnnnnnnnnnnnnnnnnnnnnnnnnnnnnnnnnnnnnnnggcacgaggtctagaaagcatgctaatgtaaagtaaaggtatttaaaagacatatagggttttttttcccctatggttattatatatatttccccctatggttattatatatattgctttaattccaaatgtaacactttgcgtgactgcggtctttttaatttaccgaacgtaaacnttactnnagagatncnganctcttcaggtttaangcntgntgagnaggctttnggattntctaatattngcntnnncatantganatatnttgaggnngggacccannctnnaacantacnntntttatgttngatnttcnccttanatacgnagccctgaangggntttnattcaacat

SEQ ID NO: 32622 - DNA, 457 bp, Homo sapiens
  misc_feature (1)...(457): n = a,t,c or g
gagtnnntttgaacccctatgncatgattacgaatttaatacnnnnnnnnnnnnnnnnnnnnnnnnnnnnnnnnnnnnnnnnnggcacgagtgagtccaaacaagggccaaaagacagagtgtgttgtggaatacagaagtgaatacaaaattaggtgcatgccttggaagaagcctgtgcaaatagtgtatattaggggcaccaacaccgaagactcagcagtttcctggtacattcacccctggaaaggttagtgtccacatctagaatggtgatatctttgatgggcttgaccattactgtctaagatattgtaaattgaagagtacagacaaactaattgagctttaagtttccttttaactctgaagaaagcctatgtatcctgtgaggaagggagttgctgttcattaaaatcgtttgatttggaatggtgtaatctgaagtgctggcagg

SEQ ID NO: 32623 - DNA, 464 bp, Homo sapiens
  misc_feature (1)...(464): n = a,t,c or g
gngnnnttttganncctctntgnagacncnnnnnnnnnnnnnnnnnnnnnnnnnnnnnnnnnnnnnnnnnnnnnnnnnnnnnnnnnnnnnnnnnnggcacgaggcagcttataggtaatacactcttctctcagtgcagtgtacatttccacaaatctaagaattgccctataaacatagcaggattttgagagcttgaaaattttccattattctggacatgaatttctaaaatgccttaataggtttatgtagttgagtaaatnttgttttttaatntttgtaagcatcacagttgattanagaggggggcactttgtctggananntnantnatnaaacactanngattgacacggntcnnttancggtaacngcntttatcccagttggtcctnagggcgatgtncattcctncgcttaagtnnatnncannnatttcnnanctccttgtccntgccggc

SEQ ID NO: 32624 - DNA, 451 bp, Homo sapiens
  misc_feature (1)...(451): n = a,t,c or g
gagnnnattgaaccctctttgagaccctatgacnnnnnnnnnnnnnnnnnnnnnnnnnnnnnnnnnnnnnnnnnnnnnnnnnnnnnnnnnnggcacgagcggcacgagctagcaccgcttnnnnnnnnnnnnnnnnnnnnnnnnnnnnnnnnnnnnnnnnnnnnnnnnnnnnnnnnnnnnnnnnnnnnnnnnnnnnnnnnnnnnnnnnnnnnnnnnnnnnnnnnnnnnnnnnnnnnnnnnnnnnnnnnnnnnnnnnnnnnnnnnnnnnnnnnnnnnnnnnnnnnnnnnnnnnnnnnnnnnnnnnnnnnnnnnnnnnnnnnnnggggccnatnctatnancgtncntgattatnattntgcaaaanacanatnaaccctgantnggacaagnnanttacngccantntgagncatacctttttaaagggcaatancanngacaaactcaggg

SEQ ID NO: 32625 - DNA, 450 bp, Homo sapiens
  misc_feature (1)...(450): n = a,t,c or g
gagtnnnctttgataccctctnnggagacncnnnnnnnnnnnnnnnnnnnnnnnnnnnnnnnnnnnnnnnnnnnnnnnnnnnnnnnnnnnnnnnnnnggcacgagttttcttcaagtaaagaacaaatatgagacctaagtataaccaaatcagaaatgcaaacaaaaattcccaatattcttttatatgctttgaaattatactattcatcttaaacaggctaaaggagtggagattagaagcaggactacaagaccagtggtggccangatgctgtgnttaacanccaatgcccagnnaaagaccangaccntgtgnaggaggcttanactccanctctgtggtnctaagganngngactggcatggaacgcntanntgnttactatgacanngntnctantggnnncgnnnnntcnngcncgnctanntgncttctncgnctnatat

SEQ ID NO: 32626 - DNA, 459 bp, Homo sapiens
  misc_feature (1)...(459): n = a,t,c or g
gagagtnnctttgaanccctattacnnnnnnnnnnnnnnnnnnnnnnnnnnnnnnnnnnnnnnnnnnnnnnnnnnnnnnnnnnggcacgaggtggaacgagaactttgttcagccacagctgaatttgaggatttcgtcttacagtttatggacagatgttttggacttatagaaagtagcacattggagcaaacaagagaagagacagaaactgagaaaatgacacacttggagagtttggtcgaattaggtctgtcttctacgtttagtacaatcctcacccaatgttccaaagaaatatttatggtggcccttcagaaggtttttaatttttctacttcacatatatttgaaacaagagtagcaggtcgcatggtggcagacatgtgccgcgctgctgtaaagtgctgcccagaagaatctttgaagctctttgntccccactgctgcagtgttat

SEQ ID NO: 32627 - DNA, 451 bp, Homo sapiens
  misc_feature (1)...(451): n = a,t,c or g
tttgaaaacccttatgttnnnnnnnnnnnnnnnnnnnnnnnnnnnnnnnnnnnnnnnnnnnnnnnnnnnnnnnnnnnggcacgagaggaaaatgcataacatatggcttatataaaattgttacaagagaagtgtatttttgactgacttaatattttaccagaacttgcaccccatggaaggagagaaacagaggattataatgtcaatttgtcactgggattaatttcataaagaatttatgcccactgttgtcctgctgagaatacaaaataatcatgaaatgttgttacagaacctagttaaaatgttacttatctcccctgaggaaagatgagaagctactaaaatggataaatcttgtcagaaggtaacagttcacccttgtccaaaacacatactaatttccccttattaagcaactaaaggacccnaaagaaatactcnggat

SEQ ID NO: 32628 - DNA, 454 bp, Homo sapiens
  misc_feature (1)...(454): n = a,t,c or g
tttgaanacccttctttgaacacctnnnnnnnnnnnnnnnnnnnnnnnnnnnnnnnnnnnnnnnnnnnnnnnnnnnnnnnnnnnnnnnnnggcacgagtacaaaatgactatggatgtataaagaagcttattgggtcttaatagtgtggggttcaaggggaggaagccccacctctgtatgggatgtccctgtaatgtcttcttaccctggggcttctctgtcctggccatctgtttgccagtctgatgccagagtctgtatattatgatttgtttgctgtttattgacttgttcatagtgaggtagagtcaaggactagctatagctcacttaggctcccattgaccctccctgtgtgtctttgccataccctccacctggactcctggcctgcttctagcttctgctggtnccactttgncaggccacaacctgatctgatngncaaaact

SEQ ID NO: 32629 - DNA, 450 bp, Homo sapiens
  misc_feature (1)...(450): n = a,t,c or g
tttganaccctttgttatgacnnnnnnnnnnnnnnnnnnnnnnnnnnnnnnnnnnnnnnnnnnnnnnnnnnnnnggcacgagcacaatagttagcataaacttgaattgtcctgttgtgtaaaaggtttgaatacaaaatcaggtccttttctctaaaagagcaaaatttcatgtgcataactgaatagatgatcattaagtagggagtaagatacgagctgaaagaagagggaagtcactgtgtaggtcataaagcgtagccttcgcaactacaacagaagtaggtatgtcagttaaactaccctgcattgcaaattctgagcttcctgtaatatggagatctgcatgtgacttaaaacattgcaggaccttttttgtgaagttattttagtattgggtcaccaaagttaaatctcatactttgagaagaagaagaactcttcatttga

SEQ ID NO: 32630 - DNA, 455 bp, Homo sapiens
  misc_feature (1)...(455): n = a,t,c or g
gaaaacccttatgttannnnnnnnnnnnnnnnnnnnnnnnnnnnnnnnnnnnnnnnnnnnnnnnnnnnnnnnnnggcacgagagtactaggacaggttccaccctgctgcccaactgaatctcttagggaatttgctttctgcctggctcaggaagctgtgatctccttccttctctgtgagttctataggagtgggccactgttatggagggctgcggcccctggaacatttttaccattgctcaaagtaaacannnnnnnnnnnnnnnnnnnnnnnnnnnnnnnnnnnnnnnnnnnnnnnnnnnnnnnnnnnnnnnnnnnnnnnnnnnnnnnnnnnnnnnnnnnnnnnnnnnnnnnnnnnnnnnnnnnnnnnnnnnnnnnnnnnnnnnnnnnnnnnncgaaggcatggtggnaacatgccctgtagtcccnactactttgggaagggtggagg

SEQ ID NO: 32631 - DNA, 446 bp, Homo sapiens
  misc_feature (1)...(446): n = a,t,c or g
ttganaccnnnnnnnnnnnnnnnnnnnnnnnnnnnnnnnnnnnnnnnnnnnnnnnnnnnnnnnnnnnnnnnnnnnggcacgaggaagagtttgaatgggaatggtagcagatggggtctgagagtaatggattgctggcctgtgtggggccttgggaggccaccgccagggctctggcatcagctctgaatgagatgggagccacgcaaggtgtcaggcaggggaattacatgatctaaatcactgtggctgctgtgttgagagccgacatctggggaccagggtggaaggatgagactggataaatagttgtagtttcatgctaaatgcaattagaagtcccttggaaggttttgacatgggagtgaccngcacatttgtgtgattaaaaagactttttgcttgnangcngntnganaactgacantnctggcnttnngnaaagg

SEQ ID NO: 32632 - DNA, 450 bp, Homo sapiens
  misc_feature (1)...(450): n = a,t,c or g
tgaatcccttntttgaaaccttatgacnnnnnnnnnnnnnnnnnnnnnnnnnnnnnnnnnnnnnnnnnnnnnnnnnnnnnnnnnnggcacgaggtagaggtgaagcatgtgggctctgggatcacactcccttgcttgaatcccagttctgccctgctctttgtgaccctaggtgaattattaagtannnnnnnnnnnnnnnnnnnnnnnnnnnnnngtagaggatgatagtgtgcagttttggatcaatgtgagaggtaaccgagaaaacaaatgggagtgtccatacagtgactggcacataattaagtgctcagaaagtcccaatcatggtattgtgtcaacaagaaggttaaattaagtagagatgtggcacttttatctcaatacagggtgacactgntctttctctgnggcaaatcgttcacatacattctttttttctttctt

SEQ ID NO: 32633 - DNA, 448 bp, Homo sapiens
  misc_feature (1)...(448): n = a,t,c or g
tttganaccctttgttnnnnnnnnnnnnnnnnnnnnnnnnnnnnnnnnnnnnnnnnnnnnnnnnnnnnnnnnnnnggcacgagaaaacatagagaaatcttagaagaaagtagatgaaagtttctcagcactgctgctatctgggactggagggttccatgtggtggggtgtcctgtgtactgcagggtgttgagcagcgtccctgggctccgcccaccagatgccggcaggagttggcagttgtgacaactaaaaatatctccacatgttgatgaaggtggatgttttgttcatctgaaagctggaaatgctggtgtaaattaaacaagatggaagaggacaccagaactgctgtgtgtcagagatattatgtgttaaagataaaacaaactgagggccacatttaaaatattataatggagaggtcttattggcatcccgtccaaa

SEQ ID NO: 32634 - DNA, 448 bp, Homo sapiens
  misc_feature (1)...(448): n = a,t,c or g
antcccttntttgatacccttatgactgantacgaatttaatacgactcnnnnnnnnnnnnnnnnnnnnnnnnnnnnnnnnnnggcacgagagagaattgtcaaataaataacctaatgttccaccttaggaaaccaaaaaaagaagagtacactaaacctacagcaagcagaaggaaataaatagtaaatattagaatagaaagaaatggaatagagcagaaaaacaatagagaaaatcaatgaattgaaaagttggctctttgaaaacatcaacaaaattgactcacattcaggtaaatggatggtaggagaggagtagtgtgtgtttgtgtgtgtgtgtgtgagagagagacagagtgacagagaaanagagacnagactcattaaaatttagaatgaaagaggagacatcctgntgatcttaccgaaattanatactttaggaa

SEQ ID NO: 32635 - DNA, 453 bp, Homo sapiens
  misc_feature (1)...(453): n = a,t,c or g
tttggaaacccnttantttgaganccctnnnnnnnnnnnnnnnnnnnnnnnnnnnnnnnnnnnnnnnnnnnnnnnnnnggcacgaggtaaatggcaaaaacaaccaaatcaaaaaacccgaagacaaaaatactaaagactttaataatggatggtttgatttctacaaaaacagccagactttacatcctttgaaaatgtgaaggtgttaaatatgcactgtctgacaaatgttcaattgctgcagggatggttatgctgtagtcacttaaaattaatatagcttcatattgttgaaactggaaagataaatccaccaaaggatgtgaaacctggtagcgtgttagtagagatatgagaaattatcttnnncacntggtgtgggntganagaagccggttctaattggntnttacaaanttnggggnaatttgcccccananacccgaaaat

SEQ ID NO: 32636 - DNA, 442 bp, Homo sapiens
  misc_feature (1)...(442): n = a,t,c or g
tttggaanaccgtnnnnnnnnnnnnnnnnnnnnnnnnnnnnnnnnnnnnnnnnnnnnnnnnnnnnnnnnnnnnnnnnnggcacgagccagtattatcactggtatgcagccagaatatgtccacaagaagcaaatgaagcactgaggaaattaacaggatagcattagagtgaggagctgtggttttccaatccatataccctccttcctcaactttttggttttgctggtttttcttcaactttttgtattgaaaatttcaactctacagagaaatcgggagggaaatgcaataaactcttgtatatctttaaccttgctgaacgaattattaagattttgccatatttgctttaaatctatgagtgaaagtgtgtgtgtgtgtttgcttgctaaaccatatgaaagtaagttgcagacatcattatatcttatcccaaag

SEQ ID NO: 32637 - DNA, 457 bp, Homo sapiens
  misc_feature (1)...(457): n = a,t,c or g
tttgaaatccttgtttgaaaccttnnnnnnnnnnnnnnnnnnnnnnnnnnnnnnnnnnnnnnnnnnnnnnnnnnnnnnnnnnnnnnnnggcacgaggggatcggcattgcctgtgtgcaggtctttggcatgatcttcacgtgctgcctgtacaggagtctcaagctggagcactactgaccctgccttgggccttgctgctgctgcacccaactactgagctgagaccactgagtaccaggggctgggctccctgatgacacccaccctgtgccatcaccataacctctggggaccccaacctcagaggcagcttcaagtgccttttgctgcgcaccaangcccagcaggggangngaggggggctngcggggcnaaantttggggggtgttttgtggggctcnccggacatactntnttgcctgnnggtcagatgccnggttggaaagggccttt

SEQ ID NO: 32638 - DNA, 463 bp, Homo sapiens
  misc_feature (1)...(463): n = a,t,c or g
tnnnnnnntntgaaaccccttatgttntgactcnnnnnnnnnnnnnnnnnnnnnnnnnnnnnnnnnnnnnnnnnnnnnnnnnnnnggcacgagggcaagcaatccaataggaagtttgaaacagctttgtcggaatagttactgtggagtggtgcgagcaaaagccagaattcaagaggcagcaggatgaagggaaagtgggaatgtattggtaactagagtagtgtcctttaagagtggtggatggaaagggagtgatggagaggttgtgatagctagcgaaagcttgggatcaaggcagcatgtatgtattgggcatgagggagctgaccgccagcgttgaggacccagctgaaactaggacccactcagatatgttgacaccagttgacatggctcatgctttctggaaacttcaacagcagaccacagacatttaggtggctaacgcatacttttgttt

SEQ ID NO: 32639 - DNA, 454 bp, Homo sapiens
  misc_feature (1)...(454): n = a,t,c or g
tttgaatcccttntttgaaaccttatgacnnnnnnnnnnnnnnnnnnnnnnnnnnnnnnnnnnnnnnnnnnnnnnnnnnnnnnnnnnggcacgaggacaataaacacaaataagtaaaataccatctatagtatgttagatggtgatcagggttaaggagaataataaaccagggaagggtttaggaagttacagtgtagcagggacgtgcaattttagataggaaggcctgggaagctcattaagaaggtaagannnnnnnnnnnnnnnnnnnnnnnnnnnnnnnnnnnnnnnnnnnnnnnnnnnnnnnnnnnnnnnnnnnnnnnnnnnnnnnnnnnnnnnnnnnnnnnnnnnnnnnnnnnnnnnnnnnnnnnnnnnnnnnnnnnnnnnnnnnnnnnnnnnnnnnnnnnnnnnnnnnnnnnnnnnnnnnnnnnnnnnnnnnnnnnnnnnnnnn

SEQ ID NO: 32640 - DNA, 451 bp, Homo sapiens
  misc_feature (1)...(451): n = a,t,c or g
tttganaccnnttgttgnnnnnnnnnnnnnnnnnnnnnnnnnnnnnnnnnnnnnnnnnnnnnnnnnnnnnnnnnnggcacgagaacattgccttaattgacaggcatcgtgacccagatagttcttaatcattgaaacctgtttctctcctccttatccactggctgcctgggatttgttacctgggaagcagactaccatagcagttaagagcatgagcctaggagtcagacagaccttactttaaagccaggctnnnnnnnnnnnnnnnnnnnnnnnnnnnnnnnnnnnnnnnnnnnnnnnnnnnnnnnnnnnnnnnnnnnnnnnnnnnnnnnnnnnnnnnnnnnnnnnnnnnnnnnnnnnnnnnnnnnnnnnnnnnnnnnnnnnnnnnnnnnnnnnnnnnnnnnnnnnnnnnnnnnnnnnnnnnnnnnnnnnnnnnnnnnnnnnnnaa

SEQ ID NO: 32641 - DNA, 491 bp, Homo sapiens
  misc_feature (1)...(491): n = a,t,c or g
gagngtgnnnnntttgaaacccttatgacatnattacgaatttaatacnnnnnnnnnnnnnnnnnnnnnnnnnnnnnnnnnnnnnnnnnggcacgagagcaccatgagcttcaatnnnnnnnnnnnnnnnnnnnnnnnnnnnnnnnnnnnnnnnnnnnnnnnnnnnnnnnnnnnnnnnnnnnnnnnnnnnnnnnnnnnnnnnnnnnnnnnnnnnnnnnnnnnnnnnnnnnnnnnnnnnnnnnnnnnnnnnnnnnnnnnnnnnnnnnnnnnnnnnnnnnnnnnnnnnnnnnnnnnnnnnnnnnnnnnnnnnnnnnnnnnnttntannaaanccnccngttttttngcccnnttttacnccntantnttnaaagggncctagcccntttaaaggggtntncngnancantnagnnganttntnatggnntttnaaagtnnttnggttnaagttaccancnntcatcctgcngatttcangcttccaaaaaact

SEQ ID NO: 32642 - DNA, 477 bp, Homo sapiens
  misc_feature (1)...(477): n = a,t,c or g
ttgaancctttgaaatccgttatgactgacnnnnnnnnnnnnnnnnnnnnnnnnnnnnnnnnnnnnnnnnnnnnnnnnnnnnnnggcacgagcggcacgagccaataacatccctgagagtttggccgggctagttgcattatcctcaatcatacagaaacatgagtgactagaatgaaaagggcgtgtggctagtaagaggtgtgagcagagttgcacaggttctttttattaatccaaagctctttccattccactgcctcttcttgctgtttcttcaacattccaaacagtcctgccttaggacgtttgccataacaatacgtaacataattatttgttggttgacctgctttcctggcanaatgcanacttcacgagggtanggactngctctcttgtttgtgctggattnncagggcctngaantgantgactgngacatttatntntgctcannaaatatttcgcanggtc

SEQ ID NO: 32643 - DNA, 480 bp, Homo sapiens
  misc_feature (1)...(480): n = a,t,c or g
gtnnnnatttganaccnttnnnnnnnnnnnnnnnnnnnnnnnnnnnnnnnnnnnnnnnnnnnnnnnnnnnnnnnnnnnnnnnggcacgagagannnnnnnnnnnnnnnnnnnnnnnnnnnnnnnnnnnnnnnnnnnnnnnnnnnnnnnnnnnnnnnnnnnnnnnnnnnnnnnnnnnnnnnnnnnnnnnnnnnnnnnnnnnnnnnnnnnnnnnnnnnnnnnnnnnnnnnnnnnnnnnnnnnnnnnnnnnnnnnnnnnnnnnnnnnnnnnnnnnnnnnnnnnnnnnnnnnnnnnnnnnnnnnnnnnnnnnnnnnnnnnnnnnnnnnnnnnnnnnnnnnnnnnnnnnnnnnnnnnnnnnnnnnnnnnnnnnnnnnnnnnnnnnnnactgagtagggagattttaagcaagccgccatctcctccatcgccatcaccagccctgtcctggacaccatcgctaaagctcacttcaccctcttggg

SEQ ID NO: 32644 - DNA, 485 bp, Homo sapiens
  misc_feature (1)...(485): n = a,t,c or g
gngnnntnnattgaanncctttgaaanccnttatgacnnnnnnnnnnnnnnnnnnnnnnnnnnnnnnnnnnnnnnnnnnnnnnnnnnnnnnnnnnggcacgaggctcttggttaacatccagacctcttgattttcagtcaaatgccaactacatgatgttgctttccatgactcatatttggaggttttcaggcaccctatggagcagtctgtccctcctggctcatctggggcaatatgagagcaaatggggctagaacaaaactggatgaaaggagaaactctggggctgctgaattcacatgccgatggtgctggggaaaggtatgaacaagaatgactcacggttattcaggctgatgtcattccatgactccctcagaagatgccacactcaaaattcagcagatggcatgccatcccttccctaggtttcctggctaacctctggagatggtgatgtccagccctactccacttacca

SEQ ID NO: 32645 - DNA, 483 bp, Homo sapiens
  misc_feature (1)...(483): n = a,t,c or g
gngtntnnnttgatncctttgaaanccttnnnnnnnnnnnnnnnnnnnnnnnnnnnnnnnnnnnnnnnnnnnnnnnnnnnnnnnnnnnnnnnggcacgagctggaataataaatgataatctatagtgtaattatgaaataaatgaaaatatataatgtaattctgaaatgatcatttataatgtaattatgaaataataaatgacaatttataatgtgattacnnnnnnnnnnnnnnnnnnnnnnnnnnnnnnnnnnnnnnnnnnnnnnnnnnnnnnnnnnnnnnnnnnnnnnnnnnnnnnnnnnnnnnnnnnnnnnnnnnnnnnnnnnnnnnnnnnnnnnnnnnnnnnnnnnnnnnnnnnnnnnnnnnnnnnnnnnnnnnnnnnnnnnnnnnnnnnnnnnnnnnnnnnnnnnnnnnnnnnnnnnnnnnnnnnnnnnnnnnnnnnnnnnnnnnnnnnnnnnnnnnnnnnnnnnnnnnnnnnn

SEQ ID NO: 32646 - DNA, 482 bp, Homo sapiens
  misc_feature (1)...(482): n = a,t,c or g
gggnntnnnttganncctttgaaanccgtttgacnnnnnnnnnnnnnnnnnnnnnnnnnnnnnnnnnnnnnnnnnnnnnnnnnnnnnnnnnnggcacgaggttttcatacatgtaggcacatgtatagttctccccagttcttccatatcttggccaacccatccacattcctcaccctaagtattaggaaggctccagtggaaggagggggagtaataaataaactttataggctgcgagggacccacatgttacagactcgccatgttataacagacttttttaccgtgtgtgattgctgcaaggaggaaaattttaggctatgagatttcaaatctctaacaaagaacacgatgtattggagttcttctcttctgtaatacacaaatatttggagatgaagaagagaaggctaaagtacagttattactctaagtataaaatgctttagaaatgcaatatacaaatagtaaacaatatt

SEQ ID NO: 32647 - DNA, 481 bp, Homo sapiens
  misc_feature (1)...(481): n = a,t,c or g
gagtgtnngnntntganaccctttgacatnanacgaatttaataccgactcnnnnnnnnnnnnnnnnnnnnnnnnnnnnnnnnnnggcacgagctggtattttgatgctttgctggctggtgcagtgcctgagggagtaagagccctgttgttgtaagatagtgtcttactccctcaggcacatctccaacaagtctcttgctctcctccaatttgatcgctttgcctggtgaccagtaactaagttcttctgattaccaaatatcattaatgagatatcaacttttaaactatttattattatttgggttttaaggagaattgccctaatattaaacttattacatgtagtattatgtataattgggtatattggcaaatgtgttaaaagagagtgtaggaactgctttatgtagcaaattacttcctaagttttatgtgaatattcttaagaactgttatttgaaatgttagtctgtgg

SEQ ID NO: 32648 - DNA, 476 bp, Homo sapiens
  misc_feature (1)...(476): n = a,t,c or g
gagtgntgnattgantcctttggaaatcnttnnnnnnnnnnnnnnnnnnnnnnnnnnnnnnnnnnnnnnnnnnnnnnnnnnnnnnnnnnnnnnnggcacgagtggggaacacaagggcatgtttaatttgaaagaaaaacatttttaaaggtacgtttgatatgatcagcctattgctcagcaaagaactgctgtttggacatttcacttggctacaaagatgtgaaaggcatgaatcttatagccactgaattgtgttggcctccgtgagctcataatccagggagtgatctgtattagctactgacttgcttccaagtaccatttgaagtgttgatcataatctttaagtacttaaagccctgagcaatttagggattgtgtgtctctatgcagtcactgagataagctatttttccccctttccttgcataatggtctagagggcaggntgtgatctttgnannggccnttgt

SEQ ID NO: 32649 - DNA, 479 bp, Homo sapiens
  misc_feature (1)...(479): n = a,t,c or g
ggtgtnnnnntntgaanccttnnnnnnnnnnnnnnnnnnnnnnnnnnnnnnnnnnnnnnnnnnnnnnnnnnnnnnnnnnnnnnnggcacgaggaccctctccctcaaatctattccttggttgcatttccttatgttaaatggtgtcttctagaaacctggtcagtctatgtcctctgtgtgagttttggggaggcaaaaggcatggagagtgttgggctcagatccagtagcagactgagtttgatgatatatctgtaacaactcagctctttaagttagtctgaaacttgaataaactttattccttccttgatttatacagatgcatcatgtataaatcaacaagtttcacagaactgtagttagtaatggcatcaaatttctggatagggaaaattaaatttgtccctttaagaaattgaaaagcttnnnnnnnnnnnnnnnnnnnnnnnnnnnnnnnnnnnnnnnnnnntgcca

SEQ ID NO: 32650 - DNA, 478 bp, Homo sapiens
  misc_feature (1)...(478): n = a,t,c or g
gngnntnnnttgannctttganacctttgacnnnnnnnnnnnnnnnnnnnnnnnnnnnnnnnnnnnnnnnnnnnnnnnnnnnnnnnnnnggcacgaggtaataatatttttttcatgagccaaaccatgtgccataatgtttatggatatttgttcgttgttgtatcacactatttttaaaaggatgtcaagctattttttggtagaaggacaaaattcagaacaattgtggaactgaccaactgtgatcaatatctaacagtattgagaagtcacagcaaaaaacaatggaagaaagagaaagtgcctcaaggtcagaaaccaaaactgaatgcccagcattgtaaggccatttacgtgcagcagcaaacagctccgcacagtgtaattgtccctctgggcattgttagactgcagtatagtataataattgatgataatgagtctgagtcattaaaaaataaacttcaagtcatgt

SEQ ID NO: 32651 - DNA, 481 bp, Homo sapiens
  misc_feature (1)...(481): n = a,t,c or g
gggtgtgnttgantctntngnaaacccttnnnnnnnnnnnnnnnnnnnnnnnnnnnnnnnnnnnnnnnnnnnnnnnnnnnnnnnnnnnnnnnnggcacgagggccagagatgagtaattttgttactgtgataatatattttatatatatgtgtatgtgtgtgcgtgtgtatatatatatatgagatatatatgatatatatatgatatatatgatatatatatataaaacatacagttcagtagcattaacatctagcattcnnnnnnnnnnnnnnnnnnnnnnnnnnnnnnnnnnnnnnnnnnnnnnnnnnnnnnnnnnnnnnnnnnnnnncataccacacccattaaataataactcctcattgctcctcctgttagtaccaaccattgttctactttcannnnnnnnnnnnnnnnnnnnnnnnnnnnnnnnnnnnnnnnnnnnnncgtgatatctttttgnaactggcttatttcac

SEQ ID NO: 32652 - DNA, 476 bp, Homo sapiens
  misc_feature (1)...(476): n = a,t,c or g
gngnntnnnttgannnctttganacctttgactgattacgaatttaatacgactcnnnnnnnnnnnnnnnnnnnnnnnnnnnnnnnnnnggcacgagggattagatattagatgatataaatggtattttttaggtatgagaatggcacggtaatcatatttaaaagaagggttatcagaggtatatatagaagtatctactgataaaattattagtgtctagatcttgctttcaatgctgcagcaaaaataaacaaaaatgggaagactgataaagtaggtaaaattttgataattgttaaagcaggtgatggatgcatggggttcaatatattatatgaagttcattatactcttccatctacttttgtatatatttaaaatgcccataataaaaagacagtnnnnnnnnnnnnnnnnnnnnnnnnnnnnnnnnnnnnnnnnnnnnnnnnnnnnnnnnnnnnnnnnnnnnnnna

SEQ ID NO: 32653 - DNA, 428 bp, Homo sapiens
  misc_feature (1)...(428): n = a,t,c or g
tttganaccgtttgattnnnnnnnnnnnnnnnnnnnnnnnnnnnnnnnnnnnnnnnnnnnnnnnnnnnnnnnnnnggcacgagaacgaccagggctgtgaagatctacagaggaagtactccagtgtgggggaggcaagggaagaggacgaaaatgatgagaatgacactgaggtcattgtttagagcagatctcaagcagccgtttggccacgccatatcctttgtggagcatagtgggttatctatctgtctgtctgtctatgtatctgtctatctatatatatattcagcttctttactgctacctacacatttttctccaaattttattaatttcatagtgttttgatttgggtggcagatgacttttaagcagtgggtgtttgccggccagatctttcctggcatgcggactgtgaggcaaaa

SEQ ID NO: 32654 - DNA, 429 bp, Homo sapiens
  misc_feature (1)...(429): n = a,t,c or g
tgnannccctnnntttgaanacntttgacnnnnnnnnnnnnnnnnnnnnnnnnnnnnnnnnnnnnnnnnnnnnnnnnnnnnnnnnnnggcacgagggggaggaacacgtatgtgtgagcgcctccaagcacagccccactgaggatgaggaaagtgccaaggcggaggctgatgcatacatcagggagaagagggagtctgtggccagtggggatgaccgagccgaagaagacatggatgaggccattgagaaaggagaggctgaacaatctgaagaggaggctgatgaggaggacaaagctgaagatgccagagaggaggaatatgagccggaaaaaatggaagctgaagactatgtgatggctgtggtcgacaaggctgcagaggctggtggtgccgaggagcagtatggattcctcaccacaccaa

SEQ ID NO: 32655 - DNA, 427 bp, Homo sapiens
  misc_feature (1)...(427): n = a,t,c or g
tttgganaccgtttgattnnnnnnnnnnnnnnnnnnnnnnnnnnnnnnnnnnnnnnnnnnnnnnnnnnnnnnnnnnggcannnnnnnnnnnnnnnnnnnnnnnnnnnnnnnnnnnnnnnnnnnnnnnnnnnnnnnnnnnnnnnnnnnnnnnnnnnnnnnnnnnnnnnnnnnnnnnnnnnnnnnnnnnnnnnnnnnnnnnnnnnnnnnnnnnnnnnnnnnnnnnnnttctgaaatcnnnnnnnnnnnnnnnnnnnnnnnnnnnnnnnnnnnnnnnnnnnnnnnnnnnnnnnnnnnnnnnnnnnnnnnnnnnnnnnnnnnnnnnnnnnnnnngccttcttaaaaataataagtggttctgaaatcctctgggcactgctgaaatatgtccactcaatacttccagcacaatttaaagccctgggtccca

SEQ ID NO: 32656 - DNA, 426 bp, Homo sapiens
  misc_feature (1)...(426): n = a,t,c or g
ganaccccnnntttgaanacctnnnnnnnnnnnnnnnnnnnnnnnnnnnnnnnnnnnnnnnnnnnnnnnnnnnnnnnnnnnnnnnnnnggcacgaggttgaaagagcagctgagagtcacctagcaagtcattaaacaactggtttgcacatattcatagttcctaccgcagggccagcttcaaaccataggccagattcaaaccatatttcctaccccagggccagcttcaaaccctgttagggtggagaaactgtttgcaaagccaacatggcattttcaggtaaaacttctatcctcttctcccttcggttacataatcaataagctgcctatgccctcatccactgccaagttgtaggttgttcagatttctactggaccatgaagtcaaaagccaagccttctcttactatagactgtttc

SEQ ID NO: 32657 - DNA, 497 bp, Homo sapiens
  misc_feature (1)...(497): n = a,t,c or g
tgncatcgnngctncaacncnangcggnngctcnnannncngnanccnantggagnnnnatnnagnantcngagttggagacncnnntttgaaaccttttgaatgatacgaannnnnnnnnnnnnnnnnnnnnnnnnnnnnnnnnnnnnnnnnnnnnnnggcacgagcaaatccctggaagaggacaagaaagactgaggtaggaataaagttcttttaaacctcaagggtgcccattgcaggttatcaaaactcacttggtgaaccctgaagagggagatgggattggtggaaatgggttctccacttgcctatttggcctcttttatgatgcttccaaggaatcttgaattcagcacagtcaaaaccaaactcaggatcttctcttgccaaaagcagtcccttcccagggccccttctgggtgtctggcaccgatatttgaacactcattgccataagccaggaaatatagaaggcgatctgggtaccccctctc

SEQ ID NO: 32658 - DNA, 421 bp, Homo sapiens
  misc_feature (1)...(421): n = a,t,c or g
ttgnnaccgnttgatnnnnnnnnnnnnnnnnnnnnnnnnnnnnnnnnnnnnnnnnnnnnnnnnnnnnnnnnnnggcacgaggggacatcctgacatgccagaaagcaagtaaaatatcaactattgctggggtaatgtcaaaaggacacaaaccaattaaaatagttccttgctagtcaaagatggaaaaatatgagcaccaaaagaaaataagatgggattctgcttctagtcaaggtatagaactggcactggatttatcctcccatcataaataagaacaagaaaactggacataatatatgaaataacacttttcaagacttttgtcatgatgcaacaatggacagtaatctctgagatataaaaacaaataaggtgaacactaggattgcccagcctattgccctgagaaaatttc

SEQ ID NO: 32659 - DNA, 425 bp, Homo sapiens
  misc_feature (1)...(425): n = a,t,c or g
anaccctnnnntttggatacccgnnnnnnnnnnnnnnnnnnnnnnnnnnnnnnnnnnnnnnnnnnnnnnnnnnnnnnnnnnnnnnnnnnggcacgagcaaataagacaagcaagcttttgagtagtgatgaaagaggtaattttgttttgagtaataatttgtcttacaccaaatactgctcttgccgatgattgcattacagtacctaatctctttgatcaagcatatgtgtatatataggtctgtggctgagtgtgtttctctgagaacacaaggaaaaacttagaattgcaaacagaggcatgcacagctgtttccttctattcacttcctcaaactccctttctagccgttttgcactacactgccttgagctggcttctcaacttagatccagatctcaactccaggcctcaacaagttt

SEQ ID NO: 32660 - DNA, 399 bp, Homo sapiens
  misc_feature (1)...(399): n = a,t,c or g
acccnnnnncttnnnnnnnnnnnnnnnnnnnnnnnnnnnnnnnnnnnnnnnnnnnnnnnnnnnnnnnnnnnnnnnnnnnnnnnnnnggcacgagccatgtagtacatgtatgttagggtccattatgactcttttatcaataaataaattatattgaactaatatctgaaaaatctgttagtagccagtttatttctgatctttaattatctctataataaatctgaactattgatttgaactatttgaactattttaggccaaactaccttttaaatatgcttccactgtcagaactacagatactactttactaggttgtaannnnnnnnnnnnnnnnnnnnnnnnnnnnnnnnnnnnnnnnnnnnggnttttnnaaataatancctngaaaatggt

SEQ ID NO: 32661 - DNA, 414 bp, Homo sapiens
  misc_feature (1)...(414): n = a,t,c or g
cntntgaanaccttnnnnnnnnnnnnnnnnnnnnnnnnnnnnnnnnnnnnnnnnnnnnnnnnnnnnnnnnnnnnnnnnnggcacgagttgggtagggacacatatttaaactatatcaataaataagaattatttaagccaaggattcaagacaaatggaccttagaatagcatacacaaaagtataaagaaagagggcatatttggaaatactgaaagaatgggtgtggggtatgtgcctgtagtgccaaccactaaggaggcggagtcagggggatcgcctgagcccagaagttggaggccacattgagctatgataatgcccgnnnnnnnnnnnnnnnnnnnnnnnnnnnnnnnnnnnnnnnnnnnnnnnnnnnnnnnnnnnntaaagaaagctagaatgaatggaatact

SEQ ID NO: 32662 - DNA, 418 bp, Homo sapiens
  misc_feature (1)...(418): n = a,t,c or g
tttgataccgtttgatttgattaccaatttaatacgactcnnnnnnnnnnnnnnnnnnnnnnnnnnnnnnnnnnggcacgaggcagatatgggataacttagagttgctttgttctttagaggaaagtggcttaaagatgatatttctgtttaatttgttcaagcaagtttttgccaatttcttaatatagttgcagctgtcatagccagctagtttatttgcatatgtaaatttaaaatcatttcattgttacacacggcaagtatgaaatgttttaatttaaaagaatctatatatggtagcattatttttatataataatatcaactaaatatgtgaagcataatctttaaaaaacatttcagataggctagatcaaacaaaaatatctaattttagtatgaatgtaagataaac

SEQ ID NO: 32663 - DNA, 413 bp, Homo sapiens
  misc_feature (1)...(413): n = a,t,c or g
ntttggaanacccnnnnnnnnnnnnnnnnnnnnnnnnnnnnnnnnnnnnnnnnnnnnnnnnnnnnnnnnnnnnnnnnnnnggcacgagccaggcctggctaatttnnnnnnnnnnnnnnnnnnnnnnnnnnnnnnnnnnnnnnnnnnnnnnnnnnnnnnnnnnnnnnnnnnnnnnnnnnnnnnnnnnnnnnnnnnnnnnnnnnnnnnnnnnnnnnnnnnnnnnnnnnnnnnnnnnngcagaatttcctttttaagacagtagtagtactttgtatgtatataccaaattttgtttnnnnnnnnnnnnnnnnnnnnnnnnnnnnnnnnnnnnnnnnnnnnnnnnnnnnnnnnnnnnnnnnnnnnnnnnnnnngcacatacctcttcaagaccgtgctttaattcttttgaatat

SEQ ID NO: 32664 - DNA, 419 bp, Homo sapiens
  misc_feature (1)...(419): n = a,t,c or g
anacccttnnctttgaanacctnttgacnnnnnnnnnnnnnnnnnnnnnnnnnnnnnnnnnnnnnnnnnnnnnnnnnnnnnnnnnnggcacgaggattaaacttgagcaagtcttctctgttgagagggcaagtgagatggcaacgtaagactggataaatattttgctagcaatctttttttaatctggaaagtagcctttccacttctttttaaagctaaacatggtaaaaattacaaccagttaccaattcttatattattaattatgaatttcaaatctgtgttttcttcatatttgtatctcttaaaactttatgtaaatctttgccatttacctgagttttaataaaactgttcttttattaaaactgttcttcaaacaataagtatagaaacctaataaatggcctcagtgg

SEQ ID NO: 32665 - DNA, 416 bp, Homo sapiens
  misc_feature (1)...(416): n = a,t,c or g
ganaccgnttgantnnnnnnnnnnnnnnnnnnnnnnnnnnnnnnnnnnnnnnnnnnnnnnnnnnnnnnnnnnggcacgagcacatgtaaaagtgctttgtaagctttgaaatataagactttaaaggatttaaagtcttaggtaaaaatataggtaggaggatattcattagtacttagtacattttcctttgcaaatacttacttagttaatggtagatttggtgagataaacaaggaaatgagaactttttgcagaatggaaaccaaatgagaactttttgcagaatggaaccacaatgataagttaggcctagggctagggaattcnnnnnnnnnnnnnnnnnnnnnnnnnnnnnnnnnnnnnnnnnnnnnnnnnnnnnnnnnnnnnnnnnnnnnnnnnnnnnnnnnnnnnnn

SEQ ID NO: 32666 - DNA, 421 bp, Homo sapiens
  misc_feature (1)...(421): n = a,t,c or g
tttgaanaccgtttgattnnnnnnnnnnnnnnnnnnnnnnnnnnnnnnnnnnnnnnnnnnnnnnnnnnnnnnnnnnggcacgagcggatctctaggatctggaaggccgctgctgccaggaacaagaagtcagagagggccaggctgagcaggagcagcgccagacgcgtgccagctccatgccgggcctgggagccggccagccacgccatcaacccattggctggcagcccaaggagcagcagggccaccaggaagaccgtgtcccagccaccttgggggtaggagtcctcatcatcaagctctgtgcggggcctgtggccagtggcacccaggtcagcttccatggtagtgtccatttggggtccccagagtcctgctggacacggagtgggtgcctggtgaatcaatgatggtgtga

SEQ ID NO: 32667 - DNA, 424 bp, Homo sapiens
  misc_feature (1)...(424): n = a,t,c or g
aanacccntnnnntttgaanaccgntatgacnnnnnnnnnnnnnnnnnnnnnnnnnnnnnnnnnnnnnnnnnnnnnnnnnnnnnnnnnnggcacgagattttctttctttataatccttattctgtacacttttttctatttaaaaattttttcaatttcataaagatttttgccaaaaacaaaggnnnnnnnnnnnnnnnnnnnnnnnnnnnnnnnnnnnnnnnnnnnnnnnnnnnnnnnnnnnnnnnnnnnnnnnnnnnnnnnannnnnnnnnnnnnnnnnnnnnnnnnnnnnnnnnnnnnnnnnnnnnnnnnnnnnnnnnnnnnnnnnnnnnnnnnnnnnnnnnnnnnnnnnnnnnnnnnnnnnnnnnnnnnnnnnnnntttnnnnnnnnnnanggnggangctntaacctannaaaaggg

SEQ ID NO: 32668 - DNA, 419 bp, Homo sapiens
  misc_feature (1)...(419): n = a,t,c or g
ttnanacccgnnnnnnnnnnnnnnnnnnnnnnnnnnnnnnnnnnnnnnnnnnnnnnnnnnnnnnnnnnnnnnnnnnggcacgagaaaacttggtggggcggaagaaagagggcatcgttgtaaggaaggatcttacctatgggaaaaggaatggatttagtggtgtcaaagggaaaggggacgatttgtctacattttcacaaaagcaaaggcacagtagatgagaacaaatccagttgggttgaaggatctggtgaggagagggtgactttttgttttctcactgagaaaagaaatcaggttcttgcttgagcatgaggaggggcctaagagctaaggattgagggttaggattggggtgcccatcctgtacgtgggagggggcatggactggagagggaggtggaactgcctgccac

SEQ ID NO: 32669 - DNA, 419 bp, Homo sapiens
  misc_feature (1)...(419): n = a,t,c or g
attaatacactcnnnnnnnnnnnnnnnnnnnnnnnnnnnnnnnnnnggcacgagactacatgtaccattcacagtgctagaaagaggaagagctgaggttcaaacccaggtctttctaccgccagagtccacactgttcctgccataccagttagggactgctgaaagataaaacacatcaatatatgcacctaaactgtcacaaaaccaaagaaggcaaattattaaatttatgttacaattaatgaaccataagcattcaaagaaaggagaatttgctgagatggtcacaagagcatttttgcaagagatagagctgagctgagccttgaaggacagttaccaaggcaaagggaaggaaaagggtatggtagttgttggaggctggtgcagaggtagatttagaagtanaaggaact

SEQ ID NO: 32670 - DNA, 449 bp, Homo sapiens
  misc_feature (1)...(449): n = a,t,c or g
gagtnnntttnnatntgatacctttgactganacgaatttaatacgactcnnnnnnnnnnnnnnnnnnnnnnnnnnnnnnnnnnggcacgagatagggctcggcgtggaggggtgctagtctcagaatttgcatttctatcagttcccatgccatgcttgcgctgctggcttgagggccacattcataggaattaaggaatctggagaagattattctctagataaagtaaacatggagatggagaaaccttctctagaaagaaatggcctaagaagtgtataacaagagccaacagcattagctactagagcacatacaaatgcaaattcacaaaagattgtgattatgtcactagggaaactccagaataaattaagaacattcgagcctagaggcacggtaaggctgaatagtcagtcaacagccatactgctcaagacaagtaca

SEQ ID NO: 32671 - DNA, 445 bp, Homo sapiens
  misc_feature (1)...(445): n = a,t,c or g
gtgnnnnttgaactcntgacngattcgaattaatacactnnnnnnnnnnnnnnnnnnnnnnnnnnnnnnnnnnnggcacgaggagcagaggacattctagagaaagaagagattgaagcctccaatatcgataatgttgtcctggatgaagatcgttctggggctcgccgcctgcaaaacctctggagggaccagcgagaagaagaactgggcgagtattacatgaagaaatacgccaagtcatctgtgggagagacggtgtatggaggatctgatgagctctcagacgacatcacccagcagcagctgctcccaggagtcaaggatcccaatctgtggactgtcaaatgtaagattggggaggaacgggccacggccatttccttgatgcgcaagttcattgcctaccagttcacagacacgcccctgcagatcaagtcagtag

SEQ ID NO: 32672 - DNA, 460 bp, Homo sapiens
  misc_feature (1)...(460): n = a,t,c or g
ggagtnnnnttttganatttggataaccnnnnnnnnnnnnnnnnnnnnnnnnnnnnnnnnnnnnnnnnnnnnnnnnnnnnnnnnnnnnnnnnnnggcacgagggaatactgagggggaaatggacttggtgggtacaaggatgaccacaagctcagttctggacgtgtcaaagaaatcatggcccttggaccaaatctgaccctccacctgttttgtgtaaataaagctttactggaacatgggatcctcctaagtttaaatattgcctgtggctactttcatgctatagcaatagagttgaatagttctgacagagaccatatgactcacaaagccaaaaatacatattatctgcagaaaaagtttgctgggcttttgtgtaggacatccaagggaagtaaagtatcaaagaggcagttggatgtgtagctataaaaatgtaatttgaggctgggcaca

SEQ ID NO: 32673 - DNA, 452 bp, Homo sapiens
  misc_feature (1)...(452): n = a,t,c or g
ggtgnnnatttgaacntgttgacctgattcgaatttaatacgactcnnnnnnnnnnnnnnnnnnnnnnnnnnnnnnnnnnggcacgagaggagccagaaaaaaggaaaaggagaatattgaggtgagacgagatctccaaatgcccaggtgagaagaccagatgaaatggggcacaggagtagggctagctttggagagggaggggagcctcctcccctcctcccctggaagaggaaatggcctgtgagaagccggtgagtgaatgggtttggtggcagcaagttgaggaaatgcccatctgatggtgcctatgctctctgctgaaagtgaggaagacggggtggagttagaggttaaagagagaatctaagggccgggcactgtgaggagggcnnnnnnnnnnnnnnnnnnnnnnnnnnnnnnnnnnnnnnnnnnnnnnnnnnnnnnnnnn

SEQ ID NO: 32674 - DNA, 454 bp, Homo sapiens
  misc_feature (1)...(454): n = a,t,c or g
ggngnnnnttgnnatttganaaccntnnnnnnnnnnnnnnnnnnnnnnnnnnnnnnnnnnnnnnnnnnnnnnnnnnnnnnnnnnnnnnnggcacgaggaggcaaatgccatctgatcctgtctaatgtaactggaagagggcaaccaagggggtgatctttggggatggcagatgggctgagaatttgtgtccagccctcagccactcttccctctgctttgaacagtgtgtcctgggactctgaatggcctgagtgtgaccggcgatgctgagaaccaataccagacactgtacaagctctacgagaggtgtgaggtggtgatggggaaccttgagattgtgctcacgggacacaatgccgacctctccttcctgcagtggattcgagaagtgacaggctatgtcctcgtggccatgaatgaattctctactctaccattgcccaacctccgg

SEQ ID NO: 32675 - DNA, 455 bp, Homo sapiens
  misc_feature (1)...(455): n = a,t,c or g
ggnnnnntttgaaatntgaanccttnnnnnnnnnnnnnnnnnnnnnnnnnnnnnnnnnnnnnnnnnnnnnnnnnnnnnnnnnnnnnnnggcacgaggaaacaacccatatgcccactgaccggtgaacgggtgaacctggggtccgtcgctggcttgcacatgtgggtgcaaccctgctcggcaataaaaggaacagacgaagggcacaccacagcacgggtgcacagacgacgggcacgccacggcacgggtgcacagacaggcatgccacacagacgacgggcacgccacagcacgggtgcatagacgacgggcacgccacggcacgggtgcacagacgacgggcacgccacagcacgggtgcacagacgacaggcatgccacacagacaacaggcacgccacagcatgggtgcacagacgacaggcatgccacacagacaacaggcacgcca

SEQ ID NO: 32676 - DNA, 459 bp, Homo sapiens
  misc_feature (1)...(459): n = a,t,c or g
gngagtnnnnttttganatttgganatccnnnnnnnnnnnnnnnnnnnnnnnnnnnnnnnnnnnnnnnnnnnnnnnnnnnnnnnnnnnnnnnnnnggcacgagaaaaaaaaacaaaaaactaaagccgactggagttaaaggtcagtacaatgaaatgtcagtgtaagtttgatagatatatgttctattttgtaaatatttgtgataactaattttagctatttcaatatatgtaattgaaatgtcagtgactagattactgaaataaaattttgttattatgtggtaaggctttgtgttttggttagatcttatttttttcttctgttttgtcttattttaatattttgtccatttttttctctgaataggtaagtatgaaacaggatgttccaataaagaaaaaaagagtatttaaacctgtcttgcaggcagatcacaaggtcaggagatctaac

SEQ ID NO: 32677 - DNA, 446 bp, Homo sapiens
  misc_feature (1)...(446): n = a,t,c or g
gnnngttgaacntgntgancgatacgaanttanacgactcnnnnnnnnnnnnnnnnnnnnnnnnnnnnnnnnnnggcacgaggtgaaatccaaatgtctttaatagtattttatcaatgctaatttcgattccatggttatgtaagattaacatcttatttgagaaactggatgagggacatatggaaacattctgtagcatttttacaacttttatgtgtctgcaattagttcaaaataaaatattttttaaattcccccaaattggtctcttgagtttcttgcctatgagctagagaaacaccagtaaaggagtaaccctcagatcagccagtctacccttctagctgggtggggcaggtggggtggagtggggaggaaaatgctattggaatttattttttaagcattgctgaggacatatatcttatttntccacaaattgg

SEQ ID NO: 32678 - DNA, 456 bp, Homo sapiens
  misc_feature (1)...(456): n = a,t,c or g
ggngtnnnntttganntntgaananccctnnnnnnnnnnnnnnnnnnnnnnnnnnnnnnnnnnnnnnnnnnnnnnnnnnnnnnnnnnnnnnnggcacgagcaggaaaaaaatgggataaaatctttgtggtcttggattaggcaaagatattttcttgtgtttgtgggtaaagaaacctttaatgagggttcaaggtgtaagaggaggaccttgtagagagccagcgcttagccctagcctcctcatatgcacatggctntgtanaggtnctcccnaccncgttgttgatgctgncgnacctnntcctntcnactnngagccntncacaagtgtgcntntgctgngtnagngcntttataacntgttgaggnncncgcnggagctaatctgtnggagatgganggcnncactccggaccttctgtctngaaggnnanncngnagcccccnagcatc

SEQ ID NO: 32679 - DNA, 449 bp, Homo sapiens
  misc_feature (1)...(449): n = a,t,c or g
ggtgnnnattgaacccttgactgattcgaattnatacgactnnnnnnnnnnnnnnnnnnnnnnnnnnnnnnnnnnnggcacgagaaggtactattttaaggaactcacaacacaaacagctggagacagtgcacagaaggtactggggttgaggcgtgtcccgggcttgtgagaacccagaggcagagtgcccttctttccatactggcatctgggggaggagcactacttagcgattcaaagacaaatgagctgcaggtgcacacagccacatggatgaagctctcagacatcatactggccaaaacaagccagacacaaatgtgcatctgctgtgtgattgcatttataacatgttgaggaacaggcagagctaatctgtagagatggaggtcaacactccggaccttctgggctgggaaggggagcaggggagcccccagggcatg

SEQ ID NO: 32680 - DNA, 444 bp, Homo sapiens
  misc_feature (1)...(444): n = a,t,c or g
ttgnanccnnnacagcttgacnnnnnnnnnnnnnnnnnnnnnnnnnnnnnnnnnnnnnnnnnnnnnnnnnnnnnnnnnnggcacgagctggttctttctactgccgtacctaatgttatgttgagaccatgtagccaataaaaattttttcacctattttgcttttcagtttagagtttccatttttgtagtttccatttctctgtaaagatttcctgtctgnnnnnnnnnnnnnnnnnnnnnnnnnnnnnnnnnnnnnnnnnnnnnnnnnnnnnagggggagcannnnnnnnnnnnnnnnnnnnnnnnnnnnnnnnnnnnnnnnnnnnnnnnnnnnnnnnnnnnnnnnnnnnnnnnnnnnnngtgnnnnnnnnnnnnnnnnnnnnnnnnnnnnnnnnnnnnnnnnnnnnnnnnnnnnnnnnnnnnnnnnnnnnnnnnnnnnag

SEQ ID NO: 32681 - DNA, 421 bp, Homo sapiens
  misc_feature (1)...(421): n = a,t,c or g
gggggnttgatnacttcttgantnnaannactaatggaaaaccncnnnnnnnnnnnnnnnnnnnnnnnnnnnnnnnnnnnnnggcacgaggtgaagtctgcctgtacatttccaggctagcagtttttaatcaaatgtatgatcactttcttctgatgaacacagttaaggggctttgttgttcaggtgagtctcacattgtactcctctcctaagagcatttattattacttgctacatacatttttgacaacctgacaatgacttttttgtcttaatttggagaaaacatactctgagcttttgaagttggtgtacttgttaaaggaagccagaaaagcttttcaaccatttgagagggtgtgaaatacagaaaggggtgggcggttnnttcccccctcatctcttanagccctgttac

SEQ ID NO: 32682 - DNA, 424 bp, Homo sapiens
  misc_feature (1)...(424): n = a,t,c or g
ggngntttgataccctntttgntctnnaaccctttgganacacnnnnnnnnnnnnnnnnnnnnnnnnnnnnnnnnnnnnnnnnnnnnnnnnnnnnnnnnggcacgaggacacagaaaggttaagtagtatctggcttctcaataaatgatgaatggagggaaatttcccacagttactgatttaaaggatacaacacatatttgaatgcttaagctcttacatgattgattggaaaatggatcctattattctgtgatccgatcttgtatacttagcttttcaccttgccagagggctttagtcttctctgttatcagacgtgagtgctttactttggtggtagtctttgagtattttgatatgtgatatgagcacttccattgcagagagagtggactccaaaaaatggcatttcaggacact

SEQ ID NO: 32683 - DNA, 417 bp, Homo sapiens
  misc_feature (1)...(417): n = a,t,c or g
gnnnnnatttgataccnnnnnnnnnnnnnnnnnnnnnnnnnnnnnnnnnnnnnnnnnnnnnnnnnnnnnnnnnnnnnnnnnnnggcacgagaagagctccatcccgcaagactgccctgatttcagatgtcggttgctggtaccaggttaccatctgtatttctaaccaaccagctatagaagtcctaggttaccacaaccccctcttcatgttcaataatttgccagaatggctcacagaactcggaaacactttcgttaggcttaccactttatgatcaaggacatatgctcagagacagccaggtggaagcatagggcatggtattggaggggcacgcagggcttctatgnntnctctgggcnngccgcctctannncttnnnngngnnncccanntggnngntnccnantctc

SEQ ID NO: 32684 - DNA, 412 bp, Homo sapiens
  misc_feature (1)...(412): n = a,t,c or g
tgganaccnnnnnnnnnnnnnnnnnnnnnnnnnnnnnnnnnnnnnnnnnnnnnnnnnnnnnnnnnnnnnnnnnnnggcacgagttatgttttccactctatcacactatcatattgtatatttttttactttaccctcctttttttttcttagtaaggggaactannnnnnnnnnnnnnnnnnnnnnnnnnnnnnnagctcatgcaatcctcctgctttcagcctccctagtaactgggactacagacacgccactgtacccagctcattattattattattatcattatcattattattatnnnnnnnnnnnnnnnnnnnnnnnnnnnnnnnnnnnnnnnnnnnnnnnnnnnnnnnnnnnnnnnnnnnnnnnnnnnnnnnnnnnnnnnnnnnnnnnnnnnnnnnnnnnnnt

SEQ ID NO: 32685 - DNA, 407 bp, Homo sapiens
  misc_feature (1)...(407): n = a,t,c or g
tttgnanaccnnnnnnnnnnnnnnnnnnnnnnnnnnnnnnnnnnnnnnnnnnnnnnnnnnnnnnnnnnnnnnnnnnnggcacgagaatcagtagtaaacaatgaactgaataaagtacaatttccccacataagtaatctttgggatggcctgtcattattttatgacattgaagtgacattccacttatcttttgccttactttcacattttaatttagnnnnnnnnnnnnnnnnnnnnnnnnnnnnnnnnnnnnnnnnnnnnnnnnnnnnnnnnnnnnnnnnnnnnnnnnnnnnnnnnnnnnnnnnnnnnnnnnnnnnnnnnnnnnnnnnnnnnnnnnnnnnnnnnnnnnnnnnnnnnntgngngcnnccnncncgnnnannnnntngnnnnnncnggnnncccc

SEQ ID NO: 32686 - DNA, 430 bp, Homo sapiens
  misc_feature (1)...(430): n = a,t,c or g
gnnnnnnntttgaanncccttnnnnntttgagnacnnnnnnnnnnnnnnnnnnnnnnnnnnnnnnnnnnnnnnnnnnnnnnnnnnnnnnnnnnnnnnnnnnnnggcacgagaacagctactgttagctcataaagactgcccagtcactgcactacagaaaaagactcaaggctatttagaaagccccaaggaaagctcagagccaacgggttctccagcccctgtgattcagcacagctcagcaacagcccctagcaatggcctcagtgttcgctctgcagctgaagctgtggccacctcggtcctcactcagatggccagccaaaggacagaactgagcatgccgatacaatcgcatgtaatcatgaccccacagtcccagtctgcgggcagatgaatggcctcctttggngganaggtcctcagcca

SEQ ID NO: 32687 - DNA, 415 bp, Homo sapiens
  misc_feature (1)...(415): n = a,t,c or g
ttgnanaccnctatgacntgattaccaatttaatacnnnnnnnnnnnnnnnnnnnnnnnnnnnnnnnnnnnnnnnnnggcacgaggannnnnnnnnnnnnnnnnnnnnnnnnnnnnnnnnnnnnnnnnnnnnnnnnnnnnnnnnnnnnnnnnnnnnnnnnnnnnnnnnnnnnnnnnnnnnnnnnnnnnnnnnnnnnnnnnnnnnnnnnnnnnnnnnnnnnnnnnnnnnnnnnnnnnnnnnnnnnnnnnnnnnnnnnnnnnnnnaaagagaatcacttacctaaaattgccttgtgtaatgcagagcaggctaggcaaagccagcagactagttgttttatagcagtctcactctcctcctggcctttcccagggcacagttttgggcccctatggncttccctgcatccgcgagc

SEQ ID NO: 32688 - DNA, 410 bp, Homo sapiens
  misc_feature (1)...(410): n = a,t,c or g
tttgataccctnngtnntttgagncctnnnnnnnnnnnnnnnnnnnnnnnnnnnnnnnnnnnnnnnnnnnnnnnnnnnnnnnnnnnnnnnnnnnggcacgagtctttccaagcctttaaaacattttgagtagggtagattgtatgtgaattcctcacttcctctatcttggactttccacatgcctggtttctgaacttcttgctctggtctctgacctctctctaatcatccctcatttgcttttttttttngaaacaatntnanggnanccttnggnctnancctcntnggangcnnaaataataggnncatnccnttgngccnggccttntnattggtttttctaacttnatgccccannttccanaaaaaanggnaannttccnttcntggccatgntttgggaa

SEQ ID NO: 32689 - DNA, 419 bp, Homo sapiens
  misc_feature (1)...(419): n = a,t,c or g
tttgatnccttngtnntttgagncctnnnnnnnnnnnnnnnnnnnnnnnnnnnnnnnnnnnnnnnnnnnnnnnnnnnnnnnnnnnnnnnnnnggcacgagaaatttgaaagattttaaagtcatgatagaagcaaggtgggaattaaataacattaggattcagagtcaagactacattctctatgtactagccacatgctgaatttgtactactagaaataactggaacaatgtgctgagtttgaatgtgatgttagtatagtgtttttagtctctgcaaagaaagaaaatgatatgtattactccatagggacttttccaatcaaaaagaagttttaggacttgagaaagacaattgtctgactctgccttgtctagagatatttgccatgggaattccattatttgaagcctgccg

SEQ ID NO: 32690 - DNA, 429 bp, Homo sapiens
  misc_feature (1)...(429): n = a,t,c or g
gnnnnngatttgannacccttgnnnntttgaagnacctnnnnnnnnnnnnnnnnnnnnnnnnnnnnnnnnnnnnnnnnnnnnnnnnnnnnnnnnnnnnnnnnnnggcacgagggaagaatcactccactgcttttaagttctattaatcttactatttataaattttatgaaaaattccttcaaattatacttccgagcatctttaccaatctaaattctgtcatgtccaataaacaaacttgatactttccttatgaaaataaagaaaaaggaaaaatggaaatgtgacaatatataatgattatattattatatcggtggttatattgtctttttttataactttcaaaaagatttaatttaatttggttttactcaataagcagaatgaggagaatgagcnaaactatttantngccttgccatat

SEQ ID NO: 32691 - DNA, 397 bp, Homo sapiens
  misc_feature (1)...(397): n = a,t,c or g
tttgagaccctnnnnnnnnnnnnnnnnnnnnnnnnnnnnnnnnnnnnnnnnnnnnnnnnnnnnnnnnnnnnnnnnnnggcacgagctaagttctgcatactcatcttcagttgctatgcacagaatcaagtcttgtcagagtaacgctcaagtccagcatcttcccttgtgtagatcacctgtatttatttgcctgcttgtaccagcattggtggtgtgagtgggagcctaagtgacctgtcagtgtcacagcgagtcctgagccctgtgtgtgtcctgagactcaggctgtgcagcgggttcgctgagatgctgagcctccatgttggggtcagccaggaccccagtgcgtcatgccannttgtacanttttntntntaggnttaaaggnggttgt

SEQ ID NO: 32692 - DNA, 414 bp, Homo sapiens
  misc_feature (1)...(414): n = a,t,c or g
tttgatacctcttgactnnnnnnnnnnnnnnnnnnnnnnnnnnnnnnnnnnnnnnnnnnnnnnnnnnnnnnnnnnggcacgagccggggcctgcaggtgaccaggtgaactgtgtctgttcacctggggagatgcacccagcatccactgggtagctgctctctgggtgggtgttggccattctgtggcacagttttccttcccttcccttccccgctgtgggtgggaattagagggctagatgggaggctgggaggacttagatgccttcccctgtgaccgtcgcgagtccacactcccagccacacgtgaccgtggatccatcccgtatctccatcaaactgtggttggcccaaaccccccattcgacanagttggcaagnanctaaaaatatgnctcctcactgtcactgg

SEQ ID NO: 32693 - DNA, 421 bp, Homo sapiens
  misc_feature (1)...(421): n = a,t,c or g
gnnnnngatttgaanacctntatgacttgaataccattnnnnnnnnnnnnnnnnnnnnnnnnnnnnnnnnnnnnnnnnnnnnnnnggcacgagcagaggtaaagtgatttcaagtcattctcggctctttggtaagattcattcaaagggagagattattgattgcatcatatctagtatttcaaagtctgtggattggatatttctccgtatcttaacataccaccaaaggaattaacaaagactaaggggaaactatcccttcctaaaatcttttcccccagacctgtaccttgagagtctgtcttctgctttccacccttatccaaacaaaacactaacatgcctgcaggtttgattctttatgtctgcttctccctggaccaaaagtaacccaaggtagnggttgttacctgattga

SEQ ID NO: 32694 - DNA, 432 bp, Homo sapiens
  misc_feature (1)...(432): n = a,t,c or g
gnnnnngnnnnnnnnnntttgannacttgannacnnnnnnnnnnnnnnnnnnnnnnnnnnnnnnnnnnnnnnnnnnnnnnnnnnnnnnnnnnnnnnnnnnnnnggcacgaggtgttgagaattcaccaggggtcttggtgcccatcttgactatagcttcattgcttcttctttcaacctagtctcctcacttgtccctagccctatattgtccccaaattgacacatcctattccctccccacacttttgccaaccactcctctctttacctctttcttcatcttgcttcctttgaaaacccactgacatattcactttattttcctattatgttttactttgtagtgtaaaccccacacatcctacctattgaaggagactccaagaactttagtaaagnggcatntgggtnggggcaaggctggggatg

SEQ ID NO: 32695 - DNA, 413 bp, Homo sapiens
  misc_feature (1)...(413): n = a,t,c or g
tttgnagnacttngnnnnnnnnnnnnnnnnnnnnnnnnnnnnnnnnnnnnnnnnnnnnnnnnnnnnnnnnnnnnnnnnnggcacgaggtccaacatacaaattttcagatataggttaatgtagaaaattatgaacaagtatttttatagacagagtaaaatttgaacagttttttagcatgttgtaattgtagagtttcaatcagcattttaaaaaataacagactaaaaaacatcagagactacacacataagaaggtatgtaatcatgtaaaacttcttacggccattatcagtaatatttaaaagctatctttcagtattgtacttataggtacttctctttggtggcctcaagatgccaggatagaaagttgagggaatgggaatgccccaatagctattgacccaga

SEQ ID NO: 32696 - DNA, 410 bp, Homo sapiens
  misc_feature (1)...(410): n = a,t,c or g
tttgaanactttgtnnnnnnnnnnnnnnnnnnnnnnnnnnnnnnnnnnnnnnnnnnnnnnnnnnnnnnnnnnnnnnnggcacgagcacaaggtgggccagggtgagaaccagagaatcaccagggaggagttcatcgcggctgtaaaggcagtcggagtccctctgaagaaccaagaggtggaggatatagtgatctacctcagctctcttgggaagcacaacaccatcaccatggatatcctggccaatacctacaagcagtggtctatggctcagcaaaggagcagcctggccactgcaagggagcattatatcttggccaagcacagagattccctgaagggtccgctnaagaaacangaggnngatttanncccacaagtttccccaaagtggacctactgacggt

SEQ ID NO: 32697 - DNA, 411 bp, Homo sapiens
  misc_feature (1)...(411): n = a,t,c or g
tttgaanactttgantnccatctnnnnnnnnnnnnnnnnnnnnnnnnnnnnnnnnnnnnnnnnnnnnnnnnnnnnnnnnnnnnnnnggcacgaggaactgagtggatggcggtgccaacccatgagacaagggacacagttgggggtcatccgctgatttgttgggcttgtgggatatctgagtggacatgctcctgaaaccatgccctgtgggggctctggggctcagctgggattttcctggtggagttcgtgatgcaggaatccatcagcacacaagcggagaaggacggaaccaagtctgggtggccatgtgggcacccagggtcacctacagaatgaggagtgtccagggcaaaggtcgcaaganggaggaggaagccctgctgggggagcacagagcagtcttgt

SEQ ID NO: 32698 - DNA, 408 bp, Homo sapiens
  misc_feature (1)...(408): n = a,t,c or g
tttganncttnnagncctnnnnnnnnnnnnnnnnnnnnnnnnnnnnnnnnnnnnnnnnnnnnnnnnnnnnnnnnnnnnnnnnnnggcacgagtcttcttttctcctttttcctcttcctctttactaatgactgaccgaggtctgcaggccttgagtgatttgttcaaggccacgtgctgggaagtgatggagctgggactcaggcccaggtctttcaactccaaatctgggtctcttttctcacccagagtctccctcagggacccatggtttatttccgctgtgccaggagcccctgtttatgccaggatcttgtagcccagacatgaagaggagcccaggagtttgtcctcctagccccagctctgaccntnangcacaacccttcatccaacccttntaatttg

SEQ ID NO: 32699 - DNA, 409 bp, Homo sapiens
  misc_feature (1)...(409): n = a,t,c or g
tttgnanaccttgannnnnnnnnnnnnnnnnnnnnnnnnnnnnnnnnnnnnnnnnnnnnnnnnnnnnnnnnnnnnnnnggcacgagggagataatgctttattttgcttaagattatggcctttatgaaacataaaactacatttgcatctttgatcttgcattaattagctgggttatttttaagcagatgactttatgtcataaactttaattttccatttataaaatctagttaacatttttttgtagaatactttggatagcaaataaaatattgcatttgataaaccaggtggttttgccaaagccagacatttagtgaattatcaataattgaaattatgtaatatgattttctatttatcatatatanggaaggctactgttttatatataggtagaagaaa

SEQ ID NO: 32700 - DNA, 458 bp, Homo sapiens
  misc_feature (1)...(458): n = a,t,c or g
tttgaaaatccgnnnnnnnnnnnnnnnnnnnnnnnnnnnnnnnnnnnnnnnnnnnnnnnnnnnnnnnnnnnnnnnnnggcacgagctacaagcatggattctggttcttcagagagtcctgctagtctaaagcgagtagcctctccagcagccaagccggtcgtttcgggagaagaaattgcccaggttattgcttcatacaccgccaccggccccgagcagctcactctcgcccctggtcagctgattttgatccgaaaaaagaacccaggtggatggtgggaaggagagctgcaagcacgtgggaaaaagcgccagataggctggttcccagctaattatgtaaagcttctaagccctgggacgagcaaaatcactccaacagagccacctaagtcaacagcattagcggcagtgtgccaggtgattgggatgtacgactacaccgcgcagaatgg

SEQ ID NO: 32701 - DNA, 451 bp, Homo sapiens
  misc_feature (1)...(451): n = a,t,c or g
ttgaaatcnnnnnnnnnnnnnnnnnnnnnnnnnnnnnnnnnnnnnnnnnnnnnnnnnnnnnnnnnnnnnnnnnnggcacgaggcttagcaagtctgcagcccagccccacctccatagggtcctgcaggcctgtgctgagaggcctggtgctgcctggcagagtgacaaaggctcaggacggctggctctgggggactcaggccaagccccttggcaccatcctggcttttggcagggatgagtgaggccctgcagagagcatcccaggccaaggttcccactcagcctgccccctctgcatgtgggtagaggatgtactgggacttggcatttaggattccatctggcccagcccctgaaggtcctggggaagcaggtctcaattctgaatagccagtggggcacactgactgtcctccccaggggaactgcagcgccctcctcccactg

SEQ ID NO: 32702 - DNA, 451 bp, Homo sapiens
  misc_feature (1)...(451): n = a,t,c or g
anatcnnnnnnnnnnnnnnnnnnnnnnnnnnnnnnnnnnnnnnnnnnnnnnnnnnnnnnnnnnnnnnnnnnnggcacgaggggataagaagtatttgttaggtggnnnnnnnnnnnnnnnnnnnnnnnnnnnnnnnnnnnnnnnnnnnnnnnnnnnnnnnnnnnnnnnnnnnnnnnnnnnnnnnnnnnnnnnnnnnnnnnnnnnnnnnnnnnnnnnnnnnnnnnnnnnnnnnnnnnnnnnnnnnnnnnnnnnnnnnnnnnnnnnnnnnnnnnnnnnnnnnnnnnnnnntgggaggagcacttgaacctgactggcagnnnnnnnnnnnnnnnnnnnnnnnnnnnnnnnnnnnnnnnnnnnnnnnnnnnnnnnnaccctgtttaaaaacaaacaaaaacagtatttatcttcgtatatatattgaggacctttttattcaaaacagaaaaaa

SEQ ID NO: 32703 - DNA, 447 bp, Homo sapiens
  misc_feature (1)...(447): n = a,t,c or g
anatttgaaanccnnnnnnnnnnnnnnnnnnnnnnnnnnnnnnnnnnnnnnnnnnnnnnnnnnnnnnnnnnnnnnnnnnggcacgagctatggcaccagcttttgagaaaagaagggctttatttattgcaaaaccagcccgcaaggagacaagagtcagctgaaatttctctcctctatttgggatctggggcaagttttaagggatcagaaggcaggggaagggatttgggaatgctggcttggcaaggtctaattagagggcttcagatttgacagcttacggtaaggtatgctgagccctacatcttccggatcagtagacccctcacttctgagaagttctggcatgcagggtctggttctcttccagccttgttggttccgaggggcggaatccctggttctgggtgtcgttagaagtcanagctttttctatngcacatt

SEQ ID NO: 32704 - DNA, 451 bp, Homo sapiens
  misc_feature (1)...(451): n = a,t,c or g
antttgataccgttatgacnnnnnnnnnnnnnnnnnnnnnnnnnnnnnnnnnnnnnnnnnnnnnnnnnnnnnnnnnnggcacgaggcctatttcacctcaccagaacttcaaggaacaaaatgtgaaaaagcactgtccaaaagaccctgtttcccatacagttctgctataataccagctactaagttattaatcagtgatcctgaaaaaagcttcaaattggcaaaacgagttaaggtactgttgttagcatgactcttcctcctcccatcctcttgggactttacagagctcaaaactgagaggtcctgcaataagtaaaacaataacaccaattcccagattgacttgactgcaggaccattttttgcatactgccctttaacaactcaagaatttggagttcaggaaaaagtttgaaaaaagtgttctgaaagatagtttcttctg

SEQ ID NO: 32705 - DNA, 454 bp, Homo sapiens
  misc_feature (1)...(454): n = a,t,c or g
anatttgganagccgtnnnnnnnnnnnnnnnnnnnnnnnnnnnnnnnnnnnnnnnnnnnnnnnnnnnnnnnnnnnnnnnnnggcacgaggccatacttgagaacatgattagcatataacgacgtttgtatataacacactgtgtggcaggcaccattttaggcctttttacatgtgtgaactcatgcaaccctcacaaccctatgtttgcaaatccccctttaaagatgggaaaccaagtcacagagaggtaacttaacttgccagagtcacatagctaataattggagttgcggagctacaacccaggcagcctggatctagtgtgttcacataaccatgggcttcagtttgtctcctacgtggaaagctgagccatgcctagtcgacctggggtcgggcatcactccgtatgacagtgaagggctcattttattcgaacgggaagcaggac

SEQ ID NO: 32706 - DNA, 444 bp, Homo sapiens
  misc_feature (1)...(444): n = a,t,c or g
ttganatttgagaccctnnnnnnnnnnnnnnnnnnnnnnnnnnnnnnnnnnnnnnnnnnnnnnnnnnnnnnnnnnnnnnnnnggcacgagggaatgaagaaaccacaaaattcaggaaggttcttatgaaccattcattcattgaagagttgtttttttttctttaaatgtctactatgtaccaggaccagagaacagatcttttttttctttnctattttttgganacaggggtctggttttgccccataagntggnntgcaangnttcattnttnnttnactntnncnttnnatgnttttgcgatactgaancttnatctntcngncnncctggagtcnactggtgtgagcttntnttcctgtncttntncttcntgattcaancnatgctncagcctnagttccngagnanttgngactacaggnnatgctaccacnccga

SEQ ID NO: 32707 - DNA, 438 bp, Homo sapiens
  misc_feature (1)...(438): n = a,t,c or g
anatntgaataccctnnnnnnnnnnnnnnnnnnnnnnnnnnnnnnnnnnnnnnnnnnnnnnnnnnnnnnnnnnnnnnnnnggcacgagggctgaggttggcatgggagggaaactggaggcatcggcccctccctcggtcttctcttctctatttttgtgggatgtccagaggccgaggggagcagtgtctatgaactttcctggtcaccagggttcaggtggagcatagtgctcagcctggggtggtacctgctagtcaggccaggcacagtgtcacctgtctaggctagcccaagtgtcattgagctactgcctgcaggactgtggcccatatcctttcccactgtctcaaggatccttaancctattacgtggttgnnctggcttnngctngnatnttngctaangannagctnnttantancnnncncttacta

SEQ ID NO: 32708 - DNA, 442 bp, Homo sapiens
  misc_feature (1)...(442): n = a,t,c or g
cnnnnnnnnnnnnnnnnnnnnnnnnnnnnnnnnnnnnnnnnnnnnnnnnnnnnnnnnnnnnnnnnnnnnggcacgagggaagctcgagaacaggttttgctgaggattccccccaagaaaagtgctccccgggaggccgttcctggcaccaagactggcggagccaccacacccgttaaagggatccacctggacagcgatcaggccgagctgaaatttaccataatccggctgatgtttagactgcacccatcgttttttccattcatctatgagtaaaggagaaaaaaagaacgtaaagacaaaatgcagctaatactgaccaagacttacaggaacggtaaaggtatgtcaagggatgactctgatattcctgaaattcctttcattgtccaattgtctgaatcccactatttgtgtattatcatgtggagtggcttga

SEQ ID NO: 32709 - DNA, 436 bp, Homo sapiens
  misc_feature (1)...(436): n = a,t,c or g
nnnnnnnnnnnnnnnnnnnnnnnnnnnnnnnnnnnnnnnnnnnnnnnnnnnnnnnnnnnnnnnnnnnnnnggcacgaggataataccgtccagtggttaagagcgatggagtctattggtctacccaagatattttatccagaaacaacagatgtctatgatcggaaaaacataccaagaatgatatattgcattcacgcactgagtttatatctgttcaaactaggaatagcaccccagatccaggatttgttgggcaaagtagacttcacagaggaggaaatcagtaatatgagaaaagaacttgagaaatatggaatacagatgccatctttcagcaaaataggtggtattctggccaatgaactgtccgtggatgaagctgcattacatgctgcagttatagccattaatgaagcagttgaaaaaggaatag

SEQ ID NO: 32710 - DNA, 438 bp, Homo sapiens
  misc_feature (1)...(438): n = a,t,c or g
nnnnnnnnnnnnnnnnnnnnnnnnnnnnnnnnnnnnnnnnnnnnnnnnnnnnnnnnnnnnnnnnnnnnnnnnggcacgagtcatgccagcccagcctgtctgtggccctccctgcatgttgacgctcttctaacccccatcttggggagctggagctggagtggggcctggttagagcagcttgcctgagccgacgagggtccagcctggagcatcaggctctggaagccgagcttgtatgtaggttttcacactgtccgggagtcaagacacagtgggttatgaaatccatctagtaggtcaccagtcagcattttaaaaaaagaaagaagaggccggcgcggtggctcccacctgtaatcccagcannnnnnnnnnnnnnnnnnnnnnnnnnnnnnnnnnnnnnnnnnnnnnnnnnnnnnnnnnnnnnnnnnnnnn

SEQ ID NO: 32711 - DNA, 481 bp, Homo sapiens
  misc_feature (1)...(481): n = a,t,c or g
gnnnnnnnnnnnnnnnnnttntnnnntnttgaaacctttggaaaancccnnnnnnnnnnnnnnnnnnnnnnnnnnnnnnnnnnnnnnnnnnnnnnnnnnnnnnnnnnnnnnnnnnggcacgagnnnnnnnnnnnnnnnnnnnnnnnnnnnnnnnnnnnnnnnnnnnnnnnnnnnnnnnnnnnnnnnnnnnnnnnnnnnnnnnnnnnnnnnnnnnnnnnnnnnnnnnnnnnnnnnnnnnnnnnnnnnnnnnnnnnnnnnnnnnnnnnnnnnnnnnnngatcatacttttgatattctgttcaatttggggtccacaagaccttgaaaaactgaagtatgcagtggagtgactgtatagataccacatggagaccttaaaaaacaaaacaaaacagaatcccatgcccaaccccagagattctatttaataagtctcaaatgaatcctcaaaatctgtatattaaacaagtcccccagtgatt

SEQ ID NO: 32712 - DNA, 374 bp, Homo sapiens
  misc_feature (1)...(374): n = a,t,c or g
nnnnnnnnnnnnnnnnnnnnnnnnnnnnnnnnnnnnnnnnnnggcacgagtgaacttgcaggatttatttcctacccactacatgtcagttactgccataaaacacacaaatgcccctgcccttctagagcttagattctaatgggaggagaaaaacaagaaaaagtaagagaaatatgtaatatgttagatggtgttaagtgttatgaaggagtaaaaagggaacagccattcaaaggaggtaacacaattttgattaaggtgtgtagagagggcctcacagaggtgataatggagtaaaaatctgaagaaggtcagagaataagagactcctgcagatttctgggggtagagtgctccaggaaaanaaccag

SEQ ID NO: 32713 - DNA, 410 bp, Homo sapiens
  misc_feature (1)...(410): n = a,t,c or g
ctttgannnnnnnnnnnnnnnnnnnnnnnnnnnnnnnnnnnnnnnnnnnnnnnnnnnnnnnnnnnnnnnnnnnnnnnnggcacgaggctggagataaaggtaacaggaataaatttagtcaaactgtgttttgggcttttctatgtctgtgagaagaatttgaacatcataatcaaggaccctgtaattctacacccagatatatatacacagaggaattgtagcaaatgatatgtgaaagaatgttcattgtagcattattcataaaagctcaaaaaataagctgtccaaatatatatcaaataaggatggataaataattacagtaaaatcaaaaaatgaaaaaaatatagagaagtgaaaagatatggatcacatgtacatgcaatgatggggttaaattttggatc

SEQ ID NO: 32714 - DNA, 407 bp, Homo sapiens
  misc_feature (1)...(407): n = a,t,c or g
ctatttnnnnnnnnnnnnnnnnnnnnnnnnnnnnnnnnnnnnnnnnnnnnnnnnnnnnnnnnnnnnggcacgaggctgttgaaactcatcaattctttgtgacttcacgtggagagaagaatttgccctgcctccctacctgctaaatgccgactgagaaaaggggcccaggagacgacccctttcagaaagaacgtcacttcatcaactcggctgagttattaacttgctccccgaaaggtcaacaacgccttctcttctcagccgcaccgcgcggagatcaatcgctttaccctaggtagcctcttgttcagggctcaggaactcctgtcttaaggtccttctggggctcagaagctgtgttgtgtatgttctttncaagaatcccacctgnctgctttcaagcc

SEQ ID NO: 32715 - DNA, 419 bp, Homo sapiens
  misc_feature (1)...(419): n = a,t,c or g
accctnatttgaaanaccgnnnnnnnnnnnnnnnnnnnnnnnnnnnnnnnnnnnnnnnnnnnnnnnnnnnnnnnnnnnnnnnnnnggcacgagggtgagtatttttattagtaaagcgtgaaatagtatggtaataaatgataagacatgtatttgtggaaagctgtagggtattcagtttaccctggctttcctttaagcagagggcatctttttctctcctacagtcacaaaatgtgttatcattaaaaaaaatcaaattaaagccaaaagtaggtacataaaaaccacacacatgcatgcacacaaacatcactgcagcccacagcagacccagccgttgttaccatgaagtgacaccactccaggcctctcttgtctgcaggctggcaggctgtcttctctccagttgccttcgt

SEQ ID NO: 32716 - DNA, 415 bp, Homo sapiens
  misc_feature (1)...(415): n = a,t,c or g
acccgntattncatgatcacnnnnnnnnnnnnnnnnnnnnnnnnnnnnnnnnnnnnnnnnnnnnnnnnnnnnggcacgagtaagaatactgctgtcatttacagcagtatcattagaatcattatcattaactaatgatataatcagtatcattagtnnnnnnnnnnnnnnnnnnnnnnnnnnnnnnnnnnnnnnnnnnnnnnnnnnnnnnnnnnnnnnnnnnnnnnnagaggctaggaaagggagagggaagggagaacgaagagcagttgattatgggtacaaaaatatagttagaagaaataagtgtttgatagcacagtagcgtgactatagtttaactgtaatttatatttcaaaatagaaaaaaattgagtatacagagaaatgataaatatttgaggttatggatcct

SEQ ID NO: 32717 - DNA, 436 bp, Homo sapiens
  misc_feature (1)...(436): n = a,t,c or g
ctttgnannnnnnnnnnnnnnnnnnnnnnnnnnnnnnnnnnnnnnnnnnnnnnnnnnnnnnnnnnnnnnnnnnnnnnnnggcacgagnnnnnnnnnnnnnnnnnnnnnnnnnnnnnnnnnnnnnnnnnnnnnnnnnnnnnnnnntgttttgcttaatattgattgcttttagtttcagctttcaatcacaaaagacaatcatgcagtagataattaagtgtaatatggattactttgaaacttagcaatgagagtctttttttttctttttatacaaaattcctctaaaatgggaatatttttcacataaaataaagggaaacttagaaaatgtgtctaagtataatggaagcattcaaatgtttgttttaagctttctaatacatttatttgtacagatcaagacttactaatatgctaaaaaggaacagttaaa

SEQ ID NO: 32718 - DNA, 439 bp, Homo sapiens
  misc_feature (1)...(439): n = a,t,c or g
ttganaactttnnnnnnnnnnnnnnnnnnnnnnnnnnnnnnnnnnnnnnnnnnnnnnnnnnnnnnnnnnnnnnnnnggcacgagcgatgatgcagaagagaaaagctttaaaagaccaggttttgaaaacttgaaactaacttggaagcagtactgaagaacctggctttaagacggtgatggaaaggacagattttttttccccagagccttggagtaatctgtgtcatttcagagccaccccacaaaaatgctagatacaatggttggccatcatgatgtgacagagtttggtaaatgtggctgattcacatttaaagcttggttttcttgacctaactattagacttagtaatgatctcatctttttagggtacttagcattgtgaatgtgatactaatagtgatttcaaacaaatcagagtttttgtttccaaac

SEQ ID NO: 32719 - DNA, 433 bp, Homo sapiens
  misc_feature (1)...(433): n = a,t,c or g
nnnnnnnnnnnnnnnnnnnnnnnnnnnnnnnnnnnnnnnnnnnnnnnnnnnnnnnnnnnnnnnnnggcacgagagagaatattaaaaacggcatgatctcacttaacgtgtcaaattaaaaatagttgaatatgtagaaacagaatagaatggtggataccagggatgaggagggggaggaaatagggcagtgttggtcagacagtacatacttgcagttacataggatgaataaatgtagctatctgatgtacagtaggagacctgtagttaataatataggacatttgctaagagagtagattgtaggtgctcttaacacacacacagggtaactggaaagtgatggatgcttgcagtaatcattgtgtgtattaaaacgttatcttgcatgttaaatataccgtaataaaaataaatactatttactaaa

SEQ ID NO: 32720 - DNA, 440 bp, Homo sapiens
  misc_feature (1)...(440): n = a,t,c or g
naaccttnnnnnnnnnnnnnnnnnnnnnnnnnnnnnnnnnnnnnnnnnnnnnnnnnnnnnnnnnnnnnnnnnggcacgagtgcactataacccatactctaaaccttaacgatgtatatatacccaattaataatcaattttttttgtaaataaataatttctgacagacaaccttgtatcagcccacttgggggtgtctctcaggnnnnnnnnnnnnnnnnnnnnnnnnnnnnnnnnnnnnnnggtcctcttgggattgctagtttgttcttgcagtcaatctggagctaaaattcacactgtgaacctccacacacttctctgnnnnnnnnnnnnnnnnnnnnnnnnnnnnnnnnnnnnnnnnnnngactgagcccattccactttggctctttaagtaagtaggccacctgttctgtaaactttaaagagtcagcaa

SEQ ID NO: 32721 - DNA, 401 bp, Homo sapiens
  misc_feature (1)...(401): n = a,t,c or g
nnnnnnnnnnnnnnnnnnnnnnnnnnnnnnnnnnnnggcacgagtaatactgttgaaaataatttaccataaatttaagggtttatttctggactctgatttctatttcattggtctgtgtctgtccctatgccattactacattatctttaaaacatttttttacccaatgtcttgattattgtttctttgtagtaagatacagtagggaagtatgagtcccccagcgttgtttttgtttatccacgttctttttctttatcaatattgttttggctatgtggagtcccttgcatttctatataaattttaggaattcagttttaggaatttaggattcagtttgtccatttctgcaaaaaaggcagttggaattttaataggggttgcattgagtctgt

SEQ ID NO: 32722 - DNA, 409 bp, Homo sapiens
  misc_feature (1)...(409): n = a,t,c or g
nnnnnnnnnnnnnnnnnnnnnnnnnnnnnnnnnnnnnnnnnnnnnnggcacgagttttcagctctagaggctgcctgcacttccttgtcgtatggatttctccagcattgctgtttgaatccaaaagccagccagggagaaagggaagctgccaagatgggtgctgcaattttatataatataacgacctaatcatgcatatatattatctttgctgtgttctatttgtaaaaccaagtcacaggtcccacctaccctcaagggatcatgcaggagtgtgaacaggaggaagcaggtatcagggtagctgccttaaaatctgtttaaattacgatccctcaaaggctttccaggaaacagttctaatttttaaagaaaatagtgtaattatgggactttttttaaaaag

SEQ ID NO: 32723 - DNA, 407 bp, Homo sapiens
  misc_feature (1)...(407): n = a,t,c or g
aatacgactcnnnnnnnnnnnnnnnnnnnnnnnnnnnnnnnnnnggcacgaggaaatatggaatttggagagtacttgacaagttatacagcatgttagagttgtttttcttataacttactttttagtgtaattttgaatagaagacctacaagcaaatcaatatgatagcctttaaaacctagagcctatagaatttgactgaattttgtttaaaaaaaatccacttactccacataccgtgtgttattgctaatggaagtggtaaaattgactttattattttatatttctccactttcagttcaataaatgcacacctacatgccaggtgttttctaggtatggagaatatatgggagaaatgattcagagactcagtctagaaaaggagacggaaaagtaaa

SEQ ID NO: 32724 - DNA, 405 bp, Homo sapiens
  misc_feature (1)...(405): n = a,t,c or g
nnnnnnnnnnnnnnnnnnnnnnnnnnnnnnnnnnggcacgagcacatctgagtatacatgagtagagctgaacaacctgaatgttggtgctttttattccatgcctggaggtttagttttttttgttttttaagtacaagatggagactgaaagtgagagtagcactttaggggatgacagtgtcttctggttggagtctgaagttataatccaggtgactgactgtgaagaggaagaaagggaagagaagttcaggaagatgaagtcctcagtacattctgaagaagatgattttgttccagagctacatagaaatgtacaccctcgagagcggcctgattgggaagaaactcttagcgcaatggcaagaggcgcagatgttccagagattcctggagatctta

SEQ ID NO: 32725 - DNA, 448 bp, Homo sapiens
  misc_feature (1)...(448): n = a,t,c or g
aaaaccntttnnnnnnnnnnnnnnnnnnnnnnnnnnnnnnnnnnnnnnnnnnnnnnnnnnnnnnnnnnnnnnnggcacgagcgcaaacaggtgccacctccaccaccctgtccagcaggcagagagctttttgatgatccctcctatgtcaacgtccagaacctagacaaggcccggcaagcagtgggtggtgctgggccccccaatcctgctatcaatggcagtgcaccccgggacctgtttgacatgaagcccttcgaagatgctcttcgggtgcctccacctccccagtcggtgtccatggctgagcagctccgaggggagccctggttccatgggaagctgagccggcgggaggctgaggcactgctgcagctcaatggggacttcctggtaccgggagagcacgaccacacctggccaagtatgtgctcactggcttgcaaaa

SEQ ID NO: 32726 - DNA, 447 bp, Homo sapiens
  misc_feature (1)...(447): n = a,t,c or g
ttgannnnnnnnnnnnnnnnnnnnnnnnnnnnnnnnnnnnnnnnnnnnnnnnnnnnnnnnnnnnnnnnnnnnnnnnggcacgagcaggtctttttttagggtctgtagtcatcctgattctgtctcaggctctgatcaccaaattaacttgatcaaggaaggttcgggtggtatttgcagatgtgttgacgttttgcccctgccagggtggaagacagcacctttgaagggctctccttggacctcagtcccacagccagaaatttgacatcatgtttgagactcaaggatgacttggagtccattcctatcccacctgggagagagtctctgaagtcattggtcattcctctccaccctaaggaggcaaggtcgtgagcagggcacttcatctctctctcttcacatcacttctgggaaatgagtcaccagcaactattggaattc

SEQ ID NO: 32727 - DNA, 439 bp, Homo sapiens
  misc_feature (1)...(439): n = a,t,c or g
ttganaccgttnnnnnnnnnnnnnnnnnnnnnnnnnnnnnnnnnnnnnnnnnnnnnnnnnnnnnnnnnnnnnnnggcacgagaactggaaggactggaggggacagagcccacacagggcaggggacagtgcctgttcccagaatctggactgggaaaagcatataattcctggggcgttgggtcatgccccagtagttgagaatcattagccctagactgggcactgctccatacccacctaacaaatcttttgcagaagacccaaaaggatcaaactgactcttaataactgcatcccagaacagagctcaataatagtatttctagaaatacaaaaatgcccagaacccaacaaggtaaattcaagtgtctggcattcaaccaaaaattaccagtcacacaaagaagcaggaaaatacacctataaaggggacaaa

SEQ ID NO: 32728 - DNA, 191 bp, Homo sapiens
  misc_feature (1)...(191): n = a,t,c or g
tttggaaaaccctttnnnnnnnnnnnnnnnnnnnnnnnnnnnnnnnnnnnnnnnnnnnnnnnnnnnnnnnnnnnnnnnggcacgagcgtgctcagaaattcacagcagatgcaatctcatgtaaaaccctcatgtggtaaaacaaagatctatcatggttgcccttaatcttttctctttttttttttttt

SEQ ID NO: 32729 - DNA, 447 bp, Homo sapiens
  misc_feature (1)...(447): n = a,t,c or g
ggananccnnttnnnnnnnnnnnnnnnnnnnnnnnnnnnnnnnnnnnnnnnnnnnnnnnnnnnnnnnnnnnnnnnggcacgaggttaatgttcctactannnnnnnnnnnnnnnnnnnnnnnnnnnnnnnnnnnnnnnnnnnntcatcacttatatagacaatagaaggaagatggagagctccatgaggggaatcattcattcagcaaatatttactggatgcctgctgtgtctgggcactattctaggtgcttgaggtccattcgcagacaaaataaagatctttgcccttgtagatttaatatttttgtagtgagagacagtcaataaaccatataataagtaatttatatggtatgttagaaagtgaaaattgcaaaggcaagaaagaggaaagtgttgtgaggtgaggaggtcaagagtgtgaagtgggggcagattgcaat

SEQ ID NO: 32730 - DNA, 413 bp, Homo sapiens
  misc_feature (1)...(413): n = a,t,c or g
tttgaaacntgatgcctnnnnnnnnnnnnnnnnnnnnnnnnnnnnnnnnnnnnnnnnnnnnnnnnnnnnnnnnnggcacgagtgctcattttcataattttcatgtaatattagaaactcagggctggaaggttcaacttctcttttttgaagcagggtctcaacttttatttctaagcattcttgcttatcttaggacagtgattattaacctacctctctgtttctatcaacagaagccaactttatgatagattttgctttgtctctaaagtttaatattttgagtgtactttagaaaataggtcatcattctttaagcgtcattcattgtctaatcacataattttgcagaccatggcagtcattaaatacagaaaaatactgtgtaaaatttgataatcttgtaggaa

SEQ ID NO: 32731 - DNA, 411 bp, Homo sapiens
  misc_feature (1)...(411): n = a,t,c or g
nacttgnnnnnnnnnnnnnnnnnnnnnnnnnnnnnnnnnnnnnnnnnnnnnnnnnnnnnnnnnnnnnnnnnggcacgaggtttatttctggactttcaattctgtctcattgatctattatctatcctgtgccagtaccacactgtcttaattcctatagccttgtagtatccttttgtgtttttaataggctttttaactgattgttaaagaatattgaagtaatgagtgaatgttaactgggagcgtagtagttattttgaaaaagcacaaaacaggtttagaacctgagccatatgcagtaagtttggggcttgtaactttggatttctcttctaaaagatgtgggggaagttatatatttgttggaattgggtttagctgtaacagaaaacctctaacagtggccta

SEQ ID NO: 32732 - DNA, 415 bp, Homo sapiens
  misc_feature (1)...(415): n = a,t,c or g
ttganacttnaatgannnnnnnnnnnnnnnnnnnnnnnnnnnnnnnnnnnnnnnnnnnnnnnnnnnnnnnnnnnggcacgagcggcacgaggtgagccactgcacccagctgcatcgtacatcttttattgtacatcattggtagtacaagtacttggtctctattatttagctctttgaggcagctgtatattatttaatattattaaattgagccaaaattcttgaattacaaaagaggagaaggacttgtgttaggtgtattagactaaatcactttgcctgcttgaccaggtgtggcagtgtggcttgttgacaatactgccaacataccactgcatttgtggtattgtcaggccagtgaggtgagttgttattgccacacctcttcattgtaggaatcttctgcctcact

SEQ ID NO: 32733 - DNA, 418 bp, Homo sapiens
  misc_feature (1)...(418): n = a,t,c or g
aanntttgaatacctttatgacnnnnnnnnnnnnnnnnnnnnnnnnnnnnnnnnnnnnnnnnnnnnnnnnnnnnnnnnnnggcacgagcagctgagaggccctgtgaaacccactggtggccctggaggagggggcacacagacacagcaacagatgaaccagctgaaaaacaccaacacaatcaataatggcactcagcagcaagcacagagtatgaccaccactattaaacctggtgatgactggaaaaagactttaaaactccctccaaaggatctaagaatcaaaacttcggatgtgacctccacaaaaggaaatgagtttgaagattactgtttgaaacgggagttactgatgggaatttttgaaatgggctgggaaaagccatctcctattcaggaggagagcattcccatt

SEQ ID NO: 32734 - DNA, 419 bp, Homo sapiens
  misc_feature (1)...(419): n = a,t,c or g
tttgaanaccttgnnnnnnnnnnnnnnnnnnnnnnnnnnnnnnnnnnnnnnnnnnnnnnnnnnnnnnnnnnnnnnnnggcacgaggtgctttcttgtttcatttggtctatataacactcttagaaggtaagtaaaacagctgcagtctggctcgcttttgtccaaaaagagtttgatgtttagaggttatttgtacaagatcatctagtggtaactatgggagtttttttccccccaaaatgaaagccaactattagacatttattctgaactgtcttcttagggactgagcaattattatgaaaatctgtcttttgctctcttgaaaggtaatctaagctattgctttttgatgtataaccgaaacttgtcatattacggactttcaaagactgaaataactcaagttaattatttc

SEQ ID NO: 32735 - DNA, 409 bp, Homo sapiens
  misc_feature (1)...(409): n = a,t,c or g
aannctttgaannccatnnnnnnnnnnnnnnnnnnnnnnnnnnnnnnnnnnnnnnnnnnnnnnnnnnnnnnnnnnnnnnnnnnggcacgagggcaatgctccaagggaaaagactgcaaaagtcaaaatataaatatattcagtgacttcagatcccattgtttccaggtcccttttgctttttccaattacctgtctcatttttgaggaaactttgcagtgcttttccttttattgtcattcttccccccaccctgtggtttttctaacacctgcactgcatcatccttcaagacccttttggctttgtttctgtgcatgattatctccccttctccctccttaccatatgcgttttaacaaaaccaattttcagtattgagttggaaaaaccctaatttaaagaaga

SEQ ID NO: 32736 - DNA, 405 bp, Homo sapiens
  misc_feature (1)...(405): n = a,t,c or g
aanacttgannnnnnnnnnnnnnnnnnnnnnnnnnnnnnnnnnnnnnnnnnnnnnnnnnnnnnnnnnnnnnnnggcacgagcaaattcagagaccgtagtagtcatccaaggcaactctgtatctgtctctgcttgcaacattcctgcctctggaagaccccctccaggcatggctaagagtccattcctttttctgacagatctagttattgggaaatgcttggcacagagtaaacactcaatgcttgtgagttagtagaaatagcctgccctctggttttcacccattggttctggtcagccctttctctctgctgtacttctggctttgcagggagtgctcaggacaatattccttgcagggtggccccacaagggtcctttntcaanaggtggttgaagca

SEQ ID NO: 32737 - DNA, 458 bp, Homo sapiens
  misc_feature (1)...(458): n = a,t,c or g
gggntnnnntttganatttgaaaaccntnnnnnnnnnnnnnnnnnnnnnnnnnnnnnnnnnnnnnnnnnnnnnnnnnnnnnnnnnnnnnnnggcacgagtgagaatccacacgatgtttttgggatagttaactcagttttggacatttgggacttggattgttgatgttaatgaaattgagccctagggagaatgtaaaggaaaaagagaaaaagctccaagggcagatctctagggaataccagcaaagatagagtcagcaaagaagttgtcagaagaaggggttcatggtggggcctggcaggagctacattctacagtgtccagtggaacgggaaggtcatgtagaatgaggaatgataggcatcatgggcttcaacaggttagagattcttgtcagcctttccaaaatcacttttgttaaggtgctagggacagaagtcgaaggactgcatat

SEQ ID NO: 32738 - DNA, 456 bp, Homo sapiens
  misc_feature (1)...(456): n = a,t,c or g
gtgnnnnnnntttgnancnctatgacnnnnnnnnnnnnnnnnnnnnnnnnnnnnnnnnnnnnnnnnnnnnnnnnnnnnnnnnnnggcacgagggagagtgcaaggataatggtaaggaactgatcaagaatatggattgtggggtctggcctctgaagaaaagaaacttaatagagaggactgatagaataagaggaaatggaggcattaaggaaggcttaggacatatccatgagttgatggatagatcccatttgaatcaacagagttcattctcagaaacataatgtggaatgaaaaaagaaagttgcgggattcatcagattcaagaggtggttacctttgggaagaaagggaaaggaatggacttggtgacaaatatacagtgggctttaattatatctgtaatgtcttatttctaagaaagggtctaaagcggccaggtgccggtggctc

SEQ ID NO: 32739 - DNA, 458 bp, Homo sapiens
  misc_feature (1)...(458): n = a,t,c or g
gnngnnnnnnntttgnnatttgaanaacnnnnnnnnnnnnnnnnnnnnnnnnnnnnnnnnnnnnnnnnnnnnnnnnnnnnnnnnnnnnnnnnnnnggcacgaggacacagtgggcagaacttgcctaaagaagaagggaatggaagggctagtggagtcttgttggggagacaaggacctgactgcctgtgggctgcattcgggacacgacacagcagtcaacccatttgcttgtttggtttagcaaggaatagtgtctggagccggtccagctgaaggaagggtgagcagagagtgcaagcaggacccttgtcggtgggtgaacattttgctccaaaagggatccttggccctgcgcaggtgagacctaccacatagtctctttgatttgaacctctctgagcacaggagagttagcctgccttcctatttgggctactctggactccaggactctt

SEQ ID NO: 32740 - DNA, 456 bp, Homo sapiens
  misc_feature (1)...(456): n = a,t,c or g
ggtgnnnnnnntttgaaacccctatgactgattacgaatttaatacnnnnnnnnnnnnnnnnnnnnnnnnnnnnnnnnnnnnnnnnnggcacgaggagactgcatagggctcggcgtggatgctcaggaagtcctggctgaatgaaagggttggccagatggaatctctgtgtcgccctagggcaggccttcagcctacgcgggcacaggagtctctctgccctgttactacacatgggctctgagcctcactttcatttcttcttcttgggtccttctgtcctctcttcacatgttacatgtatcacttctaatctggctcctggttggaaaaactacagccagccttgtgagaagtgtttgtaaagtacaaaagtcaacagaccaagtgtctgggtgcttgcccaagaaacaccgctagatttcagcgttctcagttctggccactcacatctc

SEQ ID NO: 32741 - DNA, 458 bp, Homo sapiens
  misc_feature (1)...(458): n = a,t,c or g
ggtgnnnnnnntttnnnnnnnnnnnnnnnnnnnnnnnnnnnnnnnnnnnnnnnnnnnnnnnnnnnnnnnnnnnnnnnnnnnnnnnnnggcacgaggatcaatccagtagccaaatggcaaaagacatgcaaaaagatatcacagagaaggaattaaatgcctcttaaacacgaaaagaagattcagcttcactcataagacaaaggtatcattttttgccatatatattggcaaaaatctannnnnnnnnnnnnnnnnnnnnnnnnnnnnnnnnnnnnnnnnnnnttttgcggcaaaaaccgcagttatttttgcaccaaactaaaatgcaataaaagtcaaatcatggcattactgcctgttggtttattctggtataaaatagtaaaaactgacagaaaagccaagcaggttaaaaataatattaaaggttataatgtagggccccaagcaaggct

SEQ ID NO: 32742 - DNA, 457 bp, Homo sapiens
  misc_feature (1)...(457): n = a,t,c or g
ggtgnnnnnnntttgaaancnnnnnnnnnnnnnnnnnnnnnnnnnnnnnnnnnnnnnnnnnnnnnnnnnnnnnnnnnnnnnnnnnnnggcacgagcaagttctttgctaggccataatgagggtggcctttgctccatttctagnnnnnnnnnnnnnnnnnnnnnnnnnnnnnnnnnnnnnnnnnnnnnnnnnnnnnnnnnnnnnnnnnnnnnnnnnnnnnnnngaccagccaagtactattctaacttctgagaatacagaagtgctcctcatggaacttacagtctagtggaggaagaaggacaataaatgcaacaaagaagtaaattagtcaggatgtcagagagtgataagtcccatggagaaaaatgaagcaggagaaaaatgaagcagggatgcataaagttagttcagagagagaacaggatacaattttaaatagtgnggtcagataag

SEQ ID NO: 32743 - DNA, 456 bp, Homo sapiens
  misc_feature (1)...(456): n = a,t,c or g
ggtgntnnnnntttgannttggataaccnnnnnnnnnnnnnnnnnnnnnnnnnnnnnnnnnnnnnnnnnnnnnnnnnnnnnnnnnnnnnnnnnnggcacgaggaactagtgtgtgaaaggatcaggagaggaccatagtattggagaataaaacattatgtattgatggttgagctttatgtcatcgtgtagtaaatgctatgaccataaagccattactgttaacacttaagtttatcttctgaaagaagcctatgaaatatctccagaaagactaggggattnnnnnnnnnnnnnnnnnnnnnnnnnnnnnnnnnnnnnnnnnnnnnnnnnnnnnnnnnnnnnnnnnnnnnnnnnnnnnnnnnnnnnnnnnnnnnnnnnnnnnnnnnnnnnnnnnnnnnnnnnnnnnnnnnnnnnnnnnnnnnnnnnnngcgcactgcgccaccacacccagct

SEQ ID NO: 32744 - DNA, 453 bp, Homo sapiens
  misc_feature (1)...(453): n = a,t,c or g
ggtgnnnnnnttgaaancctatgacnnnnnnnnnnnnnnnnnnnnnnnnnnnnnnnnnnnnnnnnnnnnnnnnnnnnnnnnnnggcacgagaacttgatcacatcaaaccaaattatctttttgaaaaatcacatataaatggcttcccattactacacataaaccttcaaaatgtatataaacaaaaatctgatcctgaatttcaattgatttttctgctaaagacttcatgannnnnnnnnnnnnnnnnnnnnnnnnnnnnnnnnnnnnnnnnnnnnnnnnnnnnnnnnnnnnnnnnnnnnnnnnnnnnnnnnnnnnnnnnnnnnnnnnnnnnnnnnnnnnnnnnnnnnnnnnnnnnnnnnnnnnnnnnnnnnnnnnnnnnnnnnnnnnnnnnnnnnnnnnnnnnnnnnnnnnnnnnnnnnnnnnnnnnnnnnnnnnnnnnnnnnnagatg

SEQ ID NO: 32745 - DNA, 456 bp, Homo sapiens
  misc_feature (1)...(456): n = a,t,c or g
ggngnnnnnntttgannttgganaacnnnnnnnnnnnnnnnnnnnnnnnnnnnnnnnnnnnnnnnnnnnnnnnnnnnnnnnnnnnnnnnnnnnggcacgagaatatggcaacatttgttttttatccttctcatgaataagtctagcgtagttttacttgaaacagctctattttgaaaacctagaggtccagatagcttgcttccaacagagctgtcctttccttttctggagacaagtacattgtccctgtttctcctcagaagtttgagtgctgaagatgtgggccatgggcattctgaagggcctatataatccactggtttggcctcctggaaattattaaaattggagttgatagggctggtccaaacccccagcatagcacaaccccaagtgtgtgggaccagaatggtcctagaccagctccagaattccctagatccaaattgctct

SEQ ID NO: 32746 - DNA, 456 bp, Homo sapiens
  misc_feature (1)...(456): n = a,t,c or g
ggtgtnnnnnnttggaacncgnnnnnnnnnnnnnnnnnnnnnnnnnnnnnnnnnnnnnnnnnnnnnnnnnnnnnnnnnnnnnnnnnggcacgaggaaatacagaaagtcctagaacatccaaaacaatcttgaaaaagagcatccagaagtcttagactggctcnnnnnnnnnnnnnnnnnnnnnnnnnnnnnnnnnnnnnnnnnnnnnnnnnnnnnnnnnnnnnnnnnnnnnnnnnnnnnnnnnnnnnnnnnnnnnnnnnnnnnnnnnnnnnnnnnnnnnnnnnnnnnntagccagacatggtgtaattaaaagtgtatgaaaagtgtgttagtgtagagctaatttaaaaatagctcattgcagcctnnnnnnnnnnnnnnnnnnnnnnnnnnnnnnnnnnnnnnnnnnnnnnnnnnnnnnnnnnnnnnnnnnnnnnnnnnnnnnnnnnnnnnn

SEQ ID NO: 32747 - DNA, 455 bp, Homo sapiens
  misc_feature (1)...(455): n = a,t,c or g
ggngnnnnnntttgannttggataaccntatgacnnnnnnnnnnnnnnnnnnnnnnnnnnnnnnnnnnnnnnnnnnnnnnnnnnnnnnnnnnggcacgagagcccgttcagagggcttaacatgtaagaggtaatggattaccaagagcaagtggatataggacaagatgaatgttgagatggagttacttgttaggaagagtggatcagggaaggcttcctggaagacaaaaatagtgggtgtgggttgccccttgcaagcagttgcagctattttcattatgtactccttgataacacattcctgaaggtgatggcttagcactcctttactggttgatgaacagatctccttctaagtgggctctgcctccctcgttcgcatgtgggaactgcagcttgtctggcctttgagccatgatgcaggatcatgatatcagggactgcagggttgt

SEQ ID NO: 32748 - DNA, 457 bp, Homo sapiens
  misc_feature (1)...(457): n = a,t,c or g
gtgtgtnnnnnatttgaaaccctatgacnnnnnnnnnnnnnnnnnnnnnnnnnnnnnnnnnnnnnnnnnnnnnnnnnnnnnnnnnnggcacgagggaaggaaacaccatgcaagggggaatgcctgggaaagtatatggtgcgctgtggcagagaaagagcatgggttatgggaaccacagggaagacacaaaggtggcagaaaaggtgggggagagtgctcgcttcagcggcacatatgctcaaattggaatgatacagagaagaccagcaaaaaatgaataaaaggtgagggagaggtgagaatggaaaccgttagcctggttcaggttatgaaaggtgcctctacctggctcaacaagtcacctgctattccctgagcattctgggctctgccaggtgagcttgtattcatccttccagcccaactcaaatatcttctcctatgagacaaaatc

SEQ ID NO: 32749 - DNA, 459 bp, Homo sapiens
  misc_feature (1)...(459): n = a,t,c or g
gngngnnnnnnntttgnnatttgganaacnnnnnnnnnnnnnnnnnnnnnnnnnnnnnnnnnnnnnnnnnnnnnnnnnnnnnnnnnnnnnnnnnnnggcacgagatgagatgattcatatctgaactctgtctatgcacgaagccatctcccacagcctttccttcttgtgtgccctcttgcctcacaaataccaatctactaatacttatcaatccttcacaatgctgctccctctgcagggaatgagctttcccactcctctcactagaaagcctccatttatcctttagggcccatctgagtgccttctctgtaattccttcctgaatatcttcaagcagtagactctgtacactctttttatactcttgtagttaattgcttatgtgcagttatttacttaaatctggcatccttaagagcaaaacctgtgttgtattcatttttaagtcaatga

SEQ ID NO: 32750 - DNA, 454 bp, Homo sapiens
  misc_feature (1)...(454): n = a,t,c or g
gtgtgnnnnnntttgnnacntctatgacnnnnnnnnnnnnnnnnnnnnnnnnnnnnnnnnnnnnnnnnnnnnnnnnnnnnnnnnnnggcacgagggtttcatcatctgaaaatgagaaggcannnnnnnnnnnnnnnnnnnnnnnnnnnnnnnnnnnnncaacaacaacaaaaccctgcctgccttgtgtcattactatgaggattagctaagttgatttttgttaagcaatccacacagttcctggcacatagtaaaccacaggcgagcgcatggtttcctcgtccctgttgcatttgacagaggacttgccttagcggcgagctctctctcccctgatctgtgcagctctgggatgtggcctaacagaaacagatctaaagggctggtggggattgggtggaaaagagattgtgaaacaatgatcaacacagaagctgcctggagattttct

SEQ ID NO: 32751 - DNA, 453 bp, Homo sapiens
  misc_feature (1)...(453): n = a,t,c or g
gngtgnnnnnnntttgaaccctatgacnnnnnnnnnnnnnnnnnnnnnnnnnnnnnnnnnnnnnnnnnnnnnnnnnnnnnnnnnnggcacgagcagcagtctcatcccggccacatccttgtggcaactgacctcatctggaaagcaaactgtttattccactcatttaaatgtgatggaagttcatgacaattgagctctgggagctggttctaaaagagtcatccacagattctttaccctgaaaggaatcccagatgtgttcagtttatctcctttcattgggagatttttttcattagatttattagggaagtatagtattgtgctttagggttgcttaatttgtttttgttttcgtaattaatagacaatgtcaggagctgctaaacctgggtttttgtatagcaggtgaatagaattagaaccatggccaggcgcagtgtcttacac

SEQ ID NO: 32752 - DNA, 459 bp, Homo sapiens
  misc_feature (1)...(459): n = a,t,c or g
gngngntnnnnnttgaaatttggataacnnnnnnnnnnnnnnnnnnnnnnnnnnnnnnnnnnnnnnnnnnnnnnnnnnnnnnnnnnnnnnnnnnnggcacgaggtcaatcaactgccaagcgaaagaaaggtccccaacgatctgcattgtgatcagaacctcctctttaatgttaatggttctgatcatttgatgaagaaactttcgagtatcggcaagaaactgacatacttgcagattggattccaactggtggaattcttgaacctcttccaaagcttgtatcagttgtacagtttttctgcccgcagcagtagaatcatcataatttaaagacaatatttgttttgagatctctctgaaccaagcttgaaggttttcatttttctccactctggttaggggtttcactcctgaaaagacatcagcaagctcagtcatccgctccgaaccctctt

SEQ ID NO: 32753 - DNA, 459 bp, Homo sapiens
  misc_feature (1)...(459): n = a,t,c or g
gngngnnnnnnnttgaannttgganaacnnnnnnnnnnnnnnnnnnnnnnnnnnnnnnnnnnnnnnnnnnnnnnnnnnnnnnnnnnnnnnnnnnnggcacgagatccagtagaacaattgtaatgaaccaattaaagctgaataagaaagtacaaaagaaaatagcatgatgcccccaaatcatgagtttctaaagggcaggagtggggtctttctgcttctgtctctgatactctaatgcttgttactgggctttccagcctacggctcccaatcagaagaagggactattttgttctcatggtgctgatcatacaaagcactttcaattccctgatgtcatttatcattcatgtacgcattcagtcctcaaatatttactgagttttactgagtgcaagtcacttcccacatgctagccctgagtgacaggggacagcagggagtattcttcccttt

SEQ ID NO: 32754 - DNA, 458 bp, Homo sapiens
  misc_feature (1)...(458): n = a,t,c or g
gtgtgtnnnnnatttgaaancnnnnnnnnnnnnnnnnnnnnnnnnnnnnnnnnnnnnnnnnnnnnnnnnnnnnnnnnnnnnnnnnnnggcacgagcccagaagtgagagcagttggctgtgccccagtgctgtgggacccagaggcgccgctcaccctctctgagctggtggacatcatagcgggtgcagcccaaaactgtcttctgaggaagaggtgctctcctgggcccccactgtccccaggcctcagatgctgcatattgctggcccagctcctgagcctctttggacctccaggaatcggtgtctctatcaggaacccttaaccctgacccggactcccagctgggacccggggtgtcggagtggcaagagcgctgtcaggcctggtgaagggtgtgagctgtccaacggggcagggaggaggcagggcctgttctgcagttggacagacaga

SEQ ID NO: 32755 - DNA, 457 bp, Homo sapiens
  misc_feature (1)...(457): n = a,t,c or g
gngtgnnnnnnntttgaaancctatgacnnnnnnnnnnnnnnnnnnnnnnnnnnnnnnnnnnnnnnnnnnnnnnnnnnnnnnnnnnggcacgagcggcacgagctcaggaagggtataataggataggatataaattactttctctccactccccagcacctaatactgtgtggcatgctgtaggtatttaataaatacgtgttcaatgaatttatcctcccaggaatcccttaagagaggggaattttaggccaggtgccgttgannnnnnnnnnnnnnnnnnnnnnnnnnnnnnnnnnnnnnnnnnnnnnnnnnnnnnnnnnnnnnnnnnnnnnnnnnnnnnnnnnnnnnnnnnnnnnnctcgtctctacagaaacctaatttttgtatttttagtaggtctgatcctgttggccaggctggtcttcaggtgatccacctgccttggccttccaa

SEQ ID NO: 32756 - DNA, 461 bp, Homo sapiens
  misc_feature (1)...(461): n = a,t,c or g
gngngnnnnnnnttgnnntttgganaacnnnnnnnnnnnnnnnnnnnnnnnnnnnnnnnnnnnnnnnnnnnnnnnnnnnnnnnnnnnnnnnnnnnggcacgagtaagcacttgatgtggagaaacttctctgcacaacagcttttaggactggtggtgttgcttcccttttacacacatgtaaacaggttcagagaatttaagtaacttgcccaaagttgcccagcctgtggaggggtacatctggaggatttgacataggatggatggtaatcttctgtgataggaaggcaggactcctgaatgggaagggggtaagggcatgatgagtgtgtcatcatccagagaagaggggtacgggagccccagtatttcagaatatgggaagggggtaagggcatgatgagtgtgtcatcatccagagaagaggggtacgggagccccaatatttcagaatatggg

SEQ ID NO: 32757 - DNA, 455 bp, Homo sapiens
  misc_feature (1)...(455): n = a,t,c or g
ggtgnnnnnnttgaaancctatgacnnnnnnnnnnnnnnnnnnnnnnnnnnnnnnnnnnnnnnnnnnnnnnnnnnnnnnnnnnggcacgagaaaactgtcagtaccctgcctggccaagtatgggatgctctattatgacgccgtcgctagtgaaaatcactcagtgtgtggcacctgttggcgagaggcttacagtctagctagggaagtgaggctaatgtgctcgaggcaattttgagacgagctgtgacccgaagggcatggggacggtgttcacaagggccatcatggcccccagctggaccagatggcaggagtcctcagatgagtctcccctgtctgtgggtgcaggtggtgtaaactgggttggtgctccacgctggtgctccagcaaggacgggctgcatcagggaagcctgcgtggggaaaaggagccaagacttcacagatagct

SEQ ID NO: 32758 - DNA, 457 bp, Homo sapiens
  misc_feature (1)...(457): n = a,t,c or g
ggtgtnnnnattgaaaccnnnnnnnnnnnnnnnnnnnnnnnnnnnnnnnnnnnnnnnnnnnnnnnnnnnnnnnnnnnnnnnnnnggcacgagccttagcgaagtaaaacctacaggccatttcaggttcatatgtcatgctatgcatacttccccagaggagaggatatattttattttaaatatataatttaggacttacacctgaaaatatgactgatgggcttccctttcacaagccaaaactattttcaaagacagcatgtctcatatttcccagaggaagaggtgaagcaggctaaaatgagttagagttctgatgggaaatggggtgtgaaagacctttttcacagcacggttttactttaaaggaatatatatgttttagaaagttagtgacccaaagaattatcctccaaggtctttaatattttcaaggcaaaggcatatattatctg

SEQ ID NO: 32759 - DNA, 458 bp, Homo sapiens
  misc_feature (1)...(458): n = a,t,c or g
ggagtnnnnntttgaaatcctatgactgattacgaatttaatacgactcnnnnnnnnnnnnnnnnnnnnnnnnnnnnnnnnnnggcacgagaaaacatcaaactacagatgcaagaaggtcagtgaatcccaagtaaaataaatatgaagaaataactatacctaggcacatcatagtgaatctgctgaaaaccaaaaatcaagagatacattgaaaacagtcataagaaagaagacatatcacatactcaggagaaactataatagtaatgccttttaaatacaacagaatgacaatttaaagcactaaaaatgaaatggcatctttaaaatactgaaagaaaatactgatgtactcagtactctgtatcaagtgaaaatagtattcaaaagtgaggacaaaataaaggcagtttcaaataagtaaaggctgagagaatgtgttaccagcagaagtt

SEQ ID NO: 32760 - DNA, 458 bp, Homo sapiens
  misc_feature (1)...(458): n = a,t,c or g
ggtgnnnnnnttgnaancntatgacnnnnnnnnnnnnnnnnnnnnnnnnnnnnnnnnnnnnnnnnnnnnnnnnnnnnnnnnnnggcacgaggtaatggctggcctnnnnnnnnnnnnnnnnnnnnnnnnnnnnnnnnnnnnnnnnnnnnnnnnnnnnnnnnnnnnnnnnnnnnnnnnnnnnnnnnnnnnnnnnnnnnnnnctcaatagcaaaaacaaacaaaaacaaaacaaacaaaaaccaagtaaataattaaaaaaatgaaagctnnnnnnnnnnnnnnnnnnnnnnnnnnnnnnnnnnnnnnnnnnnnnnnnnnnnnnnnnnnnnnnnnnnnnnnnnnnnnnnnnnnnnnnnnnnnnnnnnnnnnnnnnnnnnnnnnnnnnnnnnnnnnnnnnnnnnnnnnnnnnnnnnnnnnnnnnnnnnngggatcccattccttccaggggccctggtaga

SEQ ID NO: 32761 - DNA, 455 bp, Homo sapiens
  misc_feature (1)...(455): n = a,t,c or g
ttgacattgatncccttatgacnnnnnnnnnnnnnnnnnnnnnnnnnnnnnnnnnnnnnnnnnnnnnnnnnnnnnnnnnnggcacgagnnnnnnnnnnnnnnnnnnnnnnnnnnnnnnnnnnnnnnnnnnnnnnnnnnnnnnnnnnnnnnnnnnnnnnnnnnnnnnnnnnnnnnnnnnnnnnnnnnnnnnnnnnnnnnnnnnnnnnnnnnnnnnnnnnnnnnnnnnnnnnnnnnnnnnnnnnnnnnnnnnnnnnnnnnnnnnnnnnnnnnnnnnnnnnnnnnnnnnnnnnnnnctatattatcaacctttgaataattcatacttancgaannnatttctaatttttatgtaataggaatacttttacttgtagttaagctatcaaaactgtttaaaattttttccatcaccacataaacagccaactgtagaactaccaccatttttcgtaaaa

SEQ ID NO: 32762 - DNA, 446 bp, Homo sapiens
  misc_feature (1)...(446): n = a,t,c or g
ttganatcgtttccnnnnnnnnnnnnnnnnnnnnnnnnnnnnnnnnnnnnnnnnnnnnnnnnnnnnnnnnnnggcacgagaatagtttaaagaaaaaagggaaataactgttggcaaggatgtggagaaatgggannnnnnnnnnnnnnnnnnnnnnnnnnnnnnnnnnnnnnnnnnnnnnnnnnnnnnnnnnnnnccaaaggtgaacacagaannnnnnnnnnnnnnnnnnnnnnnnnnnnnnnnnnnnnnnnnnnnnnnnnnnnnnnnggacnnnnnnnnnnnnnnnnnnnnnnnnnnnnnnnnnnnnnnnnnnnnnnnnnnnnnnnnnnnnnnnnnnnnnnnnnnnnnnnnnnnnnnnnnnnnnnnnnnnnnnnnnnnnnnnnnnnnnnnnnnnnnnnnnnnnnnnnnnnnnnnnnnnnnnnnnnnnnnnnnnnnnnnnncct

SEQ ID NO: 32763 - DNA, 452 bp, Homo sapiens
  misc_feature (1)...(452): n = a,t,c or g
acattcgataaccgttatgacatgattacgaatttaatacnnnnnnnnnnnnnnnnnnnnnnnnnnnnnnnnnnnnnnnnnggcacgagtaccctgttgatcttctgcttagttttatccattattaaaagtagtatgttaaggtctccagctgttgtttttgaactactgctctcttccaatctgttagtttttgcttcatgtattttttgggggctgtttttggatgcatacatgtttataactgttgtatcttcttgatggtttcaccctgttattatcaaatatccttattttgctctgataacagtttttgttttaaagtctctccagcttttttggctgggtgnnnnnnnnnnnnnnnnnnnnnnnnnnnnnnnnnnnnnnnnnnnnnnnnnnnnnnnnnnnnnnnnntcnnnnnnnnnnnnnnnnnnnnnnnnnnnnnnnnnnnn

SEQ ID NO: 32764 - DNA, 443 bp, Homo sapiens
  misc_feature (1)...(443): n = a,t,c or g
anacccgttatgactgattacgaatttaatacnnnnnnnnnnnnnnnnnnnnnnnnnnnnnnnnnnnnnnnnnggcacgaggtatttgtgcataagatttattccttattttaggttagttcactgggataaatttacagaagtgagatttcttggcttaaagattttcagtcgctttctagttcttgatgttggatgccaagccaagttgctttccgataaggtttaatttacactgtgtccttttgcttttaaaataaggtagtgagacatctgcagcctggttgtgatgccaagtattgagatagtatggagaatgtcccagctgttgaaggcagagaatggacttacaaatgagtggcgccagaggtaggggatctcacagcttgccctgggtggcactggtcaacctgtcccagggcagcactcgagagggagggagg

SEQ ID NO: 32765 - DNA, 445 bp, Homo sapiens
  misc_feature (1)...(445): n = a,t,c or g
natcgntatnnnnnnnnnnnnnnnnnnnnnnnnnnnnnnnnnnnnnnnnnnnnnnnnnnnnnnnnnnnnnggcacgagaatctgaataattcctgtgtgtcacagactcagagcagccaaatgaagggcaaaagatctgaactgaaactggagttgctgcccaataaacagaacagttcaagttaagcaaagataattgcttcttacaacaaaaccattctcattttagaaaaataacagaatttaggatcttcacaatgtaacatttatgatgttcaggatacagttctaaaattatccagcatagaaagaaggtcaaagaaaccaaatgctggtttatagaataggagctttannnnnnnnnnnnnnnnnnnnnnnnnnnnnnnnnnnnnnnnnnnnnnnnnnnnnnnnnnnnnnnnnnnnnnnnnnnnnnnnnnnnnnnnnn

SEQ ID NO: 32766 - DNA, 450 bp, Homo sapiens
  misc_feature (1)...(450): n = a,t,c or g
ttnnccttcganaccgttnnnnnnnnnnnnnnnnnnnnnnnnnnnnnnnnnnnnnnnnnnnnnnnnnnnnnnnnnnnnnnnggcacgagagcacccgcagtagtgacagagtaggaggatgatgatgaagagactgctcctcccgttattgccccgcgaccggatcatacgaaatcaatttacacacggtctgtaattgaccctgttcctgcaccagttggtgattcacatgttgatggtgctgccaagtctttagacaaacagaaaaagaagactaagatgacagatgaagagattatggagaaattaagtatgttatctacattttacatcattgttaaattgttcacggctcttaaaacatttggcccagatggattttaacttacactttacattgtgacttaaagtataaagaataaattgnttccttataacaacagtagcttc

SEQ ID NO: 32767 - DNA, 450 bp, Homo sapiens
  misc_feature (1)...(450): n = a,t,c or g
ttgccttggataccgttatgacnnnnnnnnnnnnnnnnnnnnnnnnnnnnnnnnnnnnnnnnnnnnnnnnnnnnnnnnnnggcacgaggagagctagcaccatagcttcaataccctgttccacaaataccacatcatgaaagtctgccctcttgatatcttaacaaaggtttctatgaaaaagttctagttttttttatagcccctgcacatcacggttttgacattaggaatgtggagtagttggctaaagttgcgaaggaatggccagaggatattgcctttccccttttcaccactagtgctggtcctaaaacactcctcctgtggtaaactttttcccatgtaataccttgttcccccctatgcaaaatatttactaagtttcctttccccattggcactcaagccattcccagatacatctaatttttaagtgggcacagtggg

SEQ ID NO: 32768 - DNA, 433 bp, Homo sapiens
  misc_feature (1)...(433): n = a,t,c or g
atngnttnnnnnnnnnnnnnnnnnnnnnnnnnnnnnnnnnnnnnnnnnnnnnnnnnnnnnnnnnnnnnggcacgagggaagatgcaggtacatgtatatgcaaacatgtaaaaatttttatgagaatacatctattagtgagataatattttacacttggaagacctgtgaaataaaattgtaaaaggaaacaatttttacagtgatttgaatgttttgaaattagtcagtttataattggggacttcggggtacgccagcatcttgaattgtatttttttaaatttctttagctggttagaaggtatgtaagtgttctttagcatatctttttttgtttgactgaaatagtttatagtcaaagatcaaaaaaggaactccacctagtaggtgaggttctgtaatagccgtgaaagaccaaattgaaataaga

SEQ ID NO: 32769 - DNA, 457 bp, Homo sapiens
  misc_feature (1)...(457): n = a,t,c or g
gnnntnnntnccccctttgacttcgntnaccgttatgacnnnnnnnnnnnnnnnnnnnnnnnnnnnnnnnnnnnnnnnnnnnnnnnnnnnnnnnnnnggcacgagcacggcggagaacgactgccggcggctgcactgctccctgagagacttgagctccctgctgcaggccgtgggccgcctggccgagtactttatcggggatgtgtttgctgcacggttcaatgatgccctcacagtcgtggaaaggttggtcaaagtcactctgtacggatctcagataaaattgtacaacattgaaactgctgtgccatcagtattgaaacctgacctcattgatgtgcatgctcagtccctggctgcgctgcaggcttactctcactggttagcacagtattgcagtgaagttcaccggcagaacacgcagcagttcgtgacactcatctctactaccatg

SEQ ID NO: 32770 - DNA, 422 bp, Homo sapiens
  misc_feature (1)...(422): n = a,t,c or g
anacngtnnnnnnnnnnnnnnnnnnnnnnnnnnnnnnnnnnnnnnnnnnnnnnnnnnnnnnnnnnnnnnnnnggcacgagaaatttttaacctttgaataaaacctcaatgtcttttagattactttttgttatatttggcaataattttttaaatgaaaaatttattcccannnnnnnnnnnnnnnnnnnnnnnnnnnnnnnnnnnnnnnnnnnnnnnnnnnnnnnnnnnnnnnnnnnnnnnnnnnnnnnnnnnnnnnnnnnnnnnnnnnnnnnnnnnnnnnnnnnnnnnnnnnnnnnnnnnnnnnnnnnnnnnnnnnnnnnnnnnnnnnnnnnnnnnnnnnnnnnnnnnnnnnnnnnnnnnnnnnnnnnntgtgatcatgctgcagcactccaaactgggcaacaaaagcgagaccccat

SEQ ID NO: 32771 - DNA, 432 bp, Homo sapiens
  misc_feature (1)...(432): n = a,t,c or g
ttgacaccgtttnnnnnnnnnnnnnnnnnnnnnnnnnnnnnnnnnnnnnnnnnnnnnnnnnnnnnnnnnnnnnnggcacgagcggcacgagggtatgtgtgttgggggggggtgttcggcattctaaagtagactccagggtagaggaccttgtctatgttgtttttcgctgtatttctagtatctanaatagtacctgccacaatatttgttactccataaactgtctaatatttgttgaataaatggatgacttggaccctacttctcttacctcctttcaattcattcttgacatattagctagaaaaatattttttaaaaaaatgatgtcatgtcactgtccagtttaaagtaatcagtcgttcctatttcacttagaataaaaatccccacttcttgngaccctnagcatcctgctgaggtancact

SEQ ID NO: 32772 - DNA, 430 bp, Homo sapiens
  misc_feature (1)...(430): n = a,t,c or g
ttgaatacngttatgacnnnnnnnnnnnnnnnnnnnnnnnnnnnnnnnnnnnnnnnnnnnnnnnnnnnnnnnnnnggcacgaggagggcaggtggggtagcagggctctgacaagctcacagctagctgtgtcctgccttctagtcccccgccactgctgcctgtctctccagagcatgccatggcccaggctgctccaggctgggacccagcttcctcttcaacccccctttcccacctggcaccctgacaagacagggcagccaccggggttctgtgtggcatcaggtgtgacttctgagaagaaacaatcttggcgcgcgccgcttggatgccggagaaaatggttcttgggtgcgctgatcatcccaggggaggggaggaccttgcttgggccaggctcctaggtctgtttggntttcagggatgg

SEQ ID NO: 32773 - DNA, 430 bp, Homo sapiens
  misc_feature (1)...(430): n = a,t,c or g
ttcgatacngttnnnnnnnnnnnnnnnnnnnnnnnnnnnnnnnnnnnnnnnnnnnnnnnnnnnnnnnnnnnnnnnggcacgagcttccagggagtttcccttctctttaatcctaacttagccagctgccatgaaaaatgttttgctgtttatctctttccctgacttcannnnnnnnnnnnnnnnnnnnnnnnnnnnnnnnnnnnnnnnnnnnnnnnnnnnnnnnnnnnnnnnnnnnnnnnnnnnnnnnnnnnnnnnnnnnnnnnnnnnnnnnnnnnnnnnnnnnnnnnnnnnnnnnnnnnnnnnnnnnnnnnnnnnnnnnnnnnnnnnnnnnnnnnnnnnnnnnnnnnnnnnnnnnnnnnnnnnnnnnnnnnnnnnnnnnnnnnnnnnnnnnnnnnnnnnnnnnnnnnnnnnnntgcttggcctcaaa

SEQ ID NO: 32774 - DNA, 463 bp, Homo sapiens
  misc_feature (1)...(463): n = a,t,c or g
nnntntttgnnnncccnatttgnaaaccnctatgacnnnnnnnnnnnnnnnnnnnnnnnnnnnnnnnnnnnnnnnnnnnnnnnnnnnnnnnnnnggcacgaggcgtggcaaaattacatactttagaaaagctgtttcttttcataaaagtctgttcaaaaaaatcttttttagggtgatattttacattaaatgtcagcatggtgactaagcagtgaacggctattacaataaaatattttcatcattgcctttaatacttgttatctaattatttttaaaaggattagagggaacttacaaaaaaaggtatacagacaactaaattaccaaagtaagaataaaaggacagccgggcaacaggggcagggtggtaggaaggaaagggagtcagttccactgaaactcccaaactgaggatggttcctggacttacatataaatctgagccctgagcttcctg

SEQ ID NO: 32775 - DNA, 481 bp, Homo sapiens
  misc_feature (1)...(481): n = a,t,c or g
gnntnnnnttnnnnnctttganaacnnnnnnnnnnnnnnnnnnnnnnnnnnnnnnnnnnnnnnnnnnnnnnnnnnnnnnnnnnnnnnnnnnnggcacgagcaagaccatgagtccctgtggccctccatccaaaaccagcctcccactgagatccatctctctttgccacaagaatccagggtgacagagctacaaggacaccgggagcatttggatttcacattgcagagtcgggggattgaagggcttaggtagatcacagagcgagctggtgcccaggatcaggacccctcgggagggctctcagctgcctccaaggtaaggttcgctaatgaggtccagagcatggagatccgttcctttctagctcccggcagagcaagcgtctctagaaggggaagagatttctcaggctcctttcagaaacattctttcctccaagacattttctgagaatctcacaggaggaatctcacttga

SEQ ID NO: 32776 - DNA, 473 bp, Homo sapiens
  misc_feature (1)...(473): n = a,t,c or g
ttnnnnnctttgnnnnnnnnnnnnnnnnnnnnnnnnnnnnnnnnnnnnnnnnnnnnnnnnnnnnnnnnnnnnnnnnnnnnnnnnnggcacgagaactggaagaataattaaagaaaaaatgtatttaaaaactcagcaaacattaatggagatattccaagagccaggctcctggttccaagaccccactcagaggactaagctcaaatctaataagatgtgtaggcttggggccagtggggcgaggggatatccacaggagggccaatcgaacaaggcctcagactcatgagcctcaaatgtagatgttagatttttcctccaattgagattatacatacagccacagagcttcatggatgcaaatgaaaatggtcatgtctcaacttttaaactgtgctcaattagaggaactcattgcctatggcatagtgtcatgtaataaaatggtttttttgttgctaatcttgtag

SEQ ID NO: 32777 - DNA, 470 bp, Homo sapiens
  misc_feature (1)...(470): n = a,t,c or g
ttgnnnncnttggannnnnnnnnnnnnnnnnnnnnnnnnnnnnnnnnnnnnnnnnnnnnnnnnnnnnnnnnnnnnnnnnnnnnnnnggcacgagtaagaggcaacagtaagtgtgaccatttaataacattgttaaaactgtaacaatctaataacattgtttgctgttatgtttatctttacagtttccacctgtacatggcttttcatgtatggtagtaatataacgtttcccttaaaataaatgtatataaatcgtgtgtccatttaaagaaaaatattaaataagagtatcaatggtatgaggatagaataaaatataatannnnnnnnnnnnnnnnnnnnnnnnnnnnnnnnnnnnnnnnnnnnnnnnnnnnnnnnnnnnnnnnnnnnnnnnnnnnnnnnnnnnnnnnnnnnnnnnnnnnnnnnnnnnnnnnnnnnnnnnnnnnnnnnnnnnnnnnnnnnnnnnn

SEQ ID NO: 32778 - DNA, 389 bp, Homo sapiens
  misc_feature (1)...(389): n = a,t,c or g
ctcgaggccaagaattcggcacgagagaatattaaaaattttcaagggacatacagtgacagctattggcatcagaaaacaactacaattaagtttggacctaactacatgatatatggagtcagctaggtttttgtttttgtttttgttttggcctagaggtgccatgaaaaaatttattgaggacactaagagtactgtaaactgagattgggaacctctgtaatgcatcatttcctgaatacatatgttcaaaatgagagaatctttgaatagtctaataattataacttttttaaaaaatgtatagtgattcctcaaaaaataggagagcgttatttttgtgttattctgaattaagtatgtttcacttaaaattgntttataag

SEQ ID NO: 32779 - DNA, 459 bp, Homo sapiens
  misc_feature (1)...(459): n = a,t,c or g
ggagnnnttgnnanttggananccnttgacnnnnnnnnnnnnnnnnnnnnnnnnnnnnnnnnnnnnnnnnnnnnnnnnnnnnnnnnnnggcacgagctgaagtagtgtttgaagagccagatcttacctccacacatttgggggtgtggccctttgaagctctgtcctgcccctagggaggaaaaggcaccaaggtccaagactgcagagaaaaaggtttgagcaggagcctgaggggagagcagacattaattatcctggtcagatggtatggggaggacaagaggacagatggtgcatcagcttcttccataagaagggctgacacatttgcacagaatctcattcaattgagaacttacctgccctggggttgagagcccttgggcagagcacttgcacctccctctccccaacccccccagttgttgcacgtgggaggacctgggaaggtgagat

SEQ ID NO: 32780 - DNA, 451 bp, Homo sapiens
  misc_feature (1)...(451): n = a,t,c or g
nnaatcnnnnnnnnnnnnnnnnnnnnnnnnnnnnnnnnnnnnnnnnnnnnnnnnnnnnnnnnnnnnnnnnnnnggcacgagatagggctcggcgtggatagttgaggtagaaagacatgggtgtcgcgcagctgcagtgaatccagacatttggctgacggacatagattggggcatcagtagcttctacaatacattctgagattattttgcaaaggacaaaaatccttgagcatggagaaaaacaatagcaacagtcttcttctagcatctggcataacctgtatgctggcttatcttcttggcaattgtgatcatccatgagacgaacatgtcccatgggctgctatgtcttctccttcagcctaggccctggaaggaaacgtggagcaaacttgaacccatcatagccaagagcttcagtcttggaacataaatacggaaatagagc

SEQ ID NO: 32781 - DNA, 441 bp, Homo sapiens
  misc_feature (1)...(441): n = a,t,c or g
gctatgactgattacgaatttaatannnnnnnnnnnnnnnnnnnnnnnnnnnnnnnnnnnnnnnnnnggcacgaggcactcacctgtgcaagcatgcacacccctcagacacactcacctgctgtcatgcacacgcacactcgcatgctcacacagagctcctgtggaaggagagagtgagaactgtggcagtgccaagatcgaggagggagaatgaggaacggcagaagtgatggtagtttttgaatagtgagcatatttagaaaacgtactttatatgtcttggattgaaaaaagaatnnnnnnnnnnnnnnnnnnnnnnnnnnnnnnnnnnnnnnnnnnnnnnnnnnnnnnnnnnnnnnnnnnnnnnnnnnnnnnnnnnnnnnnnnnnnnnnnnnnnnnnnnnnnnnnnnnnnnnnnnnnnnnnnnnnnnnnnnnnnn

SEQ ID NO: 32782 - DNA, 417 bp, Homo sapiens
  misc_feature (1)...(417): n = a,t,c or g
nnnnnnnnnnnnnnnnnnnnnnnnnnnnnnnnnnnnnnggcacgaggagaaaggtttctgggtcgaaggatatggcatgtttctaatttgatggatgttgccatattgctttctcagtaggctgttaacctttacatttccttacaacaatgtatgatcctgctcccttcccacttgcccagcaaagatacatattatttatgtttttatttttttcccagccaataaagagaagtcttagttacttttaattttctcttcctttagtaattttgattatgttactgtttgccattcagattttctgtgcattttcaattctatcctttgcccatttttcctattggattgtttatcagtctcatacatatgcacacatgtatgtgtgcttgccctatccgtgtgtccatgcatgcg

SEQ ID NO: 32783 - DNA, 445 bp, Homo sapiens
  misc_feature (1)...(445): n = a,t,c or g
anaccnnnnnnnnnnnnnnnnnnnnnnnnnnnnnnnnnnnnnnnnnnnnnnnnnnnnnnnnnnnnnnnnnnnggcacgaggtagaacatgaaagtgtcagtttaaaggatttagagattggtgtagttttatttttaaaactcctgtttgattgagtctacatctctgatttttatggggagggggcagagctaaggtgagacacagccacaagtcaacaggtatctgttgagttcccagcactgtggagaatgtgaaggagatagaagacattattccttcattttaggtacatggaggtccattttattgaaataaacatttcccatagcacttggcatttggtattacaccctacgtatggtactgtgaaaaccttctctaatgccatgtaaaaattttacagatgatactagagtctgagtagtaaattactttccctttt

SEQ ID NO: 32784 - DNA, 467 bp, Homo sapiens
  misc_feature (1)...(467): n = a,t,c or g
nnnnnctttttgaanaccnnnnnnnnnnnnnnnnnnnnnnnnnnnnnnnnnnnnnnnnnnnnnnnnnnnnnnnnnnnnnnnnnnnggcacgagggaaaaaaacttatgtgtgacgcacaataaaacgagctatgcctgtacttagactgaagtttcttgaggtaccgtaccatatatgccttgttttttcatagattgtagatgcttgtgggctggagttatggaaaaaattagggattttttctcctttagaatctatcttgaatttttatttttaggtttttagcctgtgtgaaacattttgcttttcaaaagttattttgaagttgaaagttatctaatacgccagccataccacccatgtatatctttgctttctgaaaagatgtttgtccttcaaagaataacacnnnnnnnnnnnnnnnnnnnnnnnnnnnnnnnnnnnnnnnnnnnnnnnnnnnnnnnnn

SEQ ID NO: 32785 - DNA, 465 bp, Homo sapiens
  misc_feature (1)...(465): n = a,t,c or g
ttganancnttttgacnnnnnnnnnnnnnnnnnnnnnnnnnnnnnnnnnnnnnnnnnnnnnnnnnnnnnnnnnnggcacgagaacaaattaatttcctgcccatttcaaaaccacagccctagtatgtccactgtgattcaggcatgtgtttgcatgtatatggagggagggaccatgttcttcctcctgtgccgccaagcccatagtttatctgtgctccctatctgcctccaccttccgttatgtccaagagtacccactgccccagtcactcctgatctgaagccaaagatggtaggaggggcagggccgacaagggaccgtggctactcgggacccaggcttcccctccagtgtgaggaagaagctctgacctagagagagatgaataggtactggggctaggtccctgcctttccagcanggaggaaagatgggattgagctgggggctgcactgataaa

SEQ ID NO: 32786 - DNA, 466 bp, Homo sapiens
  misc_feature (1)...(466): n = a,t,c or g
tttgganaaccntttgaatgcnnnnnnnnnnnnnnnnnnnnnnnnnnnnnnnnnnnnnnnnnnnnnnnnnnnnnnnggcacgagcaggagtttcactaatcaatcaatcaatgattattggacatctacttatgtacagagcccctgctagatattctggggctctgcccatcagtctaatcttttagcagaaagaaggggacacatgccatttactggctgaaactcttggctaagtaggcagcagaggctcacataatcctgtcagtttctatggaatggcagaaaggttcattgatttcaggatgcaggaacgtgactgctgcttagaaatgaaaatgctnnnnnnnnnnnnnnnnnnnnnnnnnnnnnnnnnnnnnnnnnnnnnnnnnnnnnnnnnnnnnnnnnnnnnnnnnnnnnnnnnnnnnnnnnnnnnnnnnnnnnnnnnnnnnnnctctactaaaaa

SEQ ID NO: 32787 - DNA, 476 bp, Homo sapiens
  misc_feature (1)...(476): n = a,t,c or g
gtgnnnnnnnttttganacntgtatgacntgattacgaatttaatacnnnnnnnnnnnnnnnnnnnnnnnnnnnnnnnnnnnnnnnnnggcacgagcggtttggttaacagttggagtactgaggacgggtttcagtccgcgtaagtcttcatgtagaatctagagggggccttgtcagtggtgctttatctgaagccgtaatgacagcagtgttggaattctgctttgcaaattgtgtttgttttacttgttgaaagttaaaatcaagacacagaatcagtgcagtcatgccgttattgcacgtagagttgctatgttggtaggctaaagtgttttggacagaacacattatttgtttagaaaaaagtttcatagataccacggaaaacaactaactgaacttgtttttccttgtagctttttttgtgcgagcctctgagattttttttccttgcctttgctttccgactatttg

SEQ ID NO: 32788 - DNA, 475 bp, Homo sapiens
  misc_feature (1)...(475): n = a,t,c or g
gngntnnnntttgnnntttgnataccctnnnnnnnnnnnnnnnnnnnnnnnnnnnnnnnnnnnnnnnnnnnnnnnnnnnnnnnnnnnnnnnnnggcacgagcgcccagcctgagacgtgttttaaagactgacttttgtttcttttctagatataaatttagaaattgagaagtgtattttgaaaaggcataataaaaaaacctatggtatataattattttaacttgccatatgaaaacctaaggcacagggaggtaacttgcctacggtgcagccctaggaagtcagggagccaggattcactgtcagctgactgactccaaatccagcactcctgaccatggctgccagttcagtagtgagttttccccagcgctgcatttgttcagtgtaaagaatcgttaaagaagacttttccnnnnnnnnnnnnnnnnnnnnnnnnnnnnnnnnnnnnnnnnnnnnnnnnnnnnnnnn

SEQ ID NO: 32789 - DNA, 474 bp, Homo sapiens
  misc_feature (1)...(474): n = a,t,c or g
gngnnnnnnntttgaaacnnctatgacnnnnnnnnnnnnnnnnnnnnnnnnnnnnnnnnnnnnnnnnnnnnnnnnnnnnnnnnnnggcacgaggaagaaaatgaatgaaatgtcaaacatctatttccagttatgatgggctggtttattcaaccaatgtgcccattgataataactaaaggtgcccggccaatgtcacaattctttaacattgcccacaaagtcctatatgatgtggccagactcatcttggcaactctcctctttgctcagaatgctgcaacagcaccaacctttttccaattcctgtaagttttcgagctctgttcaatctcaggacctttgcacattacattccctctgcccacaaggctcacttcacaacttttcacctagccagttcctccttcagttctctcactaatttgtaacttattcattgaaacctacccaaatcttccaaattaggttatg

SEQ ID NO: 32790 - DNA, 533 bp, Homo sapiens
  misc_feature (1)...(533): n = a,t,c or g
tnnntnnntntaannnantannatnnnntaatnttnannanattnannntnnanaggnagaatnnnnnaatagtnangnnttggaaacccttgaattntacgannnnnnnnnnnnnnnnnnnnnnnnnnnnnnnnnnnnnnnnnnnnnnnnggcacgagtgaaagaaaaagaacacttgctcggtaattttctttatgcaggagagtttaagagaaatcagcacagatatttcaaaaaagtccatgtctttttatctttaaaatatctatttatcaannnnnnnnnnnnnnnnnnnnnnnnnnnnnnnnnnnnnnnnnnnnnnnnnnnnnnnnnnnnnnnnnnnnnnnnnnnnnnnnnnnnnnnnnnnnnnnnnnnnnnnnnnnnnnnnnnnnnnnnnnnnnnnnnnnnnnnnnnnnnnnnnnnnnnnnnnnnnnnnnnnnnnnnnnnnnnnnnnnnnnnnnnnnnnnnnnnnnnnnnnnnnnnnnnnnnnnnnnnnnnnnnnnnnnnnnnnnnnnnnnnnnnnnnnnnnnng

SEQ ID NO: 32791 - DNA, 447 bp, Homo sapiens
  misc_feature (1)...(447): n = a,t,c or g
nnnnnnnnnnnnnnnnnnnnnnnnnnnnnnnnnnnnnnnnnnnnnnnnnnnnnnnnnnnnnnnnnnggcacgagaagtcacaagccagaggctgatgccaggcagtctagctccagagccccggctcccagccactgctgactgcaaagctgaagggtgcatttttgcaagagacatcgtcatgccgtcattgaggacccaaaaaatgattcctctgagtgcatttatgcttgttgtgtttctaaaaataacaagcatgggttttcttagccataatccattagcaacctttattgaagcagaagaatatggaatgtggagtcagatgatactatccatctgcaaagtgatgacgtacacaagttccctggcacgtagtaggcatctaatgattctagttctgtgagtctccctctgcgtaagtagattttacatagaactgccagt

SEQ ID NO: 32792 - DNA, 449 bp, Homo sapiens
  misc_feature (1)...(449): n = a,t,c or g
ntttggnnancnnnnnnnnnnnnnnnnnnnnnnnnnnnnnnnnnnnnnnnnnnnnnnnnnnnnnnnnnnnnnnnnnnnggcacgagcggcacgagctaaatatatagcccattttggtgcctggatttatgtggaggtctcagattcagtttcctgctttgtcaggttcaaatcctgttagtcagttaaccagaaaaattctagcttcccaggaatgtgtcagagcatttcagtgtcccctattgacatctcattcccagctttttaaaaaagaaagtatttttattttcctattgattgccccaattcctatgtgctacctcaggcagccgcaatattaactaacaaagctctaggtttttggttttggcacacttccagggcatctctggcttctgtgttgactgatgactttagtttcacctctagattgtttgcatgcatgcgtg

SEQ ID NO: 32793 - DNA, 455 bp, Homo sapiens
  misc_feature (1)...(455): n = a,t,c or g
gaaacccntnnnnnnnnnnnnnnnnnnnnnnnnnnnnnnnnnnnnnnnnnnnnnnnnnnnnnnnnnnnnnnnggcacgagatggaaatgtaaatgcataaaacataagtctttgaaattgtaagccattaatattttgcatcatttgttaccacagccaactgagcctaaggtgactaatgccttctacttctaagtatttctaaattatctgaacctttaccacttttcacaggtgtactcattctgtattgattgtctaaatgaggaagtgttcttggaattattctttaggttaggacagtacacttgaaggtgaactaaaaaaaatatatatgaaacgtgtcttaaagaaatggtgtctnnnnnnnnnnnnnnnnnnnnnnnnnnnnnnnnnnnnnnnnnnnnnnnnnnnnnnnnnnnnnnnnnnnnnnnnnnnnnnnnnnnnnnnnnnnn

SEQ ID NO: 32794 - DNA, 461 bp, Homo sapiens
  misc_feature (1)...(461): n = a,t,c or g
tntgataccttggacatcattcgaattaatacgactcnnnnnnnnnnnnnnnnnnnnnnnnnnnnnnnnnnggcacgagtcactgcnnnnnnnnnnnnnnnnnnnnnnnnnnnnnnnnnnnnnnnnnnnnnnnnnnnnnnnnnnnnnnnnnnnnnnnnnnnnnnnnnnnnnnnnnnnnnnnnnnnnnnnnnnnnnnnnnnnnnnnnnnnnnnnnnnnnnnnnnnnnnnnnnnnnnnnnnnnnnnnnnnnnnnnnnnnnnnnnnnnnnnnnnnnnnnnnnnnnnnnnnnnnnnnnnnnnnnnnnnnnnnagcaggggggtgcaacaccagatctcacaaaagctcattcactatcatgagggcagtaggctggtgcccaagggggatggtcctaaaccattaatgagaaatctgcctccatgatataatcactttccaccagccctaccttcaacacggggg

SEQ ID NO: 32795 - DNA, 465 bp, Homo sapiens
  misc_feature (1)...(465): n = a,t,c or g
nnnacctttggaaanccgntatgacnnnnnnnnnnnnnnnnnnnnnnnnnnnnnnnnnnnnnnnnnnnnnnnnnnnnnnnnnnggcacgagctggactattctaagggaaagttcatgagggtggtagactcctgggaatatttctcaatgttctagctcccatcttttgcttcaggtgaggtacaggccaaactgtggactgcaactaactcacaggaaagccatgggatgttttaaagtttccttggagaagtnnnnnnnnnnnnnnnnnnnnnnnnnnnnnnnnnnnnnnnnnnnnnnnnnnnnnnnnnnnnnnnnnnnnnnnnnnnnnnnnnnnnnnnnnnnnnnnnnnnnnnnnnnnnnnnnnnnnnnnnnnnnnnnnnnnnnnnnnnnnnnnnnnnnnnnnnnnnnnnnnnnnnnnnnnnnnnnnnnnnnnnnnnnnnnnnnnnnnnnnnnnnnnnnnn

SEQ ID NO: 32796 - DNA, 471 bp, Homo sapiens
  misc_feature (1)...(471): n = a,t,c or g
tnnntttgnanncctntggataccnttatgacnnnnnnnnnnnnnnnnnnnnnnnnnnnnnnnnnnnnnnnnnnnnnnnnnnnnnnnnnnggcacgagagccctgtacttcctcctgtgctggttccaagacacagcgaatataatcctcagcacagcctcttagctcagttccgtaacttaggacaaaatgagcctcacatgccactcaacgccacttttccagattctttccagcaacccaacagccacccgtttcctcactctcccaatagcagttacccaaactctcctgggagcagcagcagcacctaccctcactctcccaccagctcagacccaggaagccctttccagatgccagctgatacgcccccacctgcttacctgcctcctgaagaccccatgacccaggatggctctcagccgatggacacaaacatgatggcgcctcccctgcctcagaaatcaa

SEQ ID NO: 32797 - DNA, 457 bp, Homo sapiens
  misc_feature (1)...(457): n = a,t,c or g
tttgataccttngnnnnnnnnnnnnnnnnnnnnnnnnnnnnnnnnnnnnnnnnnnnnnnnnnnnnnnnnnnnnnnggcacgagttcctgctcttgtctgtctctgggttgccccacaggcccctgttggaagatttagctcttgccatacctttggaactagttcctctgtgaattctctgcattgatcctgctggaatgagctctttcctgactgatacaggatggattttattttttacttatttatnnnnnnnnnnnnnnnnnnnnnnnnnnnnnnnnnnnnnnnnnnnnnnnnnnnnnnnnnnnnnnnnnnnnnnnnnnnnnnnnnnnnnnnnnnnnnnnnnnnnnnnnnnnnnnnnnnnnnnnnnnnnnnnnnnnnnnnnnnnnnnnnnnnnnnnnnnnnnnnnnnnnnnnnnnnnnnnnnnnnnnnnnnnnnnnnnnnnnnnnnnnnnctg

SEQ ID NO: 32798 - DNA, 453 bp, Homo sapiens
  misc_feature (1)...(453): n = a,t,c or g
nnnnnnnnnnnnnnnnnnnnnnnnnnnnnnnnnnnnnnnnnnnnnnnnnnnnnnnnnnnnnnnnnggcacgagctatctttgcccaaggttacctaaggagtgagcagtgcagcctgtgtttgcattcctgcttctgtgggtctcaagctgcgtgtttttccgtcgtgccctgagtttggcagccccaagttcactgctcattctgctagatccagggcctagaacctcttgatttattttccgagatctctacttctaggttaagttccttgagtagctatgctctgtgcaccggttcaaacaaatttgatttttcattggtttttcctattgactctcatctctggtctaacaggcatgccttcttttcaatcatatttcctggcctgggaatgtgctttcctctgttcccaattatcctgactctgcatacaattctaacaataaaatta

SEQ ID NO: 32799 - DNA, 455 bp, Homo sapiens
  misc_feature (1)...(455): n = a,t,c or g
aaaccnntnnnnnnnnnnnnnnnnnnnnnnnnnnnnnnnnnnnnnnnnnnnnnnnnnnnnnnnnnnnnnnnggcacgagggactactctgtaatctccaggcgatgttaggaaccctttctacttagcacagctggcttagaattccaagtaagtatataatatgagtttcatnnnnnnnnnnnnnnnnnnnnnnnnnnnnnnnnnnnnnnnnnnnnnnnnnnnnnnnnnnnnnnnnnnnnnnnnnnnnnnnnnnnnnnnnnnnnnnnnnnnnnnnnnnnnnnnnnnnnnnnnnnnnnnnnnnnnnnnnnnnnnnnnnnnnnnnnnnnnnnnnnnnnnnnnnnnnnnnnnnggngcagtggccntntntnnnnnnnnnnnnnnnnnnnnnnnnnnnnnnnnnnnnnnnnnnnnnnnnnnnnnnnnnnnagngctggnntnacgggcatgaccaca

SEQ ID NO: 32800 - DNA, 450 bp, Homo sapiens
  misc_feature (1)...(450): n = a,t,c or g
nnnnnnnnnnnnnnnnnnnnnnnnnnnnnnnnnnnnnnnnnnnnnnnnnnnnnnnnnnnnnnnnnnnggcacgagaacaaatctgtcttcaaccccattgccaattgtcagttatatcagaacatgcccgtggtccctgatctttttcaggaaattaaaaagctggtccttatagcaaacaggaactcagagctcttggcgaggcagtatgatgtcttagtgtatgggcagcatgcctgttttcttgctgattttgcaagtgctccagaaatgtagactggtttttttctttcttattttagtatttcatatcctgatttttaaatgttgggccaaaaaaatgacacatctnnnnnnnnnnnnnnnnnnnnnnnnnnnnnnnnnnnnnnnnnnnnnnnnnnnnnnnnnnnnnnnnnnnnnnnnnnnnnnnnnnnnnnnnnnnnnnnnnnn

SEQ ID NO: 32801 - DNA, 467 bp, Homo sapiens
  misc_feature (1)...(467): n = a,t,c or g
ttganacccttnnnnnnnnnnnnnnnnnnnnnnnnnnnnnnnnnnnnnnnnnnnnnnnnnnnnnnnnnnnnnnnnggcacgaggcggcacgtgacggtcgggccgcctccgcctctctctttactgcggcgcggggcaaggtgtgcgggcgggaaggggcacgggcacccccgcggtccccgggaggctagagatcatggaagggaagtggttgctgtgtatgttactggtgcttggaactgctattgttgaggctcatgatggacatgatgatgatgtgattgatattgaggatgaccttgacgatgtcattgaagaggtagaagactcaaaaccagataccactgctcctccttcatctcccaaggttacttacaaagctccagttccaacaggggaagtatattttgctgattcttttgacagaggaactctgtcagggtggattttatccaaagccaagaaaa

SEQ ID NO: 32802 - DNA, 469 bp, Homo sapiens
  misc_feature (1)...(469): n = a,t,c or g
tttgnaaaccctnnnnnnnnnnnnnnnnnnnnnnnnnnnnnnnnnnnnnnnnnnnnnnnnnnnnnnnnnnnnnnnnnggcacgaggaatctctgtctagtttattaaagcatgaagatcatcaggtttcagatggagctctgcgatgctttgcatcactggctgaccgatttacccgtcgtggtgttgacccagctccattagccaagcatggattaactgaggagctgttatctcgaatggctgctgctggtggtactgtttcaggaccatcatcagcatgcaaaccaggtcgcagcaccacaggagctccatccaccactgcagattccaaattgagtaatcaggtgtcaacaattgtaagtctgctctcaacactttgcagaggctctccggtagtaacacatgatcttctgaggtcggagcttccagattcaattgaaagtgcattgcagggtgatgaaagatgt

SEQ ID NO: 32803 - DNA, 463 bp, Homo sapiens
  misc_feature (1)...(463): n = a,t,c or g
aaccgtnnnnnnnnnnnnnnnnnnnnnnnnnnnnnnnnnnnnnnnnnnnnnnnnnnnnnnnnnnnnnnnnnggcacgagaaacactaaagcagggtaggagaatatgaagtgatgtggccacgagaagcctcactagaaaagtaaannnnnnnnnnnnnnnnnnnnnnnnnnnnnnnnnnnnnnnnnnnnnnnnnnnnnnnnnnnnnnnnnnnnnnnnnnacagcctcaacttccccannnnnnnnnnnnnnnnnnnnnnnnnnnnnnnnnnnnnnnccacactgggctaatttttctgttttttagagatgaagatttccccatgttgcccagttgcccaggctggcctcaagctccttgggctcaaatgatttgcccacctcagcctcactgggattactggcatgaaccactgtgcctggcctgaatgntttcttttcttcgagaccgagtcttactcta

SEQ ID NO: 32804 - DNA, 463 bp, Homo sapiens
  misc_feature (1)...(463): n = a,t,c or g
gaancctttgaaaaccttnnnnnnnnnnnnnnnnnnnnnnnnnnnnnnnnnnnnnnnnnnnnnnnnnnnnnnnnnnnnnnnggcacgagctcaagcaaatcccccacctcggcctcctaagtagttgggaccaacgtgtgtgcccccacacctggcttggagccttgtttcagcccattttctccttccctcggctatcgtcatccttcatgcctgcatgcctcagttaggggtgtgttctcagcatttgtcctcatctctacctcctcatctgaaatccagtgttttggggggtaaggttttattgaggtgtaatttatatacagcacagttgtacaattttaagtatacaatttgatgaggttgagcaaacgtatacagttgtgtaaccagcaccacaatcatgatatgggacgtttccatgacccaaaaatgtcctcatgcccctgtgcattcagtgggg

SEQ ID NO: 32805 - DNA, 459 bp, Homo sapiens
  misc_feature (1)...(459): n = a,t,c or g
anncctttgaaaaccctatgacnnnnnnnnnnnnnnnnnnnnnnnnnnnnnnnnnnnnnnnnnnnnnnnnnnnnnnnnnnggcacgagctctctggcttaccatcatctgccctcaactggttagtctttccttgacacactattcatgtgaatcctgtatgcaactacctaactaatcttccctgctgcaaaaatggtttggcttttcagggcctagaggagagagtcaaggccctttaaatctggctgcaagttagaggacaagaaagtgtgttaatgggtcatacttatttaatggtgcttccaacatagcaaattatctttcttttgaacatttcatcattggcatatttctggcaaatgtgttaatgattgattatactgagtgttaggtctttaaaacaaatgtaatattaagtaaagtctgttagaacccgatgaaaattaataaacataat

SEQ ID NO: 32806 - DNA, 454 bp, Homo sapiens
  misc_feature (1)...(454): n = a,t,c or g
tgganancnnnnnnnnnnnnnnnnnnnnnnnnnnnnnnnnnnnnnnnnnnnnnnnnnnnnnnnnnnnnnnnnnnnggcacgagnnnnnnnnnnnnnnnnnnnnnnnnnnnnnnnnnnnnnnnnnnnnnnnnnnnnnnnnnnnnnnnnnnnnnnnnnnnnnnnnnnnnnnnnnnnnnnnnnnnnnnnnnnnnnnnnnnnnnnnnnnnnnnnnnnnnnnnnnnnnnnnnnnnnnnnnnnnnnnnnnnnnnnnnnnnnnnnnnnnnnnnnnnnnnnnnnnnnnnnnnnnnnnnnnnnnnttaatacaagactatgagaaactaaaaattctattttgggagccttccgtccattatgataaaattttaaggttttttccccccatctctcataacaggatcatagcttgttttctcaaaagtttatgtaaaagtgtcttatttatgtctacattgac

SEQ ID NO: 32807 - DNA, 330 bp, Homo sapiens
  misc_feature (1)...(330): n = a,t,c or g
ttgnaaancnnnnnnnnnnnnnnnnnnnnnnnnnnnnnnnnnnnnnnnnnnnnnnnnnnnnnnnnnnnnnnnnnnnnggcacgagctcttgttttgttcacaggaacaaaagtttgtgtggcccgtagcaagctcctaatgtctttctgtccttgtccctcctccctcttcggttgctcctgttttcatatagtcttcaaagtgttcagtctaaaaacatttattacccgtctgcatgccaggtagacatttttttttaatatccttataggttcagagatgagtaagtcataggaaataacttaaaagcatcgactttttttttttttt

SEQ ID NO: 32808 - DNA, 437 bp, Homo sapiens
  misc_feature (1)...(437): n = a,t,c or g
nnnnnnnnnnnnnnnnnnnnnnnnnnnnnnnnnnnnnnnnnnnnnnnnnnnnnnnnnnnnnnnnnnggcacgaggagaatttcctctgcctgaggtctgaaagctcattctgttactctgaaagggcttctcttctagtttttgcctgcaactaggacctccctccaagtcccctgagttccccggtcattggattaattcagtcctgctctgagaatgggcaggaaaggggagggctggacagtcggtggtcagccaggagtggagggagatggaaaaactcggagaggagagtgacctgggaacatcatggacaggatggccagccagtcccctggcatcaggggatttacaagggctcatgttggccatgctcaaagaccacaggacagtgggcactcactcccattactacccctaatacctggntgaaaaga

SEQ ID NO: 32809 - DNA, 449 bp, Homo sapiens
  misc_feature (1)...(449): n = a,t,c or g
aaaccctnnnnnnnnnnnnnnnnnnnnnnnnnnnnnnnnnnnnnnnnnnnnnnnnnnnnnnnnnnnnnnnnnggcacgaggttaacttttctttttaagttttaaatgttttaaaaggtgagttcatttggcttttttgggcacgtctctgttagagtacggcaggggcttatactgctctcttgtgattgaggacaaatgagcacagtcagcacactgccacagattagtgatgcgaattctccacagccacgggaatcagtggcatctgtgctcactgtaaatttgcaaccgggagtccattgagttctattgtctatagactggtctttgttggtcctcaattgtgaatgttttgagggactgggagaagcactggcaaacatgaaataaagcccttttggaaggatatgattgattgatttaacgtcttcattaaagacatatta

SEQ ID NO: 32810 - DNA, 448 bp, Homo sapiens
  misc_feature (1)...(448): n = a,t,c or g
nnnnncctttggnaaccgntatgacatgattacgaatttaatacnnnnnnnnnnnnnnnnnnnnnnnnnnnnnnnnnnnnnnnnnggcacgagaagagacttgacaaaggagtacaagaagtatcagtttaagagatagggaatctgtaagtttgcttagcgtggatgctgtgtagaacttatggtctaagttcatgtttgtttgttttccccagaaaaaatatccgtccaaaaagaaacatgaatgaaatcttcaaaagatgcatacatttcaggacttataaaatctatttaatgtgtctgctcaattactgtattgagcacccagcctcaaagatcactttaaaaagcagtgtnnnnnnnnnnnnnnnnnnnnnnnnnnnnnnnnnnnnnnnnnnnnnnnnnnnnnnnnnnnnnnnnnnnnnnnnnnnnnnnnnnnnnnnnnnnn

SEQ ID NO: 32811 - DNA, 445 bp, Homo sapiens
  misc_feature (1)...(445): n = a,t,c or g
tnnnnnnnnnnnnnnnnnnnnnnnnnnnnnnnnnnnnnnnnnnnnnnnnnnnnnnnnnnnnnnnnnnnnnnnnnnggcacgagcgtgacttgtctcaggccataaagctggggaaagtagtggagctggttttgaacctgagctgtgagacctcagagccctaaactctggtgcctgtgtgttcccctttcaacccagactttggaaatcagtagacaccatatgcttcaaaaaacaggggctattaaaatgacatcaggagccagaaagtctcatggctgtgctttctcttgaagtttatacaacaaccagatcaccgatgtcggagccaggtacgtcaccaaaatcctggatgaatgcaaaggcctcacgcatcttaagtaagtggggtaggcaccaggttccttagtatattctcttgatcacccccttctgntggtcaaaa

SEQ ID NO: 32812 - DNA, 442 bp, Homo sapiens
  misc_feature (1)...(442): n = a,t,c or g
tttgnanacccttnngacatnattacgaatttaatannnnnnnnnnnnnnnnnnnnnnnnnnnnnnnnnnnnnnnnnnggcacgaggaatgaacaggttagaaagatggtcagtaccattcagaccagaatgtcaaataattgatggcttgtaagccctaaacttctaaagcttttgttctcgctcttactgtcaacatctcccttgttttttgcccttctttctgccccctgccccacaccaactctcacccaggctcttggggtaggggaggtgctccatgtgaagacagagtccttggcacccccactgtgtctcctgggagatgacccaacatcctcatttgaaaccgtccagatcaacgttatccccacctctgatgattcctcaggtaataaaacagcctgccccaatccttggctctactacgggagaatgtgtt

SEQ ID NO: 32813 - DNA, 434 bp, Homo sapiens
  misc_feature (1)...(434): n = a,t,c or g
anacctttgaanaccntnnnnnnnnnnnnnnnnnnnnnnnnnnnnnnnnnnnnnnnnnnnnnnnnnnnnnnnnnnnnnnnnnggcacgaggaatcggaagagcgcaggcaaaagccttggcagctgtcttgccgcctgggcagaagcccagattgccaggagtcaggctctgttcggtctgtcctcttgccccaaggaggtgacagactaggcttggggtgtcatgtacatgggaaaagaggacaaagtggtgagttaaatcagctagtctgtagcaaggcatgtttccccagggactcaggtccccgcttcaaganaacctgttctggaagccccttccttgactgngtctggtgtgcttggnttggacttaatggacagaacagaaccctgtaagcccntttcccagtaaggagcaaggcacattgcataaa

SEQ ID NO: 32814 - DNA, 439 bp, Homo sapiens
  misc_feature (1)...(439): n = a,t,c or g
tttggaanaaccgtnnnnnnnnnnnnnnnnnnnnnnnnnnnnnnnnnnnnnnnnnnnnnnnnnnnnnnnnnnnnnnnnnggcacgaggtggattccaactccaacgcggacagtgagaaatgggtggcaggagatggtttggaagagcaggaattttctatcaaggaggcaaacttcacagagggaagtctgaagctaaagattcagaccacaaagcgggctaagaaacccccaaagaatttggagaactatatatgtccacctgagatcaagatcaccatcaagcagtctggggaccagaaggtgtcccgtgctggaaaaaatagcaaagccacgaaggaggaagaaagaagccactccaaaaagaaggtaggaagccctgtcttatggttgtttttgtttgtttctctgtttttgccattttatcctcaacttctta

SEQ ID NO: 32815 - DNA, 437 bp, Homo sapiens
  misc_feature (1)...(437): n = a,t,c or g
accgttttgacatgattacgaatttaatacnnnnnnnnnnnnnnnnnnnnnnnnnnnnnnnnnnnnnnnnnggcacgagcggcacgagctcacccctggnnnnnnnnnnnnnnnnnnnnnnnnnnnnnnnnnnnnnnnnnnnnnaccaatggacaaagttgtccctggttaagagcagtagctttgatttaagcctaatacaaaaagggcagagtctcagaatgtgtttgaaagaaaatagagcactgtttgatttctgagccacagaggctaagagatgggagaacggtaacccagatctgaatgagtcagacaactccaacctgtattaggttacaagaggagggacacatctctcatttggctacgagacatgcctgctgttgtacaaatgtgcactgcctattccaagaaggtaatattgaactgtggttgaa

SEQ ID NO: 32816 - DNA, 436 bp, Homo sapiens
  misc_feature (1)...(436): n = a,t,c or g
tttgnanaccgtnnnnnnnnnnnnnnnnnnnnnnnnnnnnnnnnnnnnnnnnnnnnnnnnnnnnnnnnnnnnnnnnnggcacgaggcaatgttactaagcatctagtaagttctaggcactgttctaggctctggtgatgagtaagatggccacagcgctctcatggagcttataatcggggaagcagacaagagtgataaccacgcacaatgggtatgctgataggagacatccaggcactgcaggagcatggggtcttatggtcagagttgggctgggaactcccccttggacaaattccatcagagattccaagacaagcagttgaacagtgccaaagagtgctcaggatagcccaggaacaggccgactagaccctcttgctctctcagctctctccgttccagcatctagcctagtttcccatccctggaa

SEQ ID NO: 32817 - DNA, 466 bp, Homo sapiens
  misc_feature (1)...(466): n = a,t,c or g
ggngntnnnnttgaaatntgangacctttgacaaatncnnnnnnnnnnnnnnnnnnnnnnnnnnnnnnnnnnnnnnnnnnnnnggcacgagctgaaatatttatggatgaaaatgattgaatctctagctgttgcttcaaaataatctagtgtgagtgggcagagggagttatcagggaaaccagatgttttctaatcattgttgaagctagtaatgggaagacaggagtttattaaactattatctacttttgtatctgttttatggtttcaataatagtcaaaactatcatgtatttgcatttttaaagtcattgttggttattgaagaggaaaatgcttcgtacaagcatttctctacaaagagtgttctggnnnnnnnnnnnnnnnnnnnnnnnnnnnnnnnnnnnnnnnnnnnnnnnnnnnnnnggtangtggatcacttgaggtcaggagttcgtgacca

SEQ ID NO: 32818 - DNA, 468 bp, Homo sapiens
  misc_feature (1)...(468): n = a,t,c or g
gggntgnncttgaacttgnnnnnnnnnnnnnnnnnnnnnnnnnnnnnnnnnnnnnnnnnnnnnnnnnnnnnnnnnnnnnnnnggcacgagtcttggcctgcttgactgtgtcactgagccagtcttactggcaaggacccaggagggaatcttctgctgtgttttgaaactattcaaaacccacaatctggtagatttatggaaatagcggtttttcttatgactgaaatcctgaaagaaattgggcatcggcttctcatgagaaatgaggaaacttctgcttcccgccctgggcgctttttaaaaaaaaattttgtaggaatctgtaggggtggggatcacaggatgcttttgttaataagcaaatgtttctattcactcagcctggtgagagcaagcatcactctgcttcatttgaatgagggcagaggtgaatttcttagtaacctgtcatcaccaaagaagttt

SEQ ID NO: 32819 - DNA, 472 bp, Homo sapiens
  misc_feature (1)...(472): n = a,t,c or g
ggngnnnnnntttgaaacngctatgactgattacgaatttaatacnnnnnnnnnnnnnnnnnnnnnnnnnnnnnnnnnnnnnnnnnggcacgagttcataccctgacttctattttttttcctccaagatggagctttttnnnnnnnnnnnnnnnnnnnnnnnnnnnnnnnnnnnnnnnnnnnnnnnnnnnnnnnnnnnnnnnnnnnnnnnnnnnnnnnnnnnnnnnnnnnnnnnnnnnnnnnnnnnnnnnnnnnnnnnnnnnnnnnnnnnnnnnnnnnnnnnnnnnnnnnnnnnnnnnnnnnnnnnnnnnnnnnnnnnnnnnnnnnnnnnnnnnnnnnnnnnnnnnnnnnnnnnnnnnnnnnnnnnnnnnnnnnnnnnnnnnnnnnnnnnnnnnnnnnnnnnnttccatgacttctacagcataaattgaaattttaaaattattttctgattgtttactgatattccaag

SEQ ID NO: 32820 - DNA, 468 bp, Homo sapiens
  misc_feature (1)...(468): n = a,t,c or g
nnnnnnnntttganaccnctatgacnnnnnnnnnnnnnnnnnnnnnnnnnnnnnnnnnnnnnnnnnnnnnnnnnnnnnnnnnnggcacgagcagctatttgatggcagtttgggttaagtgatttctgagactttcccatagattctttgaatttaaatgagaagcctgataaaaattccaagttaaagatacccaggaaatctacaacagatcaagcnnnnnnnnnnnnnnnnnnnnnnnnnnnnnnnnnnnnnnnnnnnnnnnnnnnnnnnnnnnnnnnnnnnnnnnnnnnnnnnnnnnnnnnnnnnnnnnnnnnnnnnnnnnnnnnnnnnnnnnnnnnnnnnnnnnnnnnnnnnnnnnnnnnnnnnnnnnnnnnnnnnnnnnnnnnnnnnnnnnnnnnnnnnnnnnnnnnnnnnnnnnnnnnnnnnnnnnnnnnnnnnnnnnnnnnnnnnnnnnnnnnnnnnnnn

SEQ ID NO: 32821 - DNA, 478 bp, Homo sapiens
  misc_feature (1)...(478): n = a,t,c or g
ggngntnnnnntttganactttgaanaccgnnnnnnnnnnnnnnnnnnnnnnnnnnnnnnnnnnnnnnnnnnnnnnnnnnnnnnnnnnnnnnnnnnggcacgagagcctttaaaaagaaagattaattgtgacatggatgaacctagaggacgtatgttagacannnnnnnnnnnnnnnnnnnnnnnnnnnnnnnnnnnnnnnnnnnnnnnnnnnnnnnnnnnnnnnnnnnnctcaggccaggnnnnnnnnnnnnnnnnnnnnnnnnnnnnnnnnnnnnnnnnnnnnnnnnnnnnnnnnnnnnnnnnnnnnnnnnnnnnnnnnnnnnnnnnnnnnnnnnnnnnnnnnnnnnnnnnnnnnnnnnnnnnnnnnnnnnnnnnnnnnnnnnnnnnnnnnnnnnnnnnnnnnnnnnnnnnnnnnnnnnnnnnnnnnnnnnnnnnnnnnnnnnnnnnnnnnnnnnnnnnnntgagccatgttca

SEQ ID NO: 32822 - DNA, 471 bp, Homo sapiens
  misc_feature (1)...(471): n = a,t,c or g
gtgntnnncttganactttnnnnnnnnnnnnnnnnnnnnnnnnnnnnnnnnnnnnnnnnnnnnnnnnnnnnnnnnnnnnnnnnnggcacgagaagaaggcagcccttctcagcatgacttcagcaggatcctccagcagtgatgtcattcctttgtccaggctttccagggtgctggggagcagggaggaggcaagagggtgcagggtgggcacagactcacatccttcactcaggcttagattcctgtggcttctgaactggatgctgatggcttccttgcgttcctagtaatattcatgaccgtggtactctacatgtctgtggtaccatacacgattggtaatatacgtgactgtggtaatatacaaggggacttcaaaaaggtggtggaaaatggaattaaaggatgaaaataaaaaatataggccaggcacaagtggctcactcctgtattcccagcactgnggga

SEQ ID NO: 32823 - DNA, 468 bp, Homo sapiens
  misc_feature (1)...(468): n = a,t,c or g
gtgnnnnnnnttgaacctcttgacnnnnnnnnnnnnnnnnnnnnnnnnnnnnnnnnnnnnnnnnnnnnnnnnnnnnnnnnnnggcacgannnnnnnnnnnnnnnnnnnnnnnnnnnnnnnnnnnnnnnnnnnnnnnnnttttaaaaatattccccacagagagtaataggtcaacccttcagaatggcatgcccctcctatcctagtcctagccaattaaaaaaaaaatttttttaaagaaaaaaaagagtggcatgcccccttgggtgggattctcatgccaggttatataaataccactgggcagtctaaagagagctcctgaaatcagatgcccattcctagtccaatcacctgtgactatagtggcggaatcacaaggtacaaaggatggagaggagaccatgcgtctggcaggaactccgagggaccccagtggggagtggtgtgcctagtaggcatctgcca

SEQ ID NO: 32824 - DNA, 475 bp, Homo sapiens
  misc_feature (1)...(475): n = a,t,c or g
ggngnnnnnnnttggnnncttggnnaccgctnnnnnnnnnnnnnnnnnnnnnnnnnnnnnnnnnnnnnnnnnnnnnnnnnnnnnnnnnnnnnnnggcacgagatagaatcacacaacattaaattgatagaacattaacgaaaaatgtcaatgaaattataacatatgaacgtttgtaggatgtaaagtaagagagtgagagagagagagggagcacaacaattaccaaatcaagatggaaagaggcaccactacccatcctacagacataaaaggactagtgaagcaaaactaggaatctatgctaagatgttttacaactcacatttaatagaaaatatcttgaagtatacaaactaccaaaatttactcaagaacaaatatatagtgtaacatttcctatttttattaaagaaattcnnnnnnnnnnnnnnnnnnnnnnnnnnnnnnnnnnnnnnnnnnnnnnnnnnnnnnn

SEQ ID NO: 32825 - DNA, 476 bp, Homo sapiens
  misc_feature (1)...(476): n = a,t,c or g
ggtgntnnnnntttganancttgganaaccgctatgacnnnnnnnnnnnnnnnnnnnnnnnnnnnnnnnnnnnnnnnnnnnnnnnnnnnnnnnnnnggcacgaggtaaagacttctggaaaaagagaaactgttttctgaaacattttaccccaaattccatcaacagttccaatagtatttctctgctcaggaacttgacactgaaattaccatttcctcagcaggtacagaaatgtaacttgaaaatcttttagcacagtgtactagctgtcaaaatatagaaaggctgcagatgcctcaagaggcttgccagaggcacgatgccttcgggtgtttcagcttatactttgaagtaaaatgtatttgaagcttttgctgaaaagtctgggacatatccttgtcaacatagggaatagtatcagtgacagactggcccagagttgaccacccagaccgattcagtgnctttggtga

SEQ ID NO: 32826 - DNA, 471 bp, Homo sapiens
  misc_feature (1)...(471): n = a,t,c or g
tgnnnnnnnnttganacttctatgacnnnnnnnnnnnnnnnnnnnnnnnnnnnnnnnnnnnnnnnnnnnnnnnnnnnnnnnnnnggcacgagggaatgtaatgggagagtgaagctgaagtcactcaagtgctacctcctgtggcatcttgtaaacctaggcaaggaatagccactgagtcactttaatcacggcaaaagtgtaattcggtttccaaaattaggggaacactccagatatagcccggggaatagattgccaagaggctatggagaatgtcaagaaacaaggagtccattatggctggagcagagtgtttgctttcatctcctttttattttctaagactttctaagcatgctgtggtctgcaagaataaaattgctttattaaaaactttcatttatttgcttcctttttctatgtagttaaaagtctactggtgggccagccatggtggctcacacctgg

SEQ ID NO: 32827 - DNA, 470 bp, Homo sapiens
  misc_feature (1)...(470): n = a,t,c or g
gggntnnnntttganacttgganaaccgntatgacnnnnnnnnnnnnnnnnnnnnnnnnnnnnnnnnnnnnnnnnnnnnnnnnnnnnnnnnnnggcacgagagagctagcaccatgacttcaatacnnnnnnnnnnnnnnnnnnnnnnnnnnnnnnnnnnnnnnnnnnnnnnnnnnnnnnaatgccatcacagcccagataggctaagggaagnnnnnnnnnnnnnnnnnnnnnnnnnnnnnnnnnnnnnnnnnnnnnnnnnnnnnnnnnnnnnnnnnnnnnnnncaaaatccaaataaatgaattttagttagtagtaatgtaccaacattggttccttaacggtgacaaatttaacactgaaatgtcagacactggcaacatgacgagacccccatttcttacaaaaaaaanaaattaggggaactggggngcagggtanacctaaccnccctgaactttttctgaaa

SEQ ID NO: 32828 - DNA, 474 bp, Homo sapiens
  misc_feature (1)...(474): n = a,t,c or g
ggnnntnnnntttgannnttggananccgctatgacnnnnnnnnnnnnnnnnnnnnnnnnnnnnnnnnnnnnnnnnnnnnnnnnnnnnnnnnnnggcacgagcggcacgagttattatcctataggtgtgctagcaatgacttctcactcacgtgttgtttacctaacaaagttttttattttgctttgattttttgaatgataaatttttggttggctattgaagtctaagtggacaatttttttctgttgaatctttgggtttataatttttatcacattttgcaaaaatttggccattatttctgcaaataccttttttcataccctctctaatctctgcttcttctatgacttcagttataagcatgttagacttctcgacattatcccacaggtcccagaactccactattggcttttttccccagtctgattttttcttctgtgctttgatttggatggtttctattt

SEQ ID NO: 32829 - DNA, 478 bp, Homo sapiens
  misc_feature (1)...(478): n = a,t,c or g
ggngnnnnnnntttganacttggannnnnnnnnnnnnnnnnnnnnnnnnnnnnnnnnnnnnnnnnnnnnnnnnnnnnnnnnnnnnnnnnnnnnnnnggcacgagctggacaatgtgtatggtgcatttcatttcagagtataaaataccatttgctgtatggtcaaaaccacagtaagaaaacaggtagtaaacttgggatgtatgtccacccttcatcactaaaataatgctttaatggacagattatgctttgattacaggcaataaaaacctttccacatttcacaaataattcaattttatatcttgtctcagggaatcaggtttaaatgtgaaaaagagatttaaaacaaaactttagactaaagaaataagtgtacacaaaaactcacttaatttaaaaacaattttcctattttcaacatgctgtaagcctttgaactaactttggggggaaggggtgaaaacagttcaaa

SEQ ID NO: 32830 - DNA, 479 bp, Homo sapiens
  misc_feature (1)...(479): n = a,t,c or g
gngnnnnnnntttgaaanttggatnnnnnnnnnnnnnnnnnnnnnnnnnnnnnnnnnnnnnnnnnnnnnnnnnnnnnnnnnnnnnnnnnnnnnnnggcacgagcggcacgagctggctttccctacccatttaatgtacacatttgggacctaaagcgtagaaaagtccagtaattttcccaaagtcacaaagctttgaagttcttgagctaagaactgaaatctaactctgattccaaagctcatactcctccttgcctccctgaattgtgcatgaagatgatgtacccatagaggaatggtgagaacatgggcttttacattgtccagaggcaagcttgaacatctgctcatgcatgttttggccctctgacctgagtgagctacttaacttctctaagcttcagattcttcatccatcaaattggggataatgatgccagtctcacagggttgttgagtaacatgcattatgtagg

SEQ ID NO: 32831 - DNA, 475 bp, Homo sapiens
  misc_feature (1)...(475): n = a,t,c or g
gtgntnnnnntttganncttgganancnnnnnnnnnnnnnnnnnnnnnnnnnnnnnnnnnnnnnnnnnnnnnnnnnnnnnnnnnnnnnnnnnnnggcacgagcgcttgctgcagagcgacgcctaggacagtgaagaggatttgatccttttccctttccccatcaacctctgcctctccaccccttcaatggtggttttttactgttccagggttgaaccggacggtggctgggaggcaggtttaagtttggatggaaggcacatgcagaaaagctgttgcttgactagaatggttgtgaggtggcatcactctctctgggtagggcagatgtttaaatctgcctcttctcttgtgtgctcgtctggggtttgctgagatggcccgtggcccggcactgttccccagcagctctttccatgcagataatgtgctctcccctgctctgtgctaggaatccaggggttcacccaca

SEQ ID NO: 32832 - DNA, 457 bp, Homo sapiens
  misc_feature (1)...(457): n = a,t,c or g
ggtgnnncccccnttgacnnnnnnnnnnnnnnnnnnnnnnnnnnnnnnnnnnnnnnnnnnnnnnnnnnnnnnnnnnnnnnnnnnnnnnggcacgaggaaaaatgtacttgatgtagttcgtaagcaaacaaacacgaagttggatttgcctacaaaggtgattggaaggacacagatgatgtagaaatgaaaattttcattaggttgatcattttaactgttttaaaaataagcctaaaaatgaaagtctttctttaagaagcaaagaaggatgccctctttctcctcggtaaaatgatgcgccattagtgttttcaaaagtatgattaattatagaagtgtaagaagaaccagaagtaatgatgaacaaggacctattatagatgtattcgaagtcgttatctacaaagtggatatgttcatctgctagcactttatcttttcagggtttgcctat

SEQ ID NO: 32833 - DNA, 459 bp, Homo sapiens
  misc_feature (1)...(459): n = a,t,c or g
ggtnnnncccccttnnncattgnataccgnnnnnnnnnnnnnnnnnnnnnnnnnnnnnnnnnnnnnnnnnnnnnnnnnnnnnnnnnnnnnnnnnnggcacgagaaaattattctcactttatagttaaagaaattgacattaaaagaagttaaggacttgctcaaggtaaagcccctctggctggaaagcccaccctttccgctaatccacactgtgtgtaagtgagtcccaggacagagagctggagatgtgtacaggcctgcggaggttgaaacaatcatgttttggcagtgagaactaccattgcttctactgacaatgatgactatgatatcatccaacacttactgctcacatgctatgtgttgagtgtaacactgggcattttacataactgatctcattcaatctctattccattcccctgaggatataatgaccaccaccatttcaagagt

SEQ ID NO: 32834 - DNA, 457 bp, Homo sapiens
  misc_feature (1)...(457): n = a,t,c or g
ggnncccnncccttnccccnttgncaaccgtnnnnnnnnnnnnnnnnnnnnnnnnnnnnnnnnnnnnnnnnnnnnnnnnnnnnnnnnnnnnnnnnnggcacgannnnnnnnnnnnnnnnnnnnnnnnnnnnnnnnnnnnnnnnnnnnnnnnnnnnnnnnnnnnnnnnnnnnnnnnnnnnnnnnnnnnnnnnnnnnnnnnnnnnnnnnnnnnnnnnnnnnnnnnnnnnnnnnnnnnnnnnnnnnnnnnnnnnnnnnnnnnnnnaaattctaattttaacgnnnnnnnnnnnnnnnnnnnnnnnnnnnnnnnnnnnnnnnnnnnnnnnnnnnnnnnnnnnnnnnnnnnnnnnnnnnnnnnnnnnnnnnnnnnngtcactgtgcctgacctaatttttcttattaccagttttaggtttctttccgtttttgcaaatattaagagagaatggggcccaaa

SEQ ID NO: 32835 - DNA, 455 bp, Homo sapiens
  misc_feature (1)...(455): n = a,t,c or g
gtgnnncccccnttgnacnnnnnnnnnnnnnnnnnnnnnnnnnnnnnnnnnnnnnnnnnnnnnnnnnnnnnnnnnnnnnnnnnnnnnnggcacgagctgaaaggcatccaggactcaggaaaatttactattttctgtgtctacttcacatattgtaggatgcctgcaacttccagacttgactcattaaatgacagtagtatctccccagttgtgacaacctaaatcactcccaaagatttctgaaaagccttctgatagtcatattccttctgagaaccaatgtctgatagaaatatcaagccaacactcttcaacgctttcccacagaatttgtgctgtggtccccacaagggatgccctagagtcactttcttcccggatacaccctttatcccttatagagctcatacagtccctcaccttcaacgtggcctgcctttagcctgctggct

SEQ ID NO: 32836 - DNA, 427 bp, Homo sapiens
  misc_feature (1)...(427): n = a,t,c or g
acccgnnnnnnnnnnnnnnnnnnnnnnnnnnnnnnnnnnnnnnnnnnnnnnnnnnnnnnnnnnnnnnnnnnggcacgagactggatatgcggaatcgggctgggtctaggatgattcttgtttgggtgaatggataggactggcatcattcaccaagacaggaaatttggccagaggaagatgatgtctatggtgatatgtgccaggagcaagactaaagccagagagacagactgaacagttatcggtgtttatataggagaagccaggacaacagattaccaggttaatggtttggctgaagagtaagaacaggtgaggtcaaaggacggaaccctgggaaacaattctgctgtgtccccacacaaatctaacgttgaattgtnnnnnnnnnnnnnnnnnnnnnnnnnnnnnnnnnnnnnnnngg

SEQ ID NO: 32837 - DNA, 452 bp, Homo sapiens
  misc_feature (1)...(452): n = a,t,c or g
gtgnnncccccccttngacaccgnnnnnnnnnnnnnnnnnnnnnnnnnnnnnnnnnnnnnnnnnnnnnnnnnnnnnnnnnnnnnnnnnnggcacgagatttttaaaatattttaaatttttaatttttttctagtcccaaaagtaacatcctgacctactggagttaatggggtccagtatgataggtggtgagcccagcaggaggtgggagaaaagccccagatgatgagattggaaaaggggagatctgcagggggaaatcccaggttggctgtccatgtctatatggggcccaagagccgctatccttgatggattgggcctaatgtgtgagtacagggatgctctgcaaacactgaaaggtctggaagggtagttgcagggggtagatctgactgagcaaggctcatattcctgagctgtggcagctgtagttggctggccgcttcgg

SEQ ID NO: 32838 - DNA, 436 bp, Homo sapiens
  misc_feature (1)...(436): n = a,t,c or g
ctttgataccgtnnnnnnnnnnnnnnnnnnnnnnnnnnnnnnnnnnnnnnnnnnnnnnnnnnnnnnnnnnnnnnnnnggcacgagtcgctgtctgaagcccccatttgacctcaatcagctgaatcatggctcaaggctggtgcaggatgtggttgagtacctatagtccacagtgaggccctttgtatccttgcaagatgacgattactttgccaccctgagggaactggaagctacccttcggacgcagagcctttctctggcagagattcctgaagggaaaatcatgaacaacacctactaccaggaatgcctcttctacctgcacaactatagcaccaacctggccatcatcagcttctacgtgaggcacagctgcctgcgggaagctcttctgcaccttctcaacaaggaccaagttcgggccgcatgaca

SEQ ID NO: 32839 - DNA, 452 bp, Homo sapiens
  misc_feature (1)...(452): n = a,t,c or g
gtgnntccccccttngacaccgnnnnnnnnnnnnnnnnnnnnnnnnnnnnnnnnnnnnnnnnnnnnnnnnnnnnnnnnnnnnnnnnnnggcacgagggctcaggtgtttttgctgggcctgcaggcagcaaaaaccctgtgagccgataggaaaggaagatctacagtcatccagagatagagatgagacaccttctagcagtaaaacaagtcctgagcctggtcagttcttgaatgctgaagatctctgctctgcttaatgggacccaaggtctcagagcacaggcatattattttctgggtttgatactcgttattcatacaaataatgagccctacacagggaacaaggcaggaagttagctgttaactccttgtgagctgcttctctttatagagctcttgggtatgtagaactgtatggnaanaagccaggaaaacctctgagtgtt

SEQ ID NO: 32840 - DNA, 436 bp, Homo sapiens
  misc_feature (1)...(436): n = a,t,c or g
ctttgnnacccgnnnnnnnnnnnnnnnnnnnnnnnnnnnnnnnnnnnnnnnnnnnnnnnnnnnnnnnnnnnnnnnnnnggcacgagcccatctagcatcttaataattatttttccaagttcgttataattaactcctttaacctcatctcattaaatcaattttgtattatcattctgttgttctctggaaagcaaccaattgttcagctcttgaatcagaattttcaaagactcacctctcttacctgggcttgcacatatttgtcctaagtaattctctatcccttaaacctctgagtccctctgttttattacttgccccactcctcctacttgaatatgtttgttttcccagttgaatgtgatttttatctactgttcatattatcttttatacccatgagtataatttcatagtcctttcaggttccaca

SEQ ID NO: 32841 - DNA, 453 bp, Homo sapiens
  misc_feature (1)...(453): n = a,t,c or g
ggtgnnnnccccattgacnnnnnnnnnnnnnnnnnnnnnnnnnnnnnnnnnnnnnnnnnnnnnnnnnnnnnnnnnnnnnnnnnnnnnnggcacgagagagggtggtgccattgcccccggcctagcttctgtttgatcattagtttcaattcaagaaaacgttcttttgagggaattttaaaaatgaatcacgtgcacctcttaagaaaaccgagtgtcacaatcgttgttaccacgcaggtgagaggagaggagggaggacgggaaagggaaggggcatgagaaaggcggatgggactgagcttctacggctccctggccgcggcgcacgcgctggccctccccgtccacagcagcagcggcatcctccccaccctacagcgaggaggtggacgttgccccgaggggaggagcgtgtcagggtggcttccaggtgcaggttctcgcgcaggc

SEQ ID NO: 32842 - DNA, 453 bp, Homo sapiens
  misc_feature (1)...(453): n = a,t,c or g
ggtgnnnncccccttngacaccnnnnnnnnnnnnnnnnnnnnnnnnnnnnnnnnnnnnnnnnnnnnnnnnnnnnnnnnnnnnnnnnnnnggcacgagatagggctcggcgtgggagtcgtctggggacccagggaccaggtcttgttttggagaaaagacatcaaactcttcaagccgggaccacctcttgctgtccctttggaaagtccatttgccactgatggcacaaggctcatcctcgtctgaatcgtcacttcgtttccgatgaggactaatttctagcttcatcactgcacatttgtttaaagtatttagacgcctgcatagagcctcaatggcatctctgtccaaaaaatcatgctctctcttgaccaaggaaatatcgatggggaacaggaaatcttcataaagctgtgcatactgggggaaaccagttgcccgtagccaatcac

SEQ ID NO: 32843 - DNA, 469 bp, Homo sapiens
  misc_feature (1)...(469): n = a,t,c or g
ggnttnggttngctanaaacnctngatttgaacccttagacgacnnnnnnnnnnnnnnnnnnnnnnnnnnnnnnnnnnnnggcacgaggcattgtggtgggttttacttcaggttatgtacgcttctacactgaggtgagttgagttttcaacagctggaaaacactagttgactgcaatatctggttatgcatcacctttatactgtttgtgactttattacctgctgcctgaaaatgtgtagttgattctttatgggggtagaggccgggataggccgtggcaagttctggtagaagatacagagaagaggagctgtattctgaaaagagtgtacctggtatctctggaaaactgttggggaaatggtactctttgcctggccatacctgctaaggtatattggtaagaaaacaagcagggcccttctctgtgcttcctcctagaatggtgtgctcttgcttgcaca

SEQ ID NO: 32844 - DNA, 483 bp, Homo sapiens
  misc_feature (1)...(483): n = a,t,c or g
gnggntnnngttngnntttgaaacccttgatttgaaaccttnnnnnnnnnnnnnnnnnnnnnnnnnnnnnnnnnnnnnnnnnnnnnnnnnnnnnnnnnnnnnnnggcacgagataatagcagccacttgcatgggccttacttctataacaggcaatccactgtatgacagcctaggttctttgggtgtgggcaccttattaggcatggtctcagcattcctcatctacactaacacagaagcactcttagggcggtccatccagccagaacaagtacaacggctcactgaactcctggagaatgacccatcagtaagggcaattcatgatgttaaagccacagatctgggattaggtaaagtaagatttaaggcagaagtagattttgatgggcgagttgttacaagatcatatttggaaaaacaagattttgaccaaatgttacaagaaattcaagaagtgaaaactcctgaagaactaga

SEQ ID NO: 32845 - DNA, 481 bp, Homo sapiens
  misc_feature (1)...(481): n = a,t,c or g
gnggnttnngntnngnntttgaaaccctngatntgaaacctttgannnnnnnnnnnnnnnnnnnnnnnnnnnnnnnnnnnnnnnnnnnnnnnnnnnnnnnnnnnggcacgagattcttccttggtcagatattgaccaagcatctgcagtgcgaggcgctgctcaacagagaacctcagccccgccttcctgagctgcagagtgcagggagcagaacctcagccccaccttcctgagctgcagagtgcagggagcaggcagcactcactgggcagctacgagggtgggagcaggcttggggcaagtgcccagggtggggcctgccactggcctggtcacggggcatccctcggcaagcaggtacttctgcacacctcctgtgaggcaggcatggggcatccgctatgatggagacagactgtgtcccagcctgcacagccctccctttggtccagaggggaagacacaccagacgggaatc

SEQ ID NO: 32846 - DNA, 490 bp, Homo sapiens
  misc_feature (1)...(490): n = a,t,c or g
gngnnnnnnnngnnnnngnnnttggaancccnntgnntttgaaaacccnnnnnnnnnnnnnnnnnnnnnnnnnnnnnnnnnnnnnnnnnnnnnnnnnnnnnnnnnnnnnnnnnnggcacgagctggaaggtaaatcatgtctaactggcccactttacctcttcgtgcaaattccatggggacagataaagttggaaaatgacacaaggcacagaatcctctatacacgcctaaccattagttgaacaaagccactttgttcaaccagtaagtcctctcaataaaataaaaaggaactattannnnnnnnnnnnnnnnnnnnnnnnnnnnnnnnnnnnnnnnnnnnnnnnnnnnnnnnnnnnnnngactccatctcaaaaaagagaaaagaaaattaatcactcagctaaataacaataaaggcctttaagttaggtaatgagtacaaaaaagatcatgaataagagttagatttaagagacacagaagc

SEQ ID NO: 32847 - DNA, 452 bp, Homo sapiens
  misc_feature (1)...(452): n = a,t,c or g
cccnnnnnnnnnnnnnnnnnnnnnnnnnnnnnnnnnnnnnnnnnnnnnnnnnnnnnnnnnnnnnnnnnnggcacgaggcctagtttcatttgtaatgtttacttgactgatctaagtcttgggaatgcttgaaattatattcctccacagaggttttgtgctgatgtctatcagattttttttaatggggggcatgtattaattttcaggggtcaccgtaataagctactgcatgctgggtggcttagnnnnnnnnnnnnnnnnnnnnnnnnnnnnnnnnnnnnnnnnnnnnnnnnnnnnnnnnnnnnnnnnnnccacgctccccatgacaacacgagggagggctgttccagacccctctccaacaaattttcccatttgtaagatcaccgccggntgnnnnnnnnnnnnnnnnnnnnnnnnnnnnnnnnnnnnnnnnnnnnnnnnnnnnn

SEQ ID NO: 32848 - DNA, 449 bp, Homo sapiens
  misc_feature (1)...(449): n = a,t,c or g
nttgganancnnnnnnnnnnnnnnnnnnnnnnnnnnnnnnnnnnnnnnnnnnnnnnnnnnnnnnnnnnnnnnnnnnnggcacgagcggggaagacggacagggtgactgtgaagaccaacacaaggcacagcgctgtcagccagatctgggagccagaggcaggggtgtgagcaggcagggcagtcccagggccccaccctcttgcccaagccccatgtgggagcaggacacttggggcctggcccagctgtgtccctgacccactgtgaccctatgaccttggagtcaatgtgagccccattcttccccaaagatggtggttgggggctgtatccaagccaaaccttctggaagacagtgaagactgaaggttttcctggcttctggggctcatctggctctgattccggctccttctccaggtcaagatccagggtcagagctactt

SEQ ID NO: 32849 - DNA, 475 bp, Homo sapiens
  misc_feature (1)...(475): n = a,t,c or g
gnngnnnnnnttngnnttnnnnntttgaaaccnnnnnnnnnnnnnnnnnnnnnnnnnnnnnnnnnnnnnnnnnnnnnnnnnnnnnnnnnnnnnnnnnnggcacgnnnnnnnnnnnnnnnnnnnnnnnnnnnnnnnnnnnnnnnnnnnnnnnnnnnnnnnnnnnnnnnnnnnnnnnnnnnnnnnnnnnnnnnnnnnnnnnnnnnnnnnnnnnnnnnnnnnnnnnnnnnnnnnnnnnnnnnnnnnnnnggaaaaaaaattattttattacttgtattatttactattattatttatcacttaattactgagtgctttggcgccttttacattttacaacccagttaggtgacttatctccttcatcctaatcctggtcctggatgtatcacttttttttttctttttttttttntnaaacggngtttnantttttttgcccaggntgnagtnaancggngaaatnttggttcctgca

SEQ ID NO: 32850 - DNA, 465 bp, Homo sapiens
  misc_feature (1)...(465): n = a,t,c or g
gnnntttgaaancccttngnatctgaaaccctnnnnnnnnnnnnnnnnnnnnnnnnnnnnnnnnnnnnnnnnnnnnnnnnnnnnnnnnnnnnnnnnnggcacgaggggcatatgatagctaggtctctatctcttcctgttcttccaccaaccctatgtcacactgactttgtggaagaataaccagaactcttcttagttttgtgatgtgtgggccagtgtggtttttgcaatgtattattcataactagcaaatcatgatttgggtatgttgatgtcatcagcatgaacaacctggtttggaagaagagccccatatttttcataacaccttggtttacccaacgtactgtgcactgtcatccacacgtaatattgatccacttgcgagaccagagcagtggtcatcagcagctcaggtcaagagctatcactgaatgttgtgtcctaaatcaggcctgatca

SEQ ID NO: 32851 - DNA, 477 bp, Homo sapiens
  misc_feature (1)...(477): n = a,t,c or g
gnngnnnnnnttngnntnnnnnatctgaancnnnnnnnnnnnnnnnnnnnnnnnnnnnnnnnnnnnnnnnnnnnnnnnnnnnnnnnnnnnnnnnnnnggcacgagccctgctttgtttagaacccaaggtctgaatgctaggtatgctcactgctgcaagggtgtcactgttcccaggccttctctgcagacagagctgaggaacatgtctgagtttatatgtgtgtggatgtatacacacacatctacataacatttatatctctatatatgaatggatgtaaatatacatctatatttaagtacgtatgtctgtatttatttatatgtattgaaaaccatgagttcatcccaatgcctccaattccattccagtgccacaggttcgctctcatttttttctgtatttgtggccccttctcctacagggagaaacctgtctcccatagcttctgccactccactcatggacaccct

SEQ ID NO: 32852 - DNA, 473 bp, Homo sapiens
  misc_feature (1)...(473): n = a,t,c or g
gnntnngnnnntttggaancccntnnnatactgaaacnctnnnnnnnnnnnnnnnnnnnnnnnnnnnnnnnnnnnnnnnnnnnnnnnnnnnnnnnnnnnnnnnnnggcacgagatttgtactccatctttgtacagggagggctgacccacgtgaccgtctcactcaactgagaaaaactctgagttggagggacagagtagtcatttaatttgttattttggaaatgaggtgtcatccttgttggaggctttgggagctggcagcttgcaagccagagaagggaggggctggggattgatgggagccttgttctcagcttgcttggtttaggttggcggacgaagagtgaagagtgctccctgctcagaaggtgaattctgataaagcaggggaatgtcttgtaagaggggttccttagcaagatgagagagccaccaggaagttgtgagactgtggaattactaaaatggg

SEQ ID NO: 32853 - DNA, 479 bp, Homo sapiens
  misc_feature (1)...(479): n = a,t,c or g
gnnngnnnnnnttngnnttnnnnatctggaaaccnnnnnnnnnnnnnnnnnnnnnnnnnnnnnnnnnnnnnnnnnnnnnnnnnnnnnnnnnnnnnnnnnnggcacgagatttctgtactgagatttttttaacgtataaaatgtagatacaactgttctatgatggctgtttttgccaaaaacatgcctgcccaggatgcctttgtcagttgttttcatggcatttgcttggtggaaaagttgtgggggttatgtagaaataaaaacgagaataaatttctgcagccgatctaaatacatatttttaaagtcaagaattatgtttcccattaaataaacgttctcatttatggtctccgttcatatagtgatgggtcctattagctgtcattatccttctattctcattaggagagaaaaatagtccaggctcctaaaagtatcttcatgagaagtatcagctcctaattagcagtgac

SEQ ID NO: 32854 - DNA, 476 bp, Homo sapiens
  misc_feature (1)...(476): n = a,t,c or g
gnggnnnnnttnngnttnngntctgaaaaccctttgactttgaacccnnnnnnnnnnnnnnnnnnnnnnnnnnnnnnnnnnnnnnnnnnnnnnnnggcacgagagctgcctgcctgttgccaaaggtattatgcaaaagaatagaaaaaaagagttcattatccaacctgattttgtccattttgtggctagatttagggaacctgagtgtctgatacaaactttccgacatggtcaaaaaagccttccttttatctgtcttgaaaatctttcatctttgaaggcctacactctcgtttcttcttttaagatttgccaatgatgatctgtcagaggtaatcactgtgcatgtgtttaaagatttcaccactttttatggtggtgatcactatagtgaaatactgaaacttgtttgtcaaattgcacagcaaggggccacagttcttgattatcttttcatganaatttttagtagg

SEQ ID NO: 32855 - DNA, 454 bp, Homo sapiens
  misc_feature (1)...(454): n = a,t,c or g
tttgaaaccnnnnnnnnnnnnnnnnnnnnnnnnnnnnnnnnnnnnnnnnnnnnnnnnnnnnnnnnnnnnnnnnnnggcacgagnnnnnnnnnnnnnnnnnnnnnnnnnnnnnnnnnnnnnnnnnnnnnnnnnnnnnnnnnnnnnnnnnnnnnnnnnnnnnnngtcctaaaatttaaaagctaccaaattcttatctcaacttgattgctctttttgctcttactgtcgcccagcagcctatagaggatcttcagggcagcctcaataccctttgaatgcataaaacttaaacttttgatactatatgcacacatttggatctgtttgtgtttttattttttatttttgaattttctttttcttcatgtaccccacaggagacttaatggattctgttttcatttagcttttgcactcagctgtctctgcagaatagattcctaattaaaagaac

SEQ ID NO: 32856 - DNA, 476 bp, Homo sapiens
  misc_feature (1)...(476): n = a,t,c or g
gnnngnnnnnttngnntnngnntntgaaaccnnnnnnnnnnnnnnnnnnnnnnnnnnnnnnnnnnnnnnnnnnnnnnnnnnnnnnnnnnnnnnnnnnggcacgagcggcacgagctgaaagatgcagcagtggacaagacagagtatctgtcctcatgcagcttacattctagcaggagatacaatttacaaatatacaagcaaataatataatattatgccaggatagaaatgaacatgccatggttgacagtaataggaataacaggagacagggaagaggtggaaatttgtttctttttttaagtttgtgtttttaggtttacttacatacagtgactctccagattttaagttgacaactcagtgaataatttttgcttatgtgcacactctgaaacctccatgtagatcaaagaacaagctatttccaacttctcacctcccttccccaaaagctctcttaagacccctct

SEQ ID NO: 32857 - DNA, 464 bp, Homo sapiens
  misc_feature (1)...(464): n = a,t,c or g
tnnnnnntttggaaacccctatgtcatgatcncnnnnnnnnnnnnnnnnnnnnnnnnnnnnnnnnnnnnnnnnnnnnnnnnnnnnggcacgagtcaataccctgcaaaacaaatgttaccagtatttaatagatcaactttcacttcaacataaaatactcaatatattaaatatcaagatatcaaaaattttaaagattatgaacaaaatgtaagcttaaaattaacaaactttctaaagcaccaacttgtataggaacagcaaaattcaaatgagtttgactccctggtcaaaccagtccaactaaaagcctctgatatggaacagtctatatattgtatcccagtctctaaatctccctatttctactagactctagaactgcctgtccttacccaaactgtacacttcatataatggcatcaacctctattaagagtctcctcaagaaccaattttgtaa

SEQ ID NO: 32858 - DNA, 452 bp, Homo sapiens
  misc_feature (1)...(452): n = a,t,c or g
ttgaaaccnnnnnnnnnnnnnnnnnnnnnnnnnnnnnnnnnnnnnnnnnnnnnnnnnnnnnnnnnnnnnnnnnnggcacgagctgtcatggctgctgtcagtgagggcccgtaatggagatcgagtcaagggttgcccagggacacttaagagccttcggcttcaaggaggcctctcaaaggacaaaggatgagactgcctggcggcagagtgccccccacaatcgtaggaactgtgtcgccgcgcttcccgttaacttgccgctaagtttttctagaaaagtcgcccttcttgccaggggtgtcctatagactttgtcatggagtgaaacagaaacaaatgnnnnnnnnnnnnnnnnnnnnnnnnnnnnnnnnnnnnnnnnnnnnnnnnnnnnnnnnnnnnnnnnnnnnnnnnnnnnnnnnnnnnnnnnnnnnnnnnnnnnnnnnnnnnnn

SEQ ID NO: 32859 - DNA, 471 bp, Homo sapiens
  misc_feature (1)...(471): n = a,t,c or g
gnnnnnngnntttgaannccnntnnnnnttttgaaanccnnnnnnnnnnnnnnnnnnnnnnnnnnnnnnnnnnnnnnnnnnnnnnnnnnnnnnnnnnnnnnnnnnggcacgaggacagtggctgcgttaaagaagctgcattttgctccaacaagaccccttgggaaagtggcattgccttatgactgtttacagcaattgatattagctcagtttccattcgcctttctagataggaattttgtactaaaaatcttgaggtcagtcatgatttgtcctagggaaaacttaggccaccccaacccccagagaaggtgtgaggaggccctggggttctctcacctgggtctgcctgctggtgtttcccaatgtcccctgctcatgggtgacagcatgttgacattctgcagcgtgcttccggcccctccctctcaggatactggagccccctcgcaccccatctattgctat

SEQ ID NO: 32860 - DNA, 477 bp, Homo sapiens
  misc_feature (1)...(477): n = a,t,c or g
gnnnngnnnnnnttnngnttnngnatctnnnnnnnnnnnnnnnnnnnnnnnnnnnnnnnnnnnnnnnnnnnnnnnnnnnnnnnnnnnnnnnnnnnnnnattcggcacgagtcggaagtgaggccagggctccaggaagactccctgatgacgcactggcccgcagcccaggctcaggtagtgggggctgtcaggatgatctgtgggatcccccagtgtccgaagaaagaagccacaattgngnnnnnnnnnnnnnnnnnnnnnnnnnnnnnnnnnnnntggnncnnnnacnntttngcctttanggntaaatnanngggcccnnntnnaggntaatngaanctntggcntanggggtnaagngggncttccnnnttaaccntcccangaacnggnaatngaaacntnccctnacaancccnggtnanttttggcnttttnggggaaaaattttaannnaangggncaaaaaaaatcc

SEQ ID NO: 32861 - DNA, 462 bp, Homo sapiens
  misc_feature (1)...(462): n = a,t,c or g
gngnnnnnnnnnnattgaaantttgnnnnnnnnnnnnnnnnnnnnnnnnnnnnnnnnnnnnnnnnnnnnnnnnnnnnnnnnnnnnnnnnnggcacgagaggaacttcagccaacccggtcattgtggacaccattgttatggccaatctgggctactttcagctgaaagccaacccaggagcttggatcctcagacttaggaagggacgctctgaagatatttatagaatttacagccacgatggcaccgattctccccctgatgctgatgaggtggttatcgtcctcaacaacttcaaaagcaaaattattaaagtgaaggttcagaagaaggcagatatggtgaacgaagacttgctgagtgatggaacgagtgagaatgaatctggattttgggattccttcaaatggggctttacaggacagaagactgaggaagtgaagcnagataaagatgcttat

SEQ ID NO: 32862 - DNA, 443 bp, Homo sapiens
  misc_feature (1)...(443): n = a,t,c or g
tttgaaaacctnnnnnnnnnnnnnnnnnnnnnnnnnnnnnnnnnnnnnnnnnnnnnnnnnnnnnnnnnnnnnnnnnggcacgagcatatttcatttattattttgtctacttaattattgttttcttttatatcatgcaattgtgggttttaaaaatattctgtttataaaagatatgaaagtatgttatagaaaatttattagttaactgtagatatctaaagagtaaaagtttcaactctgaatttaataaaattatatcttaggaagcccagcagacttttattaagctacgtcttaaaaagataaatatactaaaaagagatacttaaaaagatgaattttcctttctatattaattacaatggatttttagataatatggaaatatataaaagtagtcagtgtttagacatttgaaaaattaatgggaatatatattt

SEQ ID NO: 32863 - DNA, 448 bp, Homo sapiens
  misc_feature (1)...(448): n = a,t,c or g
tttgaaannttgnnnnnnnnnnnnnnnnnnnnnnnnnnnnnnnnnnnnnnnnnnnnnnnnnnnnnnnnnnnnnnnnnggcacgagtgcagttagaaaagaaggccctggtagagaagtgttgggagctaagctgctctatctattctagtcacctgctccgggagtaaaagcccttgttgccgccctccctcccaggctgacccaggcaggttgtatctgtgagtgtttctagcatagcctggcccattaccaacaaggaagcaaatattcacctcctttctccttggtaatctcaagtaaacaggtgtttgttttagatgtcctgagatccaggccttccagaatggcctcatttccttaccagatcctgatgctggaagatcctccagtgtatgaatgaatggacaaagtggggttgcccatcatccaccttnagccttcggcact

SEQ ID NO: 32864 - DNA, 470 bp, Homo sapiens
  misc_feature (1)...(470): n = a,t,c or g
gngnngnnnnntnnnnnttgganntttganaacctnnnnnnnnnnnnnnnnnnnnnnnnnnnnnnnnnnnnnnnnnnnnnnnnnnnnnnnnnnnnnnattcggcacgagaaaaaaaagaaatgaaaccacacagaaaaataggcaaagaacataaacgtgcagttcccagaaaaagaaatacatgcatatgaccaacaagcagatgaaaacacaggactgagggaccatcttacagtcactgaattccatacaacgtaacaggtggaaaagactgacggggcgggacatagagcagcaggcagggtccttactggtggggcgcggggactgcaggctgcctggcaagcagggcctcacaccagtagggtctgtgatgtgtctgcaggtgatatacactgtgatcttgagaatttaaaagggtgtaaaaacatcatttatggatatatgtagtaaaggnattgagatccgg

SEQ ID NO: 32865 - DNA, 462 bp, Homo sapiens
  misc_feature (1)...(462): n = a,t,c or g
gngnnngnnnntnnnntttgnannttggaaaacnntatgacnnnnnnnnnnnnnnnnnnnnnnnnnnnnnnnnnnnnnnnnnnnnnnnnnnnnnnnnnnggcacgagatgaaaaggtatttccttaagagctaatcgtgtatttacccgatggttaatagagcattgttctatacttgtactggccatttatggttccggcttttggtatcctgttttatgaaacctttatttcctctgagatgagcattctgagcagacgctacgctctttgtcagctagcagctcgtgtgtttccctttcacatctggacctgcatctgctcacatttcacgtcccccgtgaatgctcggcttactggtggtgtttgcactgaggaccgtgtccgcgtggctccctctgntccctcctttgcaccaagggccatgttcacatggctgcctctggtccctcgttgnccttt

SEQ ID NO: 32866 - DNA, 463 bp, Homo sapiens
  misc_feature (1)...(463): n = a,t,c or g
gngnnnnnntnnnnnctttgaaacncctatgacnnnnnnnnnnnnnnnnnnnnnnnnnnnnnnnnnnnnnnnnnnnnnnnnnnnnnnnnnnggcacgagnnnnnnnnnnnnnnnnnnnnnnnnnnnnnnnnnnnnnnnnnnnnnnnnnnnnnnnnnnnnnnnnnnnnnnnnnnnnnnnnnnnnnnnnnnnnnnnnnnnnnnnnnnnnnnnnnnnnnnnnnnnnnnnnnnnnnnnnnnnntgttccctaaaataaattccctttgcattaggaaaaacataaatgacttagataaatctccattttgtttaataaaatatatcataatnnnnnnnnnnnnnnnnnnnnnnnnnnnnnnnnnnnnnnnnnnnnnnnnnnnnnnnnnnnnnnnnnnnnnnnnnnnnnnnnnnnnnnnnnnnnnnnnnnnnnnnnnnnnnnnnnnnnnnnncaggaaaaaaagaaaa

SEQ ID NO: 32867 - DNA, 466 bp, Homo sapiens
  misc_feature (1)...(466): n = a,t,c or g
gngnngnnnnntnnnntttgnanntttgaanaccnnnnnnnnnnnnnnnnnnnnnnnnnnnnnnnnnnnnnnnnnnnnnnnnnnnnnnnnnnnnnnnnnnnggcacgagggagtcgctgatgccataagtccccggttttgggggagttgaataaataagctttttgggggaatggtatttcccaggtggtggaatgggaaccatccctggggccatgtgtccccgaggcattggtcggttgagggctagtctcttggggccacactattcttcggctttgctggagtggaatgaggagcggtctggcttgaccaaacaagccaaggttagactggatctggggtggccattttgccgcgatcttagggtttcactttggttggtcacccccgggttcgggccgttggaggaggaagtctggctgggacgcacaggacaggttttttcccaaggcccagggaccgc

SEQ ID NO: 32868 - DNA, 437 bp, Homo sapiens
  misc_feature (1)...(437): n = a,t,c or g
tttgaaaaccgntatgacatgattacgaatttaatacnnnnnnnnnnnnnnnnnnnnnnnnnnnnnnnnnnnnnnnnnggcacgagggaacaatgaaaaggctagattttaactcctaattgccctctttagccaagtgcctctgtgcaatgcacaactgtaggaccatatccagagaccctggtctatactcagtgtgcccgagtcctgaccgctgagcaggcagcctcatcacccgtgagtatttagactttcattaagttgcttcaacctttgctgtgcctggtgtccctgagttggagctgctctgatttctccatggagtaggagcacagtggtcatctggctgcatgggaaggacaggggacctcagagccaataaatgccctggcttcagccccatgtctcacccatccttctattcaatccccaagcct

SEQ ID NO: 32869 - DNA, 458 bp, Homo sapiens
  misc_feature (1)...(458): n = a,t,c or g
ggtnnntnnnnnctttgaaanccctatgacnnnnnnnnnnnnnnnnnnnnnnnnnnnnnnnnnnnnnnnnnnnnnnnnnnnnnnnnnnggcacgagaactggaatatctcaaggacaggagaaagacagtgtggctgaaaaagtacttaaagaaataatgagnnnnnnnnnnnnnnnnnnnnnnnnnnnnnnnnnnnnnnnnnnnnnnnnnnnnnnnnnnnnnnnnnnnnnnnnnnnnnnnnnnnnnnnnnnnnnnnnnnnnnnnnnnnnnnnnnnnnnnnnnnnnnnnnnnnnnnnnnnnnnnnnnnnnnnnnnnnnnnnnnnnnnnnnnnnnnnnnnnnnnnnnnnnnnnnnnnnnnnnnnnnnnnnnnnnnnnnnnnnnnnnnnnnnnnnnnnnnnntgcctctagcttgggtgacagagtaagaccctgctgggaaaaaacnaaaaacaaaaaa

SEQ ID NO: 32870 - DNA, 451 bp, Homo sapiens
  misc_feature (1)...(451): n = a,t,c or g
tttggatntntgaaaacctnnnnnnnnnnnnnnnnnnnnnnnnnnnnnnnnnnnnnnnnnnnnnnnnnnnnnnnnnnnnnnnnnggcacgagcactgatgaaagccaagcagagttgtaaattgggactggtatttcagctgtactcagcaggtgttcaaaaaaaaaatgcatactgaataaaaggaacaaccaatgaataagttcatttttcattggtgcttgctcgagtaaacaatgactacctttcaaaaaaaatcatggatatatacatctgtatccactaccctggccctggcactgagttagaaatgggaaattcaacaactattaagtcgggtactatacatttgtgcagatagaactaatgccttcagagacaggggaaatatatctatatataatatacccangaaatttagacnttaggaaaagatgancaagccncattt

SEQ ID NO: 32871 - DNA, 447 bp, Homo sapiens
  misc_feature (1)...(447): n = a,t,c or g
tttgaaaanntgtatgacctgattacgaatttaatacnnnnnnnnnnnnnnnnnnnnnnnnnnnnnnnnnnnnnnnnnggcacgagaaatgtgtaatgtatttgtgcttttcttcagtcttcaaaaggactagttattgcttttataaatttcttccatattttatgcttgacgttatgcatggtacagaaatgtctttgtaaaattggaagagctgtctactgtgtggaaaaggtgtttgagtctagaacacaggatttaatatatgtgtggatgactaagagtctgcttttgtaatcatttgaaatgcttcccctccctgttgtattattattttttgcattattttcagatttatttggttggagaacacatttttgaggagaatcattctgtgaaaaaaaaggactggacatacntaactcaagaaagaaaagaaagnggtac

SEQ ID NO: 32872 - DNA, 462 bp, Homo sapiens
  misc_feature (1)...(462): n = a,t,c or g
gngnnngnnnntnnnntttgganattgaaancnnnnnnnnnnnnnnnnnnnnnnnnnnnnnnnnnnnnnnnnnnnnnnnnnnnnnnnnnnnnnnnnnnnggcacgagctgggggaaccactgctaatgataatagttgagtgggaattcttacgctttttaaaatgaggtaaaattcagataacatgaaatgaaccattaacgtgtgcggcttgggagtcgttggcctccccagtgctgcgtggctgtcccggggttctcgtcagcctccccggtgctgcgtggctgtcccggggttctcctaggcacctgcaggactgtgcagttctggctttgtctttcctgaaatgccatcacggtgtatgcacagtttagcatctcttttcattttgtatgttaattgaggttaactttattctttttgatgcctgnacagttttttggttggttggttggtttttga

SEQ ID NO: 32873 - DNA, 458 bp, Homo sapiens
  misc_feature (1)...(458): n = a,t,c or g
gnggtnnnttnnnnctttgaacccnnnnnnnnnnnnnnnnnnnnnnnnnnnnnnnnnnnnnnnnnnnnnnnnnnnnnnnnnnnnnnnnnnggcacgagtcgacagagacttaagaatgttcatagaccaactccaagctgcaaaatgaaagtaccgagaggaaggtgggccatctgagagccgcctttatcccagatctggaagaaacccacatctaggtgtgaaagtggcaaaaggagggccggggcctgcctgccactgaggcccagcggctgcctgcgagggtcagtggtgtcgtagcctgctgccgccacacagagggatttgcagggaagggccttagccaggcatgatgtgggagccgttggccctggcattcccgggtcttcatgagcttaattcagcaggggctccttcttcagtgatggaatctggagtttctgactgattcttaccaa

SEQ ID NO: 32874 - DNA, 443 bp, Homo sapiens
  misc_feature (1)...(443): n = a,t,c or g
tttgatanctgnnnnnnnnnnnnnnnnnnnnnnnnnnnnnnnnnnnnnnnnnnnnnnnnnnnnnnnnnnnnnnnnggcacgaggataacgtgtgtttttcatcctttgatcagacaaacaaaagcaaacaaaacaatcttcaccaagttttaaacaannnnnnnnnnnnnnnnnnnnnnnnnnnnnnnnnnnnnnnnnnnnnnnnnnnnnnnnnnnnnnnnnnnnnnnnnnnnnnnnnnnnnnnnnnnnnnnnnnnnnnnnnnnnnnnnnnnnnnnnnnnnnnnnnnnnnnnnnnnnnnnnnnnnnnnnnnnnnnnnnnnnnnnnnnnnnnnnnnnnnnnnnnnnnnnnnnnnnnnnnnnnnnnnnnnnnnnnnnnnnnnnnnnnnnnnnnnnnnnnnnnnnnnnnnnnnnnnnnnnnnnnnnnnnnnnnnnnntgccatctc

SEQ ID NO: 32875 - DNA, 447 bp, Homo sapiens
  misc_feature (1)...(447): n = a,t,c or g
tttgaanntntgaaaaccntatgacnnnnnnnnnnnnnnnnnnnnnnnnnnnnnnnnnnnnnnnnnnnnnnnnnnnnnnnnnnggcacgagcggcacgagcttcaagcttctgatgtttctgttaagtatcgagaaaaacgcttggagcaagaaaaggaattgctacatagtcagaatacatggctgaatacagagttgaaaaccaaaactgatgaacttctggctcttggaagagaaaaagggaatgagattctagagcttaaatgtaatcttgaaaataaaaaagaagaggtttctagactggaagaacaaatgaatggcttaaaaacatcaaatgaacatcttcaaaagcatgtggaggatctgttgaccaaattaaaagaggccaaggaacaacaggccagtatggaagagaaattccacaatgaattaaatgcccacataaa

SEQ ID NO: 32876 - DNA, 443 bp, Homo sapiens
  misc_feature (1)...(443): n = a,t,c or g
ttgannttgataaccntatgacnnnnnnnnnnnnnnnnnnnnnnnnnnnnnnnnnnnnnnnnnnnnnnnnnnnnnnnnnnggcacgagagggaagagaaacataggttgagtggccttccagctggcaacttacggtcaccatgcctaactgccatgcctatgggaggccggaggtcaaactggaggtccccagtgggctgtcccatggccagtaaacgatggaggggggaaaagcagtagcagccttttgtgacatggaaactgtgcctggctgtctttgcccgtgagtttttatgagttttctaggattcctctgtgggaatcttctcatactaaagctagggagactgtaaaaaaccatcctcggaacttgtacaagcttcttcccttcccacctcagcctgctggggcatctaaggaacactgcacaatgnattcactt

SEQ ID NO: 32877 - DNA, 176 bp, Homo sapiens
  misc_feature (1)...(176): n = a,t,c or g
anaccnctatgacatgattacgaatttaatacnnnnnnnnnnnnnnnnnnnnnnnnnnnnnnnnnnnnnnnnnggcacgagggagaatgaggtagaaatgaattcagaaagacagaaatattaacaaattactactaaagttttcttttttcttttctcttctttttttttttttt

SEQ ID NO: 32878 - DNA, 447 bp, Homo sapiens
  misc_feature (1)...(447): n = a,t,c or g
tgganntttgaaaaccnnnnnnnnnnnnnnnnnnnnnnnnnnnnnnnnnnnnnnnnnnnnnnnnnnnnnnnnnnnnnnnnnnnggcacgagctgggatcaaccagacatatagatcacctttaggctccacagcctctgccccagcaccctcagcactcccggcccctccagcacccccagtcttccatggcatgctggagcgggccccagcagagccctcctaccgtgctcccatggagaagccttctacttacctcatgtctgcagctatacctgtctgtctcgagtcagacctatgaggaatgagcagtaccggggcaagaaccctctgctggtcccgttactatatgacttccggcggatgacagcccggcgtcgagttaaccgcaagatgggctttcatgntatctataagacaccttgnggtctctgccttcggacaatgg

SEQ ID NO: 32879 - DNA, 445 bp, Homo sapiens
  misc_feature (1)...(445): n = a,t,c or g
tttganntntganaaccttatgacatgacnnnnnnnnnnnnnnnnnnnnnnnnnnnnnnnnnnnnnnnnnnnnnnnnnnnnnggcacnnnnnnnnnnnnnnnnnnnnnnnnnnnnnnnnnnnnnnnnnnnnnnnnnnnnnnnnnnnnnnnnnnnnnnnnnnnnnnnnnnnnnnnnnnnnnnnnnnnnnnnnnnnnnnnnnnnnnnnnnnnnnnnnnnnnnnnnnnnnnnnnnnnnnnnnnnnnnnnnnnnnnnnnnnnnnnnnnnnnnnnnnnnnnnnngattacagacatgagccgctgcgcccaggcctagttttattttttactctgcctcttgcaccccagcccttaagcattcttatgaaaacagcaactgatgggaacctgagacttccagaaaaangggaacttgattagaagaattttggttccaagggggtaaagg

SEQ ID NO: 32880 - DNA, 443 bp, Homo sapiens
  misc_feature (1)...(443): n = a,t,c or g
tttgaantcctgaaacccttatgacnnnnnnnnnnnnnnnnnnnnnnnnnnnnnnnnnnnnnnnnnnnnnnnnnnnnnnnnnnggcacgaggtgggctggagtcccagggggagattattccaagtaggggctccagaaaggtgagtgatgtgtttgggtctatgggaaggttggtggcccccaaagagaggtggctgggttactgctgaacagctatcagggtgatatggctttgcaggggtccagtccatgggcctgacatgttgtagctatgctttgaaggcattttcctggtgggaggccaccgcaggtaaggggagtgaaagggtggctgtggcggctgttccctgtggctggtggccatggataagtgaagaggaacctgatgctnggcaccatgctggtggtgccnngngcaaaaanctggccttntggggctgtg

SEQ ID NO: 32881 - DNA, 443 bp, Homo sapiens
  misc_feature (1)...(443): n = a,t,c or g
gcgggtnngttntgccacgagaantntntgacctgacnnnnnnnnnnnnnnnnnnnnnnnnnnnnnnnnnnnnnnnnnnnnnnnnnnnnnggcacgagattgtgatgaagaaactagagactcagtatttttacttgaattacagcaacctaaataggattttttttggtctttttttttttncnttttnanggaaancagggtntnnntntntngcccanccnggnntaaaantccgggcntaannntntcntccnacnttngcntccttaanaccngaanttncgggnggnancnacnggncccagntanntnggattttttnaaccnccaanttttntaccagggnaangggnannnaaaaaggggnttccananncaancatggnagaannccccntttnancncaggggnggattccnngngncagnatttnnaggca

SEQ ID NO: 32882 - DNA, 443 bp, Homo sapiens
  misc_feature (1)...(443): n = a,t,c or g
tttgaantctgatacctnnnnnnnnnnnnnnnnnnnnnnnnnnnnnnnnnnnnnnnnnnnnnnnnnnnnnnnnnnnnnnnnnggcacgagatccttttcttaggtaggtaacttattcactataatgttgagcaaaattgtggagctattgctgtgtatcacacattgtccacaaatttaatgacataaaacacaaactattatttttcatgaatccttgaataaactgggcagctgtgctggtctaggccagactctggactctcatatgtctgtggtcagctggcaggtcagctgggcctggctggtccaagatgtggctggctagtcttaaggcctagtctcagaactggcacatcatcacttcttgctgcagtcttttggccaaagcaagtcacactcctagcccagattcaagaggtgaggaaataaagtccgccact

SEQ ID NO: 32883 - DNA, 452 bp, Homo sapiens
  misc_feature (1)...(452): n = a,t,c or g
gnggtnnnttnnncctctgaaacccctatgacnnnnnnnnnnnnnnnnnnnnnnnnnnnnnnnnnnnnnnnnnnnnnnnnnnnnnnnnnnggcacgagacatagaggtaggaagagatgtgctggttcacagttttgtgagccacataatttctgttgcagctacccagttctgctgttgcaacacagagacaaccatagacgatatgtaaatgaatgggtgtgagtggctgtgtcccaataaaactttatttacaaaaacagcctgtggccaggtttggcccacaggctatcatttgccaattcatggtctttagtcaatctcctaattataatgcttttcaactttttaaaatagactttattattatttttagagcagtttcaggtttactaagtggaaggtacagggatttcccacatgccccctgtcccccaaatccataccttcct

SEQ ID NO: 32884 - DNA, 444 bp, Homo sapiens
  misc_feature (1)...(444): n = a,t,c or g
tttgaannnngaataccntatgactgacnnnnnnnnnnnnnnnnnnnnnnnnnnnnnnnnnnnnnnnnnnnnnnnnnnnnnggcacgaggttgtttaatatggtgccttgcagccaggtgtttagtattgcatttggtttcttggtatttggaatttttatggtcgtcattacagtaggaagtttcaagggaatcattttatggtatatattttacttcttactcattccttggcttccaactctacaagactcacttacctttacctttgtgaattacgtgcaaatattttcaaacccttctttgtgttctaattgtttttggcttccatatgctacagcagagccaagcagaatagaaaagtaagttttaaataaaaatcagaaactattggatttgccaaacgctttctccttcatttatttgggaaataagtcttgtatt

SEQ ID NO: 32885 - DNA, 465 bp, Homo sapiens
  misc_feature (1)...(465): n = a,t,c or g
ggnnnngggncgnnggtntgtanccttngngancctatggaataccctcctnttgggaatntggccctngaggccaagaattcggcacgagtgtttgtgtatttattatttatttttctttcgtggatttattaattcttttattttataatccttattaaagaaagagtacatacacattgtagaaagttaaaatatacagagaagcaaactttttaaaaagaactttacattcctactgccctgaagtcaccagaattagcatcttatgcaggatttcatattctgaatttcatacctgtatgtgtatgtatgtannnnnnnnnnnnnnnnnnnnnnnnnnnnnnnnnnnnnnnnnnnnnnnnnnnnnnnnnnnnnntttcaatgaatatattgaaaattttggggggatttgtgaaaatttgaaaaaactcatagaggaatcacaaagcctanaaatctaaa

SEQ ID NO: 32886 - DNA, 471 bp, Homo sapiens
  misc_feature (1)...(471): n = a,t,c or g
gngnnnnnngnntnnnnnntttggaaacccttttcggatnnnnnnnnnnnnnnnnnnnnnnnnnnnnnnnnnnnnnnnnnnnnnnnnnnnnnggcacgagnnnnnnnnnnnnnnnnnnnnnnnnnnnnnnnnnnnnnnnnnnnnnnnnnnnnnnnnnnnnnnnnnnnnnnnnnnnnnnnnnnnnnnnnnnnnnnnnnnnnnnntaaaaaaattagcctgcaccaccatggctgactaattttttttttaataaaaaatttttattgtaatagttattttttgagttaaaatttatatgtgtgtatgtttaatcaactttattgaggtataannnnnnnnnnnnnnnnnnnnnnnnnnnnnnnnnnnnnnnnnnnnnnnnnnnnnnnnnnnnnnnnnnnnnnnnnnnnnnnnnnnnnnnnnnnnnnnnnnnnntcactgtcagcatctgaaatagagaatataggagagcag

SEQ ID NO: 32887 - DNA, 451 bp, Homo sapiens
  misc_feature (1)...(451): n = a,t,c or g
tttggaancccttttggnatncnnnnnnnnnnnnnnnnnnnnnnnnnnnnnnnnnnnnnnnnnnnnnnnnnnnggcacgannnnnnnnnnnnnnnnnnnnnnnnnnnnnnnnnnnnnnnnnnnnnnnnnnnnnnnnnnnnnnnnnnnnnnnnnnnnnnnnnnnnnnnnnnnnnnnnnnnnnnnnnnnnnnnnnnnnnnnnnnnnnnnnnnnnnnnnnnnnnnnnnnnnnnnnnnnnnccgatgacaactttaatttcgattatgaagaaaagaaacaaactaacaccaagcactcttcatcattcccccacattttgattttttgatgtctcagtttatatctttttatattgccatttcttaacaaattgttgtggtcatttttctttttttcatactttaagttccaggatacaaatacagaacgtgtaggtttcagcccatcatctgg

SEQ ID NO: 32888 - DNA, 417 bp, Homo sapiens
  misc_feature (1)...(417): n = a,t,c or g
nnnnnnnnnnnnnnnnnnnnnnnnnnnnnnnnnnnnnnnnnnnnnnnnnnggcacgagaaatctcttattgctgactatacatttcagatatgtcagatgtgtaatccagagagtaaattcactcactgtattttcagtgatattttaaaattcatttatcagtaggatcattctgttctagacaagttggctatattataaaacattaagcaagcaggcactaagttaaatattgtagcagttgaaatttaatgctaatcttacagttttacacagttaacaatctaggccaaatctattgatacctttggaactaccctttaaattccatcctatgcttgtgaaaaggttgcatataatttcttttcctttttctctcttctcttcctcttcttttttctttttctttttctatt

SEQ ID NO: 32889 - DNA, 452 bp, Homo sapiens
  misc_feature (1)...(452): n = a,t,c or g
tttgaaaccctntgnnnnnnnnnnnnnnnnnnnnnnnnnnnnnnnnnnnnnnnnnnnnnnnnnnnnnnnnnnnnnggcacgaggagcttttgaccagaagcaagtggacatggatttgagcttcgggtaagaagggagacttctctccagggaccataggggctggcagctgaagaaggtgacttggcccctctctagagggtgaacgcaggatcaattcaaggccatgaagtggatgcagctgggagagcctgcttggtgcttttaaacctcaacatgtcaaccgcaaatacctcaaacactgctcacaccgtggtaaaatctagttgcgaaacctgtcccgtggcagccttctccatcccaggtgcccaggccccatctcctgggagcaggcagctctccccaccccgattcatgtccctcctacagcccaaggcaactccctgccacct

SEQ ID NO: 32890 - DNA, 442 bp, Homo sapiens
  misc_feature (1)...(442): n = a,t,c or g
atttgaaaaccnnnnnnnnnnnnnnnnnnnnnnnnnnnnnnnnnnnnnnnnnnnnnnnnnnnnnnnnnnnnnnnnnnggcacgaggatggtttgaaataccattacctcatcaggctcacgaagatagctccccaactctccactgaagaactggtgtctcttggcgagaaaatggtgacagctttcactacttgctgtacgctaagtgaagagtttgcctgtgttgataatttggcagatttagtttttggagagttatgtggagtaaatgaaaatcgaactatcaaccctgctgtggaccactgctgtaaaacaaactttgccttcagaaggccctgctttgagagtttgaaagctgataaaacatatgtgcctccacctttctctcaagatttatttacctttcacgcagacatgtgtcaatctcagaatgaggagctt

SEQ ID NO: 32891 - DNA, 393 bp, Homo sapiens
ctcgaggccaagaattcggcacgagcagaccatggagagctggccatggaacatcgacagttttataaaatgagcatgtacgaggctagtgcacatgttccgcttttgatgatgggaccaggaattaaagccggcctacaagtatcaaatgtggtttctcttgtggatatttaccctaccatgcttgatattgctggaattcctctgcctcagaacctgagtggatactctttgttgccgttatcatcagaaacatttaagaatgaacataaagtcaaaaacctgcatccaccctggattctgagtgaattccatggatgtaatgtgaatgcctccacctacatgcttcgaactaaccactggaaatatatagcctattcggatggtgcatcg

SEQ ID NO: 32892 - DNA, 444 bp, Homo sapiens
  misc_feature (1)...(444): n = a,t,c or g
ttgaaaccctattacatgacnnnnnnnnnnnnnnnnnnnnnnnnnnnnnnnnnnnnnnnnnnnnnnnnnnnnnggcacgagatttaaatgttttttatggctggatgcggtggctcacgcctgcaannnnnnnnnnnnnnnnnnnnnnnnnnnnnnnnnnnnnnnnnnnnnnnncatttgttttctaaaagaattgtatttcttttcttcttcagagtacttttctcaggttataattttgccttctctggtaggattacagtgtagcttaatttgttaatatttgtttcaaagaccttagagattcaggctggcatggtccatgtctttttcacatcctgttgactcatagcacatttctcagcccttggcacctaatagccagaaagtagaagatgaatgaatgaatgaatgaatgaacgaactcacccttagatctgccag

SEQ ID NO: 32893 - DNA, 437 bp, Homo sapiens
  misc_feature (1)...(437): n = a,t,c or g
attgaaaaccctatgacnnnnnnnnnnnnnnnnnnnnnnnnnnnnnnnnnnnnnnnnnnnnnnnnnnnnnnnnnnggcacgagaaaattgttaaagttgcagtggaggtacttttacttcttggacatggttagcctgtgatacacttgtaaaagattaaaacttaaatgtctctctactaaaccccaactgagcatttctggctttgtggcatctgatcatttcattcaagtatggatttattggaaattttccttttagcaaattttttcctacatattgacaaattttaaaatgtgggttaaactcttggtgtgaacctacaaatctgctttgtagtcactctcctcagctcactgtttttcctagattctgcagcaaatatggtatgtaagaacattcactgttctgaggccctgatttaaaagaaataaata

SEQ ID NO: 32894 - DNA, 443 bp, Homo sapiens
  misc_feature (1)...(443): n = a,t,c or g
aaaccnnnnnnnnnnnnnnnnnnnnnnnnnnnnnnnnnnnnnnnnnnnnnnnnnnnnnnnnnnnnnnnnnnggcacgagctgcttgatggaaaattttacaataaatatgtggaaacatgcactgaacagtctgtgtataaatagtacattgagaatggtacatttttgtcaatttttatttagttaactaaatttttagtaaaccattaggttaagaagaaannnnnnnnnnnnnnnnnnnnnnnnnnnnnnnnnnnnnnnnnnnnnnnnnnnnnnnnnnnnnnnnnnnnnnnnnnnnnnnnnnnnnnnnnnnnnnnnnnnnnnnnnnnnnnnnnnnnnnnnnnnnnnnnnnnnnnnnnnnnnnnnnnnnnnnnnnnnnnnnnnnnnnnnnnnnnnnnnnnnnnnnnnnnnnnnnnnnnnnnnnnnnnnnnnnnnnnnnnnn

SEQ ID NO: 32895 - DNA, 445 bp, Homo sapiens
  misc_feature (1)...(445): n = a,t,c or g
ttgaaaccctnttnnnnnnnnnnnnnnnnnnnnnnnnnnnnnnnnnnnnnnnnnnnnnnnnnnnnnnnnnnnnnggcacgagggaaaatttgtcctacagtgataactttgttaaaaagaattatgtgacctctgtctctggccatgatagagggattaaattggtaccaaattagcactcccactgtaaggaactgtaaaactggatacaatagttgaagctactgttttccagcagtggacaacaggcagcataatactattatccctgacataaatgaactcgtgaggtattcctcacgattgcgcaaagactggggcagttcctgactctgatgcagaaagctagagtgaaagcagagctggactacctgcagcagctggaatatgcagggcttggcattggagaggagggaattgtgcagagagagggcataaagtgcct

SEQ ID NO: 32896 - DNA, 443 bp, Homo sapiens
  misc_feature (1)...(443): n = a,t,c or g
aaacccnnnnnnnnnnnnnnnnnnnnnnnnnnnnnnnnnnnnnnnnnnnnnnnnnnnnnnnnnnnnnnnnnnggcacgagcttaactaaaacttcagctgttctgtgtcctttactttgtgattggaacaaaactttaattttgatgtgtcttcaactatcctgcctttttcttagttgctgtagtttttcattaaccttttttttttnaaaacanagtctnactntgtnacccaggtngnaangcagngatgngatcccagtnnnnnnnnnnnnnnnnnnnnnnnnnnnnnnnnnnnnnnnnnnnnnnnnnnnnnnnnnnnnnnnnnnnnnnnnnnnnnnnnnnnnnnnnnnnnnnnnnnnnanactttttggggaaacagggtnnnnnnnnnnnnnnnnnnnnnnnnnnnnnnnnnnnnnnnnnnnnnnnnnnnnnnnnnn

SEQ ID NO: 32897 - DNA, 471 bp, Homo sapiens
  misc_feature (1)...(471): n = a,t,c or g
ttgacccccctttggacaccntnnnnnnnnnnnnnnnnnnnnnnnnnnnnnnnnnnnnnnnnnnnnnnnnnnnnnnnnnnnnnnnnnggcacgagatagaaagggccagctcctgctgcaagaggatagatctgaattatttttctaagtgttatgtaaagctattggagagttttaagggggaaaagtggaggagaagggaatgtgtcattcactctgtgtccctattgcttggcacataacaggtgctcagaaactggatgaatgagctgagataatgcatatcaagtgcttttgaaacaatgaagtgtttcagaaatgacactcatcatcagttggaggagaataagacactgcccccaataccattcttttagatcacaaagctattacagatttctgggtaatgagggtggaaatctagaggcacctgattttttacagtgccttatttctgttaaaataatttca

SEQ ID NO: 32898 - DNA, 458 bp, Homo sapiens
  misc_feature (1)...(458): n = a,t,c or g
ctttggaanaaccgtnnnnnnnnnnnnnnnnnnnnnnnnnnnnnnnnnnnnnnnnnnnnnnnnnnnnnnnnnnnnnnnnnggcacgaggagagagnnnnnnnnnnnnnnnnnnnnnnnnnnnnnnnnnnnnnnnnnnnnnnnnnnnnacacctgtnnnnnnnnnnnnnnnnnnnnnnnnnnnnnnnnnnnnnnnnnnnnnnnnnnnnnnnnnnnnnnnnnnnnnnnnnnnnnnnnnnnnnnnnnnnnnnnnnnnnnnnnnnnnnnnnnnnnnnnnnnnnnnnnnnnnnnnnnnnnnnnnnnnnnncaaaccaaaacaaatccttccttactccactgatggtgagcttggatacacgacttgctacaaaggccaatgaagtattaactgatctganaggaagagaagcttaaacatgtttgtgctgtttntcttgccccttgaattcatcccttgagt

SEQ ID NO: 32899 - DNA, 453 bp, Homo sapiens
  misc_feature (1)...(453): n = a,t,c or g
cttgganaaccgttatgacnnnnnnnnnnnnnnnnnnnnnnnnnnnnnnnnnnnnnnnnnnnnnnnnnnnnnnnnnnggcacgagctggcattggccactgaagggtacaaaggcaaaaggaccacagcaccacttaggtgtagcatggattttaaactgcagtcagtatcagatcctgtttgataaataagctgactgttctctcttgagaacctgtggcctcaaccagccaccaagctgatgtggcccaagtccatctcttggtcttctcctttgaagcacagcctatttctgagccaagggttggggaagcctgtctagatgtgggactcattgccccaaaccagggagaggaagagctcccacagggagagcccaggctctctttgcagcctttcccagtttggtgtttaagcagtgccatgttccttgtttgacaacaagacagtctg

SEQ ID NO: 32900 - DNA, 458 bp, Homo sapiens
  misc_feature (1)...(458): n = a,t,c or g
tttgacacccctttgactgcnnnnnnnnnnnnnnnnnnnnnnnnnnnnnnnnnnnnnnnnnnnnnnnnnnnnnnnggcacgaggtgagaaacaatggtccaggtgagaggtaattgtggctttgaaaaggtatgtcatttgtggccgggctcggtggctcatgcctataannnnnnnnnnnnnnnnnnnnnnnnnnnnnnnnnnnnnnnnnnnnnnnnnnnnnnnnnnnnnnnnnnnnnnnnnnnnnnnnnnnnnnnnnnnnnnnnnnnnnnnnnnnnnnnnnnnnnnnnnnnnnnnnnnnnnnnnnnnnnnnnnnnnnnnnnnnnnnnnnnnnnnnnnnnnnnnnnnnnnnnnnnnnnnnnnnnnnnnnnnnnnnnnnnnnnnnnnnnnnnnnnnnnnnnnnnnnnnnnnnnnnnnnnnnnnnnnnnnnnnnnnnnnnnnnnnnnnnnnnnnnatat

SEQ ID NO: 32901 - DNA, 458 bp, Homo sapiens
  misc_feature (1)...(458): n = a,t,c or g
tttgaacaccccttnnnnnnnnnnnnnnnnnnnnnnnnnnnnnnnnnnnnnnnnnnnnnnnnnnnnnnnnnnnnnnnggcacgagcctggattgggcaaaggagtcagtcctgtgagcaaataatgacagaactgcaagtgctgtgaccttaagtactagtatccttcactgaaccggagccatacgttgatttaaagggaggtcagccatggctttcctgaggtggtagggttgaacagagtctgaaagatgtgtggtagttagctaggcagtggagggctgcaggtccccttcaccaggaggtgcggaagagcaggtaggtttgctgaaagcactagaacctgggagtcctgagcaagcaatttctatcttctcctttccctaagccctagagttggcttancgggtaggaggtggagggagcatgccaacaggagcagtggtgagtgattgctgg

SEQ ID NO: 32902 - DNA, 450 bp, Homo sapiens
  misc_feature (1)...(450): n = a,t,c or g
ctttggannnnnnnnnnnnnnnnnnnnnnnnnnnnnnnnnnnnnnnnnnnnnnnnnnnnnnnnnnnnnnnnnnnnnnnnggcacgagctgaatatgcagtctccttgacttgcagtgttctctctctccctctttctctggtgggccatctggttgtttagatattagtttaaaggtgacctaattcagggacatttctttggacaccctacccaaggaggtctctgctatttctctctagcctagtgctgtgtattttgtacttggtgcttacttacaaatggcacttaccttatttccttgtgtattgccttgcctcatccactggagtctagtgaccagacagtaagcctcaggaaggctgggacctggtgggtcttagtccccctgtttccaagtatctggtgcagagtccaagctcactgtggacagagtgaatgtccccactac

SEQ ID NO: 32903 - DNA, 454 bp, Homo sapiens
  misc_feature (1)...(454): n = a,t,c or g
tgaanaccccttnnnnnnnnnnnnnnnnnnnnnnnnnnnnnnnnnnnnnnnnnnnnnnnnnnnnnnnnnnnnnnnggcacgaggaaaaaataaattaagtctcacatataaagtaaatacactaaagagttaaagatttgtgtaggatctaaaagtcttccttagtccagtctccattactgtgttctagagtgatgatacccagtgttgcctgcccacctccttgctttaccttcctcatcaagtctcaagtcctttgtgttaaactacatgtcattttgtagtttaacatatcatttgtccatttataggatccattgatagttttcatgaatcgtggaacgatttatcttttcagaaacagataaatggttccgtgattcatgaaaactaccagtggatagagttggtanaactgtggtgtgactggcattaattgtatgttttcatcttc

SEQ ID NO: 32904 - DNA, 448 bp, Homo sapiens
  misc_feature (1)...(448): n = a,t,c or g
anccctttgacnnnnnnnnnnnnnnnnnnnnnnnnnnnnnnnnnnnnnnnnnnnnnnnnnnnnnnnnnnggcacgagcccaagccgagttcagagaacggctccacagtcttgccagaccacccaggccctgagtccctggcatccagtgatggatcaccaacctcactatggcccaagaacatccaactctggtcttgtgcagggctttcaaaagatgatctcgtatcgcttttagaagacattttctctgcagagagaccttttctttcatttaaggaggctggctgacatgtgtctgggaagcttgctaactgagttccctgcagccctgtttctttggaacctacatacaattctaattcagctatgctttctctttcttcacaggtctctggctttgagtgtgaattttcttcacggtttacaagtatgtaatccatgtgtag

SEQ ID NO: 32905 - DNA, 352 bp, Homo sapiens
  misc_feature (1)...(352): n = a,t,c or g
ctttnaccccctttgacacctnnnnnnnnnnnnnnnnnnnnnnnnnnnnnnnnnnnnnnnnnnnnnnnnnnnnnnnnnnnnnnnnnggcacgagcggcacgagnnnnnnnnnnnnnnnnnnnnnnnnnnnnnnnnnnnnnnnnnnnnnnnnnnnnnnnnnnnnnnnnnnnnnnnnnnnnnnnnnnnnnnnnnnnnnnnnnnnnnnnnnnnnnnnnnnnnnnnnnnnnnaaaccacaaaatgtagtaataagaaaaaagctaaatgcaaaatgtgcatatgaccatactgaaaagcttccctgcttttatatgtgtgtgaaggtgtaaacttttttgtctttttttttttttt

SEQ ID NO: 32906 - DNA, 448 bp, Homo sapiens
  misc_feature (1)...(448): n = a,t,c or g
ctntgaacaccgtnnnnnnnnnnnnnnnnnnnnnnnnnnnnnnnnnnnnnnnnnnnnnnnnnnnnnnnnnnnnnnnnnggcacgaggaaattagccgccgaagggaagggcccggagagcttgggaagcgacctaggctgccagcctcccggcgggtctttggtcccagctctgatgacctgtcagcagccgcaggacctgcgcttaaaggcgcctctccaggcctggctcagggtggggctcctcgtgctcagcaccctggtcaaggttagggctgggtgtgcgctggaggcttggagtgccagggcacccagtgaagagcgaatgaatgaacgagtgaacaccggactgggggcctgcagacggttcttcgcaggttaattagaaggcctntagcaagctgcagcggaggcatttcaggcatccttnagagaggaccctcggcctg

SEQ ID NO: 32907 - DNA, 456 bp, Homo sapiens
  misc_feature (1)...(456): n = a,t,c or g
tttgaacacccnttnnnnnnnnnnnnnnnnnnnnnnnnnnnnnnnnnnnnnnnnnnnnnnnnnnnnnnnnnnnnnnnggcacgaggaagcaaattgtgtaattatcagatttcaatataaaggagatataatgaccaatctttatgcaccaaagcacacagttgctaaatatgtgtaatacaattaaaacagaaacaagaggaccttggtaaaatagtgatagtggcagacttttctcataagtggataaatctagtagacaataaagacatatacaaaaattacagtcaatataattgatttaatagatgtttatgctccttaagagaatatacatttattgctatggttcaggaatatttgtaaaaattgaacatgtacttagccacaaagaaaattattttttattagccgggcaaggtggcatttgggagcccgaggcaggtgaatcatggg

SEQ ID NO: 32908 - DNA, 459 bp, Homo sapiens
  misc_feature (1)...(459): n = a,t,c or g
tttgaaccccctttgaacaccgtnnnnnnnnnnnnnnnnnnnnnnnnnnnnnnnnnnnnnnnnnnnnnnnnnnnnnnnnnnnnnnnnnggcacgaggaattgtcggtttacaactgaaggcatctccttccagagggaaagctggcctccctcatcaaagacttgcaacgtatgtgaaagagcaagtgacagacgtaagaatgggggtagagggcattgagatgtggtccgtgggattgcaggtgtaaaggaaaatgacactcttagccgacttgctccttcaaacaaagtcagctatgagtctgtcctgcggatgttacttttcagtaaagccagacttgtcctggctcccctccagagccgtttccttcacctggcagccatcctgggcttctgagtaggcggatgggaggcaaggaaaggccgcctggcacggtggggatagagccagggccccga

SEQ ID NO: 32909 - DNA, 451 bp, Homo sapiens
  misc_feature (1)...(451): n = a,t,c or g
tgaanaccccttnnnnnnnnnnnnnnnnnnnnnnnnnnnnnnnnnnnnnnnnnnnnnnnnnnnnnnnnnnnnnnnggcacgagctcagaagaaagtgtggctttgaggatttccagcctcacttttattatctgtctctttaggaattttaagttaaccaagggactggtatatcatgatcaaccattgaaatgccaaaatgctaagtgaattattttaaaaataaacccttcatatgtcaaaacaattttagatttacagaaaagttgcagtcagtacagacaattctaatacaacttgcacccaacttctcctcctgttaacattaatatgatacatttgttannnnnnnnnnnnnnnnnnnnnnnnnnnnnnnnnnnnnnnnnnnnnnnnnnnnnnnnnnnnnnnnnnnnnnnnnnnnnnnnnnnnnnnnnnnnnnnnnnnnnnnnnn

SEQ ID NO: 32910 - DNA, 449 bp, Homo sapiens
  misc_feature (1)...(449): n = a,t,c or g
cctttgganancngntatgacatgattacgaatttaatacnnnnnnnnnnnnnnnnnnnnnnnnnnnnnnnnnnnnnnnnnggcacgagnnnnnnnnnnnnnnnnnnnnnnnnnnnnnnnnnnnnnnnnnnnnnnnnnnnnnnnnnnnnnnnnnnnnnnnnnnnnnnnnnnnnnnnnnnnnnnnnnnnnnnnnnnnnnnnnnnnnnnnnnnnnnnnnnnnnnnnnnnnnnnnnnnnnnnnnnnnnnnnnnnnnnnnnnnnaggatcaagcagtcnnnnnnnnnnnnnnnnnnnnnnnnnnnnnnnnnnnnnnnnnnnnnnnnnnnnnntttttttttttttaaangaaanccnnnccagtannanaacnnaaacnngtnnaaaaaantaggncnggaaannttttaatnngttgnannttttnacccaannntttaaatncnccntttt

SEQ ID NO: 32911 - DNA, 447 bp, Homo sapiens
  misc_feature (1)...(447): n = a,t,c or g
anaccnnnnnnnnnnnnnnnnnnnnnnnnnnnnnnnnnnnnnnnnnnnnnnnnnnnnnnnnnnnnnnnnnnnggcacgagtaggtgtttcacgatactgcctaggattttcgacacattctttctgaactaagttcaaatgcctcactatcgcttttgaaggttaacagaaatagtttatgggaaattagaacttctcagattaatattccctctgaaaaacattctaagttgtcttttcatgatagcttaatagtgctattagaagttgccttcatatccaaaattattttcttctcatataaagatactgagtattaaaaaaatnnnnnnnnnnnnnnnnnnnnnnnnnnnnnnnnnnnnnnnnnnnnnnnnnnnnnnnnnnnnnnnnnnnnnnnnnnnnnnnnnnnnnnnnnnnnnnnnnnnnnnnnnnnnnnnnnnnnnnnnn

SEQ ID NO: 32912 - DNA, 185 bp, Homo sapiens
  misc_feature (1)...(185): n = a,t,c or g
tttgnacaccccttgnnnnnnnnnnnnnnnnnnnnnnnnnnnnnnnnnnnnnnnnnnnnnnnnnnnnnnnnnnnnnnggcacgagtgtactagagggaaaaatctataacctttcatgtatttttcagcacttcttccacttttcatttctgaaggggagggagttttttgtttttttttttttt

SEQ ID NO: 32913 - DNA, 442 bp, Homo sapiens
  misc_feature (1)...(442): n = a,t,c or g
ggaacanccgntatgacatgattacgaatttaatacnnnnnnnnnnnnnnnnnnnnnnnnnnnnnnnnnnnnnnnnnggcacgagaaaagagtttctgatttcaaggaacttatgataactgtagaaaaatggaaaaataagccttgttggaaagcttgaatgttactttatgggcatccatacgggaagaagagaatccagggagccaaaaatacatctttttgactcttaaggaaaaggtaaagcaagaagtaataaaaatcttttcaaatactctatgaaatattaaaatcctgggcattggaaagagaatttttcaagagggttttaaactatgaaattttgaacgacaaaaatgttggggccagacgcnnnnnnnnnnnnnnnnnnnnnnnnnnnnnnnnnnnnnnnnnnnnnnnnnnnnnnnnnnnnnnnnnnnnn

SEQ ID NO: 32914 - DNA, 447 bp, Homo sapiens
  misc_feature (1)...(447): n = a,t,c or g
ttgnanncctttnnnnnnnnnnnnnnnnnnnnnnnnnnnnnnnnnnnnnnnnnnnnnnnnnnnnnnnnnnnnnnnnnnnnnnnnnnggcacgagtcggcgtgggtttagaagggcctggcctggagcctaacagagaaatagaaggagcagaaactagaggtggaggaaaatttgctggcagatcctacagggaggaaagagaaaagggaaggatttcagtcctttccataattttgtgactggatgactgaaagaatgcttttaaacatttattaatccatccgtccatgcatctatgcatccatgcatgcatgcatgcatccatccatccatccatccatccatccatccatccatccatccatccatccatccaacattcattgctgctaccgcatggggattctcaatcttataaaaaagagcaactctccctttccctaatg

SEQ ID NO: 32915 - DNA, 435 bp, Homo sapiens
  misc_feature (1)...(435): n = a,t,c or g
ttgaaccttgnagaccnnnnnnnnnnnnnnnnnnnnnnnnnnnnnnnnnnnnnnnnnnnnnnnnnnnnnnnnnggcacgagcagttttactttggcttttaatgcctagtttctttcagttttggtcagaaaacatagtgtatacttttggtcttcttaaatgtatttgttgatannnnnnnnnnnnnnnnnnnnnnnnnnnnnnnnnnnnnnnnnnnnnnnnnnnnnnnnnnnnnnnnnnnnnnnnnnnnnnnnnnnnnnnnnnnnnnntttacctcaaatttttgagctgggactacagaaatgcactactacccctggttaatcatttgatttattggtagcgacagggtctcactatgttgtgtaagctggcccaaactttttgccccatgtgaacttcccaaagtgttnagattatagatatgancctcg

SEQ ID NO: 32916 - DNA, 442 bp, Homo sapiens
  misc_feature (1)...(442): n = a,t,c or g
tttggaaaccccnnnnnnnnnnnnnnnnnnnnnnnnnnnnnnnnnnnnnnnnnnnnnnnnnnnnnnnnnnnnnnnnnnggcacgagctgcccttccttatatacttaacatgaattaccaaaatttgttctactaaattcattaataagatgattgaatacttttgattaattcgtgtacattatattgactgtgcgaattcattaattttacttgaacagttacgtttttgacctttttttatttgagactgagatacctcattttgtaagcagaagcaaattagttaatgtctttggctgccttctactcacattgtgggtacacctacaggtggttttaggctaggtgctgcatctcaggtttggttttgtgaaagctggattttctcagctttctcaggggctgataggctttcatgaattgaatcctggtaatcaaa

SEQ ID NO: 32917 - DNA, 440 bp, Homo sapiens
  misc_feature (1)...(440): n = a,t,c or g
aaantncgnnnnnnnnnnnnnnnnnnnnnnnnnnnnnnnnnnnnnnnnnnnnnnnnnnnnnnnnnnnnnnnnnggcacgaggcagcaggccgggagcagcagcaacctcaccgagctacaggtggtgaacctggacaccgcccacagcaccaagagtgaatgatccgcccgccgccctggacagatggcccaagggatggcaccacttatttattgttgccttttcacgttttctttacacacacgttgacgggccgcaggagggaggcggggaggaggaacgggcagccacaggactgagccctctcactccagccaaagaaatgggcctgcctgcctccacccgtcctccctcagcctccccttcttcccgccccacctcccatttctgttgctggaggggctgtcctccttcctgggaccccctcgccagcttggct

SEQ ID NO: 32918 - DNA, 448 bp, Homo sapiens
  misc_feature (1)...(448): n = a,t,c or g
tttgnanntttggaaanccgnnnnnnnnnnnnnnnnnnnnnnnnnnnnnnnnnnnnnnnnnnnnnnnnnnnnnnnnnnnnnnnnnnggcacgagttgctatgcaaagtaaagtgattatgtatttaggaatatataataggaaaacagaacatataacaaaggagaggggattgtttataggaacacatgtaagtgcggtggttattatttttttaaatttcnnnnnnnnnnnnnnnnnnnnnnnnnnnnnnnnnnnnnnnnnnnnnnnnnnnnnnnnnnnnnnnnnnnnnnnnnnnnnnnnnnnnnnnnnnnnnnnnnnnnnnnnnnnnnnnnnnnnnnnnnnntaaatgcagtggttcttaaacttgaatttacaaagaatggcctgggataattgttaaaagtgaagatgctctgattctaaccccaaagattcctattcaatag

SEQ ID NO: 32919 - DNA, 443 bp, Homo sapiens
  misc_feature (1)...(443): n = a,t,c or g
ttgaantttganaccgnnnnnnnnnnnnnnnnnnnnnnnnnnnnnnnnnnnnnnnnnnnnnnnnnnnnnnnnnnnnnnnnnnggcacgagggaatacagagaacatagagcatatggcaggatagtcagaattgcagcaagagtatgatgtgcacaaggcatatctagattttgaattaggaagatggtgacatgaattaagaatgaaggcatnnnnnnnnnnnnnnnnnnnnnnnnnnnnnnnnnnnnnnnnnnnnnnnnnnnnnnnnnnnnnnnnnnnnnnnnntcccactcctggctttaaatgttggtttcatgnnnnnnnnnnnnnnnnnnnnnnnnnnnnnnnnnnnnnnnnnnnntttgtatttttttttattattgtattttttattgntttttaaaaaatattttcaatccatggttggttgaatccctggatg

SEQ ID NO: 32920 - DNA, 447 bp, Homo sapiens
  misc_feature (1)...(447): n = a,t,c or g
tttggaaatccgtttgncatgattacgaatttaatannnnnnnnnnnnnnnnnnnnnnnnnnnnnnnnnnnnnnnnnnggcacgagcgcaatcatgtctttacaaggcaatgcattttcacaaatgaagaaactgcaacaattgcatttaaatacatcaagccttttgtgcgattgccagctaaaatggctcccacagtgggtggcggaaaacaactttcagagctttgtaaatgccagttgtgcccatcctcagctgctaaaaggaagaagcatttttgctgttagcccagatggctttgtgtgtgatgattttcccaaaccccagatcacggttcagccagaaacacagtcggcaataaaaggttccaatttgagtttcatctgctcanctgccagcagcagtgattccccaatgacttttgcttggaaaaaagacaatgaacta

SEQ ID NO: 32921 - DNA, 445 bp, Homo sapiens
  misc_feature (1)...(445): n = a,t,c or g
atttggaaanccgttatgacatgattacgaatttaatacnnnnnnnnnnnnnnnnnnnnnnnnnnnnnnnnnnnnnnnnnggcacgagnnnnnnnnnnnnnnnnnnnnnnnnnnnnnnnnnnnnnnnnnnnnnnnnnnnnnnnnnnnnnnnnnnnnnnnnnnnnnnnnnnnnnnnnnnnnnnnnnnnnnnnnnnnnnnnnnnnnnnnnnnnnnnnnnnnnnnnnnnnnnnnnnnnnnnnnnnnnnnnnnnnnnnnnnnnnnnnnnnnnnnnnnnnnnnnnnnnnnnnnnnnnnnnnnnnnnnnnnnnnnnnnnnnnnnnnnnnnnnnnnnnnnnnnnnnnnnnnnnnnnnnnnnnnnnnnnnnnnnnnnnnnnnnnnnnnnnnntaaaagggatagaatataatgaaatatattttgaacttaaattatattctatatgtgtatc

SEQ ID NO: 32922 - DNA, 447 bp, Homo sapiens
  misc_feature (1)...(447): n = a,t,c or g
tttgaaatccgntatgacatgattacgaatttaatacnnnnnnnnnnnnnnnnnnnnnnnnnnnnnnnnnnnnnnnnnggcacgagcttttgtgcagttaagaaaataggctctttccctaagtctcagagcagcagctcctgtccccagctgtcgctcccatccatatgtggccatctcgccagaccacaccagcttgcctgcaaggcccttcagccttggggagctggtgcccatcttcacaaagctcgcagcagatgacacctctgctggtgtgtggacctggcagtttggtggcacatttaggtggctgtgagttggaagagagatgagggacggaggcgtccagcgggcagttagggttctccacagctgggcgcagtttcttctagcggcttcctctggcatgggatggtgagctaacttctttgagctctggtcacttgt

SEQ ID NO: 32923 - DNA, 447 bp, Homo sapiens
  misc_feature (1)...(447): n = a,t,c or g
tttgnaatncnnnnnnnnnnnnnnnnnnnnnnnnnnnnnnnnnnnnnnnnnnnnnnnnnnnnnnnnnnnnnnnnnnnggcacgagagagtttggagaagtcaaggcaactagaatttgtggggcagaaaacaataaaaggaactacacagaaatctatagaagtaagagaatctttgattggacactcatctgcacatgcaaagtgtggaagtcagcagtgctggagaaagtcacactggaaatcagaacactgaacaattccaggagctcacacagagctgggaatagtttatgtttccattaggcatagtggagagactgtttcatacaaaggacattggctagagtcttcaaagtggggttaaattagctatagactaaaggcctttctaaacctaccctaagcttcaaggcaggttttgaaaggaccaggctgattctaagta

SEQ ID NO: 32924 - DNA, 443 bp, Homo sapiens
  misc_feature (1)...(443): n = a,t,c or g
tttgaanaccgntatgacatgattacgaatttaatacnnnnnnnnnnnnnnnnnnnnnnnnnnnnnnnnnnnnnnnnnggcacgagcggcacgagcagcggctcccagctctgccaggcccattcccagctgctgcagtacgtggagcgatacgggaagcgtttgaaggccaagaacctgatgtacctgaagcagatcctgtatttgctggagaaattcgtggctgtgctaggggggaacattaagcaaaatcccaatacacagagtctgtcacagacagggacggagctgaagaccatcaacgactttctcttccagagccagatcgacaacatcaacctgttcaaggtgcagcgatactgtgagaagagcatgatcagcagaaagctctttggattcactgaacggtacggagcagtgttctcatcccgggagcagcccaa

SEQ ID NO: 32925 - DNA, 462 bp, Homo sapiens
  misc_feature (1)...(462): n = a,t,c or g
gnagnntntnttntgctnnagagaacttttnnnnnnnnnnnnnnnnnnnnnnnnnnnnnnnnnnnnnnnnnnnnnnnnnnnnnnnnnnnnnnnggcacgaggtgacaaccataccagacactgcagttctgtgacttcagcaccttctagaagttgtattggagttgggagaattcagcttgacaggtggcttccatagatgggtgggcaccagcattgcctgggggcttgttgaaatactgagtgcttnnnnnnnnnnnnnnnnnnnnnnnnnnnnnnnnnnnnnnnnnnnnnnnnnnnnnnnnnnnnnnnnnnnnnnnnnnnnnnnnnnnnnnnnnnnnnnnnnnnnnnnnnnnnnnnnnnnnnnnnnnnnnnnnnnnnnnnnnnnnnnnnnnnnnnnnnnnnnnnnnnnnnnnnnnnnnnnnnnnnnnnnnnnnnnnnnnnnnnntnttgagccctgga

SEQ ID NO: 32926 - DNA, 448 bp, Homo sapiens
  misc_feature (1)...(448): n = a,t,c or g
tttggananccgnnnnnnnnnnnnnnnnnnnnnnnnnnnnnnnnnnnnnnnnnnnnnnnnnnnnnnnnnnnnnnnnnggcacgagcnnnnnnnnnnnnnnnnnnnnnnnnnnnnnnnnnnnnnnnnnnnnnnnnnnnnnnnnnnnnnnnnnnnnnnnnnnnnnnnnnnnnnnnnnnnnnnnnnnnnnnnnnnnnnnnnnnnnnnnnnnnnnnnnnnnnnnnnnnnnnnnnnnnnnnnnnnnnnnnnnnnnnnnnnnnnnnnnnnnnnnnnnnnnnnnnnnnnnnnnnnnnnnnnnnnttagggaggggccggtggagtggtcacaacagacgacatttatcggtaaagttcatcgttttaaatgggtatagttcatggtgccccctaaaattataagagtaatatcaaatnnnnnnnnnnnnnnnnnnnnnnnnnnnnnnnnnnnnnn

SEQ ID NO: 32927 - DNA, 443 bp, Homo sapiens
  misc_feature (1)...(443): n = a,t,c or g
ttngaccaccntnnnnnnnnnnnnnnnnnnnnnnnnnnnnnnnnnnnnnnnnnnnnnnnnnnnnnnnnnnnnnnnnnggcacgagggagtactctagggaagtgtggttggggaattacagggaatgatgtgataacccctggtcggttaccacctctgggcccagagaaacaaagggagggaggggttgtcagaatctggaaggaatcacataggatcagtgacctccatttaagctaaggaaataaataccgtaactgactgtcttgccttctcagatctgctggcaaaacccacacggaagccaggggcctggggagcctgccaatggggtccatgaaggtcaggcttccatggtagagggcagggcacagaaaggtggagggaggctaggggtggggcggatgaaagatctatggctcggccatgtcctgtgagtgccc

SEQ ID NO: 32928 - DNA, 450 bp, Homo sapiens
  misc_feature (1)...(450): n = a,t,c or g
tcgacncccccntngcatgncnnnnnnnnnnnnnnnnnnnnnnnnnnnnnnnnnnnnnnnnnnnnnnnnnnnnnnggcacgagcagnnnnnnnnnnnnnnnnnnnnnnnnnnnnnnnnnnnnnnnnnnnnnnnnnnnnnnnnnnnnnnnnnnnnnnnnnnnnnnnnnnnnnnnnnnnnnnnagtgtttgggattacctttaaattgttaattttaancagaaaaaacatatcttgtatagtattggatcaggtgaaagtatatgctatttgaagcatctattcaaaattaatataactatttaataaagacatgttaatctaataaactcaggtcacattctaagtgacctgagtgtttttctagttccatattttgtagaaagtatgaaaaagnnnnnnnnnnnnnnnnnnnnnnnnnnnnnnnnnnnnnnnnnnnnnnnnnnnnnnnn

SEQ ID NO: 32929 - DNA, 460 bp, Homo sapiens
  misc_feature (1)...(460): n = a,t,c or g
gncccgncccccccttngcccccccctntgacaccntnnnnnnnnnnnnnnnnnnnnnnnnnnnnnnnnnnnnnnnnnnnnnnnnnnnnnnnnnnnnnnnnnggcacgagggagatgcaccctgcctacaccgaggaagagctgaggcgctttgaagaggagctggctgcccgggaggcagagctgaatgccaaggcccagcgcctcagccaggagacagaggctctagggcggtcccagggccgcctggaggcccagaagagagagctgcagcaggctgtgctgcacatggagcagcggaagcagcagcagcagcagcagcaaggccacaaggccccggctgcccaccctgaggggcagctcaagttccacccagacacagacgatgtacctgtcccagctccagccggtgaccanaaggaggtggacacttnataaaagaaacttctcgagcggctcc

SEQ ID NO: 32930 - DNA, 442 bp, Homo sapiens
  misc_feature (1)...(442): n = a,t,c or g
tttgacncccccntnnnnnnnnnnnnnnnnnnnnnnnnnnnnnnnnnnnnnnnnnnnnnnnnnnnnnnnnnnnnnnggcacgagagagagctgctgttacaacactggttcagatccggagtttgcaagatcattttactcggcccttcaatgccatcccaagcatctcaaacataggctttgcttaaacaaaaccaggcaactaaaatgcaagaagaaagggaaatgtcctttggggacctcaaacccaccccttttattcatcatcatcatcgtctctctctctctctctacttacaaagtttaggagcagtttggagattagtttctgttgtttgtggctgagttgctgacttgggcgttctcacctcagggttccgggtgggngaagggaaggatggcgcagnggacggnaagaaagaaaaggcaaaaatacnattct

SEQ ID NO: 32931 - DNA, 440 bp, Homo sapiens
  misc_feature (1)...(440): n = a,t,c or g
cttcnccccccnacnncccnctnnnnnnnnnnnnnnnnnnnnnnnnnnnnnnnnnnnnnnnnnnnnnnnnnnnnnnnnnnnnnnnnnggcacgagggctgtctatcagtggataaggtgggggctgtctatcagtggagaaggtgggggctgtctatcagtggagaaggtgggggctgtctgtcagtggagatggtgggggctgtctgtcagtggagatggtgggggctgtctgtcggtggagatggtgggggctgtctgtcggtggagatggtgggggctgtctgtcggaggagatggtgggggctgtctgtcggtggagatggtgggggctgtctgtcggtgganaangtgnaancttgtactcagagcaggggatatttagacttnaangggccacgnaggaaggnctggttctactannccccatgttcactgggc

SEQ ID NO: 32932 - DNA, 456 bp, Homo sapiens
  misc_feature (1)...(456): n = a,t,c or g
gccncgccccctctnnacccccccaanaacacnctnnnnnnnnnnnnnnnnnnnnnnnnnnnnnnnnnnnnnnnnnnnnnnnnnnnnnnnnnnnnnnnnnggcacgagcttaaatcgtataggccaaaccataattaccttagaatttagatatgggagattatcagggttggccattgttattggtattgatatttggaaggtatggacaatgtgtcacatagtggaaagagactgaactgctgacagataagtaacaaggttctagtccaagttttaccattaaagatgtgtatgactttggccaaatcacttaactttctaaacctttagtttttttcatttttgaaatgagtttatatgatcattttgatttctaaggtctcttctgtctttccatctagtatgctaaaaaagatttaccagataaaaacttttttttggagaaaaagttgg

SEQ ID NO: 32933 - DNA, 436 bp, Homo sapiens
  misc_feature (1)...(436): n = a,t,c or g
nttgaacanccgntatgacatgattacgaatttaatacnnnnnnnnnnnnnnnnnnnnnnnnnnnnnnnnnnnnnnnnnggcacgagaactggatttcattttacttacaggattcttgctttgccactcaacaggatagttgtaatcttgcatgatccagggatggttcaatagatttttcatagaaatccgtttctttgggtccacctgcagcatttgttgaagaagcagaatgctactgggagagagccacttgggaacatcatattttcctctcataatcttcttgtataaagccattacattatcatcatcaaatggtagaaatccacacataagaacatataacagtatgcccatgctccaaacatctgcctctgatccaagatatgatttgccttgtattaactcaggngctgcataagccagactccg

SEQ ID NO: 32934 - DNA, 444 bp, Homo sapiens
  misc_feature (1)...(444): n = a,t,c or g
tttcgacnccccccntnnnnnnnnnnnnnnnnnnnnnnnnnnnnnnnnnnnnnnnnnnnnnnnnnnnnnnnnnnnnnnggcacgagcaaaaggatcaaaatgcaggacactacccttgatatatttgtcactaccttctggtgggaagacagcagtaagtaaagaaggcttggccctaaacacagatgagagccagctgctcccaggtcaagcacatgtggagactgtactacagagcttggaagttgctgcgttaggagcttctgccgccaaaggaagatgaccgagcatctaatagggaaatggctgtgtgcccatgctcctgtaacttctcatataaatgacgactgcagagtccctagaaacggggagggggggggcgtggggggggttattttccctgtaaatgaaggcaacnttggnttatcactaactgttcaaatt

SEQ ID NO: 32935 - DNA, 440 bp, Homo sapiens
  misc_feature (1)...(440): n = a,t,c or g
ccccccnnnggaccacccttnnnnnnnnnnnnnnnnnnnnnnnnnnnnnnnnnnnnnnnnnnnnnnnnnnnnnnnnnnnnnnnnggcacgagcagaatgtgtatactttcattttgatttacatttatagacttccttattgaaggaatggagcatgtatatacctggcctgcagtgtttatcttatcccattcacacagcaatttgtaactaggggaaagtaatacctgccttatcttaaatatgatggttttacaaagattcctgtctttcactgtcttctgggaaccaggaaatagctatagttacctctaaaatataccctcatatccttttttaccgatgaaaatggcttataatagggactcataatgattttctttggtcttttattgtttttgaaacacnaagcanaacatttttattattggctcanaatg

SEQ ID NO: 32936 - DNA, 431 bp, Homo sapiens
  misc_feature (1)...(431): n = a,t,c or g
cnnnnnnnnnnnnnnnnnnnnnnnnnnnnnnnnnnnnnnnnnnnnnnnnnnnnnnnnnnnnnnnnnggcacgagcaaaagcttcaacaggatggcttctgagaactaagctgtatgcaaaggtctactctgattcaatgaggaaaaagcaccctgtaaacttattctttgtaggcagcatatgagcactggtcaagcaaaaaaacccagcaattggatgatcctcaaaaatctgcttcctcctaattcccattgcatcagaagactaaattcagtctgctttgagacagcctggcaacccattggtacaagggagtacagagaaaaaccccagactcctgtcgcagctggccacaggtgggaggcttgcatctcccaggtcagggtgcctgcaaaagcaaccaggaaaggtgccctaatgagagaagccta

SEQ ID NO: 32937 - DNA, 433 bp, Homo sapiens
  misc_feature (1)...(433): n = a,t,c or g
tttgacnnnnnnnnnnnnnnnnnnnnnnnnnnnnnnnnnnnnnnnnnnnnnnnnnnnnnnnnnnnnnnnnnnnnnnnggcacgaggaacgtgccaaacaggtgaccatggcagagttgaatgccatcatcgggcagcagcagttgcaagctcagcatctttctcatggccacggacccccagttccccttacgccttacccttcgggacttcagcctcctggaatcccgcccctcgggggcagtgccggccttcttgcgctgtctagtgctctgagtgggcagtctcacttggcaataaaagatgacaagaagcaccacgatgcatagcaccacagaggtgagaggccgggcaagccagattaggactttgtcctcatactcttacagtgctgnaaagttgtgtgcatcgctaaagagagcccnaacctatac

SEQ ID NO: 32938 - DNA, 438 bp, Homo sapiens
  misc_feature (1)...(438): n = a,t,c or g
acccnnnnnnnnnnnnnnnnnnnnnnnnnnnnnnnnnnnnnnnnnnnnnnnnnnnnnnnnnnnnnnnnnnnggcacgagnnnnnnnnnnnnnnnnnnnnnnnnnnnnnnnnnnnnnnnnnnnnnnnngtaacatcctttcacaatgaaaattctcaacaagtaaggtatagaacagtatgccacaacataataaaggctatgtgtgacaggcccacagctgacatcatacttaatggtgaaaagctgaaagcttttcctctgaggtcaggaagaagacccttgctacttccattaaatatggtaagttctagccagaacagttaggccaagaaaaagaaataaaggcagccaggagtggtggctcatggctctgatnnnnnnnnnnnnnnnnnnnnnnnnnnnnnnnnnnnnnnnnnnnnnnnnnnnnnnnnnnnnnn

SEQ ID NO: 32939 - DNA, 434 bp, Homo sapiens
  misc_feature (1)...(434): n = a,t,c or g
nttggacacccgnnnnnnnnnnnnnnnnnnnnnnnnnnnnnnnnnnnnnnnnnnnnnnnnnnnnnnnnnnnnnnnnnnggcacgagaaaaacctggatagacatctttgcatttaatgtgagagacccatcaaggacagcaaaactctgctccttgggacacagtagccacatcgttggaagaatttgatagggttacccaaggtttcctaaagcatttttgtctaacattagttcctcaaatggctttgagaagaaacaaatccttggacaagttattttgagaaagaataattataaaacctttctttggagattcacagtgctaaaagctcggagacgtcctgcagtaataaatcctgtaaaactttggcttgttgttccctaaacttacttgatgacagaattctaggttcaacatatgttaagatccct

SEQ ID NO: 32940 - DNA, 455 bp, Homo sapiens
  misc_feature (1)...(455): n = a,t,c or g
tnnnttcccccctttgacnccccnttgnnnnnnnnnnnnnnnnnnnnnnnnnnnnnnnnnnnnnnnnnnnnnnnnnnnnnnnnnnnnggcacgagaaaaaaatttttaaaaaaacttcatgctgaagtgacttctccagaagtttctatcattctactggatgaacatgggagaaactacattcacatggtaactttatttgaacagtatccatccatgtggcatgtgatgaaaccaataaaattcccatgtccacgggagactgtgtgggccaagctgaaggacgggacagagcaaagtttcaaacgatgttctcggggtcagcaagtgagtacaggccagtggttctctgctggggaagaatgtagccccctcctccatgtgacattttgcaatttctggagtacctggggaggtggtcttgtcaccacatcaaggccaggggtgctgctaaa

SEQ ID NO: 32941 - DNA, 458 bp, Homo sapiens
  misc_feature (1)...(458): n = a,t,c or g
gnnngnccccccttganctcccctctgataccgtnnnnnnnnnnnnnnnnnnnnnnnnnnnnnnnnnnnnnnnnnnnnnnnnnnnnnnnnnnnnnnnnnggcacgagagaaggggagactggagaaaagtcctgagatcttgtctcaaatccagacagcactgcagagtgacctgcattgggtctagatggcaaagagacccaaatggcaccacagatgacctatactaggtccagataactagaaagtgcagatggctaagatggaggatttcccagtacactctggttaatttatccaacccttgaattctgttgacctccaagatgccacttctctttcactaactgagtgttacagcagctgatgccacaaagggaagggaaggaaaaatccttcagacaagggtggtctccctagctgctgggaattccttaaggtcccagctgcagggtcag

SEQ ID NO: 32942 - DNA, 471 bp, Homo sapiens
  misc_feature (1)...(471): n = a,t,c or g
nnngnnnnnnntnnnnntttganatntgannnnnnnnnnnnnnnnnnnnnnnnnnnnnnnnnnnnnnnnnnnnnnnnnnnnnnnnnnnnnnnnggcacgagcagttaaaactcccccnnnnnnnnnnnnnnnnnnnnnnnnnnnnnnnnnnnnnnnnnnnnnnnnnnnnnnnnnnnnnnnnnnnnnnnnnnnnnnnnnnnnnnnnnnnnnnnnnnnnnnnnnnnnnnnnnnnnnnnnnnnnnnnnnnnnnnnnnnnnnnnnnnnnnnnnnnnnnnnnnnnnnnnnnnnnnnnnnnnnnnnnnnnnnnnnnnnnnnnnnnnnnnnnnnnnnnnnnnnnnnnnnnnnnnnnnnnnnnnnnnnnnnnnnnnnnnnnnnnnnttggcgagagagaaactgcctccaaaaaaattccctgagggaaacctgtatgcagaacgccctgatcccaataaagggttgcctggggaaaaa

SEQ ID NO: 32943 - DNA, 450 bp, Homo sapiens
  misc_feature (1)...(450): n = a,t,c or g
tttgaaanntggnnnnnnnnnnnnnnnnnnnnnnnnnnnnnnnnnnnnnnnnnnnnnnnnnnnnnnnnnnnnnnnnggcacgagattgatctgnnnnnnnnnnnnnnnnnnnnnnnnnnnnnnnnnnnnnnnnnnnnnnnnnnnnnnnnnnnnattgcatacagatgtacgcaattgcacggatgtgtgttttccattgtcttgggtcgttacctaggaagggaattgctggagtacatgctaatctatgcttagctttttgaggaaccgctgttatgcagnnnnnnnnnnnnnnnnnnnnnnnnnnnnnnnnnnnnnnnnnnnnnnnnnnnnnnnnnnnnnnnnnnnnnnnnnnnnnnnnnnnnnnnnnnnnnnnnnnnnnnnnnnnnnnnnnnnnnnnnnnnnnnnnnnnnnnnnnnnnnnnnnnnnnnnnnnnnnnnnnnnnnnnnn

SEQ ID NO: 32944 - DNA, 446 bp, Homo sapiens
  misc_feature (1)...(446): n = a,t,c or g
tttgnanntctgataccgttatgactgattacgaatttaatacgactcnnnnnnnnnnnnnnnnnnnnnnnnnnnnnnnnnnggcacgagaagaactaaaactatgcttgaagaagtaaaggactattggataatgtgtcgttaaatagagaataacaataaaaagataggaagtatttgaaaagagcccagtggaagttctagaattgaagagtagtataataatcnnnnnnnnnnnnnnnnnnnnnnnnnnnnnnnnnnnnnnnnnnnnnnnnnnnnnnnnnnnnnnnnnnnnnnnnnnnnnnnnnnnnnnnnnnnnnnnnnnnnnnnnnnnnnnnnnnnnnnnnnnnnnnnnnnnnnnnnnnnnnnnnnnnnnnnnnnnnnnnnnnnnnnnnnnnnnnnnnnnnnnnnnnnnnnnnnnnnnnnnnnnnnnnnnnnnnnnnnnc

SEQ ID NO: 32945 - DNA, 445 bp, Homo sapiens
  misc_feature (1)...(445): n = a,t,c or g
ttgantntgatacctttgacnnnnnnnnnnnnnnnnnnnnnnnnnnnnnnnnnnnnnnnnnnnnnnnnnnnnnnnnnnggcacgagcgnnnnnnnnnnnnnnnnnnnnnnnnnnnnnnnnnnnnnnntcttggaccatttaatcaatatgtatttctttagcatgtatggggaacaactttccccttgtgagtaataaaatggttacttataatacctactatggaagagttacagtctaatcaggcaagctgtggctagaaaccagaatgatgatttntagcttgtataatacaggaattgtagagaaggggaacaagggattgtgtgctgcagttgtcggggaaaacttgaatagtaggtgagacattaattgggggataagatttggatgttgggagagtgaggttctttggatatgttaccaaaagcacagatatgggatt

SEQ ID NO: 32946 - DNA, 448 bp, Homo sapiens
  misc_feature (1)...(448): n = a,t,c or g
tttganacctnnnnnnnnnnnnnnnnnnnnnnnnnnnnnnnnnnnnnnnnnnnnnnnnnnnnnnnnnnnnnnnnnnggcacgagagcaagttttaacttggccaaaatccaccaatcttaaactttgtgcacccttcccgctctgaagaacagtgagccagccggccagggtgcgggtatctcctacctaccctggggcccctcactgtatgttgactattgacaaatatttattgtgtgctggctgtgaataggacttgtatattgagcacttaggtgtcatgaaccatgctggatgttttgaccatattatcccctttaattctcacgacccaactctgtggggcacttttacagctgggaaactgagggttcaaggggttaggtatgggacttgcccaaggtcataaangtatgtggtagccagagnccttgttnnggccagacc

SEQ ID NO: 32947 - DNA, 444 bp, Homo sapiens
  misc_feature (1)...(444): n = a,t,c or g
tttgganactcntatgacnnnnnnnnnnnnnnnnnnnnnnnnnnnnnnnnnnnnnnnnnnnnnnnnnnnnnnnnnnggcacgaggaaatacataaatcttaagtatataaaatttgaaaactacatatccctttctaaccaaaatccccatgaagacatagtagaaatggtatcagcaccttaggaaagttccctcatgttctttcacagttagtccctacctcttccccctcaaatgtaaccattgttctgatttttcctagcatagattaattttacctgttctaggacttcatgtaaatggagtaatgcactatatactcttatgtgaggcttctttcattcaggatcttattttgagactcatccatcctggtgcttgcatcaatagtttgtttctttttaacattgcattgtatgagtataacaagttatttatcgatt

SEQ ID NO: 32948 - DNA, 457 bp, Homo sapiens
  misc_feature (1)...(457): n = a,t,c or g
tttgaaacctnnnnnnnnnnnnnnnnnnnnnnnnnnnnnnnnnnnnnnnnnnnnnnnnnnnnnnnnnnnnnnnnnggcacgagactacattttatgaggaaaatctatatattagaagcactttaaaggtatatttgctattctagctgtggaaaccatctgaaaacacatttgaaagtgctttgaaacaggggtcaacaaacttctctgcaaagggccagagtatgtttagctttgcgggccacagatggcctctgttgcatatgctgctgggtctccaccttcctcctccttttcttcccttcctcttccttctttttcttcttctctttcttctttctctttaaaagcataaaatcattctcagctcttgggccatacagaaacaggccataggccagatttgacttctaggccatagtttgccgaccctccattttagaacttagctttcctg

SEQ ID NO: 32949 - DNA, 472 bp, Homo sapiens
  misc_feature (1)...(472): n = a,t,c or g
ttgaaaccctntgantganantttgataccnttatgacnnnnnnnnnnnnnnnnnnnnnnnnnnnnnnnnnnnnnnnnnnnnnnnnnnnnnnnnnnggcacgagggtaacccaaccaaatcaggatcagaaactttacaactgaataaatgaatggatataactgtatttgaagttatttatattaataccatgaaatatatttctccagttggccacaagcagtcaattgtcctcttgttctcaaatatctagttactaggctttctaaataattttttgttattgttgttttactttagctctcttcctgccttctgccctggcctcttggagaaggaaatggaaacatgggctgtgtttcatgagagttaaaaactttcaccccagttacctttttatcttggaaggctgatctctgcatctccctccttcctgtcgctcgggggattgaaacctcagtggacactggg

SEQ ID NO: 32950 - DNA, 468 bp, Homo sapiens
  misc_feature (1)...(468): n = a,t,c or g
tgaaaaccctatgactgattacttggntaacccnnnnnnnnnnnnnnnnnnnnnnnnnnnnnnnnnnnnnnnnggcacgaggactatgatggtatgttacataacagtctaaaagaacaagttaattttatatggacttaacaatatgtcttggagctatttcccagttctagaaaaatataaacaatgttataccattcaggttaaaatatacccacaaattagttatgtatctacatgcatttattaatgtaaatgtattaaaaagtacagaaaagtatttattaaagagatattaggggttaccgtctcacgaaggaactacaattggcagctcaaggtatattattggtttattcatagcagaaagttttacaatatgaattgtatttttcaattcaattcaatatgcattaaatctttattattttgntttttatttatttttgtagagacagggtctcactc

SEQ ID NO: 32951 - DNA, 465 bp, Homo sapiens
  misc_feature (1)...(465): n = a,t,c or g
anacccctatgacatgattacttgnataacccnnnnnnnnnnnnnnnnnnnnnnnnnnnnnnnnnnnnnnnnggcacgaggccttggagagttggttaaaaactgcttccccagtttcactgttagaagtagtttgaggtctatcatcctgctcaccccagccttccatagttcagtggggtttttggagctgcaggaggatgatggctttagggaaggactggatgtacgttcagtcaagtcttcctgctgctttatgcgtctttaggtgtgggtggcatctgttaagcaacttcttggaagagtaaccataggtacaatctgaaagaggaagtgaagaggcaccaattgccttctctactggaggctgccttctccactggaggctgcttctcctttaaccctcagttccccttctcatgcctattccctagaggtgggaaaacatacaaccagcagaacact

SEQ ID NO: 32952 - DNA, 456 bp, Homo sapiens
  misc_feature (1)...(456): n = a,t,c or g
tttgnaancccttgactgattacgnnnnnnnnnnnnnnnnnnnnnnnnnnnnnnnnnnnnnnnnnnnnnnnnnggcacgagcacacatagtgactttattaaatcaaatgagttgtgcagagcagagcaaatctattaggctttctcttttagagttttctaattttactcttattagctccctcagttgtcatcaattacatattcctacatcagatattttacactatcagattctttgattaaaaaatcatcttcagctttacattattaatctctgaggacataaaatcaaataactttctagtccatgatcattaatccctactattttagatatttccataaaaggcttaaagggaaaaaaaaatggtaggtagttcagannnnnnnnnnnnnnnnnnnnnnnnnnnnnnnnnnnnnnnnnnnnnnnnnnnnnnnnnnnnnnnnnnnnnn

SEQ ID NO: 32953 - DNA, 470 bp, Homo sapiens
  misc_feature (1)...(470): n = a,t,c or g
ttgncnttcgannccccnnccccccctttgaactaccnnnnnnnnnnnnnnnnnnnnnnnnnnnnnnnnnnnnnnnnnnnnnnnnnnnnnnnnnnnnnnnnnnnggcacgagaaaatgcacagagatataaagggagctaacattctattaacggataatggtcatgtgaaattggctgattttggagtatctgcacagataacagctacaattgccaaacggaagtctttcattggcacaccatattggatggctccagaagttgcagctgttgagaggaaggggggttacaatcaactctgtgatctctgggcagtgggaatcactgccatagaacttgcagagcttcagcctcctatgtttgacttacacccaatgagagcattatttctaatgacaaaaagcaattttcagcctcctaaactaaaggataaaatgaaatggtcaaatagttttcatcactttgtga

SEQ ID NO: 32954 - DNA, 474 bp, Homo sapiens
  misc_feature (1)...(474): n = a,t,c or g
nnnntnnngtnttnctagnnnngctntnntgngaagaactcnatacgatttcangnataagggaacctggccctcgaggccaagaaattcggcacgaggtgagttcagattccatctagcctgatgttgattcatggaggtggagattgggatgccatataaaccagtggagattattgggcactcttggttcttgatgtcagatatgtgagtgctgcatttgtcattttgtaaatattcatccagattgaggctgatgaaggtagggcattgtgggagaatggaagcaggataagtccccagaaatgcggggaccatcaggcctctaggctctattctagcaagtaactggagtgagtgatgagcaagtacagaagcctagtctgggcagtgtgatggcataggcccagatgttcccctcttggctttaagatagtagacagtttgcagaccacacctactgtgaggagcgaa

SEQ ID NO: 32955 - DNA, 472 bp, Homo sapiens
  misc_feature (1)...(472): n = a,t,c or g
ggaggtgntgttttgnanttgaaataccgttatgacnnnnnnnnnnnnnnnnnnnnnnnnnnnnnnnnnnnnnnnnnnnnnnnnnnnnnnnnnnggcacgagtgataatttgcttcttcctattaaaaccttacacccattattgatttatttttctgttttaaaatatcttcctgcactggctaacctccactataatgttgagcagaacagtgagcatccttagaactatcttggttgcaaagggtaggtctctaatgtttcatcaataaatgtgatgtttctagtctgagtttgctaagtatattttaaaataatcagtaaagttagattttatccatttttatcttaactattgagatgctcatgtcatttttcttcttcaatgtgttaaaatggtgaataaatttatagattttggaaaagtaaattcattcttgcattcccgaagtaaaccaagccatgctatgtg

SEQ ID NO: 32956 - DNA, 470 bp, Homo sapiens
  misc_feature (1)...(470): n = a,t,c or g
ggngntnnnnttttganatttgannnnnnnnnnnnnnnnnnnnnnnnnnnnnnnnnnnnnnnnnnnnnnnnnnnnnnnnnnnnnnnnggcacgaggctggaagaagcatatcaggactatattgtgggctaatttcaggcctggttcctatgtatatcggtgaaattgctccaaccgctctcaggggagcacttggcacttttcatcagctggccatcgtcacgggcattcttattagtcagattattggtcttgaatttatcttgggcaattatgatctgtggcacatcttgcttggcctgtctggtgtgcgagccatccttcagtctctgctactctttttctgtccagaaagccccagatacctttacatcaagttagatgaggaagtcaaagcaaaacaaagcttgaaaagactcagaggatatgatgatgtcaccaaagatattaatgaaatgagaaaagaaaga

SEQ ID NO: 32957 - DNA, 470 bp, Homo sapiens
  misc_feature (1)...(470): n = a,t,c or g
ggngnnnnnntttgaaacttnnnnnnnnnnnnnnnnnnnnnnnnnnnnnnnnnnnnnnnnnnnnnnnnnnnnnnnnnnnnnnnnnnggcacgagcttgtctgagaaaaatccaaacttgcattttccaaagcactgcttgaagagtgaaatcttaaaaaattaaataaataataaatacaaataagtgttaacacccatttgtagttttcaaatagagctcagagtgagggctgtggctccatcgacttgttcaagcccaggaccccgtctgctttgcgagcatcatctggtgcttccttaatcaacagacgaagaccagacaagccctggtcattgtcctgcccacaggccagttcagagctagacggagttgcagactgacagtaagaatgacatttccctcacctctccaaaagcggggtgctctcaagcccaatgagggcgcataccgtggaccgcaccacaggat

SEQ ID NO: 32958 - DNA, 463 bp, Homo sapiens
  misc_feature (1)...(463): n = a,t,c or g
ggngnnnnttgaancctttgacnnnnnnnnnnnnnnnnnnnnnnnnnnnnnnnnnnnnnnnnnnnnnnnnnnnnnnnnnnggcacgagaaataaactcattaaacaattagtccttatcaactatttaagctgggggaagctttgcatgggagaaggctcatgtggtcccttctctgggaacatgagccttcctaggttttgccactgagaactgtgtttaggggatttcaacattgtctctgcatccgacaagcactaggaaaatggctgaaatcagtcagggactttcaactctccaatctggaaaaataaccacccctatttctctatctctagatcagcattattttaggtgaagcaaactaaaacatgtagaggttccactacaacggcaggggcatgaagagttggccacgagaccaccccgagcgccaagcctgtatctgcagatccctctctgct

SEQ ID NO: 32959 - DNA, 473 bp, Homo sapiens
  misc_feature (1)...(473): n = a,t,c or g
ggngnnnnnntttgnnnnttgganancngnnnnnnnnnnnnnnnnnnnnnnnnnnnnnnnnnnnnnnnnnnnnnnnnnnnnnnnnnnnnnnnnnnggcacgagaactgggtactagcaatgaaaaatagaggctcagtctactgattcccagcctagaattattttcacttatccagcactatctgtacttctattaaaacagtccatggcatacacagagacaattttagcttcttgccccttcccaaaaatgattacagaaactgagcaataggcagaataattagccacaagatatacaaccttttattggaaagaagaaataggaacaggtactggcaataatggatagtgactgaggcaggaagagcaaaaggaaggggaggatggattctcaataacaggtttgtgagggtcaggaaatccttactgcacaaaaactggaccagcaagagccctgctaaattctcta

SEQ ID NO: 32960 - DNA, 466 bp, Homo sapiens
  misc_feature (1)...(466): n = a,t,c or g
ggngnnnnnntttgnnnnnnnnnnnnnnnnnnnnnnnnnnnnnnnnnnnnnnnnnnnnnnnnnnnnnnnnnnnnnnnnnnnnnnnnggcacgaggtagtaaatgattgccattctagaaaggcttttatttaaagaaaactactgtgaattcgaaaaatctttctggatgagttgcttacgtttatctttacgtataattttttgtttatctttacacctaatttgtcctggttctttgtctttgtgctcttttgttaagggtggagtacagaattgaaagccacgctcctaaacccatcacaaacaatctggctctgacagattcagtgtgaacactgtgtattaacccttggagtctctggctttcattaaagcattggcgcttcaggccaattaattccacggttctctctttggattgcacatgtttgcttgtgcttctcaatttttctgcatatattcaag

SEQ ID NO: 32961 - DNA, 471 bp, Homo sapiens
  misc_feature (1)...(471): n = a,t,c or g
ggtgnnnnnnnnttganattggaatancgtnnnnnnnnnnnnnnnnnnnnnnnnnnnnnnnnnnnnnnnnnnnnnnnnnnnnnnnnnnnnnnnnnggcacgagctggaagagaagatttgaaaagagactggagagaagggtgggagacggacagagccagctgtgccagccgagggaccagagtgggcagtggggacggagcacagaccaccgcccacaagggtctctcctgtgacttctggcttcccgagggcagaggctgggatgggcatgtggcggctggcacccaggaggctccgccaggtccacgccaagccagcctggctcagctctggcttcctgctcacacgctggatgcctgtccccaggcctcctgacagggctctgcagcattggagaggcttgtggtggggccctcgctgtagaacaggcactgccagtgctcactgactcctcattgcagccagggc

SEQ ID NO: 32962 - DNA, 468 bp, Homo sapiens
  misc_feature (1)...(468): n = a,t,c or g
ggnnnnnnnnnttggnaatcnnnnnnnnnnnnnnnnnnnnnnnnnnnnnnnnnnnnnnnnnnnnnnnnnnnnnnnnnnnnnnnnattcggcacgagatatggcaaagttttaacaccattttttactaagataagtatcataaaggactttgtaaagaatatattacaaccgatcaggccagtggctttttgtttgtttgtttagcaggatttgattgaacctcatcatgctatagatcttccattcagggatgatgatgtgggcatagttcagtggaggctgcctgcaatgaaactgggcagaggcaagaatcgagagatcagctttagcccagctcccaggagcaccagagttaagaaggatatctcctagagggaaagccagagaccaggcaagggaacatacatgaacacccagcctgtgctctggtgtgaggttgcaacaggagtaggattggttcaatcagc

SEQ ID NO: 32963 - DNA, 470 bp, Homo sapiens
  misc_feature (1)...(470): n = a,t,c or g
gtgnntnnnnntttganattcgatnaccnnnnnnnnnnnnnnnnnnnnnnnnnnnnnnnnnnnnnnnnnnnnnnnnnnnnnnnnnnnnnnnnnnnggcacgagtatgtcggagctaaaaaagtagataccacaatgacacacagttagattggtggctaccagaggccaggaaagggagagggggatgaaggaagaaaagggatannnnnnnnnnnnnnnnnnnnnnnnnnnnnnnnnnnnnnnnnnnnnnnnnnnnnnnnnnnnnnnnnnnnnnnnnnnnnnnnnnnnnnnnnnnnnnnnnnnnnnnnnnnnnnnnnnnnnnnnnnnnnnnnnnnnnnnnnnnnncagcttggattacaggcgtgcgccaccaggtccagctnnnttttttgnatntttagtananatgaggnnnnnnnnnnnnnnnnnnnnnnnnnnnnnnnnnnnnnnnnnnnnnnnnnnnnnnnnc

SEQ ID NO: 32964 - DNA, 469 bp, Homo sapiens
  misc_feature (1)...(469): n = a,t,c or g
gtgnnnnnnnnttganattcgannnnnnnnnnnnnnnnnnnnnnnnnnnnnnnnnnnnnnnnnnnnnnnnnnnnnnnnnnnnnnnnnnnnnnnnggcacgaggtctacagcagtgccagtgtggactataaaagtttttttttttccttgaaaaaaaatatatttatatatttatattataaattatatnnnnnnnnnnnnnnnnnnnnnnnnnnnnnnnnnnnnnnnnnnnnnnnnnnnnnnnacagttggggtaaggaatatcacaaaaatgatnnnnnnnnnnnnnnnnnnnnnnnnnnnnnnnnnnnnnnnnnnnnnnnnnnnnnnnnnnnnnnnnnnnnnnnnnnnnnnnnnnnnnnnnnnnnnnnnnnnnnnnnnnnnnnnnnnnnnnnnnnnnnnnnnnnnnnnnnnnnnnnnnnnnnnnnnnnnnnnnnnnnnnnnnnnnnnnnnnnnnnnnnnnnnnaaa

SEQ ID NO: 32965 - DNA, 470 bp, Homo sapiens
  misc_feature (1)...(470): n = a,t,c or g
gnnnnntnnnnnnttgnnnttnnnnnnnnnnnnnnnnnnnnnnnnnnnnnnnnnnnnnnnnnnnnnnnnnnnnnnnnnnnnnnnnnnnnnnnnnnggcacgaggtgggcattctaagttatggtaggtagcagtgataggagtctaagaaaatcattgttcatttgtgtggattctcctttatcgcttcccctttcacaactactctattttcagttaggagagaaaggcgctactctctcatcctaaatcttggtgcattggccttggaaataaaaacctccagggcacaagccaaaggaaaaactcaaaatatgatgttagtgttgagaaagtgaatgactctaatattaccagataacaaaccattttcagttctttgctttcaataaaacaaaatatactcaaattgtcagctgatctttaaaaatattgataattcatgtgcaattttttgttacataattaaga

SEQ ID NO: 32966 - DNA, 455 bp, Homo sapiens
  misc_feature (1)...(455): n = a,t,c or g
ttgnnattcgataaccgntatgacatgattacgaatttaatacnnnnnnnnnnnnnnnnnnnnnnnnnnnnnnnnnnnnnnnnnggcacgagatctctactttcactcctattcccagattataattaagatttattttttattttttatctatttattttttaaagatgtccctcttgtgtgttcattttgaagttttagaccaagatgaggttgtgtgtgggctcagcttggaaactgatctgaaattattctaatttatataatgtaatgtaaacagttttagccttaccatacgtcagggctatcgtttcatgtgcacctttgactaggggctggggcgtacttttccagtttctgactattttaaatgctcttctgagcagaacgttgagattactgtcttccctctcactctgacagagggacatcaaatgtctgcatctgatctttta

SEQ ID NO: 32967 - DNA, 432 bp, Homo sapiens
  misc_feature (1)...(432): n = a,t,c or g
nnnnnnnnnnnnnnnnnnnnnnnnnnnnnnnnnnnnnnnnnnnnnnnnnnnnnnnnnnnnnnnnnnnnnnnnggcacgagccacagactcagagagaacccaccatggtgctgtctcctgccgacaagaccaacgtcaaggccgcctggggtaaggtcggcgcgcacgctggcgagtatggtgcggaggccctggagaggatgttcctgtccttccccaccaccaagacctacttcccgcacttcgacctgagccacggctctgcccaggttaagggccacggcaagaaggtggccgacgcgctgaccaacgccgtggcgcacgtggacgacatgcccaacgcgctgtccgccctgagcgacctgcacgcgcacaagcttcgggtggacccggtcaacttcaagctcctaagccactgcctgctggtgaccc

SEQ ID NO: 32968 - DNA, 438 bp, Homo sapiens
  misc_feature (1)...(438): n = a,t,c or g
nttcgannnnnnnnnnnnnnnnnnnnnnnnnnnnnnnnnnnnnnnnnnnnnnnnnnnnnnnnnnnnnnnnnnnnnnnnnggcacgagttactttaaaagttctgcttgattattgtttcttaggaaatatgggaatgaatcttagtagtgagtatgtggaaggttctgttcttgctaaaatgtattttcctttactgagaagcaacttaaaaaataagaaatgagcttttgttcttatgtggcaaccttaatagtgatggactgattgggaagaaaggaagcccctgcttatgatgtagcatccctcagaaaaggcacactaaagacaagctgctctctccctccgatttctgacaacaggaacaggagaaagcactgcagaaagcctgaactccattcacagctgggtaccacaactcccataaagatgagatttaa

SEQ ID NO: 32969 - DNA, 429 bp, Homo sapiens
  misc_feature (1)...(429): n = a,t,c or g
tttgantcctnnnnnnnnnnnnnnnnnnnnnnnnnnnnnnnnnnnnnnnnnnnnnnnnnnnnnnnnnnnnnnnnnggcacgannnnnnnnnnnnnnnnnnnnnnnnnnnnnnnnnnnnnnnnnnnnnnnnnnnnnnnnnnnnnnnnnnnnnnnnnnnnnnnnnnnnnnnnnnnnnnnnnnnnnnnnnnnnnnnnnnnnnnnnnnnnnnnnnnnnnnnnnnnnnnnnnnnnnnnnnnnnnnnnnnnnnnnnnnnnnnnnnnnnnnnnnnnnnnnnnnnnnnnnnnnnnnnnnnnnnnnnnnnnnnnnnnnnnnnnnnnnnnnnnnnnnnnnnnnnnnnnnnnnnnnnnnnnnnnnnnnnnnnnnnnnnnnnnnnnnnnnnttttaactcttacatgacatgacctcatgccatgtaaaagttaaaggtgt

SEQ ID NO: 32970 - DNA, 442 bp, Homo sapiens
  misc_feature (1)...(442): n = a,t,c or g
ttgctttgataccgtnnnnnnnnnnnnnnnnnnnnnnnnnnnnnnnnnnnnnnnnnnnnnnnnnnnnnnnnnnnnnnnnnggcacgaggatttccctgtgaaaatcatgaatgactgtggctaccatgtaaaaccatccctgattctttggtgttcctcaaattggaggtctccaagccacagagcaaggggttgtagagagaggagtactggacagggaggcaggtgggccaggttctagtcccagctctgcctgtaatgtgctgagtgacccttcccttctgggcctgaggctcttcatccataaaaggaggtaaagaggtacaggtgtgtgtctgagggctcttaggactgagacccaaagggactcttagctctgtccctcacccactatgagctcctgctgctgactggtttcgttacaggaagttctgctgtggct

SEQ ID NO: 32971 - DNA, 433 bp, Homo sapiens
  misc_feature (1)...(433): n = a,t,c or g
ttcgntacnnnnnnnnnnnnnnnnnnnnnnnnnnnnnnnnnnnnnnnnnnnnnnnnnnnnnnnnnnnnggcacgaggacttatatactaaccgaaagagggccacatgctcctgggaactgaaagcaatacagtagcctagttaatcccttgaagaagcactcatgtggccacttgctcatggatttaacccattctagtggctgagatcagacccagacctcaagaagccagcatgtggtgcatgtgcagtgaccagagcttagtgatctgggcattttctgcatgttcaacaaatattggatggacatcattggtatattcatctatagattaggtgatctgagggcaggtgagaggaaaagacgtggcctccagccttaagaaacttattactgtttggaatgggagatcatacagacctacatcaaacc

SEQ ID NO: 32972 - DNA, 436 bp, Homo sapiens
  misc_feature (1)...(436): n = a,t,c or g
natccgnttcnnnnnnnnnnnnnnnnnnnnnnnnnnnnnnnnnnnnnnnnnnnnnnnnnnnnnnnnnnnnnggcacgaggaaaaccacttgtttagatgataaattctggcatgattattaagaaaacactgtctctatttaaagactgatttcttccatttacttagaaatgaatagtagtgaacaaagaagaggaaattatcaagcacaaaacaaaacgttgctacactgttaaaatgggctctaaatgtacctaaatcataaacatattcattcctaattaagacactttggtgttcatatacaaggcaattcctatgatgcctcacataaaggtggtatttgagctggtatttatttgaacatcagctacatcaacagtcccaataccatggaagaagccagggcagtgactctgaaagtgcagccttaacc

SEQ ID NO: 32973 - DNA, 459 bp, Homo sapiens
  misc_feature (1)...(459): n = a,t,c or g
gnnnngnnntnnnnnttnnccttcgannnnnnnnnnnnnnnnnnnnnnnnnnnnnnnnnnnnnnnnnnnnnnnnnnnnnnnnnnnnnnnnnnnnnnnnggcacgagaagttgtgaaaacaagagcagaaggcgaatggctctccttcgatgtaactgatgctgttcatgaatggcttcaccataaagacaggaacctgggatttaaaataagcttacactgtccctgctgcacttttgtaccatctaataattacatcatcccaaataaaagtgaagaactagaagcaagatttgcaggtattgatggcacctccacatataccagtggtgatcagaaaactataaagtccactaggaaaaaaaacagtgggaagaccccacatctcctgctaatgttattgcctcctacagacttgagtcacaacagaccacccgcggaagaagcgtgctttggatgc

SEQ ID NO: 32974 - DNA, 439 bp, Homo sapiens
  misc_feature (1)...(439): n = a,t,c or g
ttcgatacagntnnnnnnnnnnnnnnnnnnnnnnnnnnnnnnnnnnnnnnnnnnnnnnnnnnnnnnnnnnnnnnnggcacgaggatatctattgctggtttcagcaccaagctgatgttacttgcctcttcttcacagattctgctcacagaaaaactaacacatcactaggcccatcagcgaaattattttgcctggccctgcccttaaaagacattgtgacatactacagtgcccagcatcaatgtaatttgtctcctgcctaaaccctgcctactgggggcattgtgacatatctcttggcccatcaactatttgatgtgactctactttcttacctgggctttgccaatagtagagcttgtgacctatctctgggcccagcacctagatgttatgactctcccgcctggtccatgcacacaaaaaagagagtgat

SEQ ID NO: 32975 - DNA, 441 bp, Homo sapiens
  misc_feature (1)...(441): n = a,t,c or g
ttgnctccgtttccatgattacgaatttaatacgactcnnnnnnnnnnnnnnnnnnnnnnnnnnnnnnnnnnggcacgagagaagtagggcaattttcttgagagaaagcacttacataattgtactatttactttttccatggagcctaattttgacttgaaagaatgacagactgttgagagagatggggagaggttaaggagggggcccaagtgaacaatatcaggaatgaaagagggggaatattactacagatcttacagacattaaaatgatgataagggaatatcgtgaacaattccatgcccctaaatttgatgacttaagagaaattgatcaactccttcaaagacacaaactaaaactcactcaagaaaaaatatgtaacctgaatagtcctatatctattanagaaatccgaattcaagctgggggtggg

SEQ ID NO: 32976 - DNA, 449 bp, Homo sapiens
  misc_feature (1)...(449): n = a,t,c or g
ttgacttcgntacnntgagacnnnnnnnnnnnnnnnnnnnnnnnnnnnnnnnnnnnnnnnnnnnnnnnnnnnnnnnnnnggcacgaggattctacctactgaatggtatcgtgttttcatccatccactgtgttttggttacaatactttctgcggcaaataatagcaaacctgactaaaagttgtttaaatatcaaggactcttgccattatgcataaaaaagattctggacttaggctgtttccagggttagttcagcagttgaaactatcagaactctgggatggcttttctacagcttctttgatcttctgcttcagcaatatagcaatgtagcaataaacatcactttctcccttaacaaaatccagaagccaaaaggatagggttctttctcgaattcctcagtcttcctatcagggtggaaaatctttcctanggataccct

SEQ ID NO: 32977 - DNA, 447 bp, Homo sapiens
  misc_feature (1)...(447): n = a,t,c or g
gnanaccgtnnnnnnnnnnnnnnnnnnnnnnnnnnnnnnnnnnnnnnnnnnnnnnnnnnnnnnnnnnnnnnnnnggcacgagcctgtaatacttcacctccaggaactgtcatggatgtccaaatggctttgcagaaaggaaatgagatgacagtatttaatcgcagcagtagcaaacttttcacatgctaatgtgcagctgagtgcactttatttaaaaagaatggataaatgcaatattcttgaggtcttgagggaatagtgaaacacattcctggtttttgcctacacttacgtgttagacaagaactatgatttttttttttaaagtactggtgtcaccctttgcctatatggtagagcaataatgctttttaaaaataaacttctgaaaacccaaggccaggtactgcattctgaatcaaaatctcgcagngttctgtgaaa

SEQ ID NO: 32978 - DNA, 455 bp, Homo sapiens
  misc_feature (1)...(455): n = a,t,c or g
ttggnnancctttgagnnnnnnnnnnnnnnnnnnnnnnnnnnnnnnnnnnnnnnnnnnnnnnnnnnnnnnnnnnnnnnnnnnnnnnnggcacgaggcgtgggctgcaggctctctaattctaggtgggtactcttgccatgttcagtatggcctcatttcccagcctgctcaggggattttctaggcaacaaattcatctctttatgttttgaaatctttataaatgacctgcctttcttttcagaatgcattatgagtagtagcaacttcatccccaggaggtgaatgaggaacttcttagcccttagctcaatggccccaggccactgttttgactttctcgggatttgttcttcctaatttttctgcatctcacctctgccaggctacgggctgtcacctctgnngttagtagttgctaatagactagntcccattccccctgtttagttta

SEQ ID NO: 32979 - DNA, 455 bp, Homo sapiens
  misc_feature (1)...(455): n = a,t,c or g
tttganaaccttnnnnnnnnnnnnnnnnnnnnnnnnnnnnnnnnnnnnnnnnnnnnnnnnnnnnnnnnnnnnnnnnnggcacgaggagatgcctagcaccccacagcagttacagaacttgacagaagatatacgtgaacgagttgaaagcctttctcaagtagaggttattcttcagcatagtgctgctgacattgccagagctgagatgttgttagaagaagctaaaagagcaagcaaaagtgcaacagatgttaaagtcactgcagatatggtaaaggaagctctggaagaagcagaaaaggcccaggtcgcagcagagaaggcaattaaacaagcagatgaagacattcaaggaatccagaacctgctaacttcgattgagtctgaaacagcagcttctgaggaaaccttgtcaacgcgtcccagcgcatcagcgagttanagaggaatgg

SEQ ID NO: 32980 - DNA, 455 bp, Homo sapiens
  misc_feature (1)...(455): n = a,t,c or g
ttgaaaacctttgannnnnnnnnnnnnnnnnnnnnnnnnnnnnnnnnnnnnnnnnnnnnnnnnnnnnnnnnnnnnnnnnnnnnnnnggcacgnnnnnnnnnnnnnnnnnnnnnnnnnnnnnnnnnnnnnnnnnnnnnnnnnnnnnnnnnnnnnnnnnnnnnnnnnnnnnnnnnnnnnnnnnnaggaacagattttttacctctgtgtattttactctgcccacacagatcagattgtgagctctaataaggaaatttctccttgatttaaatgaatatttgccagcatttgacaatttgccaagtgttcatgtatgtccaggaattttctcccagcccagccttatcaccattggcattttccaaatgaggaaacagaggctcagggaaacttctcgctgctctgggcttgccagggaggattggatcccaacagacttgggctnttttgtctgt

SEQ ID NO: 32981 - DNA, 471 bp, Homo sapiens
  misc_feature (1)...(471): n = a,t,c or g
gnnnnngnnntngntnttnctncgnaacctnttgaatgacncgaattttnnnnnnnnnnnnnnnnnnnnnnnnnnnnnnnnnnnnnnnnnnnggcacgagcattctccagctactccctgcagagcgagtctgtcagcaggccacaccgcaggtagctcaggtctaaacagaccgtcatctaaacaggaggcttcagtaccatcttcccatgtaggcaagccctgaagacctcaggcttggcaatgaatgccatcatctctgctgcattgactatttctaacaacaggatcagaacattgccacagacacatgtgagccctggttacctccatgcccttaccagaatgctgtcgaagctggctcctcggtctggactggacagatattttatgaaaaaagttgagagccaaagcacccataaggtcctgatttagaagcatcattttaataatattcatcttctctggctg

SEQ ID NO: 32982 - DNA, 452 bp, Homo sapiens
  misc_feature (1)...(452): n = a,t,c or g
ggtgnnncccccnttgacnnnnnnnnnnnnnnnnnnnnnnnnnnnnnnnnnnnnnnnnnnnnnnnnnnnnnnnnnnnnnnnnnnnnnnggcacgaggaaggaagcgctgatcttctatttaattccccacccatgacccccagaaagcaggagggcattgcccacattcacagggctcttcagtctcagaatcaggacactggccaggtgtctggtttgggtccagagtgctcatcatcatgtcatagaactgctgggcccaggtctcctgaaatgggaagcccagcaataccacgcagtccctccactttctcaaagcacactggaaaggccattataattgccccagcagagcagatctgctttttttccagagcaaaatgaagcactaggtataaatatgttgttactgccaagaacttaaatgactggttttgtagcttgcagngctt

SEQ ID NO: 32983 - DNA, 437 bp, Homo sapiens
  misc_feature (1)...(437): n = a,t,c or g
ccattgaatnnnnnnnnnnnnnnnnnnnnnnnnnnnnnnnnnnnnnnnnnnnnnnnnnnnnnnnnnnnnnnnnnnnnnnnggcacgagcacatgtcaattctgaaaaatactctgttttctcttttagtagcatttcttctgtattctctgtatcatttaaaaatttttcttcaaatttactattttttcagccatctactgtttagtgcatccattgagtttaaaaaattttgatcactgtattttttatttctaaaatttctataaatttccttttcaatattgcctggtcttttttcttttttaatacatccctgtgccttgccgcatcctcttgatttccttctgaatgtgttgagtatatttattttcaaatctcttttcggttgctctattatcctcagttctggtgatctcttttgactggtgtgtctat

SEQ ID NO: 32984 - DNA, 439 bp, Homo sapiens
  misc_feature (1)...(439): n = a,t,c or g
ganatncctnnnnnnnnnnnnnnnnnnnnnnnnnnnnnnnnnnnnnnnnnnnnnnnnnnnnnnnnnnnnnnnggcacgaggagggtagcaggtgctgttttcccataccccttcgggtggggaccagctgaggctggcctctctatgttatctggtaccctgggtcagggtgagacagaaggacctgtctagtgatgctggggtttggtccaaggctttcagaaacccctcctctctttgcggcccaggatataccccctacagaactacattttggggagaaatggttccacaagaaggtggagaagaggacgagtgccgagaagttgctgcaggaatactgcatggagacggggggcaaggatggcaccttcctggttcgggagagcgagaccttcccaatgactacaccctgccttctggtaatgcccccgaccca

SEQ ID NO: 32985 - DNA, 432 bp, Homo sapiens
  misc_feature (1)...(432): n = a,t,c or g
anancnnnnnnnnnnnnnnnnnnnnnnnnnnnnnnnnnnnnnnnnnnnnnnnnnnnnnnnnnnnnnnnnnnnggcacgagcattattaagcaagacactagggaggaggttgcccaaggacctgaatgccaggagacaaggggatcaccggaacccatctgggaaaactgcatggtgggaggaatagaagacgctctttagctcagacctcaggtcctttacagccaggtagggaggattcctcagtagcagcagtggggtgtccaggactgtgtctcacgtgtctttaacacaccagcatcactttagctccatcattgctgtaggtaaatgagcctcctttcccctaaaatgccctgcacccttttctgaaattcttaacagtaattcttctttaaaggntaatttcnttctgcaaaagtttttgccttt

SEQ ID NO: 32986 - DNA, 438 bp, Homo sapiens
  misc_feature (1)...(438): n = a,t,c or g
nnnnnnnnnnnnnnnnnnnnnnnnnnnnnnnnnnnnnnnnnnnnnnnnnnnnnnnnnnnnnnnnnggcacgagctcagtttgcaccttcacattcaggagtatgtctaatctgattacctatcacactcctgaatatcacgctcctgaacatgaaggtgtaagctttgcctgaagtcccagagacactcagcagcggtgcagaatttgcacctgggtctgtctggttcccactcacctatcaccacagggctgcgggtcggagctcaggatccagcacttgagactgtcgctgctcaccctgtcaccaacttgctggagagagcctgggtcagcttctgttcaccactgactctcctgggcctggccagagtagctgttcaaaaggaattcttgactggaaataatgagcatccgaaaaggcatttcaagaaacaaat

SEQ ID NO: 32987 - DNA, 451 bp, Homo sapiens
  misc_feature (1)...(451): n = a,t,c or g
ttgnaaccctttttganacccttgacnnnnnnnnnnnnnnnnnnnnnnnnnnnnnnnnnnnnnnnnnnnnnnnnnnnnnnnnnnggcacgagtaaacataccataaagcctggtttaaaggcatcttgggcctcagtgaggaacagaacggcatcttctgagacaagggttacctctgagtccctgaaggcacactggcacctggccgccaccttgaagatgaatctcatttaggtcatttgactaaatgtgcctgagagtgactgagggggcttgttaaaatggagattcctggccccatacctggtgacgagcattctgagggcgggaggtgtctcccagaggtcagcacatccacccaaccaacactgcctgatgcaggcagctgcagagcccacgcccagagcagctcctcaagggcccaggcgcctgctatggggcccctgaggcg

SEQ ID NO: 32988 - DNA, 446 bp, Homo sapiens
  misc_feature (1)...(446): n = a,t,c or g
nnnnnnnnnnnnnnnnnnnnnnnnnnnnnnnnnnnnnnnnnnnnnnnnnnnnnnnnnnnnnnnnnnnnnnnnggcacgagctggagtttgcttattgtactctctctgttaaaatactcccttcagacaagcccatgctgaaataggataggtctactgctagtagcacccatttcaatcaccagggcagtttattacccttttatctctacagagaaaataccaatcaatggtccctaaaagctggtctacacactggcatgtgtcagtgataacatctccaccaggccatagcattcttctcaaataagttctactactatatgccaatgagcaaagccttaagctaagtcctaggtatgagcagtgttagggcttagaacatgataccccaaagtatggtgctttagcatgctgagtactttaaactaagagagattagaagg

SEQ ID NO: 32989 - DNA, 464 bp, Homo sapiens
  misc_feature (1)...(464): n = a,t,c or g
gnntnnnntnnnnnnntttgnanancnctatgacnnnnnnnnnnnnnnnnnnnnnnnnnnnnnnnnnnnnnnnnnnnnnnnnnnnnnnnnnnggcacgagccagtcccttggggctggcatcagagaagaagtctgtttaacatctgtggaaaaggttacctttgaggttctttcagctctaatgattgtagcatatcccctgatgttctctgttatcactgtagtgggctgaaatgtcccccccccaccaaattcatgtccacctggagtcttatttagtgacctaattattttaaaatagcattttttttnnnnnnnnnnnnnnnnnnnnnnnnnnnnnnnnnnnnnnnnnnnnnnnnnnnnnnnnnnnnnnnnnnnnnnnnnnnnnnnnnnnnnnnnnnnnnnnnnnnnnnnnnnnnnnnnnnnnnnnnnnnnnnnnnnnnnnnnnnnnnnnnnnnnnnnn

SEQ ID NO: 32990 - DNA, 446 bp, Homo sapiens
  misc_feature (1)...(446): n = a,t,c or g
tttgannaccgnnnnnnnnnnnnnnnnnnnnnnnnnnnnnnnnnnnnnnnnnnnnnnnnnnnnnnnnnnnnnnnnnnggcacgagaatatttatggatacatcccataccctattggataaaatatctgagccaacaaattcacacatttttggaattttcttcaggttttctgtaggtgcttaacgcttagtatttcaatgatactgtttaatcaaacagcttgctaattttaatacctttccacatcagaacctgagacaggccagtgtaacgaaatgtatcagaggtagacagttaagagtcctgatttctattcttagacctgctggaaaccagcatgtgatttggaccagtcatcctatatgggctgtagttcactcatctctaaagtaaggagattagataagtgattcccaaacggataattgtgacaagcattcagga

SEQ ID NO: 32991 - DNA, 449 bp, Homo sapiens
  misc_feature (1)...(449): n = a,t,c or g
ttggaatngaatgccnnnnnnnnnnnnnnnnnnnnnnnnnnnnnnnnnnnnnnnnnnnnnnnnnnnnnnnnnnggcacgaggaatggacagacagagccaacagtnnnnnnnnnnnnnnnnnnnnnnnnnnnnnnnnnnnnnnnnnnnnnnnnnnnnnnnnnnnnnnnnnnnnnnnnnnnnnnnnnnnnnnnnnnnnnnnnnnnnnnnnnnnnnnnnnnnnnnnnnnnnnnnnnnnnnnnnnnnnnnnnnnnnnnnnntacgaagggnnnnnnnnnnnnnnnnnnnnnnnnnnnnnnnnnnnnnnnnnnnnnnnnnnnnnnnnnnnnnnnnnnnnnnnnnnnnnnnnnnnnnnnnnnnnnnnnnnnnnnnnnnnnnnnnnnnngttttctttaaatcttcatcatgccagtacttccctcctcctgttttcatcttcctgtatttgcaa

SEQ ID NO: 32992 - DNA, 472 bp, Homo sapiens
  misc_feature (1)...(472): n = a,t,c or g
gnaggttgtgttttncanataagaacttnatggaactcncctganttttanggnnnnnnnnnnnnnnnnnnnnnnnnnnnnnnnnnnnnnnnnnnnnnnggcacgagtcacatcatatcaaggattcatactatcaacatgacttactactgttgatattaaccttgatctcccaggtgaggaggtgttgtcaggtttctccactggaaagctgttctttttttctcgtccatactatcctcttttggaaggaagtcattatgcaaggcccacacttaaggaatagagagttatatcagtatggacttgtggatatttattttatgacttgcattacaatctaatactactttttttcccnnnnnnnnnnnnnnnnnnnnnnnnnnnnnnnnnnnnnnnnnnnnnnnnnnnnnnnnnnnnnnnnnnnnnnnnnnnnnnnggntttgngntttgtgttngntttttaagcact

SEQ ID NO: 32993 - DNA, 439 bp, Homo sapiens
  misc_feature (1)...(439): n = a,t,c or g
anacctgnnnnnnnnnnnnnnnnnnnnnnnnnnnnnnnnnnnnnnnnnnnnnnnnnnnnnnnnnnnnnnnnggcacgaggggaatttggggggtaatgaaaatattctaaaactagattgtggtgatgttgcatagctatataaatttaccaaaaccattgaattatatatatacttagaatggatgaatgttatggtatgtaaattatacctcaatttaaaaaaagggagcatgaaaatgaattttgccagctcaagtaataagaaacagtgtttgacaagggtagtcatttgagaaatgatgaaagagatttagagatataatctttcaggtgaaaggaaaagggttttgacttgatttgataaacgaagaaagggaactctttcacttttgccttaatcttcagtaaatgtcaaagttaacatcaagtatctattt

SEQ ID NO: 32994 - DNA, 443 bp, Homo sapiens
  misc_feature (1)...(443): n = a,t,c or g
ttgnanacctnnnnnnnnnnnnnnnnnnnnnnnnnnnnnnnnnnnnnnnnnnnnnnnnnnnnnnnnnnnnnnnnnnggcacgagctggtttgatgttgacattaccaaggaatacctaggaaacagggatggcaggaaggtggggaaaggaggcaagggaagaaagggaaattatggaagaaaataagttgcctcgtggtcttccagttccaggttctaaatttggtttctgtcctgttacatgagaaaccctgcaaattttcaatactttgcctttacttgctgaaggtagtttgagtgggttttataatgtttttaaactttctccagatacctaccatgatagcctgcttcatggaatagatgttacccggccttctgggagcagtgcaggcctgtgcaattatacttgcactgcagcctatctgctatcagcagtgctt

SEQ ID NO: 32995 - DNA, 429 bp, Homo sapiens
  misc_feature (1)...(429): n = a,t,c or g
nnnnnnnnnnnnnnnnnnnnnnnnnnnnnnnnnnnnnnnnnnnnnnnnnnnnnnnnnnnnnnnnnnnggcacgaggctgagaatgagatccctgaatgattgactcaagagttcaccttcctttccactgagctatgatggttcctgtatcgttatctagtaaattggcaatatagaagcactaaatgcttggagaatacagaatatgaggtagatcttgatggcttcatagaatcacctgggaggagagaaatgttgaagtattcgcaggcaggaaacagtgttgaactaaaaccttaaaggagaggatgagggtaatatgtctgtaggtttggatggttatagggtagatgtactataagtgaaaaaaaatcaaggtatggagcagtatgaatgtcacccttattatatgaatatatgtatgtatat

SEQ ID NO: 32996 - DNA, 444 bp, Homo sapiens
  misc_feature (1)...(444): n = a,t,c or g
ttgnanaccttnnnnnnnnnnnnnnnnnnnnnnnnnnnnnnnnnnnnnnnnnnnnnnnnnnnnnnnnnnnnnnnnnggcacgagcggcacgagtgtttatttnnnnnnnnnnnnnnnnnnnnnnnnnnnnnnnnnnnnnnnnnnnnnnnnnnnnnnnnngacagagctagtattcaaatgtggagcagtctgattccaagcatcgcacctttaacctttaatttcaacatcagccttattatgcactacttttcatatactgggttccagctaaactgcactttcctttcgtatgctgttgcattgccattcctcctctccacactgccccttctcttcatttgtttgttgagtgctataagaatcttcagattgatcatcattgcttgctgaaaagtcgaaataatagactttgctgatactcagtaaaagaagaatgngcta

SEQ ID NO: 32997 - DNA, 440 bp, Homo sapiens
  misc_feature (1)...(440): n = a,t,c or g
actttgnatanccgnnnnnnnnnnnnnnnnnnnnnnnnnnnnnnnnnnnnnnnnnnnnnnnnnnnnnnnnnnnnnnnnnnggcacgaggaatattcagcctgccaccaccatatgagattagggaacagtagggggaagaaaagggagaaatttctgagttaggggagtgacagtgggtatggagagttagaaaggatatgaggtagaattttcagggcagggaagacgaagggcccataataagcttcaggtttgagcctgagtgattgggaggctcagggtactataaacagtatagagaaaagaaaacagaggggcagagggaataaatttagggcatgttggagctgatgcgatctctgggaaactcaggtggagactcctactcacatcatcatctcaaccttagtgttntgaactccagnggcaggtcggctgg

SEQ ID NO: 32998 - DNA, 443 bp, Homo sapiens
  misc_feature (1)...(443): n = a,t,c or g
tttgagnnnnnnnnnnnnnnnnnnnnnnnnnnnnnnnnnnnnnnnnnnnnnnnnnnnnnnnnnnnnnnnnnnnnnnnggcacgagattgcatcatttatatttgtacacatctgcttccccattagactgtaaaatccttgagactaaagactctttcttttaatctatatgtcccggtacaatgtctgagaaaaagtaggtagtaagtgcttaagaaacattttctgaatgactatatgtagtgggggatctcaggcttgcgaagttcccctaaaagatatacattttctattcttcatctcactggcaccaaatgatatttaaagggcaaggagaacaaataggaaagtatctctcagggaacaggtttaatatgttgacattaaaagacaatctaatggggattttgataaattactttcagtaaaactatcaatctaag

SEQ ID NO: 32999 - DNA, 468 bp, Homo sapiens
  misc_feature (1)...(468): n = a,t,c or g
gtgnnttnnnnntttgaagatnnnnnnnnnnnnnnnnnnnnnnnnnnnnnnnnnnnnnnnnnnnnnnnnnnnnnnnnnnnnnnnnnnnnnnnnnnnggcacgagcggcacgaggaattcatttgctttggctatattctttataggctaataactttcagacttttactgtctggaacattcttcggtcacagagatagccactgtcactaagctgtatcaatacagtacaacgctattccctgtcacccctgcactgagaacttcgacttattttctgtcaatatttttagctttcaattttaatccttatattttgtacgtgtatattgtgaataactatacatacttgctaagtatagaattgtatatacaattttgggggtgattagaaacagaatcccggagaattcaacaaaatcaagaaattgtgtgtttgttgaatggcttcagctacatggtataggag

SEQ ID NO: 33000 - DNA, 472 bp, Homo sapiens
  misc_feature (1)...(472): n = a,t,c or g
gtgnnntnnnnnnttggnnattggnnanccgnnnnnnnnnnnnnnnnnnnnnnnnnnnnnnnnnnnnnnnnnnnnnnnnnnnnnnnnnnnnnnnnnnggcacgagttggcagtttctcaaaaagttaaacacaaagttgctgtatggcccagtgtttcatacctgggtatctacaaacaagagaaatggaaacatgtacacgcagnnnnnnnnnnnnnnnnnnnnnnnnnnnnnnnnnnnnnnnnnnnnnnnnnnnnnnnnnnnnnnnnnnnnnnnnnnnnggaggaatgaatagattaaatgtagtttgttcatatgttagaatacagagcgataaaagaaaataaattgatacatgctacctggatgaacctcagaaacactatgttaagtgaaataagccagacacaaataaccacatgtatgaatctattacataaaatgttcagaaaagtaacagagacagaaagta

SEQ ID NO: 33001 - DNA, 457 bp, Homo sapiens
  misc_feature (1)...(457): n = a,t,c or g
ttgnaaatcggnnnnnnnnnnnnnnnnnnnnnnnnnnnnnnnnnnnnnnnnnnnnnnnnnnnnnnnnnnnnnnnnnggcacgagggagagttctcacaaaactccatggaagaaaaacaagaaactaaaagcacagatggacaagaaccacacagtgtagtatatgatacaagcaatggaaagaaggtagttgacagtataagaaacttgaagtcgttgggcccaaaccaagagaatgtagttcaaaatgaaataattgtctatccagagaacacagaagacaatatgaaaaatggagtgaagaaaacagaaatcaatgtagaaggtgttgccaaaaataacaacattgatatggaagttgagagaccatcaaactctgaggcacatgaaactgatactgctataagttacaaggaaaaccatctagcagcttcatcagtaccagatcaaaaactgg

SEQ ID NO: 33002 - DNA, 467 bp, Homo sapiens
  misc_feature (1)...(467): n = a,t,c or g
gtgntnnnnnntttgaaaccnnnnnnnnnnnnnnnnnnnnnnnnnnnnnnnnnnnnnnnnnnnnnnnnnnnnnnnnnnnnnnnnnnnggcacgagcnnnnnnnnnnnnnnnnnnnnnnnnnnnnnnnnnnnnnnnnnnnnnnnnnnnnnnnnnnnnnnnnnnnnnnnnnnnnnnnnnnnnnnnnnnnnnnnnnnnnnnnnnnnnnnnnnnnnnnnnnnnnnnnnnnnnnnnnnnnnnnnnnnnnnnnnnnnnnnngaagatatattacttaagaaaacatattattctgtgacagtgttgtttgaattacaatgattgacttggcgataaacatacaggattactatttaggtgtaaagaataatgttgcagcagctaaaaaacacttctgtcaaaaaaaaatcatgaattgtgaagtattttcctctttccttaaaaagtaaataatcagagtaaaataagctctt

SEQ ID NO: 33003 - DNA, 377 bp, Homo sapiens
  misc_feature (1)...(377): n = a,t,c or g
accnnnnnnnnnnnnnnnnnnnnnnnnnnnnnnnnnnnnnnnnnnnnnnnnnnnnnnnnnnnnnnnnnnnggcacgaggaggtcagatgctcttgcctgttctctaggtgcccagcatgcgggaggggagtggttgatgtctacagctgaagacacctcgatttgggcaatgcctccaatacagaaatgttcgttcaaaaatacaaggnnnnnnnnnnnnnnnnnnnnnnnnnnnnnnnnnnnnnnnnnnnnnnnnnnnnnnnnnnnnnnnnnnnnnnnnnnnnnnnnnnnnnnnnnnnnnnnnnnnnnnnnnnnnnnnnnnnnnnnnnnnnnnnnnnnnnnnnnnnnnnnnnnnnnnnnnnnnnnnnnnnnnnnnn

SEQ ID NO: 33004 - DNA, 453 bp, Homo sapiens
  misc_feature (1)...(453): n = a,t,c or g
acccctttgnacanccgnnnnnnnnnnnnnnnnnnnnnnnnnnnnnnnnnnnnnnnnnnnnnnnnnnnnnnnnnnnnnnnnnnggcacgagtgttcttcttaaaagcgttatttcttatcagacaaaattatagatcctttaattattgttagtttaggacacagtaaaagactttaataacattggcaggctatcgcatatatttctgggtattagtctcaagttcactgtgtactttttcatgaaaaactatgtaattgagagagcagctgcacccttatttgttgcagatcttgatttattctatttttaaaaaaaacattcagaagatatctttgtatcaaaagaaatgctaatgattttctttagaatgtgaacccattttaatcaatactggccaatctttgtcactttgctgattgcatgtatttgtgacccttagattgtaggga

SEQ ID NO: 33005 - DNA, 445 bp, Homo sapiens
  misc_feature (1)...(445): n = a,t,c or g
ttggananccgntntgacnnnnnnnnnnnnnnnnnnnnnnnnnnnnnnnnnnnnnnnnnnnnnnnnnnnnnnnnnnggcacgaggaaataagacactattttttgccatcatcttttagagtgaataaaaaagtgttaaatacctcttattgggccttgtgaacattgggtagagccattaattattttgttatgagttgcttgctaatttttttctgagataaatattttcatttggtcctgatttttttttttttnnaaanggantttngnttttgtnncccaggntgnagngcaccgnaangatntgggttnaccnnaaanttnncctccngggttnaanaaattntcnngcctnanttantnggnnggntgaaacnggaaaatngntngaccctgaaaaanggnggttncagngacctnaaatnggnccttngaactccaa

SEQ ID NO: 33006 - DNA, 484 bp, Homo sapiens
  misc_feature (1)...(484): n = a,t,c or g
gnnnnngnnngnntgnnntccccnccttggacaccctttgnacaccgtnnnnnnnnnnnnnnnnnnnnnnnnnnnnnnnnnnnnnnnnnnnnnnnnnnnnnnnnnnnnnnnnnggcacgagcaaagtaaaggatttggaatctgaaaaagaataatgtctaacttggtaccaaataatgtttccaggactggtttgaaggatcagatgtgagtttttcaaattggaaccttttctaatgggcccctgggaaatgtcttagctaaattgcaacagtgactggtgaagtcgatcgaggtaaattgctcccattgctgagggttcagaaaccaggcagtggaagctaaaatttcaggggaaatcgggcggaactattgcagatggtttcccccttgaatagagatgggggttggtgtcgctgatgatgaatgggaggagattaaagcctganttttgcaacgaagttggtaacattctctttgggag

SEQ ID NO: 33007 - DNA, 449 bp, Homo sapiens
  misc_feature (1)...(449): n = a,t,c or g
aaccgntnnnnnnnnnnnnnnnnnnnnnnnnnnnnnnnnnnnnnnnnnnnnnnnnnnnnnnnnnnnnnnnnggcacgagcattacccctggatcatgaacactgcttaagtctattcgttctctaaaccattgcaggacagagtatatattaaaataaatttttcctatctaatacaggttgttcccgaaaacgaaattgctagaataatacttttaatagaattatagtaatagaacaatacttttaaatgcctggggattcaattatttaaagaaatttggttgtaaagatttttaaaaacaatgcttttatcataaaattggaattttataaattaggtttgcttaaggtgagaggggactctgatggtaaagttatacagggaacaattaatttttattgaggtgaggatgcaacaagtaagatttggggaaacagaaataagga

SEQ ID NO: 33008 - DNA, 437 bp, Homo sapiens
  misc_feature (1)...(437): n = a,t,c or g
cnnnnnnnnnnnnnnnnnnnnnnnnnnnnnnnnnnnnnnnnnnnnnnnnnnnnnnnnnnnnnnnnnnggcacgagtgaaaaagaagaaaatgaaggaaagcgaggctgacagcgaggtgaagcatcaaccaattttcataaaagaaagattgaagctttttgaaatactgaagaaagaccatcagctcttacttgccatttatggaaaaaagggggatacaagcaacatcatcacagtaagagtggctgatgggcaaacagtgcaaggggaagtctggaaaacaacgccttaccaagtggctgctgaaattaggtaaaccgcagtgtggaaaagatattcaatcttaagtaattatactgaagcctggtgaaaatgttttcttagggaccgctaatatattactccattctcacgatactaaaaggacatgtctgag

SEQ ID NO: 33009 - DNA, 463 bp, Homo sapiens
  misc_feature (1)...(463): n = a,t,c or g
gnnnngnnnccccattggcccccccattgaacanccnnnnnnnnnnnnnnnnnnnnnnnnnnnnnnnnnnnnnnnnnnnnnnnnnnnnnnnnnnnnnnnnnnnggcacgagatattaatataattttagatagatgtatctagatctctctctctcatatatatgtgtgtgtgtatatatctatatctatatctatatatatctccttttacccttaaatattcagtgtatatttcctaacaacaaggtgatttaaaaatatatatataaacatagtataattaacaatcaggacatcaacattgaaacatttctgctatgtcatctacaggccttaggaagactttgtcaggtgccccaataatagccttgatggtagaagaaaaccatgtgttgtattcagttgtcatgtctcttantgtcttgtaatctgaaataattcccaagccctttggatttcatg

SEQ ID NO: 33010 - DNA, 437 bp, Homo sapiens
  misc_feature (1)...(437): n = a,t,c or g
cgctntgacatgactacgaatttaatacnnnnnnnnnnnnnnnnnnnnnnnnnnnnnnnnnnnnnnnnnggcacgagtttttgcttgctattgtttttctgttttattccttacagacagactattgccttatgttgccatctgtgtacccttctaattggctgatttgatcctgttgagaaaactataaatggtagtttcccacactgttcataaagttttccttaaaccatctatggcacttgaatgtttatgagttctacatcaggttcttataaagacagttctactcctgctctctctcttgagggttccattgccatagtacatctgcttctgtttgagcatctccttgattctttcccaagtgattagctctacaactgtagcttccaagtggaacataacagtatgccaggcttggccaggcgtggtaa

SEQ ID NO: 33011 - DNA, 453 bp, Homo sapiens
  misc_feature (1)...(453): n = a,t,c or g
ttgnccacccccttngnacacccgtnnnnnnnnnnnnnnnnnnnnnnnnnnnnnnnnnnnnnnnnnnnnnnnnnnnnnnnnnnnnnnnnnggcacgaggtcgataagttgggctacattaaaattaagtttctatttatgaaaagaccactaataaaagaatgaaaagtcaaagaatgggaatagatatttacaatgcatatatctaacaaaggactcttatccaaaatatattatttttctacattgtatgtatatatccgaaaaaacacagagccgaacagatacttgagcaaaaaagttgaattggtcaataaacatgaagtgatttaccactttatcaatcttaagggaaatgcagatttaaatggtagtatcataccatctgacacccaccagttgattaaaatgaanaataaggaaaatagcagacatactttaactctcatttagg

SEQ ID NO: 33012 - DNA, 443 bp, Homo sapiens
  misc_feature (1)...(443): n = a,t,c or g
anccgcnnnnnnnnnnnnnnnnnnnnnnnnnnnnnnnnnnnnnnnnnnnnnnnnnnnnnnnnnnnnnnnnnggcacgagaactgggtttataaataccttttacaaaggaggtgtactcaaatctacagaaaagcaagtttacagattaaatggaacagtaagttgatcaagcccggcccagagcatgccacaattctctggccctacacagcaccatgcacctttcagctctgtcccctaacattgcaatctggtaggaatccaacagaacattccttcactctacccagggaagaaatgcaacagctacaatggggaaaggcagcagcagcatggacatgtgtgtctaggatcaggcgaggacatctgataagtcaggctactccactgcacaccctaagccctgcagccagggtaggccaccaaacatcccagggactca

SEQ ID NO: 33013 - DNA, 449 bp, Homo sapiens
  misc_feature (1)...(449): n = a,t,c or g
ttgccacccctttggccaccgttnnnnnnnnnnnnnnnnnnnnnnnnnnnnnnnnnnnnnnnnnnnnnnnnnnnnnnnnnnnnnnnggcacgagcggcacgagactaattaaacactcaaaaatgcttttggttagacaaagtctttcagattctgaagctcatggggagggtaaatgggtgttcttgatggtaaaaaatatatgaaatatagtcagatttgaagactgcaaattgatgggtcatcagccaattctggcctaaagatgcattttgtttggctaataaaatggaggagttttttaatttataaattcctgacaaacatttaaaaattagaaaatgtcacatcaaaaagcagatgtttaagcttcttttcaaaattcaaaagttctggcattagtggatccacatttgtccatgacaataaccagctggaaccgggttgtt

SEQ ID NO: 33014 - DNA, 464 bp, Homo sapiens
  misc_feature (1)...(464): n = a,t,c or g
gnnnnncccgncccgnccccccttgacnccccttgactgccnnnnnnnnnnnnnnnnnnnnnnnnnnnnnnnnnnnnnnnnnnnnnnnnnnnnnggcacgagactaattagaatttcaaaccattatctgtcctgtttgtgccattttttctccccttcttatttttttccccatccttctattttgtattttgacttttcaaaatgtttgatgatcctttgttatctgtacatatttgagaatgaagatgtcttagctaatggggatttcctctgccttttatggctgctttgggatttcaagggaggagaggattctgcctgacctgcacccttattctctgagtgttgtgatctgctgctgttttgtcagtaaaatactgtcccatccactctttgtcttacagaaattaggtctctattctcttattctcagtnctctaatggattttctttttttgcct

SEQ ID NO: 33015 - DNA, 476 bp, Homo sapiens
  misc_feature (1)...(476): n = a,t,c or g
gnnngnnnnnnnnnctnntncctacngaatctcnntggaaatacccnnnnnnnnnnnnnnnnnnnnnnnnnnnnnnnnnnnnnnnnnnnnnnnnnnnnnnnnnnnnnnnnnnggtacgagaactgggcctctataaaccactgcaatgacttccccaactgcttcaccacttcaacacatttcccatctgaatacttctagtatttgattcggttctgcctcatgttgtactggccttagagtctagagcagctgaagacatttttgaagtctggaacaaaaatcaggattgagacagaaaaatctggctgcggacaatgaggacgtgtactagggggttaggattcaatttgaatgtccaattacatggttacaagcctgtttatgccttatgcttttcagataagaatcagattttggaaggaagaacacaatctttgccttgctcaattaaaaaaacagatttttagaacttc

SEQ ID NO: 33016 - DNA, 468 bp, Homo sapiens
  misc_feature (1)...(468): n = a,t,c or g
gtttggananccttnnnnnnnnnnnnntttggananccgnnnnnnnnnnnnnnnnnnnnnnnnnnnnnnnnnnnnnnnnnnnnnnnnnnnnnnnnnnnnnnnnnnggcacgagcgtctttgcccgggagccatttgtggcccagttctctttgcccagcaatgtccttcccagcctggtgttggtcccgctgcacaccactcctaaggccgtagagaaggagctgaacgccctctacgatgtgtttctggaggtctcccactggcagagcaaggacgtgatcctgcttggggacttcaatgctgactgcgcttcactgaccaaaaagcgcctggacaagctggagctgcggactgagccaggcttccactgggtgattgccgatggggaggacaccacagtgcgggccagcacccactgcacctatgacccngtcgtgctgcacggggagcgctgncggagtctgctg

SEQ ID NO: 33017 - DNA, 467 bp, Homo sapiens
  misc_feature (1)...(467): n = a,t,c or g
ctttgacacccntnnnnnnnccccctttgacnaccnnnnnnnnnnnnnnnnnnnnnnnnnnnnnnnnnnnnnnnnnnnnnnnnnnnnnnnnnnnnnnnnnnnggcacgagggnnnnnnnnnnnnnnnnnnnnnnnnnnnnnnnnnnnnnnnnnnnagagctaaaggacttaaccatggcctcacacctagtaagtggtagacccaggaacagagcccagatctcctgactctcagctcggtgctcttcctactgtaccatccagctgtagacagtgggcctcagttgctgggagtgataatccacccagctcttcactcaggaagggacccttagacctcagccccactcccgcaggagcagcatgggagttaggacctatgcggatataacttatttcattcctgtagccaagaaccaaaagcagtaagtatgtaaggtaagaccttcctttcacctgataagaac

SEQ ID NO: 33018 - DNA, 438 bp, Homo sapiens
  misc_feature (1)...(438): n = a,t,c or g
acnnnnnnnnnnnnnnnnnnnnnnnnnnnnnnnnnnnnnnnnnnnnnnnnnnnnnnnnnnnnnnnnnnnnnnnggcacgagggcccaggccacagtacccacaccagcatcagctctttgtcctcttccccttttcatttctttgcagctcatgccatctgaaactacctcattcaattattgatagatctgtttggaattccaggagtccctttgcgatcccattcttctaaagattcacatggcctcagaatgccatgttacagtggagagtctgacttcttgnnnnnnnnnnnnnnnnnnnnnnnnnnnnnnnnnnnnnnnnnnnnnnnnnnnnnnnnnnnnnnnnnnnnnnnnnnnnnnnnnnnnnnnnnnnnnnnnnnnnnnnnnnnnnnnnnnnnnnnnnnnnnnnnnnnnnnnnnnnnnnnnnnnnnnnga

SEQ ID NO: 33019 - DNA, 463 bp, Homo sapiens
  misc_feature (1)...(463): n = a,t,c or g
gntttganancnttatgannnnnnnnnnnnnnnnnnnnnnnnnnnnnnnnnnnnnnnnnnnnnnnnnnnnnnnnnnnnggcacgaggtgagcaaacaagagcaagaaacaaaaagaagccaaaagcagaaggctccaatatgaacaagataaatctatcttcaaagacatattagaagttgggaaaataattcatgtgaactagacaagtgtgttaagagtgataagtaaaatgcacgtggagacaagtgcatccccagatctcagggacctccccctgcctgtcacctggggagtgagaggacaggatagtgcatgttctttgtctctgaatttttagttatatgtgctgtaatgttgctctgaggaagcccctggaaagtctatcccaacatatccacatcttatattccacaaattaagctgtagtatgtaccctaagacgctgctaattgactgccact

SEQ ID NO: 33020 - DNA, 457 bp, Homo sapiens
  misc_feature (1)...(457): n = a,t,c or g
aaaccctttgacatgattacttggataacncnactaactatanaggaatttggncctcnaggccaaggaattcggcacgaggttagtacctacggtacagagctgggtccagtggacagggacatttcaatgagaagtgtactgtgtgtgagaaagggctctggagcaaaattctctggattcactttcttcgtctgtaagataggagtgatacctaccctacctcttgtgggcatcaaaagggatgacgggtatgaaaaagttttataaacccnnnnnnnnnnnnnnnnnnnnnnnnnnnnnnnnnnnnnnnnnnnnnnnnnnnnnnnnnnnnnnnnnnnnnnnnnnnnnnnnnnnnnnnnnnnnnnnnnnnnnnnnnnnnnnnnnnnnnnnnnnnnnnnnnnnnnnnnnnnnnnnnnnnnnnnnnnnnnnnnnnnnnnnnnnnnnnnnnnnnnnn

SEQ ID NO: 33021 - DNA, 433 bp, Homo sapiens
  misc_feature (1)...(433): n = a,t,c or g
gctacacatgattacgaatttaatacnnnnnnnnnnnnnnnnnnnnnnnnnnnnnnnnnnnnnnnnnggcacgagttcaatgataggaagattgaagtcatgttatctgagataaagctttcttcagatatccaaatgctttctccaaaacacaatgcctttggtttttgatttgtatatttgtttgtttcttcttattagttagcaagaggttggaaaacagattcatcaacaagtagagagtggtgagttgattcccaaatcacagctagggcattgcctgtaacgagatgaccatatccttgccctttcctttttaaaaccttagtgtataatgactttgtaggcaaccttattaggtttttcacctgttggacctggttaacgatacagttccaggtgaagagagtagaacgttataaagttggaagaa

SEQ ID NO: 33022 - DNA, 434 bp, Homo sapiens
  misc_feature (1)...(434): n = a,t,c or g
nnnnnnnnnnnnnnnnnnnnnnnnnnnnnnnnnnnnnnnnnnnnnnnnnnnnnnnnnnnnnnnnnnnnnnnnggcacgagcacttacgagaacctaatnnnnnnnnnnnnnnnnnnnnnnnnnnnnnnnnnnnnnnnnnnnnnnnnnnnnnnnnnnnnnnnnnnnnnnnnnnnnntttttttttcaaanggcaagttntttnttgacatatnaagctttactnacctgcctgccantcacntcntgntgngccgccnggttcctaanaggccaggnaccgatnccagtntgnggcccaggggttggnacccctgntttacntgaaacaggtaacattnggataaaanaaaacttaaaatncanggaagtagggtatcaccccntatgtcttccacgtttngnganangtccncttnattccttgggggtnaata

SEQ ID NO: 33023 - DNA, 444 bp, Homo sapiens
  misc_feature (1)...(444): n = a,t,c or g
gctttgnantccgnttnnnnnnnnnnnnnnnnnnnnnnnnnnnnnnnnnnnnnnnnnnnnnnnnnnnnnnnnnnnnnnggcacgagtttaagtcatggatctgctggggggcgtgggatgggggtgcctcgtattgtttggaagggcctgggactgcaggtgtgggtggggtctcccagccagtgaggtaatccattactgatggatcatgcccagactgaagcccaggagaagccccctcttttgtcgtctcaggttcgtcattttctccatggaaaagacccctccctcctccgtgcagggaatgacttcataccacattgtcagccaccccccaccccacccccaggctaggctggggatttctgagggggtgacagcattgctgagtacggaatgtcagccttccagattcaccccttcattcaccgttggggaaactga

SEQ ID NO: 33024 - DNA, 438 bp, Homo sapiens
  misc_feature (1)...(438): n = a,t,c or g
tanccnnnnnnnnnnnnnnnnnnnnnnnnnnnnnnnnnnnnnnnnnnnnnnnnnnnnnnnnnnnnnnnnnnnggcacgagggagaaacaaagaaagaggaaatcgcgtgctgtaattctgacagcaaatctattttctcaccaaatggaactgtaatgatgcgtgtagcgttttggcaaggcaccctctataaataaaccctcccaggagttcctgacctaccccaggacccataggaaacttttattgcagtgcagggggcaagcaggccccttacctcgcaaccctcctttcagggaggacttttattctgacaagcgcccgcccatccagttttgtgcctgagactgcttgccaagtttgtgaggcccaaggctttcttgtgggaggacgctgggctgtcttcatgctctttggcaatgattaaagtgaggttag

SEQ ID NO: 33025 - DNA, 432 bp, Homo sapiens
  misc_feature (1)...(432): n = a,t,c or g
nnnnnnnnnnnnnnnnnnnnnnnnnnnnnnnnnnnnnnnnnnnnnnnnnnnnnnnnnnnnnnnnggcacgagtttagttgtatctctaaaagaaaaggattctttttttttaacctagcctcattgccatgttatacctattaaataattgacagtaagtcattattttcattatctagtctatgtacaagtctctgattattgttttctaaaagcctttttttaaaccatgtatttgactcaagatcgtatgaatttcctaatttgcaattctttgatactttttatgtctcttttaatttataggttataggttcttcccttatcttgcttcccccccacacacccaaccttttaaaattatttactggagaaactaggnagggtttgnccnangttgnccacagnctgggttttgccganagcanagga

SEQ ID NO: 33026 - DNA, 444 bp, Homo sapiens
  misc_feature (1)...(444): n = a,t,c or g
ancnnnnnnnnnnnnnnnnnnnnnnnnnnnnnnnnnnnnnnnnnnnnnnnnnnnnnnnnnnnnnnnnnnnggcacgaggcatgaaacgtctacaagaaaacattgagaagctctccaggacattgaactgggcagagatttcttgagtaatgccctataagcataggaaactaaagcaaaatggacaaatgggatcacatcaaattaaaaagcttctnnnnnnnnnnnnnnnnnnnnnnnnnnnnnnnnnnnnnnnnnnnnnnnnnnnnnnnnnnnnnnnnnnnnnnnnnnnnnnnnnnnnnnnnnnnnnnnnnnnnnnnnnnnnnnnnnnnnnnnnnnnnnnnnnnnnnnnnnnnnnnnnnnnnnnnnnnnnnnnnnnnnnnnnnnnnnnnnnnnnnnnnnnnnnnnnnnnnnnnnnnnnnnnnnnnnnnnnnnnnnnnnnnn

SEQ ID NO: 33027 - DNA, 470 bp, Homo sapiens
  misc_feature (1)...(470): n = a,t,c or g
gnnnnnnnncnttgnnnaccccncccccttggacnnnnnnnnnnnnnnnnnnnnnnnnnnnnnnnnnnnnnnnnnnnnnnnnnnnnnnnnnnnnnnnnnnnnnnnggcacgagcatttttgtggcttaaaaaagcacagacaagtctgctttgcctacctcacaaagttaccattgatacaatgagattaggtttataaaaactgagaaaattctgtacacatgtgagctgccactgctgttcctcatgagatagtcatgtccacattttagtagtatgatgtcctgatttcagtctctgatgaagaataaggaagtggcnnnnnnnnnnnnnnnnnnnnnnnnnnnnnnnnnnnnnnnnnnnnnnnnnnnnnnnnnnnnnnnnnnnnnnnnnnnnnnnnnnnnnnnnnnnnnnnnnnnnnnnnnnnnnnnnnnnnnnnnnnnnnnnnnnnnnnnnnnnnnnnnnnnnnn

SEQ ID NO: 33028 - DNA, 443 bp, Homo sapiens
  misc_feature (1)...(443): n = a,t,c or g
nnnnnnnnnnnnnnnnnnnnnnnnnnnnnnnnnnnnnnnnnnnnnnnnnnnnnnnnnnnnnnnnnnggcacgaggttatttttgtctctaaaaggttcagaaccattttaacccacttcagagctttatttcaggagttctcactgcgttttgagaaagtacagatgctcaaatagctgatgtttttctgtgacctgtgcctttccagccagtatttataaggtcaagaaggcaaaatatgcagaattatagatgtgacagctgatttgtactgaactttttaggactaacatatcttagctgccattctttacttatagttgatgcaaagagaacattgtttagcagtagcaaagaaaaacttaacactgaaagtaaaatagaaatttcattcttaaaaattgcactcctggtaatatgtccttttacccttgtgcagaaga

SEQ ID NO: 33029 - DNA, 445 bp, Homo sapiens
  misc_feature (1)...(445): n = a,t,c or g
accccttgcntgantaccnatttaatacgactcnnnnnnnnnnnnnnnnnnnnnnnnnnnnnnnnnnggcacgagaaaaggcttggacaagaggaaatcatcccagtggaaatggagaaacgcaggaacaaatgaagagcaacagaagaagctaaatatttgggtaaagacaggaattttgaatgatgatttcatcattaatgaattaagaagacattgatgcgtgctcattctatatttgatgacattgcaaacattgttttgaaaactatactttgcactnnnnnnnnnnnnnnnnnnnnnnnnnnnnnnnnnnnnnnnnnnnnnnnnnnnnnnnnnnnnnnnnnnnnnnnnnnnnnnnnnnnnnnnnnnnnnnnnnnnnnnnnnnnnnnnnnnnnnnnnnnnnnnnnnnnnnnnnnnnnnnnnnnnnnnnnnnnnnnnnngg

SEQ ID NO: 33030 - DNA, 471 bp, Homo sapiens
  misc_feature (1)...(471): n = a,t,c or g
gnnnnnnnccnttgnnnncccncccccctttganaacgnnnnnnnnnnnnnnnnnnnnnnnnnnnnnnnnnnnnnnnnnnnnnnnnnnnnnnnnnnnnnnnnnnggcacgagctgcacatctctgggtctcccttttgttctaaaaaaatcaaaaacatactttgtacttgggataaagaatttgaaaagtctggctgagagcttgaacccaccaaaagttcaagaaataaattttaatctctgaatgtggccttgggtcagtaactgtaaaattctattccctgagatgtgcagggctggaaagagaatcagacaagggcagagagggatgtgtttctttcctcatggggtcagtgcaaaagaggcttatcaggaatttcatttcctgggtcagctgttgtccagtctctgaggaaccctcaggttgatggcagagagaaagtgatgaccagatctggggacaccaaggt

SEQ ID NO: 33031 - DNA, 464 bp, Homo sapiens
  misc_feature (1)...(464): n = a,t,c or g
gccccccccctttgacacccctatgacntgantcgcnnnnnnnnnnnnnnnnnnnnnnnnnnnnnnnnnnnnnnnnnnnnnnnnnggcacgagccaagtaccagggcttatacacaggaatacttgagaaccactgcactcaagcctttaaaattttccttttacctaaatccacatgggccaagacaatttttaaaattcatagaattcatgtgaccagacgtaaggggtcaataaaggtcattttatagatcacaaaactgagacccaaagctgagaaataagttatctaaaaccccaccaggacattgcattaaaggagttgctctaagcgtgtcttcttactattagaaagtgaaattgacttttaaatctgtcacttagtttttggcataataataaaacaatgaacagtctgtctggctctaattgcgcctagaatctccagatcagaanaccttctt

SEQ ID NO: 33032 - DNA, 463 bp, Homo sapiens
  misc_feature (1)...(463): n = a,t,c or g
ctnttnaatccctttgganttgnccaccnnnnnnnnnnnnnnnnnnnnnnnnnnnnnnnnnnnnnnnnnnnnnnnnnnnnnnnnnnnnnnnnnnnggcacgagtgcacttagtagacgtaatagggaaaagtacatctaacccatttttctggaagcagaagtctgtcttttttttctatattatatataaagctgtgacagaatctgtctatataaagctttccccacatgtgggatggattcccagaagtacagttagttggccaaagggtatgaacatttctgtgacacttaccatctacaattccttaaattacttaaaaggttatacctggtctcactacctccagcactttctgtcctgttgagagtcatgttaatttctaagcagctctgaacagcatgtgtgctgaccagtgaactaacaggcagngcctgccaatctctaggtggatttttccc

SEQ ID NO: 33033 - DNA, 448 bp, Homo sapiens
  misc_feature (1)...(448): n = a,t,c or g
tttgnanacccgtttnnnnnnnnnnnnnnnnnnnnnnnnnnnnnnnnnnnnnnnnnnnnnnnnnnnnnnnnnnnnnnnggcacgagctttattccaaataaggtgtgcactcatctgtgaatttatgttgggctagcacggtgtaaaattgccactttgcattgcatactacttggagaaaggtagaatataatagcttcaccagctgaatttcaaaataaagcagagccttgaacattggtaccctatcgtgtgctttgggctacagagactgaggaggcctgatgcaaactggacagaattaggactctgaggatgactgactcacaggggaaaggatggttccggaagacattttatataaagctgcttgccaaatcggccaatagggcccataaacgcgtccaacagtagaaacaacagatcctgctggtctctgccaagggta

SEQ ID NO: 33034 - DNA, 374 bp, Homo sapiens
  misc_feature (1)...(374): n = a,t,c or g
atnnnnnnnnnnnnnnnnnnnnnnnnnnnnnnnnnnnnnnnnnnnnnnnnnnnnnnnnnnnnnnnnnnnnnnnggcacgagccaggcagtgccctgtctgaagagatccaggaggtagacgcaagttccagaactggtgcaggcactgacacattgggagactttgggaaggtcaccactctgggctttggcttctttacctatgaagtgatatagtcggactagttcctacattatatccaaggattcttctagtagggaaatgctctaactccacaacagacaaatgtcagtatctagaannnnnnatcctactgctcctantatttnagnntnnnacccnnnnnnatgnnntacnnnnnnnnctttntttt

SEQ ID NO: 33035 - DNA, 442 bp, Homo sapiens
  misc_feature (1)...(442): n = a,t,c or g
nnnnnnnnnnnnnnnnnnnnnnnnnnnnnnnnnnnnnnnnnnnnnnnnnnnnnnnnnnnnnnnggcacgagtggacattgagaaacaggtaatgtaagaaactatcacttattaagaaacatatagaaagctctcacaaaacagtcataaaatcaatgaaaaatgttattgtggaggtaattttaagaaaaacatcctccattattgtaggaaggtgtattataactattttgtaaagcattctgtgaagaaacacattttttttgctgtttaatccgcctttacaaccctattttataaaaacaatcataaataaagaaaaaggctttatgcagtaacgtattcaggaaagcaaaacaatatatgtcttgaagctatacctatggaggagctaagagaaacgtggcatggtcgtggactggaatattacacagctactcta

SEQ ID NO: 33036 - DNA, 456 bp, Homo sapiens
  misc_feature (1)...(456): n = a,t,c or g
gnnnnctttgnnnancnnnnnnnnnnnnnnnnnnnnnnnnnnnnnnnnnnnnnnnnnnnnnnnnnnnnnnnnnnnnnnnnnnnggcacgagctgttcagaatgcgacctatggtggcctcctactccttgccccccaccccgccccgccccttccttctgttccccagatctatgaactacaacattatgaagacattcttttgtaccttgttcaactttagagttctaagaaagcttatttattagcgatataaccttgctttgcaaacagaatgcaagcgttaactttggtcttctgtattttggactaaatactaattgactagagtgctgtaaacttgctgtaacatttatggcaattgcaagttgccctgctaggcagttgtaatctggcattaacttattttctatatccagtttaatatgaatctggtgttgatgcaatgcctcagtga

SEQ ID NO: 33037 - DNA, 441 bp, Homo sapiens
  misc_feature (1)...(441): n = a,t,c or g
acttggatacccgtnnnnnnnnnnnnnnnnnnnnnnnnnnnnnnnnnnnnnnnnnnnnnnnnnnnnnnnnnnnnnnnnnggcacgagcggcacgagctctgctgcacccccgcctccaccaatggtagtgcctttcccacctgcagggcacagggggctgccctcagcaatctccgagcagtgaggggagggctgccctgctgagcccagctttggaggaggggtatcctcctccagcctcagcctgcttcattccccacttcctttgtggctgcagcatcttaaannnnnntnnnnnnnttnnnaaacnngcccncaaatttccaaaggcntngttaaaaaccnnggggccntgnaaagccnggnggttaangcctgnaatcccaacntttgaaggntaaagngcacagattacttgagtncgagagttaganaccatcc

SEQ ID NO: 33038 - DNA, 447 bp, Homo sapiens
  misc_feature (1)...(447): n = a,t,c or g
tttganacccgnnnnnnnnnnnnnnnnnnnnnnnnnnnnnnnnnnnnnnnnnnnnnnnnnnnnnnnnnnnnnnnnnnggcacgaggattctcgttattgtcattgactcactttctcctgtgatttaaaacccagtggtgcggattcaggtgcctggaaaccctggtgactgtacatgggcctgtgatgggggacaggagatgtctgtgaggtcatgtgggaggcacacgcagggttcaggtctgtgaggtcatgtgggaggcacacggaggggtcacctgccccagcgccccacggtttccagccttggcctgtcctctttcacctggcccacgggtgatgcgtgctgtgctggcctttctgcaggggacagtgcggtcaggggactgctgggggctgtcagagccccagccctttgctccataccagggcagccgtttcagtcct

SEQ ID NO: 33039 - DNA, 447 bp, Homo sapiens
  misc_feature (1)...(447): n = a,t,c or g
tgnaaactnnnnnnnnnnnnnnnnnnnnnnnnnnnnnnnnnnnnnnnnnnnnnnnnnnnnnnnnnnnnnnnnnnggcacgagnnnnnnnnnnnnnnnnnnnnnnnnnnnnnnnnnnnnnnnnnnnnnnnnnnnnnnnnnnnnnnnnnnnnnnnnnnnnnnnnnnnnnnnnnnnnnnnnnnnnnnnnnnnnnnnnnnnnnnnnnnnnnnnnnnnnnnnnnnnnnnnnnnnnnnnnnnnntagcaggtttcaaaatagccgcagggatctgttcctgtaacacttggcctgagccaagcagcagaagggagaacaagataatgaggatgcagagcgatgccggagtttcaaatagttgggggctggccctgttaagtccccaaccattatagcaattctgactcctggagctcaggagtgagctggactggtgcggctagtgaagttct

SEQ ID NO: 33040 - DNA, 448 bp, Homo sapiens
  misc_feature (1)...(448): n = a,t,c or g
aannnttnttnannnnnnnnnnnnnnnnnnnnnnnnnnnnnnnnnnnnnnnnnnnnnnnnnnnnnnnnnnnnnnnnnnnnnnggcacgagcacagttattggggctcccaaagtgccaggcgctgggctaggtgcaaatgcattttctctgtccacattgtggccatgcaatgacagctctggttacttgacgtgagtccttggcaagcatcatttcatttgatgcacaggtggcacatatggcagatgggctgagcctagggcttgtgcccttagaggacatgggttcacatcttggcttcgcttctttctggtaaccttctgaagtacttaacctatttaagcctcagatttctcatctgtaaagtggagataatcacagtgtcctagggtattaaaaaggttaactagcacatgtgatgtgctttgcacagcttctggcatatgt

SEQ ID NO: 33041 - DNA, 447 bp, Homo sapiens
  misc_feature (1)...(447): n = a,t,c or g
tttgaaaccntttgacatgantacgaatttnnnnnnnnnnnnnnnnnnnnnnnnnnnnnnnnnnnnnnnnnnnnggcacgagatgcaaagccaggatttcctcaaacaatgggctcatataccttggcattgagatgccaagttcccataagcaaatctggcttgaaaacaccacagaacagttttaactaataccaacttcattcctgagacagctgttgctttgtaatattaaaatcccttccgcagcacctaggtctctgtttactttagtgggagagctagatcaatcagttttgctgaaagcattaccgtatcactaaatttgaaatttaagaggcctattttacattacaccatgttgtcatttagttattcaggaaactcttttttatttttattgttataatggtatttaaaggtaggttttggctgggtgtcgtgact

SEQ ID NO: 33042 - DNA, 464 bp, Homo sapiens
  misc_feature (1)...(464): n = a,t,c or g
ttggncccccccccnttgaacacccnnnnnnnnnnnnnnnnnnnnnnnnnnnnnnnnnnnnnnnnnnnnnnnnnnnnnnnnnnnnnnnnnnggcacgagaatacatgtctaaaccattttgtaactacacagaaagtgaacattgttgtctccctccctgcacgccactctttagccctttcctcgacttttaggtttctttttatttctgccaggaaaatattttgcctatccccacgtgtgtttttattgatatagtcattttaaatgttgcttatattgcatacatgtcctttgcttctttgacctaataatgtagcttggaggtctttccatatcagcacaaacagatatcacattctttttaatgtaggcatagtattccctcatatggatataccataatttatgtaagcggtcacctattcttccaattactatttttttttaagtccagggatcct

SEQ ID NO: 33043 - DNA, 454 bp, Homo sapiens
  misc_feature (1)...(454): n = a,t,c or g
naaccctcnnttggacaccaatttaatacgactcnnnnnnnnnnnnnnnnnnnnnnnnnnnnnnnnnnggcacgagcaagaaccatcagcaccaacacaaatgtatctttgcagaccgaaggaatcagctaaacaatttacagtcatctcaatctctactaaaacaaaaatcacatccaacatgccacctgacaccatttctttctctctctctcttttgctccttgcgatgtggcattcatctctccttgagcctccgttctgaagagataacagtatagcaacaactctgccactgaaatcctgttctctgaccgatattggcacctgcaaagagaaacaaccagtaacaggcagcagcagcatcagtattaatcttccatgatgaaatctttacaggtcaagaacaagtacacagctcttttctcactccttcacagtggaccatgcaact

SEQ ID NO: 33044 - DNA, 448 bp, Homo sapiens
  misc_feature (1)...(448): n = a,t,c or g
ttgacacccnnnnnnnnnnnnnnnnnnnnnnnnnnnnnnnnnnnnnnnnnnnnnnnnnnnnnnnnnnnnnnnnnnggcacgagagactttaatgagtaggtactttttccaaaggagctttataacttttctccagctgttaaatgggtcttctcctgttagattgtaaactgaggtacaaagtccttcttccaccttatcccttttctctacccatgaagagccctgcaactatttaaacattagttagagactttgccatgtatcagaagaaacacattctgttgttgtatttattggttttaattataaagcagttggaatgcattttaggattctgaatctccataattctctgccagcactttgcacctagaggaccattagtaggaataattttccatccctgcctagcttcataattgtagacacttcngctgcacaaaag

SEQ ID NO: 33045 - DNA, 454 bp, Homo sapiens
  misc_feature (1)...(454): n = a,t,c or g
aaacccctatgattgattcnnnnnnnnnnnnnnnnnnnnnnnnnnnnnnnnnnnnnnnnnnnnnnnnnnnggcacgagccttgatgggcctggaagttgttgacaaggggaaagatctttcttgccaataaaaagaagggatatcgttnnnnnnnnnnnnnnnnnnnnnnnnnnnnnnnnnnnnnnnnnnnnnnnnnnnnnnnnnnnnnnnnnnnnnnnnnnnnnnnnnnnnnnnnnnnnnnnnnnnnnnnnnnnnnnnnnnnnnnnnnnnnnnnnnnnnnnnnnnnnnnnnnnnnnnnnnnnnnnnnnnnnnnnnnnnnnnnnnnnnnnnnnnnnnnnnnnnnnnnnnnnnnnnnnnnnnnnnnnnnnnnnnnnnnnnnnnnnnnnnnnnnnnnnnnnnnnnnnnnnnnnnnnnnnnnnnnnnnnnnnnnnnnnnggaggtatatcaactgtt

SEQ ID NO: 33046 - DNA, 449 bp, Homo sapiens
  misc_feature (1)...(449): n = a,t,c or g
tttgaacaccnnnnnnnnnnnnnnnnnnnnnnnnnnnnnnnnnnnnnnnnnnnnnnnnnnnnnnnnnnnnnnnnnnnggcacgaggagactatctatcttggaggctttgtcttacgttccttggccaagtgaagtctagaaaattgagctcaagcttgcatggttcagtacctgtcctcaagccaaaagcaattttagttctccttttgcccctgtcagtttattctttcacttagattttgggcttagtatcttgctgatttgtccatacttctgaaataaacaagtacctgtttttttctttgctcattttaaattcagggttttacttattttcaatacagagttgatctttatacctggaagacatattattgagagctgaggtattagtttatgtcttaacacagaatatcataaaaggcttttgatcaccattgacttctgg

SEQ ID NO: 33047 - DNA, 443 bp, Homo sapiens
  misc_feature (1)...(443): n = a,t,c or g
ancnnnnnnnnnnnnnnnnnnnnnnnnnnnnnnnnnnnnnnnnnnnnnnnnnnnnnnnnnnnnnnnnnnnggcacgagcagaaaagtgaaaatgtggtctctgctcaagaaagagtgcaggtcttagagacaaagtctgggtctaaatcttggtgctgcccctggcccaggtgtaaggcctcagaggaaattacctgccagagtttacacatctctaaagtggagagaagaggtgctgtgaggatctcatcagacaagatggtacaaagaaatcaccggggctggcctcgtggagggatgatgtgtgtgtctgactcagaatcagtagaaaaagcttaaaatgtggttgctgggacaaaactaatctaccagagaagccgtggctggagagcctgtgttgagctgngnggagctggnctgtgctggaatgccaaggaagaggc

SEQ ID NO: 33048 - DNA, 450 bp, Homo sapiens
  misc_feature (1)...(450): n = a,t,c or g
nnnnnnnnnnnnnnnnnnnnnnnnnnnnnnnnnnnnnnnnnnnnnnnnnnnnnnnnnnnnnnnnnnggcacgagcaggccatcagatggtcatcttcaatcaagtttctacactgtaccttccttccagattcagactattggccaaacttgggtcctgagcccttcctctaggacaccagaatcacctgaagtggggaaaggaagttccaaaagaaagagtgaaagctgattgaagcaagagttgtctactgtgccatccttcttctttttggattgaataggtctcacgcccatgggcctggaaaacaaatgatagccctttaagggaggaggttgctttacctcttcttcatacagcaaggcccaggttgagggccaaaggtggtagataaaacgctggagagcagttttggagcagcataggtctccttaaacttttccaaaatca

SEQ ID NO: 33049 - DNA, 450 bp, Homo sapiens
  misc_feature (1)...(450): n = a,t,c or g
ttggacacccntatgacatgantacgaatttaatacnnnnnnnnnnnnnnnnnnnnnnnnnnnnnnnnnnnnnnnnnggcacgaggacagtaagagaaatggcctctctcctcagcggcacaatggactttagacatcgcgcctgttttgtactctccaagccggacttctctactcgctggcctggcgctgatgcccagaggccccctgtgcttgaggtcgtggccttagacagttccctgccctttgttccagccccgccacacagtctgcacggcctccaccgcagctctggtgagcctcttggccagctcctggtgacagcgtgcacctccctgctctgagaaggtctccctctcctctctgcccaccctgtacagagacatctttcaagcccatcccagaggagagnggcctctctcctcaaccccaagaggacggcctctcatg

SEQ ID NO: 33050 - DNA, 449 bp, Homo sapiens
  misc_feature (1)...(449): n = a,t,c or g
tttgacacccnnnnnnnnnnnnnnnnnnnnnnnnnnnnnnnnnnnnnnnnnnnnnnnnnnnnnnnnnnnnnnnnnnggcacgagggaaagtgatgagaaagtttgggaaagggccctcgctgagaaaccggggttaccctgcatcggccttggtcccagtccaagtctgccctgttttttctgattgggaactggcggagctctagcgtgtctgagatggctcccggctgctaataaggaggaaggagcctggcttcccacgggcacgggacgctgaggctagggccaggggattccagcttgtgcacgggcggactttactcctgaggcagggccaggcgccttcgctgggaggactccagcttagaccagagacggtggtggcctggcctgaggggaggcccagcccagtcacaggccggctctcttctgggctttctgcctcctgt

SEQ ID NO: 33051 - DNA, 454 bp, Homo sapiens
  misc_feature (1)...(454): n = a,t,c or g
anccctatgatttgattcnaatttaatacgactcnnnnnnnnnnnnnnnnnnnnnnnnnnnnnnnnnnggcacgagcttgagatgggccagacaaaaccagaccacaggcccaaatagtttacagatccctgatctaacactatgggttaactatgaaaaagtagaaagagaccatcaaagaaaaccagagctagtgagtagttgaagtggtacaaaaaccagatgttattcaggaactattacagtaggggaaaagagacttcagtatagacttccaaatttcctcagtnnnnnnnnnnnnnnnnnnnnnnnnnnnnnnnnnnnnnnnnnnnnaggtgggagtcagtggatggaaaattacccaaaggaaacatcaggggcaaggtgggattctggctaaattgacttgacaggattcttgctgaaggcatgccaggctgatcaaataccaag

SEQ ID NO: 33052 - DNA, 460 bp, Homo sapiens
  misc_feature (1)...(460): n = a,t,c or g
tttncnccccccctttgnnaccttatgacnnnnnnnnnnnnnnnnnnnnnnnnnnnnnnnnnnnnnnnnnnnnnnnnnnnnnnnnnnggcacgagaaggaatcttgggggtctccttcgggggttggaggagggtgttgatgctgtgttgttggggtttcttcctacctcaccctgtaaaaaatttatttgtgtttctaatgagaaaggaaggttagaggtccactgatctaaaccagcggtctcaatggacagatgaagaaagtggagtttagtaaggttaactcatgtcttggccatgatcacagagtgacagctcagggcatttgctgccccaggaagccagggtggcctggggggatacctactgcctgcatcaggccctgtgcatggagagcctgnggncctcagggatgggagaggcacccacaggacccgagggcagcaggaccacnggggag

SEQ ID NO: 33053 - DNA, 449 bp, Homo sapiens
  misc_feature (1)...(449): n = a,t,c or g
ttgaacaccnnnnnnnnnnnnnnnnnnnnnnnnnnnnnnnnnnnnnnnnnnnnnnnnnnnnnnnnnnnnnnnnnnnggcacgagcggcacgagcattgtggccacatctggcatattttgagccccagaataagaatagtgatgaatgataaaccactgggaaaaaaatagaagttagtgaattcatactgataatgaataggtaggtatgtcaataaaagggggttatgacaggatttcttgctgactgataaaaaagtgctggagttgggaaatcgttttgcagccatcatattaatgtttggtttggcacaagttatcattagatgccaaatttaagaatggcggtgagatttcagtgagaaacaatgtggtcatatttcaaagtgtgtccctgaggttgccgattggttgcaaggagaaatacgtagtatacagtggaaaactgg

SEQ ID NO: 33054 - DNA, 454 bp, Homo sapiens
  misc_feature (1)...(454): n = a,t,c or g
anccctatgatttgattccaatttaatacgactcnnnnnnnnnnnnnnnnnnnnnnnnnnnnnnnnnnggcacgagccactacctctaattagttgtcactaactgtaacaattaaaaatgtctttacacattgtcaaatgtcccctgggggataaaattgccccttgtagagacttattggtccacggaaaattttgaatcatcctagaaattacatacactagcataggcaagaaaaaaaaaatgaaaactaggcatagagtatgatcttctctatagaaaataatagtagaaggatgaggaaaagagaaaagaaaggggaaaaaggatagaagaaaatgaaaaacttagtgacacagaaaggactgaaaggaaatagcccaaaagcttaaaaatagctgcttccaagtggtgagatgataatcacttagatgtttctataaatgttctgaa

SEQ ID NO: 33055 - DNA, 446 bp, Homo sapiens
  misc_feature (1)...(446): n = a,t,c or g
tgaacaccnctatgacatgattacgaatttaatacnnnnnnnnnnnnnnnnnnnnnnnnnnnnnnnnnnnnnnnnnggcacgagctggaagaattattaaagatctttattgtccttgtttttatgtccatgttaatctctgaggacctctgtgcctctcttctcttaccattccagttcatctagacaagtgccagggtaatgttttcttaacatcatattcatcatgttacttccttgcttaggtgatcagggtaattccttttgtttaaatggatctaatctgaactctccagctagacgtaaggcattctgataattactctccccttcctttttaacttggacccatgtttgttttcatcttggaactggggaacgtggcccacttattcctgtgaaactaatgcatttgcatttcctgcagtcatcnggcttttctgtgg

SEQ ID NO: 33056 - DNA, 459 bp, Homo sapiens
  misc_feature (1)...(459): n = a,t,c or g
ccccccccctttgaacaaccnnnnnnnnnnnnnnnnnnnnnnnnnnnnnnnnnnnnnnnnnnnnnnnnnnnnnnnnnnnnnnnnnnnggcacgagcaggaaacttcagtgtgactctcaggcacctaacaatcacttacttgctttagatcactcaaatagtgatctcagcagcatatatacttctgacagcacttctgattttttcaagtcctgcagcaaggatactttttcaaaattctggcagccatcacttgaattcacttgcattgtttcacaactaacagataatgatgatttttcagcttcagaacaaagtaaggcctttggtactcttcagcagaacagaaagtccatctccattgcagaggccactggttccagtagctgccatgatcccattcaggattcatggagccttgtttcatatatggataaaaagagtacagcagaaaagttg

SEQ ID NO: 33057 - DNA, 450 bp, Homo sapiens
  misc_feature (1)...(450): n = a,t,c or g
nancnctatgatntgattcnaatttaatacgactcnnnnnnnnnnnnnnnnnnnnnnnnnnnnnnnnnnggcacgagagaaaaagacacctgataattaaaataaaacaaatgtaaaagaggtttacaggtgctgtaatagccagagaagggccacaacctctgaaaggattttggaatatgtcactgaaaaggtagtgcctaacctgaatcttgaattaagagtgttttatattggagctgtctatacagagagacatgggaagggcatttgagatagagactagaggattgccaaggcatagttatgtgagaggaagtgttatattcaaggaaagataggcatgtggcaagttattctagaaagtgatggtannnnnnnnnnnnnnnnnnnnnnnnnnnnnnnnnnnnnnnnnnnnnnnnnnnnnnnnnnnnnnnnnnnnnnnnnnnn

SEQ ID NO: 33058 - DNA, 449 bp, Homo sapiens
  misc_feature (1)...(449): n = a,t,c or g
ancnctatgattgattcnaatttaataccgactcnnnnnnnnnnnnnnnnnnnnnnnnnnnnnnnnnnggcacgagatttgagtccttacaaaagtctcacatatgaggcagaatttctgtcagttcttttatttttaatggtaactatttggaaagacacactagcctaagtgacttcagtgagagctttttgaatatttataaaagtcacctggtgaaattggtttttaaaaaagaagcaaagagattttatatagatttagcaattattcctaggggtaagacttcacagaagtgttggatgaagttgtaaataagcctttcgaaaattaatttaataagcaatatagcaattgggtactatatacatgatactgttttagagatcattagatggtgaaggagtactcttggctggggataaaatgttcagggacagcatctaaca

SEQ ID NO: 33059 - DNA, 449 bp, Homo sapiens
  misc_feature (1)...(449): n = a,t,c or g
anaccnctatgatntgattcnaatttaatacgactcnnnnnnnnnnnnnnnnnnnnnnnnnnnnnnnnnnggcacgaggaaatggttaagaaatacgtaaatatggccgggcgtggtgcttacgcctgtaatcccagctctttaggannnnnnnnnnnnnnnnnnnnnnnnnnnnnnnnnnnnnnnnnnnnnnnnnnnnnnnnnnnnggacacttctaagtatgacctgaaatacgaaggcagagagttgctttttctgaccttagttagctaggaacatgcacctcaggtgactcaaattttgtgctgctctgtgcatgtctaggaatgactgngaaagcatcatgagtagngattngggggttacaagtaagttttancnagtaagtgaattcacaatgcaaaatncntgaacaatgaaggntgattgtattgnggtgggngccacc

SEQ ID NO: 33060 - DNA, 446 bp, Homo sapiens
  misc_feature (1)...(446): n = a,t,c or g
tttgacaccctnnnnnnnnnnnnnnnnnnnnnnnnnnnnnnnnnnnnnnnnnnnnnnnnnnnnnnnnnnnnnnnnnggcacgaggcctacagggggtccatggcagcagttctactttctgcagctccctaagcagtgactttgaccccctagtgtactgcagccctaaaggggatccccagcgagtggacatgcagcctagtgtgacctctcggcctcgttccttggactcggaggtgcccacaggggaaacccaggtttccagccatgtccactaccaccgccaccggcaccaccactacaaaaagcggttccagaggcatggcaggaagcctggcccagaaaccggagtcccccagtccaggcctcctattcctcggacacagccccagccagagccaccttctcctgatcagcaagtcaccagatccaactcagcagcccct

SEQ ID NO: 33061 - DNA, 446 bp, Homo sapiens
  misc_feature (1)...(446): n = a,t,c or g
nnnnnnnnnnnnnnnnnnnnnnnnnnnnnnnnnnnnnnnnnnnnnnnnnnnnnnnnnnnnnnnnnnggcacgagaaaaaggagcgtgagaactcttcatgccctaacggaaaagtctccaagctgttgaaggaaagggcagaagtgggtatactattctaccatttgtattacaaataatagtaatcataataaatggccggggcaggannnnnnnnnnnnnnnnnnnnnnnnnnnnnnnnnnnnnnnnnnnnnnnnnnnnnnnnnnnnnnnnnnnnnnnnnnnnnnnnnnnnnnnnnnnnnnnnnnnnnnnnnnnnnnnnnnnnnnnnnnnnnnnnnnnnnnnnnnnnnnnnnnnnnnnnnnnnnnnnnnnnnnnnnnnnnnnnnnnnnnnnnnnnnnnnnnnnnnnnnnnnnnnnnnnnnnnnnnnnnnnnnnnnnnnnnnnnn

SEQ ID NO: 33062 - DNA, 445 bp, Homo sapiens
  misc_feature (1)...(445): n = a,t,c or g
tttgacaccnnnnnnnnnnnnnnnnnnnnnnnnnnnnnnnnnnnnnnnnnnnnnnnnnnnnnnnnnnnnnnnnnnnggcacgagtccgagtggccaaagctggaatgatttgaatagaataaatggtattggattataacccaacgaataaacatccacggttctgtaatgattagactaccgaataaataaaaaatggggaaaaaggctgaaccttccttacagaattccagttactattaataaaaatagaagnnnnnnnnnnnnnnnnnnnnnnnnnnnnnnnnnnnnnnnnnnnnnnnnnnnnnnnnnnnnnnnnnnnnnnnnnnnnnnnnnnnnnnnnnnnnnnnnnnnnnnnnnnnnnnnnnnnnnnnnnnnnnnnnnnnnnnnnnnnnnnnnnnnnnnnnnnnnnnnnnnnnnnnnnnnnnnnnnnagccaagatcac

SEQ ID NO: 33063 - DNA, 439 bp, Homo sapiens
  misc_feature (1)...(439): n = a,t,c or g
caccnnnnnnnnnnnnnnnnnnnnnnnnnnnnnnnnnnnnnnnnnnnnnnnnnnnnnnnnnnnnnnnnnnnggcacgagtagggctcggcgtggaattaacaagacttaaggtttcaaagaaactagcaaatgtatgccctatggtgctcttgaagtgtttgctggttttagcatctttcttcatgtgctatagggccattatgataaacaagtagcatctttaccacaggaagttagataccaagtcatcagacactagaagtatagagacactannnnnnnnnnnnnnnnnnnnnnnnnnnnnnnnnnnnnnnnnnnnnnnnnnnnnnnnnnnnnnnnnnnnnnnnnnnnnnnnnnnnnnnnnnnnnnnnnnnnnnnnnnnnnnnnnnnnnnnnnnnnnnnnnnnnnnnnnnnnnnnnnnnnnnnnnnnnnnnnnnn

SEQ ID NO: 33064 - DNA, 458 bp, Homo sapiens
  misc_feature (1)...(458): n = a,t,c or g
ttncccccccccctttgacaccgtnnnnnnnnnnnnnnnnnnnnnnnnnnnnnnnnnnnnnnnnnnnnnnnnnnnnnnnnnnnnnnnnnggcacgagggcgtggtgtacgtattaaaaaatgcatattcttgggcgcaacttggaccttcctggtcaagatctctgggggnnnnnnnnnnnnnnnnnnnnnnnnnnnnnnnnnnnnnnnnnnnnnnnnnnnnnnnnnnnnnnnnnnnnnnnnnnnnnnnnnnnnnnnnnnnnnnnnnnnnnnnnnnnnnnnnnnnnnnnnnnnnnnnnnnnnnnnnnnnnnnnnnnnnnnnnnnnnnnnnnnnnnnnnnnnnnnnnnnnnnnnnnnnnnnnnnnnnnnnnnnnnnnnnnnnnnnnnnnnnnnnnnnnnnnnnnnnnnnnnnnnnnnnnnnnnnnnnnnnnnnnnnnnnnnnnnnnnnnnnnnnnnnnn

SEQ ID NO: 33065 - DNA, 454 bp, Homo sapiens
  misc_feature (1)...(454): n = a,t,c or g
nccccncccttgaacaccnnnnnnnnnnnnnnnnnnnnnnnnnnnnnnnnnnnnnnnnnnnnnnnnnnnnnnnnnnnnnnnnnnnggcacgagggcgtgcagtattggaaacattactatccagaatctgaaggatcctgttcaaataaaaatcaaacatacaagaactcaggaagtgcatcatcccatctgtgccttctgggatctgaacaaaaacaaaagttttggaggatggaacacgtcaggatgtgttgcacacagagattcagatgcaagtgagacagtctgcctgtgtaaccacttcacacactttggagttctgatggaccttccaagaagtgcctcacagttagatgcaagaaacactaaagtcctcactttcatcagctatattgggtgtggaatatctgctattttttcagcagcaactctcctgacatatgttgcttttgag

SEQ ID NO: 33066 - DNA, 496 bp, Homo sapiens
  misc_feature (1)...(496): n = a,t,c or g
ggngnntcccccttgaaaccctcttctgaccctaattaatacgactcnnnnnnnnnnnnnnnnnnnnnnnnnnnnnnnnnnggcacgaggcaggtgagaaggtgtgcactggaggctccttccactgccctaagactctgccccctgtttttgtagctattttaaggaaactgccatgtaaccctttctaacaaatagtccctttctgttcaaacatatatagggtgttgagaagtgtaaaacgtgaccccacccagggtttggacattgttggggtcgccaggctagttaatgactaagcttcagaactgtgatcctttgttgccagcagggaggaggttggtggggattgctttccttaactgctgtcctggtgatccatacccacctaagtgttgtttctgcttttgtttggccgattatcaagatcctcacttgaggacttgacaataattcaaagatcaagaagatatgaagagaaaattgtacagtactt

SEQ ID NO: 33067 - DNA, 502 bp, Homo sapiens
  misc_feature (1)...(502): n = a,t,c or g
nggtgnnnnnnnctttgaaaccctattagtgancnnnnnnnnnnnnnnnnnnnnnnnnnnnnnnnnnnnnnnnnnnnnnnnnnnnnggcacgagggcagcaagcagcctccctggccctggagtccctccatgctgtgggaagagggttgagcagggcaggtggcagccctgtgggactgagggtgctggctggtgaaccctgttcagttccaccccaccccagctaccccaggatgctgtgtgccatcagcctgctttatgatcccaggcacctgggaagagagaggaatagctcctctaccagagttacagtaatggcaggagtgagtgccagcctgtgggacccattactcctgctctttctattccttccccaacaataaaatgggcagaagcatcagctgagctctctaaagttcagcctcaaactcaagaggcccaggctaggcgtggtggnnnnnnnnnnnnnnnnnnnnnnnnnnnnnnnnnnnnnnnnnnnnn

SEQ ID NO: 33068 - DNA, 499 bp, Homo sapiens
  misc_feature (1)...(499): n = a,t,c or g
ggtnntnccccttgaaaccctattctgannnnnnnnnnnnnnnnnnnnnnnnnnnnnnnnnnnnnnnnnnnnnnnnnnnnnnggcacgagaagcttgccagcaaagcacggacagagaaggaggagaagctgagccaggcctatgcaatcagtgctggtgtctctctagagggccagcagctcttccagaccattcacaagaccattaaagactgtaaatggcaagaaaaaaacatcgtagtcatggaagaagttgttattacacccccatatcaagtggaaaactgtaaaggcaaagaggggagtgcactgagccatgtacgcaaaatagttgaaaaacattttagagacgtggaaagccaaaagatactgcaacgttcacaagcccagcaaccacagaaggaggctgcctgtcatcctgagtccgtacacatggaggactcttccagcatccagccaaggaggcgctggtggtggcttcagcggaggcaggccgggg

SEQ ID NO: 33069 - DNA, 503 bp, Homo sapiens
  misc_feature (1)...(503): n = a,t,c or g
ggggnntnncccttgntaccctctntgnagaccntatgacnnnnnnnnnnnnnnnnnnnnnnnnnnnnnnnnnnnnnnnnnnnnnnnnnnnnnnnnnnggcacgagtgaacacgtgnnnnnnnnnnnnnnnnnnnnnnnnnnnnnnnnnnnnnnnnnnnnnnnnnnnnnnnnnnnnnnnnnnnnnnnnnnnnnnnnnnnnnnnnnnnnnnnnnnnnnnnnnnnnnnnnnntcagggtgtggagcaaccaaaacacttatacattgctggtaaaataactactttggaaatctggctgtttctcatgaaatttaacatatgcctaccttgtgacccagaaattgtacctttagatcttnnnnnnnnnnnnnnnnnnnnnnnnnnnnnnnnnnnnnnnnnnnnnnnnnnnnnnnnnnnnnnnnnnnnnnnnnnnnnnnnnntcaccatcaacaggagaatcgataaattgtagtataattataccacgaatggaatgtattattg

SEQ ID NO: 33070 - DNA, 503 bp, Homo sapiens
  misc_feature (1)...(503): n = a,t,c or g
gtgatgnntcccccctttgaaaccctantncntgatccnnnnnnnnnnnnnnnnnnnnnnnnnnnnnnnnnnnnnnnnnnnnnnnnnnnnggcacgagggcaggttcttaccatcttgccnnnnnnnnnnnnnnnnnnnnnnnnnnnnnnnnnnnnnnnnnnnnnnnnnnnnnnnnnnnnnnnncaccttgcctggctcaaggcctttactttctaccagagtggtgactggtacatggagtgactggtacattgagtgctacccaatgacaggaagatatgcacctagctaaaataatggttgaaggcttttaaaataaagtcagtttattcaatacatatgcattatcctttaagcttttgtggactggcttggggacagtgcctggacggagaagcaactcacttaagtgtctgttaaatagatgaaagaagggccaaatgaaggaagcaagctaaccctatctggttacatcgtttgggaaaacgcatttcacattcta

SEQ ID NO: 33071 - DNA, 502 bp, Homo sapiens
  misc_feature (1)...(502): n = a,t,c or g
gngatgtntcnccctntganacncctctttgagatccctnnnnnnnnnnnnnnnnnnnnnnnnnnnnnnnnnnnnnnnnnnnnnnnnnnggcacgaggtctaaacgagctggattacccaataggcagactacactgagggtaccagcaagataagggctaccaaactaagaaaaaaaactatcttaaaaacnnnnnnnnnnnnnnnnnnnnnnnnnnnnnnnnnnnnnnnnnnnnnnnnnnnnnnnnnnnnnnnnnnnnnnnnnnnnnnnnnnnnnnnnnnnnnnnnnnnnnnnnnnnnnnnnnnnnnnnnnnnnnnnnnnnnnnnnnnnnnnnnnnnnnnnnnnnnnnnnnnnnnnnnnnnnnnnnnnnnnnnnnnnnnnnnnnnnnnnnnnnnnnnnnnnnnnnnnnnnnnnnnnnnnnnnnnnnnnnnnnnnnnnnnnnnnnnnnnnnnnnnnnnnnnnnnnnnnnnnnnnnnnnnnnnnnnnnnnnnnnnnnnnnnn

SEQ ID NO: 33072 - DNA, 506 bp, Homo sapiens
  misc_feature (1)...(506): n = a,t,c or g
ggntgnntncccccttgaacncccncttggananccnnnnnnnnnnnnnnnnnnnnnnnnnnnnnnnnnnnnnnnnnnnnnnnnnnnnnnnnnnnnnnnnnnggcacgagaacatcctgaaataagtttccttggtatagaattagtcatgtcaggatattaggaaatgtgttttagaagacttgaaaacagggtactgggtgcatctgttgggtctgtatgcaggaattggatgtctagcaaatgtgttagcaagcctctctggaaattgacagacagctgatcctaactgagagatatacctgcttgtaagcttaaaaagtaacaatacttacgtttatatttaattacttactttaatactgaaatacatgagctatatgcagtgctttcaaatcactgtttaaagaaaataaaaagccctcaaattcactattttccattggttttaataactttttttcaaaaatagtaaagttttatagccttacatgtttctaacaaca

SEQ ID NO: 33073 - DNA, 506 bp, Homo sapiens
  misc_feature (1)...(506): n = a,t,c or g
gtgtgnntcccccctttgnanccccnctttganaaccnnnnnnnnnnnnnnnnnnnnnnnnnnnnnnnnnnnnnnnnnnnnnnnnnnnnnnnnnnnnnnnnnnggcacgaggtattttttagtagagacagannnnnnnnnnnnnnnnnnnnnnnnnnnnnnnnnnnnnnnnnnnnnnnnnnnnnnnnnnnnnnnnnnnnnnnnnnnnnnnnnnnnnnnnnnnnnnnnnnnatttgtttgatttgggtctggacaaggtctacactttgcatccggttgataggcctcttttttttgttttgttttgttccctttgttacccaggctgaagtgcagtggagcgatcagagctcacgnnnnnnnnnnnnnnnnnnnnnnnnnnnnnnnnnnnnnnnnnnnnnnnnnnnnnnnnnnnnnnnnnnnnnnnnnnnnntcatgctcaggtactggcatcagctctttggcgtgcatgttgtggnagtttttctacaggcgacctaggccat

SEQ ID NO: 33074 - DNA, 498 bp, Homo sapiens
  misc_feature (1)...(498): n = a,t,c or g
ggtgnnnnccccttgaaaccctanncatgattncgaatttaatacgactcnnnnnnnnnnnnnnnnnnnnnnnnnnnnnnnnnnggcacgaggttgtattgcatgtaattgatacatttcagccataaagcacctaagaggtttagcaagcactagcgtgtttttgaaatagatgttgatagatttagtaagatatccttattcttagtttaaaaaaaaaacgcaggactgaaaataccaccaaagagatccttgatttttagatttaaaatgcttaatttcttcctgagattacacagagaagtttccttaactactgtttgttctagaaactggaacaacttaatcagtatccagactttaacaactacttgatttttgttcttacaaaattaaaatctgaagatgaacccacaagatcattgagtggtcttatcttgaagaataatgtgaaagcacactttcagaacttcccaaatggtgtaacagactttatta

SEQ ID NO: 33075 - DNA, 504 bp, Homo sapiens
  misc_feature (1)...(504): n = a,t,c or g
gggnnnnnnnncttggannccctctttganaccnctatgacnnnnnnnnnnnnnnnnnnnnnnnnnnnnnnnnnnnnnnnnnnnnnnnnnnnnnnnnnnggcacgagtgcaaaatgaaaggaaatataaacccagataccctgaaggcacagtgtgcaaagcacatcccatgaatcagttcacttaatccttttaacaaacctgtgctgtaactcaggggtccttaacccccgggccatagactgatacnnnnnnnnnnnnnnnnnnnnnnnnnnnnnnnnnnnnnnnnnnnnnnnnnnnnnnnnnnnnnnnnnnnnnnnnnnnnnnnnnnnnnnnnnnnnnnnnnnnnnnnnnnnnnnnnnnnnnnnnnnnnnnnncccaccannnnnnnnnnnnnnnnnnnnnnnnnnnnnnnnnnnnnnnnnnnnnnnnnnnnnnnnnnnnnnnnnnnntgttgctataactgattattcttacactaagaatgagtagactgaaaagttt

SEQ ID NO: 33076 - DNA, 507 bp, Homo sapiens
  misc_feature (1)...(507): n = a,t,c or g
gtggtgnnnncccccttgannccctctttganaacccnnnnnnnnnnnnnnnnnnnnnnnnnnnnnnnnnnnnnnnnnnnnnnnnnnnnnnnnnnnnnnnnnnggcacgagnnnnnnnnnnnnnnnnnnnnnnnnnnnnnnnnnnnnnnnnnnnnnnnnnnnnnnnnnnnnnnnnnnnnnnnnnnnnnnnnnnnnnnnnnnnnnttgtgtctttttttgtggctcgcggcggccgttggccatagggcgtgtctggctcagctgggcaggcacccaggaccaccccgcgaagctgtagcgtccgtggcctctgtagccagcacctgaacacgccacggagaaaggtccgctgaagaaagctcagtctcaattgtgcttcctggctcttgcctcccaaacacgtaccatttccacttgatgtcatcatgctcagaatggagtgaaagggattcagtgacagattcagtttggaggataaataatcatattgcaatgttttccttggga

SEQ ID NO: 33077 - DNA, 501 bp, Homo sapiens
  misc_feature (1)...(501): n = a,t,c or g
ggntgnntncccccttgaaaccnnnnnnnnnnnnnnnnnnnnnnnnnnnnnnnnnnnnnnnnnnnnnnnnnnnnnnnnnnnnnnnnnnggcacgaggacattatattttttaattatctaaaacaaatagtgagaacagtggcattattttatatttttgcaaacgctttaatatctggcttaatagaaaacagctgtattctcatatctgtttctgtgttcaagctgttgtaatgtgttgattcaactatatgaagaaaacccagcctcacacaggtatgtagttagaaaagaaggttgtctcagatccccgaggggctctccagatcacactttgagaaccgctgcactagggcagcactacttctgcccacaacatgcccaaggtgggactgggaaagcctcatgggtaaggccaacatagctaccatcattcccattttgcaaatgagagaaataagggtaagagaggttgaggggaaaacagctattgcttcctgt

SEQ ID NO: 33078 - DNA, 500 bp, Homo sapiens
  misc_feature (1)...(500): n = a,t,c or g
ggggntccccttgancccnctttganacctttgacnnnnnnnnnnnnnnnnnnnnnnnnnnnnnnnnnnnnnnnnnnnnnnnnnnnnnnnnnnggcacgaggtattttaggagtccgaggcaggcagatcacnnnnnnnnnnnnnnnnnnnnnnnnnnnnnnnnnnnnnnnnnnnnnnnnnnnnnnnnnnnnnnnnnnnnnnnnnnnnnnnnnnnnnnnnnnnnnnnnnnnnnnnnnnnnnnnnnnnnnnnnnnnnnnnnnnnnnnnnnnnnnnnnnnnnnnnnnnnnnnnnnnnnnnnnnnnnnnnnnnnnnnnnnnnnnnnnnnnnnnnnnnnnnnnnnnnnnnnnnnnnnnnnnnnnnnnnnnnnnnnnctgatcccctggccctctgcccttacctgtttactggtggggcccctcctctctgtccctatccatctgtctccctgtgtcccctcctttgttggcctgatgtgccttgggtccatttgtctctccag

SEQ ID NO: 33079 - DNA, 500 bp, Homo sapiens
  misc_feature (1)...(500): n = a,t,c or g
ggtnntncccccttgaaaccctatnacnnnnnnnnnnnnnnnnnnnnnnnnnnnnnnnnnnnnnnnnnnnnnnnnnnnnnnnnnnggcacgagaactgggtgctagcaatgtcatactannnnnnnnnnnnnnnnnnnnnnnnnnnnnnnnnnnnnnnnnnnnnnnnnnnnnnnnnnnnnnnnnctaactnnnnnnnnnnnnnnnnnnnnnnnnnnnnnnnnnnnnnnnnnnnngtctgnnnnnnnnnnnnnnnnnnnnnnnnnnnnnnnnnnnnnnttgtgttgttttttgnnnnnnnnnnnnnnnnnnnnnnnnnnnnnnnnnnnnnnnnnnnnnnnnnnnnnnnnnnnnnnnnnnnnnnnnnnnnnnnnnnnnnnnnnnnnnnnnnnnnnnnnnnnnnnnnnnnnnnnnnnnnnnnnnnnnnnnnntttcttaatctgaatgttggttgtcccatatggctgagttcatgaaaattcgctgagctgttacatttatg

SEQ ID NO: 33080 - DNA, 501 bp, Homo sapiens
  misc_feature (1)...(501): n = a,t,c or g
ggtnntnccccttganccctctttgaaacccnttgacnnnnnnnnnnnnnnnnnnnnnnnnnnnnnnnnnnnnnnnnnnnnnnnnnnnnnnnnnnggcacgagctggaattagccataataaaaagaacattgcatctgatccagtggagcataaggaattaaaagactgaatttttaattcttccaaggtgatacagcttcatacagcttcatgattgaaatggggacttgaattaataaaactagttttaaaaatgaaaacnnnnnnnnnnnnnnnnnnnnnnnnnnnnnnnnnnnnnnnnnnnnnnnnnnnnnnnnnnnnnnnnnnnnnnnnnnnnnnnnnnnnnnnnnnnnnnnnnnnnnnnnnnnnnnnnnnnnnnnnnnnnnnnnnnnnnnnnnnnnnnnnnnnnnnnnnnnnnnnnnnnnnnnnnnnnnnnnnnnnnnnnnnnnnnnnnnnnnnnnnnnnnnnnnnnnnnnnnnnnnnnnnnnnnnnnnnnnnn

SEQ ID NO: 33081 - DNA, 507 bp, Homo sapiens
  misc_feature (1)...(507): n = a,t,c or g
ggtnntnccccccttggatnccccnctttgaacanccntnnnnnnnnnnnnnnnnnnnnnnnnnnnnnnnnnnnnnnnnnnnnnnnnnnnnnnnnnnnnnnnnnggcacgannnnnnnnnnnnnnnnnnnnnnnnnnnnnnnnnnnnnnnnnnnnnnnnnnnnnnnnnnnnnnnnnnnnnnnnnnnnnnnnnnnnnnnnnnnnnnnnnnnnnnnnnnnnnnnnnnnnnnnnnnnnnnnnnnnnnnnnnnnnnnnnnnnnnnnnnnnnnnnnnnnnnnnnnnnnnnnnnnnnnnnnnnnnnnnnnnnnnnnnnnnnnnnnnnnnnnnataccacagntntccagcttgggcaacanaacaanaccctgtctntaaaaaataaaannnnnnnnnnnnnnnnnnnnnnnnnnnnnnnnnnnnnnnnnnnnnnnnnnnnnnnnnnnnnnnnnnnnnnnnnnnnnnnnnnnnnnnnnnnnnnnnnnnnnnnnnnnnnnnnnnattagccagg

SEQ ID NO: 33082 - DNA, 503 bp, Homo sapiens
  misc_feature (1)...(503): n = a,t,c or g
gtgtgnntcccccctttgacacccctantnnnnnnnnnnnnnnnnnnnnnnnnnnnnnnnnnnnnnnnnnnnnnnnnnnnnnnnnnnnnggcacgaggttaaattagaaacggctttggtacattgtcaggacactagggggacatttacttctggagtttttttcagttctgtgtagtttacttcttgagtctttgtgctgaccactctatttcagtgaattgagttccctttaaaaagcatatcagaaagtaaaactgcttttgttgtgtttctattcagctacaaatctcccagagtctgcttgcagtgaagtgttagtaatgaggtctcttctgtccccacttcaatgccgccgtgaagaaaatcccatgaaatgttataaggcattttagtggatggaaaagcaatataaatgaccagattacctaggtgcttaaaattgcatcaggtggcctccttgtagcccttgcccatggtaattaaatgtttgttactgattg

SEQ ID NO: 33083 - DNA, 506 bp, Homo sapiens
  misc_feature (1)...(506): n = a,t,c or g
ggtgnnnnnnnnctttganncccncctttnnnnnnnnnnnnnnnnnnnnnnnnnnnnnnnnnnnnnnnnnnnnnnnnnnnnnnnnnnnnnnnnnnnnnnnnnggcacgagacaggaatgcactacacatctttaccttttcaggctctactctgagttaatgttgagccactccatgtgacacagaagcctcttgtcactgtgttgttcattggggtgccgaggccagctcatggtatctcctgagagccagtcgttcactttccagtatttttttttgcgggggcgggggggnnnnnnnnnnnnnnnnnnnnnnnnnnnnnnnnnnnnnnnnnnnnnnnnnnnnnnnnnnnnnnnnnnnnnnnnnnnnnnnnnnnnnnnnnnnnnnnnnnnnnnnnnnnnnnnnnnnnnnnnnnnnnnnnnnnnnnnnnnnnnnnnnnnnnnnnnnnnnnnnnnnnnnnnnnnnnnnnnnnnnnnnnnnnnnnnnnnnnnnnnnnnnnnnnnnnn

SEQ ID NO: 33084 - DNA, 505 bp, Homo sapiens
  misc_feature (1)...(505): n = a,t,c or g
gtgnntnccccctttgnannccctcttggagacccnnnnnnnnnnnnnnnnnnnnnnnnnnnnnnnnnnnnnnnnnnnnnnnnnnnnnnnnnnnnnnnnnnggcacgagcttcagcaatagtgtccttatgtagagaacattgtaggttacctactcaactaactttttgcttttgtcttcttcccgagagaattctgattttgtccaaacatccatctcttctccccagagctaagtactttgggagaagttggcctcatccccagttacagcagataggtcctgaatagactaagctggtgttgactattccaaagggatcaccagtgattggtttaggagtgacatgtgtcttgttctgacaaataagatgtgagggaaggtctgctgggatggaggtggggagttctgggaaaggttttcttggccttatgaagaatgcaccagaagagaccatccctcttctgcctcttgacattgccctgttgaatgttatatctggaa

SEQ ID NO: 33085 - DNA, 503 bp, Homo sapiens
  misc_feature (1)...(503): n = a,t,c or g
gtgtgnntcccccctttgnaaccccttgactgattacgaatttaatacnnnnnnnnnnnnnnnnnnnnnnnnnnnnnnnnnnnnnnnnnggcacgagctttagcttgtgagattataaataacttaaaaagttatgattaaatttttgtctttatatttttgttctcagttcatctgtagtaagcatactgctacgataagatgaaaaagtaagttattttacaaggtatatcactacagtcagcctaagaatattccttcagagaacatttttatgaggcttttataatagtcttcagaggaaagacatgctttctatgcccttcttgatggctgtggtaggacatgagactccaaatcttttagatatttttcttctatacaatttctgattaaatttgttgaaatagtaatactactagagagaaattgccctaccctttgaaatctgtgtgaggacagtgatctacttcaccattaatatcccaactttaaagtagttt

SEQ ID NO: 33086 - DNA, 453 bp, Homo sapiens
  misc_feature (1)...(453): n = a,t,c or g
ggnngtnnnngtnttgnttccgatagagatctctttggaaanncccgactatttttgggnaatttnccnctcgaggccaagaattcggcacgagaacttgtactaaccacgttgagcttttcctttactaaacgctgtcattcttgtccaagtccaagaagctaagactttacgaagtaatattttgtttaccagttccttcatgtgggctcattttaggttttgttgaggtgcttgatggggctgaagagcacagcctcagtcaggtcagggtttctcagcagtggccctattgctgttttgggtcaggtaattcttttcatgggaggggtgatcctgtgctacgaataatacgaagtaatattttgttaatcagttccttcatatggacttcacattttctccctcaagccaaattgttagctcattatgggtaggaagtttttctgcctt

SEQ ID NO: 33087 - DNA, 440 bp, Homo sapiens
  misc_feature (1)...(440): n = a,t,c or g
nnnnnnnnnnnnnnnnnnnnnnnnnnnnnnnnnnnnnnnnnnnnnnnnnnnnnnnnnnnnnnnnnnnnnnnnggcacgagctcagatcatcagacattannnnnnnnnnnnnnnnnnnnnnnnnnnnnnnnnnnnnnnnnnnnnnnnnnnnnnnnnnnnnnnnnnnnnnnnnnnnnnnnnnnnnnnnnnnnnnnnnnnnnnnnnnnnnnnnnnnnnnnnnnnnnnnnnnnnnnnnnnnnnnnnnnnnnnnnnnnnnnnnnnnnnnnnnnnnnnnnnnnnnnnnnnnnnnnnnnnnnnnnnnnnnnnnnnnnnnnnnnnnnnatctacagaattgcattagtgataactctcaaaatgttcatttcattgaaatactacattccctcaccattttgaataaataggaatttattcgtgcttatagatttattcaacctgta

SEQ ID NO: 33088 - DNA, 443 bp, Homo sapiens
  misc_feature (1)...(443): n = a,t,c or g
tggananccnnnnnnnnnnnnnnnnnnnnnnnnnnnnnnnnnnnnnnnnnnnnnnnnnnnnnnnnnnnnnnnnnnnggcacgaggggctggttccctctgcaggcccaagggaggaatccttccttgcctctgaannnnnnnnnnnnnnnnnnnnnnnnnnnnnnnnnnnnnnnnnnnnnnnnnnnnnnttcccctgtgtatatctcagaggtcctactcctttcccttatacggactccagtctctgaatttagagtctaccctaaatccaggatgatctcatcttgagatccttcaactcatcacacctgaaaagaccctgtttccaaatgagggtgcagtttaggtcccacggattaggacttgggcccatctttttgaggaccaccattccacccactctagggaactcacattgcttcatgacttttgtcttctcagg

SEQ ID NO: 33089 - DNA, 442 bp, Homo sapiens
  misc_feature (1)...(442): n = a,t,c or g
tgnananccgntttgacnnnnnnnnnnnnnnnnnnnnnnnnnnnnnnnnnnnnnnnnnnnnnnnnnnnnnnnnnnggcacgagatggaatctttctagcatagattcactttaaatgataccaagataggaattattttgtattccttgtttggtaactcttttcattccactttagcacccaccatctgctgggtgctgaacaatgtagtttttactaataaattacgaacatttttacataacagaagacactaactttgacagtaactagaaaaataaggcacagagctagaagtgaaactgataagcagtagcaccctaacgctggggaaatagtcacatatgtgtaaaaacagacaagtataacaacgttaactnnnnnnnnnnnnnnnnnnnnnnnnnnnnnnnnnnnnnnnnnnnnnnnnnnnnnnnnnnnnnnn

SEQ ID NO: 33090 - DNA, 397 bp, Homo sapiens
  misc_feature (1)...(397): n = a,t,c or g
ncccntttgaanaccgtttgacnnnnnnnnnnnnnnnnnnnnnnnnnnnnnnnnnnnnnnnnnnnnnnnnnnnnnnnnnnggcacgaggcagccctggagacccggcaccatcacacccagatcgcgtccaccttcatcgctgtggtgcaagccatcgtccgcacggctggtggctgggcagctgcctcggactccaggaaaggcggggagcctgccggctactgagtgctccaggaggacaaggctgacaagcaatccagggacaagatactcaccaggaccaggaaggggactctgggggaccggcttcccctgtgagcagcagagcagcacaataaatgaggccactgtgccaggctccaggtggcctccctggcctgtcaaaaaaaaaaaaaa

SEQ ID NO: 33091 - DNA, 443 bp, Homo sapiens
  misc_feature (1)...(443): n = a,t,c or g
tgnanaccgnttnnnnnnnnnnnnnnnnnnnnnnnnnnnnnnnnnnnnnnnnnnnnnnnnnnnnnnnnnnnnnnnggcacgagtcatagggttgcgtcctgagctctccgtctcgctgggtagacagcggctcactgccatacgactgcagccgctgctgccggcccgaactccgtgcggcttcttgagggcgcgagtggcactggcgctgatggccgatgagacannnnnnnnnnnnnnnnnnnnnnnnnnnnnnnnnnnnnnnnnnnnnnnnnnnnnnnnnnnnnnnnnnnnnnnnnnnnnnnnnnnnnnnnnnnnnnnnnnnnnnnnnnnnnnnnnnnnnnnnaactgttgtgaagattaaagcagatcacagagacttaaagctcttggtacgtattctgaatctacaggggttacagtaaacacctataaatttattc

SEQ ID NO: 33092 - DNA, 372 bp, Homo sapiens
  misc_feature (1)...(372): n = a,t,c or g
tganacnnnnnnnnnnnnnnnnnnnnnnnnnnnnnnnnnnnnnnnnnnnnnnnnnnnnnnnnnnnnnnnnnnnnnnnnnnnnnnnnnnnnnnnnnnnnnnnnnnnnnnnnnnnnnnnnnnnnnnnnnnnnnnnnnnnnnnnnnnnnnnnnnnnnnnnnnnnnnnnnnnnnnnnnnnnnnnnnnnnnnnnnnnnnnntnnnnaaaattanctggtgtannnnnnnnnnnnnnnnnnnnnnnnnnnnnnnnnnnnnnnancagcggaagggttgcttgancctggnanatcaaggntacagngagccatggtcataccactgcactccatccanagngacncagnganatcctntntcanaaaaaaaaaaaaaa

SEQ ID NO: 33093 - DNA, 435 bp, Homo sapiens
  misc_feature (1)...(435): n = a,t,c or g
anacccgntatgacatgattacgaatttaatacnnnnnnnnnnnnnnnnnnnnnnnnnnnnnnnnnnnnnnnnnggcacgaggaaagagtcagtaaagagagttccttagcaggatgcaagttacagtcttatgtaagataatcatagagtgacatctcctcccctgtgccaggttctattgggcaaaagcaagtcacaggtcccacccagactcaaaggggaggaattacacaggcctgtgattcccaggaggtaggaatcctaggggccattttggagtctgtttgccacaacctgtaaaatgtagtaaaaccagtgcaatactttgtaatgagtcaggaatgaccaggaaaagtttttgctagatggagtcttccttggtagagtttcaatgtctattttatgacaaaatacttaaaagagttgacaaaatg

SEQ ID NO: 33094 - DNA, 444 bp, Homo sapiens
  misc_feature (1)...(444): n = a,t,c or g
tttganaccnnttnnnnnnnnnnnnnnnnnnnnnnnnnnnnnnnnnnnnnnnnnnnnnnnnnnnnnnnnnnnnnnnggcacgagcggcacgagcatagagacagggtctcactatgttgcgtaggctgtaaaacaaacaaacaataggtaagagatggatttttctagtgggtctgagactgggcgttttgtgtgaccttggaatctgagagccaggtagccagtgtcctcttcttcatttcacaggagagaaaattgagaccctgtgagaccctgctcctgactcttgatgttcacccttataactctctgggccccggtgctagccagtttgtcacagctgttatgtcagcttaatttggtttgctctgtctgaaggttggggaagcgcctggaatttgggaagccgcttcacacatgtcttcatcgccgctgccgtcagcc

SEQ ID NO: 33095 - DNA, 452 bp, Homo sapiens
  misc_feature (1)...(452): n = a,t,c or g
nnttggnnnnccnntttganacccgtnnnnnnnnnnnnnnnnnnnnnnnnnnnnnnnnnnnnnnnnnnnnnnnnnnnnnnnnnnnnnnnnnggcacgagcggcacgaggtgggagccctctgtaatctttagggagagtgaggactggggatgggagaaggcggcagcgggcactggaccgacagatacaggccctgggtaggctcctctacatctggaaaggcccagaattgaagaattgaggcccatgtccgagtatggtggctggtgctggcactgctgggccccgcctgggcagtgcctcttaccatgaactttctgaagtcgtttttaatcccctggagcctccttttgccaaggagggcaggggcagatgggccctggggatgggatagacaggaggtggccaggaaggcttggcaaggcagtgggcagagccatccttagggctg

SEQ ID NO: 33096 - DNA, 445 bp, Homo sapiens
  misc_feature (1)...(445): n = a,t,c or g
ttgaaaccgttttgacatgccnnnnnnnnnnnnnnnnnnnnnnnnnnnnnnnnnnnnnnnnnnnnnnnnnnnnnggcacgaggagagtatgagttcattattgtagcgcatgctcagtgtatccagcctgcctttcttcctctgtgtatattcacagaggggtgctggggtgaaggccaagcaatgttagcagtggttatttctaaggggtgggatcacagtggccttcttgcttctttgtctctgtgttgtttgattttttttaagattaacatggaaataataaagccattctaaaaattaagcaaaaagaaaagttttaaaagagcaaacaaaatagcacgaccctgttcgtggcttcataggcagctctcatgtttgtccttccttcttccaccccacctcccacctggctgcagccccaggggactggctgctttccctc

SEQ ID NO: 33097 - DNA, 442 bp, Homo sapiens
  misc_feature (1)...(442): n = a,t,c or g
tttgataccgntttnaatgccnnnnnnnnnnnnnnnnnnnnnnnnnnnnnnnnnnnnnnnnnnnnnnnnnnnnnggcacgagaaagagacaaatgggagaggaaggaggaggaggaaagacggagaaagagaaaggaaagaatgaaggagaggaaggaaggaagagggggagggaggaaggaagacatatattgaaagatgttagagatacataactaatgtaatgggtgatccctttttttttaaattttattttcggttcaggggtacnnnnnnnnnnnnnnnnnnnnnnnnnnnnnnnnnnnnnnnnnnnnnnnnnnnnnnnnnnnnnnnnnnnnnnnnnnnnnnnnnnnnnnnnnnnnnnnnnnnnnnnnnnnnnnnnnnnnnnnnnnnnnnnnnnnnnnnnnnnnnnnnnnnnnnnnnnnnnnnnnnnnnnnnnnnn

SEQ ID NO: 33098 - DNA, 446 bp, Homo sapiens
  misc_feature (1)...(446): n = a,t,c or g
ttgananccnnnnnnnnnnnnnnnnnnnnnnnnnnnnnnnnnnnnnnnnnnnnnnnnnnnnnnnnnnnnnnnnnnnggcacgagcctgtgtcttctcttctgtgtcttctaagggcacttgccactggatttagaacccacatggttacatcaggatgatctcatctctagatccttaattttccaataagatctcattcacaggttcgaggattaagatgtggacatatctttttgggggatgagggttatcattcaacccccaaaggctggaaaccaaaaacatccagctgtttctcacagaaacctggtgaaacaaactggatcatggtggactctaccccgcagctgtgggacggaccgagctggactgactggcaaaagggaacagcagagtcaagggtgtcaggtggtacaatctgaataatgagaacaaacaaatcatg

SEQ ID NO: 33099 - DNA, 446 bp, Homo sapiens
  misc_feature (1)...(446): n = a,t,c or g
anncccnattgnanacccgntatgacnnnnnnnnnnnnnnnnnnnnnnnnnnnnnnnnnnnnnnnnnnnnnnnnnnnnnnnnnnggcacgagctctcctctgccgtctggagaacttgggtggaaatgaccataaaatttatgtttaagtttaccataaaagtagacttaattttttcgcttacacttacatagcaacactttttaaaaactcttcttgatagctctttgcaacatatgccttttctttcataagcatgcccttcacttgctctaaggggcgcaggactggccccacggagcctgtcacctcaagacttggagtgccatcaccagctaccctcttcagcgaacttcatgaacaaacttattaacgtcaattcacctgcctctggcagagccttttcctttaccaaataacctgtttctaacatgctaaaggtgccg

SEQ ID NO: 33100 - DNA, 442 bp, Homo sapiens
  misc_feature (1)...(442): n = a,t,c or g
anacccnnnnnnnnnnnnnnnnnnnnnnnnnnnnnnnnnnnnnnnnnnnnnnnnnnnnnnnnnnnnnnnnnnnggcacgagaagtgaagcatggttgaataccagctggggagacactagggaagggagctttgtaagccttgattgcaaaagtccaaattttgatgtggggctataacatgacacccttggattgcgactggttttatacggcctgcctataacgttgaaaatccatgtactacataataattcagaagggctctattcactacacagattacattgttcaatcatcagctgctaatagcctaagatttattttttttttttnnnnnaccntatgganccggntttgctgtnctggggggggaaantagactanntacnggnaaaacnttnagagaangaaancccnnngttcccatagggncnctttaac

SEQ ID NO: 33101 - DNA, 449 bp, Homo sapiens
  misc_feature (1)...(449): n = a,t,c or g
tttgnananccnnnnnnnnnnnnnnnnnnnnnnnnnnnnnnnnnnnnnnnnnnnnnnnnnnnnnnnnnnnnnnnnnnnggcacgagcgctggtgtacctgttgtcaaagctcacggaagacaaagagactctgcagtacttacaacagaatgcaaaagaaagagctgagcttgcagccgctgctgtgggcagcagtaccaccagcatcaacgtccctgccgcggcctccaagatctccatgcaggagcttgaggaactgaggaagcagcttggcagcgtggccacaggctccacactgcagcagtctctggaacttaaaagaaagatgcttcgagacaagcagaacaaaaaaaattcaggccagcacctccccatcttcccagcatgggtgtatgagagacctgccctgatcggggatttcctgattggtgctgcatcanncanacacc

SEQ ID NO: 33102 - DNA, 445 bp, Homo sapiens
  misc_feature (1)...(445): n = a,t,c or g
ttgganaccgntttgacatgccnnnnnnnnnnnnnnnnnnnnnnnnnnnnnnnnnnnnnnnnnnnnnnnnnnnnnggcacgaggtccattctattggctttttgaccctttgtgacaatttctgttccctgtccttcataaactgcttttatttttcttgccttaaatattgacatttataaagacccagaccctaactttttgcagtgtacaaacattccttgagagactgaatctacatctgtacttttacatatagttgactcatacatctttaagcttcagattgactacaggaatttcaggatgactgtttcattgtctgtaaatcctagcattttctgtgtttcttctctcgtatattcttttttagttggtggcactatgagaatcacccaaactagaaacctaagaattacttcagattccctgttctgtcacactg

SEQ ID NO: 33103 - DNA, 436 bp, Homo sapiens
  misc_feature (1)...(436): n = a,t,c or g
tttgataccgtttgacnnnnnnnnnnnnnnnnnnnnnnnnnnnnnnnnnnnnnnnnnnnnnnnnnnnnnnnnnnggcacgagaactgggcttggtcacaggaactgacctggagctgctgactaagggcatcttgaaggatgtaattaccttcctcccttggggccccagaacaaggaagccctacagctgaaaaacagtaattaccaggcagatcgagaagacagcctgggactcgtccctgaggtataaaaggaggactggcggatgtggagccataagacctgcggtaaaggagggttctactctcctagctgggagacactgggcagctcatgagcttcctaggacactcagttttctcatctataaaatggggtattctgccccccgacctcctgaagcttggtttccatttgaaagtgcttcataaacac

SEQ ID NO: 33104 - DNA, 488 bp, Homo sapiens
  misc_feature (1)...(488): n = a,t,c or g
gttgnagnccntnnnntnncnnntttgaaaccctttgacnnnnnnnnnnnnnnnnnnnnnnnnnnnnnnnnnnnnnnnnnnnnnnnnnnnnnnnnnnggcacgaggaggtactgaaccatgatggctgttgaggaattggtcctaaaaggacagatcacttcagaagagtgaataactgatttgcacagctgaatcaggagacacaaagatgagactgtgtttggttacattttccaaagtttcattgcattctcccttggggaggctgtgagagagggcttgtatccctcttgtgctaagcagactctactcctaactgacttcaatatttcagcagggtacacaggcgtttccaagtttcagtgacaccgtcctgcctaaccagatgcggtcagcctcttcacgcccacctggcttgcatcccccatcccttgttcacacgccctgattcacggtgagacattttgccaccttcttgngnatatta

SEQ ID NO: 33105 - DNA, 470 bp, Homo sapiens
  misc_feature (1)...(470): n = a,t,c or g
tttgaannnnnnnnnnnnnnnnnnnnnnnnnnnnnnnnnnnnnnnnnnnnnnnnnnnnnnnnnnnnnnnnnnnnnnnnggcacgagagacagcacaatttccagtgggcgttcaactccagcaatgatgaatggacaaggaagcactacttcttcaagcaaaaatattgcctataattgttgttgggaccagtgccaggcttgcttcaactctagcccagatctggcagatcacatccgttccatacatgtagatggtcagcgaggaggggtatttgtttgcttatggaaaggttgtaaagtatataacactccatctaccagtcaaagttggttacaaaggcatatgctgacacacagtggagacaaacctttcaagtgtgttgttggtggctgcaatgccagctttgcttctcagggagggctagctcgtcatgtacccacacacttcagtcagcagaactcctcaaa

SEQ ID NO: 33106 - DNA, 493 bp, Homo sapiens
  misc_feature (1)...(493): n = a,t,c or g
gtgnnnnnnnntttgaaccctntgacnnnnnnnnnnnnnnnnnnnnnnnnnnnnnnnnnnnnnnnnnnnnnnnnnnnnnnnnnnggcacgagcttaaacctgggtttctgccatatcaacctagggggaaaacttagccatgtggatttccaggtcactgcctcatagatggagagaatttttggcttcctctctgcctgcagatagcagttaagtaggaagtttgcaaatattgtggatggcctattgagaacaataaacatgattcacttgcttgcctgtcctactgaagaccaagagatgatgttctgccaatctatgcttatggccatgcagtggggaagtcagtcactggaggttatgtctatcgtggttgtgaatccccaaatctcaatggcctgtatatctttggagacttcatgagtggtcgacttatggctttgcaggaagatagaaaaaacaagaaatggaagaagcaggatctttgcctggg

SEQ ID NO: 33107 - DNA, 496 bp, Homo sapiens
  misc_feature (1)...(496): n = a,t,c or g
gttgtnnnnnnntttgaaaccnnnnnnnnnnnnnnnnnnnnnnnnnnnnnnnnnnnnnnnnnnnnnnnnnnnnnnnnnnnnnnnnnnggcacgagggcatctgtggaacatcttcgaacatatcctcatggataagggagggactactgtatatattgcaaatatcttctcccactcggtagcttgccttttcactctgttattggtgtcttttgatgaacttaaaagaccttnnnnnnnnnnnnnnnnnnnnnnnnnnnnnnnnnnnnnnnnnnnnnnnnnnnnnnnnnnnnnnnnnnnnnnnnnnnnnnnnnnnnnnnnnnnnnnnnnnnnnnnnnnnnnnnnnnnnnnnnnnnnnnnnnnnnnnnnnnnnnnnnnnnnnnnnnnnnnnnnnnnnnnnnnnnnnnnnnnnnnnnnnnnnnnnnnnnnnnnnnnnnnnnnnnnnnnnnnnnnnnnnnnnnnnnnnnnnnnnnnnnnnnnnnnnnnnnnnnnnnnn

SEQ ID NO: 33108 - DNA, 463 bp, Homo sapiens
  misc_feature (1)...(463): n = a,t,c or g
ttgganaccgcttgacatgacnnnnnnnnnnnnnnnnnnnnnnnnnnnnnnnnnnnnnnnnnnnnnnnnnnnnnggcacgagcgttgataaacacaaaactactatgggtcaattaatatcctagcactatacataaaatatcagtcagtatgaaggaccctttaaatgctgattttctactttggtttatatttttaattttattaactatttcttgattatgtataaatattatataacttttaagctttgagtagctagcttccacaaatatttactctttggagatatacatgtatatataaaatttgtctatttctagtccttgaactccttgaacaagccaagctgacactgaccttggggccactatcattactatttctacctgaaagacttttctccccatatcttcaattgatcagttcttcctcatccttcagtcttaccttacaaatggca

SEQ ID NO: 33109 - DNA, 471 bp, Homo sapiens
  misc_feature (1)...(471): n = a,t,c or g
nnnnnnnnnnnnnnnnnnnnnnnnnnnnnnnnnnnnnnnnnnnnnnnnnnnnnnnnnnnnnnnggcacgagaatttataagttaaaactttattgtatgtatgtgtatatagnnnnnnnnnnnnnnnnnnnnnnnnnnnnnnnnnnnnnnnnnnnnnnnnnnnnnnnnnnnnnnnntgttggaatgtcttcctgcaggtaagagggtctactctatgctatattcaagtgctgtagacatgtatatatattattatgattgtaactaacattttattacaaaaccttttaaacattcaacaaggttgaaagaattttacagctatcaccagtgtaatccttacccagatgattctgcctattaatgttttactataactgtgtaatacttatctgtccatctctccatccctctatccattagtccatcttacttttgatgcatttcaaagttaaatttcagacctcagtt

SEQ ID NO: 33110 - DNA, 479 bp, Homo sapiens
  misc_feature (1)...(479): n = a,t,c or g
ngtgnnnnnnnttgaacccttgactgattcgantttaatacgactcnnnnnnnnnnnnnnnnnnnnnnnnnnnnnnnnnnggcacgagaactggaattatttcatgggacagtgtagagtacagacttcactgattgttataactaaaagtacatttctgagcagaggagtggaaagtgttacatgtgtgggaaaccacaggtcttggtgctcataggagatgaaacatcccacatttcactatggttttaatcaccaaagaaagaaaacgacagtttgtatatagatgggtaaatgatgtctccaagtatggtgtacagttgctcaattctttatgtggccatcttcccactacnnnnnnnnnnnnnnnnnnnnnnnnnnnnnnnnnnnnnnnnnnnnnnnnnnnnnnnnnnnnnnnnnnnnnnnnnnnnnnnnnnagnctnccctnccggntcaancattntnccgctnanctctga

SEQ ID NO: 33111 - DNA, 464 bp, Homo sapiens
  misc_feature (1)...(464): n = a,t,c or g
annnnnnnnnnnnnnnnnnnnnnnnnnnnnnnnnnnnnnnnnnnnnnnnnnnnnnnnnnnnnnnnnnnnnnnnggcacgagatgacttcaatacctgacttcatgatttattataaggttatagtgataaagacagtgagctattaccataaagatggatcaatggcccaaaacagactccagaattagacctactcatctgtgtcaactgatttttgaaaaggtgaaagaggtagtttagtgaaagaaaagataatcttttcaagaaataatgctgtaacaattgacatacagatgcaaaaacaacaacagtaacaaagaactgaggtctatacttcacaccatgtaaacaaattaacttgaaatggattagacctaaatgtaatactgaaactcaaaaacacttagaacaggagaaaggttttgtgatcttaggttaggcaaagatttcttaaatacaacac

SEQ ID NO: 33112 - DNA, 468 bp, Homo sapiens
  misc_feature (1)...(468): n = a,t,c or g
tttgannnnnnnnnnnnnnnnnnnnnnnnnnnnnnnnnnnnnnnnnnnnnnnnnnnnnnnnnnnnnnnnnnnnnnnnggcacgaggcgaaaaccaacttgcttaatttctgtgggtgccgatagcatcccggtaactgtaaaagggatcctactaacttctgaaggagccctgaaacaaggggcagggtggaggtgggttttgagataattgcaatctttatcgtttgaagcctcaagacacctgcctttccccattagggttttatcagcctgggacgctgctccctcaatcccctgtggttgtcgatttacacagtggcacagtacaaaactgggaaacggctgggtgaaaatggctggccaggcgacgagccgcagtagacgtttcggtcttcagctgcaataaagagaaaaatatatatataaacttggcatttgtctcggcgcacagggcaaggccacatgat

SEQ ID NO: 33113 - DNA, 460 bp, Homo sapiens
  misc_feature (1)...(460): n = a,t,c or g
annnnnnnnnnnnnnnnnnnnnnnnnnnnnnnnnnnnnnnnnnnnnnnnnnnnnnnnnnnnnnnnnnnnnnnnggcacgaggcctaggtcagggtggacaaccctataccacctccagcaatccctagttcattccatttactttgtttagtaagatatggcacgtcccaaattcacaagtggtttctgtggaaaatggttggaattttaaagataatttggcacttggtaagaacagctttatttatctggaaacatttctgttctgggggatgggctggcttccctgaggtgccactctatagagtgctgaggcccatgcagttgctctggctttatactgcatctaacagtcttaggaataggatatattccatattccgatgagaatgangggnttannacacacccgnncannctggatgctggnttgnncacgctgggggcngtaatgtggagg

SEQ ID NO: 33114 - DNA, 475 bp, Homo sapiens
  misc_feature (1)...(475): n = a,t,c or g
ataccccttgacatganacgttggnnnnnnnnnnnnnnnnnnnnnnnnnnnnnnnnnnnnnnnnnnnnnnggcacgagcggcacgagaatggcacccatatctcttgagattttgattttttaaaaactgtgctaaaccgtattctccaaaggagagaagaaagaattttgcagttttcgttctgttttttcttttgggaagcgtctactttggagaatttaacccttttctaaagtaactgcagttgtcttttattcccctttttgaaatacctgtgacctatagtttgattggaccaacaaaggcctcaggtgcactggcttgtttcacttgtgtgcttctggcctttttctttctaattcttcatccttgccttttgaaaggatgatgctcttttccaagtgacctctagcagattctgagatgtagtgtccgatttagtaattttctcatataaaaggattctacagttaa

SEQ ID NO: 33115 - DNA, 484 bp, Homo sapiens
  misc_feature (1)...(484): n = a,t,c or g
tttgaanccctntgannnnnnnnnnnnnnnnnnnnnnnnnnnnnnnnnnnnnnnnnnnnnnnnnnnnnnnnnnnnggcacgagggtggactgtagcctactagaagcaggctgatacatctttgtacctcccatttgtcttgcacttataacttgcctgcttagttttgatggaatgagccaatgaatgacagtaagatttcacaagagtcacctgtgaaacatacttcaccaaagcacccatggtagcacttattaacaaacggagtttaccagggatggggcagaagaaagtcttagcttttcaaagaatttcattcctgagacatttttgtggtcatgtatttaaaaaaaaagggttgggggggtgctctgagaaatgtgctctcagatggcncagctggaatgagagaaatgggaactgttttccattttacatagtttctggaaagggcantttgancaaaaaaagcaacnctgttggg

SEQ ID NO: 33116 - DNA, 468 bp, Homo sapiens
  misc_feature (1)...(468): n = a,t,c or g
tggannnnnnnnnnnnnnnnnnnnnnnnnnnnnnnnnnnnnnnnnnnnnnnnnnnnnnnnnnnnnnnnnnnnnnnnggcacgagcccttattgtccttctccttcttcaattccttgctccagtaaggcatgtatatagtccgcccaaaagttcagatgaaattggtaatccagactcgtaagcggaccaccacctgctgcagtggcacatgctcatgcctaatgcccaattctcccatgtcaagatgtacagtaagtcctcactaatagcctcgataggttcttggaaactttatgtgaaacaatgtataatgaaaccaacttagagtttctacagcatatttgtggtcataaaacattgccaaacttctaaataaagannnnnnnnnnnnnnnnnnnnnnnnnnnnnnnnnnnnnnnnnnnnnnnnnnnnnnnnnnnnnnnnnnnnnnnnnnnggtaattatttat

SEQ ID NO: 33117 - DNA, 481 bp, Homo sapiens
  misc_feature (1)...(481): n = a,t,c or g
ttgaaccctttgacatgacacgtnnnnnnnnnnnnnnnnnnnnnnnnnnnnnnnnnnnnnnnnnnnnnnnnnggcacgaggacatggtctggggcacagtatttgacccatagtagtgctaaacattaattccattttctttccaaaaggatttttgtaaggtttctttatatgtcaattgtcttggtgtatctacctaatatacacagaacttttcaaaactgtaactatgacaaggcgtgaaatatttggaatcacatattccagggtttagccacacagaaattacagcaatttactctggacttattaaagcaaacaaatccctgctaaagctatggcttaccttccttccatatttaggatacacaccagttcatcctcaaaaaaaatctctggtccttcaaggttctcaatgtcactgaagccattacaaggaacctatgaagaagacatatacaagtaggcctcaattatgagg

SEQ ID NO: 33118 - DNA, 477 bp, Homo sapiens
  misc_feature (1)...(477): n = a,t,c or g
aaaccccttgannnnnnnnnnnnnnnnnnnnnnnnnnnnnnnnnnnnnnnnnnnnnnnnnnnnnnnnnnnnggcacgagcaaaatgccatttagtaaatttgaatgttcctcaagaaaggagtttgtaaataagaaggcaatatgcataacacctttctttctttcattctttattatttttgtagaatactttgccttatttttaatctctatgatttgggtagtttcttttgtattttatatactttgggtgaaatgagtaaaaaaaaaaaaannaatanttntaggncngggannctaatttttaccaccannanatcantnctangattnaaaatangtntccccngntntntccncccaanatttaaaatananaangttaccantaacccaatntngggggaancnccagttgncagggctaaaanccctccaanggcnttccaagctggntggncgngggggctcatgcc

SEQ ID NO: 33119 - DNA, 466 bp, Homo sapiens
  misc_feature (1)...(466): n = a,t,c or g
ttggatanccgctatgacnnnnnnnnnnnnnnnnnnnnnnnnnnnnnnnnnnnnnnnnnnnnnnnnnnnnnnnnnnggcacgagaaaatatgatcatagtttttagaagtcagttataaactgaatccaggcacacctaccttttgtttttgaaacaaaccaagcttattcctccctcggcatcttttaaaaatgtcccttcaaatagtcattccctgatctttcagaatattttcttttccccaccctccatgggaaacatgaggggatttttccnnnnncgncactgtgagaacctctntganctcctggngatanaccnaccattanactgggggctgccantgnctngngctnnctnngnncctcaaggttanggnctnngnccacnggagggcctgacacttnatacncnnttctcnngnngcggntcttnngattanccaccttntgngcaactnggttc

SEQ ID NO: 33120 - DNA, 121 bp, Homo sapiens
  misc_feature (1)...(121): n = a,t,c or g
gnggnngnnnnngtnnntttgtnacctacnagaccttntgggaattcccacgactttttangggaaatttncccctcgaggccaagaattcggcacgagtaaagatctttttttttttttt

SEQ ID NO: 33121 - DNA, 454 bp, Homo sapiens
  misc_feature (1)...(454): n = a,t,c or g
nnnnnnnnnnnnnnnnnnnnnnnnnnnnnnnnnnnnnnnnnnnnnnnnnnnnnnnnnnnnnnnnggcacgagctggaagaattaacaacagagtaagttatatatttacttttaaggtacacacacgaaaaaatttttaggaatagaagtactcagtgttggctaaaagattttagatatttcagtcacttcctaatccttaaaatgtttatacaagtttctccccacttcctccaccatccccctattatatccattttataattcagaaggtgatctgttaaccaggccataaacagaaagtaaacttcaaaaannnnnnnnnnnnnnnnnnnnnnnnnnnnnnnnnnnnnnnnnnnnnnnnnnnnnnnnnnnnnnnnnnnnnnnnnnnnnnnnnnnnnnnnnnnnnnnnnnnnnncggtgaaaccccatccctactaaaaaatatatatat

SEQ ID NO: 33122 - DNA, 463 bp, Homo sapiens
  misc_feature (1)...(463): n = a,t,c or g
ttgnaaanccttnngacatcnnnnnnnnnnnnnnnnnnnnnnnnnnnnnnnnnnnnnnnnnnnnnnnnnnnnnnnnnggcacgagggaaaggccagcagaagtccagagcttccacaccgtttctgggtgccccaccttctaggcatgtccacctgttcagcaatttggaagctatccaaacccttttcttttggactttggcnnnnnnnnnnnnnnnnnnnnnnnnnnnnnnnnnnnnnnnnnnnnnnnnnnnnnnnggcntgatctttgntaactgaancnttngcntcccaggctaacacaatcntcccntttcngcctcctgagnaacnggnactaacaggagtnccccatnacccccagccaattttnggatttttcgaanaaacggggtcnaatnatgtngcccgngctggntttgaannctnggacnnaggggatccacccanntgtgcttttttt

SEQ ID NO: 33123 - DNA, 458 bp, Homo sapiens
  misc_feature (1)...(458): n = a,t,c or g
nnctttgaaaaccnnnnnnnnnnnnnnnnnnnnnnnnnnnnnnnnnnnnnnnnnnnnnnnnnnnnnnnnnnnnnnnnnnggcacgagggatggctcacatggttatggaggctaaggagtcctggagtctgcagccagcaagctggagacccaggactcccaatgatatagttccaactcgagtccacatctaaagtcaggagaagattgctgtcccaactcaaatataatcaggtaannnnnnnnnnnnnnnnnnnnnnnnnnnnnnnnnnnnnnnnnnnnnnnnnnnnnnnnnnnnnnnnnnnnnnnnnnnnnnnnnnnnnnnnnnnnnnnnnnnnnnnnnnnnnnnnaaatgttatcctcatccagaatacctcagagacccacccagaataatgtgtagccaaatatctgggcacccacaacccagtcaaattcatacataacactaaccatca

SEQ ID NO: 33124 - DNA, 456 bp, Homo sapiens
  misc_feature (1)...(456): n = a,t,c or g
aaacccttnnnnnnnnnnnnnnnnnnnnnnnnnnnnnnnnnnnnnnnnnnnnnnnnnnnnnnnnnnnnnnnnggcacgagccctgaagaatgaggttttcatacttggtttggtttccaggctagcctatttcccattactcaattctgtctggactcctgagcgccacagtattttgcatattttaagctttcagatgtttgctaaactgtattaatacagctggaaagtaagtgtgaggcaatccaacaacccaacttctgagcaccagtgggcacccagctctggcctgggagccgtgggctctggcgattcatctctttctcaacctcagaacgtgcactgtcagccactcgttaaaaaattgcctgcttgggactcaccagaaaaaggtggaaaaaggtgattcgtcctttcaaaatttcagcgggtgcaaataaggaagaacatgcaaca

SEQ ID NO: 33125 - DNA, 459 bp, Homo sapiens
  misc_feature (1)...(459): n = a,t,c or g
nanncctttgaaaaccnnnnnnnnnnnnnnnnnnnnnnnnnnnnnnnnnnnnnnnnnnnnnnnnnnnnnnnnnnnnnnnnnnggcacgagctttctgagttttggtttctccatcttatatggcatcagcaaggcccacttaattgggctattatattgattgaattaaataatgtctctcaaagcgtcaagcacagagcctgttaactgttaatgaaaaacagtacctttcttatagaagttattctggaaaagtagtcatcacattctgttctgaaggcatttactggcatggctgtcttcctgtgttaccctcaaatacagctgccatgctttgacttggttgagcgatagggaaagtgttagcaatttgccccggtgcttccttgcctggcaaatggttgaccttaggcaagtctttaaagcttgtaagagtggcctctgaagccacagcctcca

SEQ ID NO: 33126 - DNA, 451 bp, Homo sapiens
  misc_feature (1)...(451): n = a,t,c or g
nnctttgaaaccctnnnnnnnnnnnnnnnnnnnnnnnnnnnnnnnnnnnnnnnnnnnnnnnnnnnnnnnnnnnnnnnnggcacgagcggcacgagaaaatagttgtagattatttatagtactttctgaaattggagaaaatgctgtataaaaatctgattttattaagacatctagtttagcttagtatttgtttaaaagaagtagagaagagggaaatgggaaatgcaaagtatctagtctgttgttaaggaagatctgtcttttgatgaggtgatgcgtgtggaaggaaaactgattttatgaggaaggaatcctgagcaaagaaaatggaggggccagtgattaacttcattctgtttcttgaagagaattgtttcctgaaaaaatgtagttagaaaatctggtttaatttaaaaattcttttcttaccttacattcaatgctggaa

SEQ ID NO: 33127 - DNA, 458 bp, Homo sapiens
  misc_feature (1)...(458): n = a,t,c or g
tttgnanancttttgnacaccattacgaatttaatacnnnnnnnnnnnnnnnnnnnnnnnnnnnnnnnnnnnnnnnnnggcacgaggaagaggagagggcatacctgagtctgggcgcccattcccagaggccacgcagaagccgaaagtgccccctggggagcgctgcagctgcagctggctggtgccgtctgggaacacctccaccaggcggcccacggtgcgagccaggctgggagcacccacgtcctccacactgagggcacgccgtggtgaagtcttggccggcctgcgagggaaccagagacacagtgagggcaaaaagcatcaggcactgggcacagctcttccctggcttacagatgaccgatgcctcacagacttaagagcctggcattggaggctggggttctgctgacttcaaccagcaaaaagagcctgctagggccaaaactggt

SEQ ID NO: 33128 - DNA, 449 bp, Homo sapiens
  misc_feature (1)...(449): n = a,t,c or g
tttgganancnnnnnnnnnnnnnnnnnnnnnnnnnnnnnnnnnnnnnnnnnnnnnnnnnnnnnnnnnnnnnnnnnnnggcacgaggagcttcaataccctgtctctaggaaacataagtcctgaccttcacagacactgtcaatatgcaccaattacacccagtacacctatattacggaagtgaaactcaaaacgtaatgtctaaaaacacacccaaggaaaccacaattaaaacctcagacatcctcccctcttcccctaacagcatctgcctgtgcatcctcagcttccaagtgctctgcagtttctttcagtacaagaggatccttccatggtgggcatatgagtagctggcagacctgtaggggaggctccccaggaagaaccaattgggccttcaatgatctttctttgcaggctcaaaggtggacttagcttggaatcactt

SEQ ID NO: 33129 - DNA, 448 bp, Homo sapiens
  misc_feature (1)...(448): n = a,t,c or g
ttgganancnnnnnnnnnnnnnnnnnnnnnnnnnnnnnnnnnnnnnnnnnnnnnnnnnnnnnnnnnnnnnnnnnnnggcacgagtgaataacttgcaccatcttatcttccattgcttcatttttaagtaatacaacagacagaaaacatgcagcaggaaggactaaataccttttgagagaatgctatttgcagccaagttttgtaaggctcaggcattatagatagattagattagattcaaatgtataattcacagtggcttcttctagcaacaacatccaaatgatgagactcagttgttgcttctaatagtaaaggcaaagaaagaaataattggagaagaggaggagagagaaaacagtagaatttgtgggaaaaaataagccttacatatgcctttttacttatgcaaatttggaaaatggagcagagagaaatgaattag

SEQ ID NO: 33130 - DNA, 452 bp, Homo sapiens
  misc_feature (1)...(452): n = a,t,c or g
tggaaacccttnnnnnnnnnnnnnnnnnnnnnnnnnnnnnnnnnnnnnnnnnnnnnnnnnnnnnnnnnnnnnnnnggcacgaggcaaccnnnnnnnnnnnnnnnnnnnnnnnnnnnnnnnnnnnnnnnnnnnnnnnnnnnnnnnngatnnnnnnnnnnnnnnnnnnnnnnnnnnnnnnnnnnnnnnnnnnnnnnnnnnnnnnnnnnnnnnnnnnnnnnnnnnnnnnnnnnnnnnnnnnnnnnncacctttaaaaaatgatgcagtattctctacccagtagttctaatcctaggtatatattgagtagaagtggtacatatgttcaccaaaagacacgtacaagaacattactagcactattcaaaataggaacaaactgaaaactaaagtgcctcttaagagtaaaatggataatttgtacgttactcgtgtgtcgtactatatacagcat

SEQ ID NO: 33131 - DNA, 449 bp, Homo sapiens
  misc_feature (1)...(449): n = a,t,c or g
tncctttganancnntatgacnnnnnnnnnnnnnnnnnnnnnnnnnnnnnnnnnnnnnnnnnnnnnnnnnnnnnnnnnnggcacgagagataggtaaccacaggataaaagaagaataaaaatatatagagagaatattagatcagtgctatgaaaaaatagaacataggaatggggatgttgctatttagcctagacaaggaacacataactgataaggtgacatttgagtagagacctgagagaaatgaagtaatgagacctggatattgagataagtaagtgcaaaggtcccaatttaaaatgattgatgggaccaaggaatagatattgatagtccagactaagtggtagtagaagtgctgaaacatggtcagattgtggatttgttttaaaggtgggaccaagaggatttgccaatggattggatgttgcaagtgagggaaaat

SEQ ID NO: 33132 - DNA, 389 bp, Homo sapiens
  misc_feature (1)...(389): n = a,t,c or g
tttgaaaaccnnnnnnnnnnnnnnnnnnnnnnnnnnnnnnnnnnnnnnnnnnnnnnnnnnnnnnnnnnnnnnnnnnnggcacgagaactggaacccacattaagaatctcgcctccaccttaattccacttctagaaaaagctgccttgtccctcctctcataaatgtgcctacagacccctcagaaatctacaggccgtgtgactgcctaacctgagcattctaagaaatatgggcatcacagtcagtgatgttttggttgcagcgccacaaacagggcctctggctgggaggaaacagggaaggtcccctgaacggcaatctgtggtactgtggttcaggttccagaatgggtgttaagtgaatacttggcctaaaaaaaaaaaaaa

SEQ ID NO: 33133 - DNA, 451 bp, Homo sapiens
  misc_feature (1)...(451): n = a,t,c or g
aannctttgaaaacctnnnnnnnnnnnnnnnnnnnnnnnnnnnnnnnnnnnnnnnnnnnnnnnnnnnnnnnnnnnnnnnnnggcacgagggatcttgatgagggatgtacaagatttaattagaaactgaaattttagagtaaaaaaatgcaggggtgtgtgtgtttcttctatatttgtggaaacccagagagctatcctgcaggatacttgaaaatatatataaatacagaggagaaataaagtgcggagaaggtttgttgattattgagctttttcatgggtgatagaatggagcagctgtaggatggaggtaaagaggataggaaaatgctcttctgggtcagacccagccccacatcccaaaatgttgtggccaccctctgtgttatgtaaaatgtagnnaggtcctcccagctggaggaccttcgagtatactgcgttccccctc

SEQ ID NO: 33134 - DNA, 450 bp, Homo sapiens
  misc_feature (1)...(450): n = a,t,c or g
tggaaacccttnnnnnnnnnnnnnnnnnnnnnnnnnnnnnnnnnnnnnnnnnnnnnnnnnnnnnnnnnnnnnnggcacgaggtgataaataagaatggtgcagtttccccatgacaagttgtacataaatgcttagggatggttcacattctctttggagttgaacaaaatgaggtcattatttacaactctttctacttgagtccatttcatgaatgtggttaggatgagcactgggcccaaaagccttgttttcggtgagttctttggaattccaccacttttcaccaagacattaaatattcaggttttgaaacagacagcgcaaagctaatctttgaaaatcttgctcaatttctggctaagatagaacatatgcaaataaaatgagatttatttaaaatcttacttttctcaaaaggatctatgaggagagtcttatagagctac

SEQ ID NO: 33135 - DNA, 451 bp, Homo sapiens
  misc_feature (1)...(451): n = a,t,c or g
tgganaccctnnnnnnnnnnnnnnnnnnnnnnnnnnnnnnnnnnnnnnnnnnnnnnnnnnnnnnnnnnnnnnnnnggcacgagagactatcccaaagctctgaagaaataatcaaatactgcctgggaagattttttttggtgtactgcagtagtagcacccacttacttcttacactttactcactagaaagtatgttttgtagtcacccatctctctgccttttgattttggatagcctgtcagctttttactggatagaccgcgtcaatggaggagaaagtgtgaacttacaggagtctactctgaggaaatgttctcagtgcttagagaagcttgtaaatgactatcgcctggttctttttgcaacgacacaaactataatgcagaaagcctcgagctcatcagaagaaccttctcatgcctctcgacgactgtgtgatgtggacat

SEQ ID NO: 33136 - DNA, 448 bp, Homo sapiens
  misc_feature (1)...(448): n = a,t,c or g
tttgaaaaccnttatgacnnnnnnnnnnnnnnnnnnnnnnnnnnnnnnnnnnnnnnnnnnnnnnnnnnnnnnnnnnggcacgagacccaactgtaccccacagtaagatgcccaggctcaggtgggcagaaggaggaaggagggacctgggaaccacgagtcacccatttcagtggaggttgaatacgcagaatcaggaagcacagaaatccacacccatatcataatgaaattgcagcacaccaaaggcaaagagaagatctttaatgcagccaaggaaaaagcacagattacagagagcagacgctgagactgagagtagacttcgtagtggccacagtgggagccggaagccatgggatacagtgagtgtgacttgggactcttcaccatcaaattagaatcaggagttgaaattgatggttgttcaagaatctgctcacggtaa

SEQ ID NO: 33137 - DNA, 451 bp, Homo sapiens
  misc_feature (1)...(451): n = a,t,c or g
tttganacccttnnnnnnnnnnnnnnnnnnnnnnnnnnnnnnnnnnnnnnnnnnnnnnnnnnnnnnnnnnnnnnnggcacgagcgccccatcaacttgggttcctttgactcctgtagactctgtccctacctgtggttgtcatcgtccacggcagccaggaccacaatgccacggctactgtgctgtgggacaatgcctttgctgagccgggcagggtgccatttgccgtgcctgacaaagtgctgtggccgcagctgtgtgaggcgctcaacatgaaattcaaggccgaagtgcagagcaaccggggcctgaccaaggagaacctcgtgttcctggcgcagaaactgttcaacaacagcagcagccacctggaggactacagtggcctgtccgtgtcctggtcccagttcaacagggtgaggggcccagctgccagccgccaccagggc

SEQ ID NO: 33138 - DNA, 446 bp, Homo sapiens
  misc_feature (1)...(446): n = a,t,c or g
ttgganaccgntatgacnnnnnnnnnnnnnnnnnnnnnnnnnnnnnnnnnnnnnnnnnnnnnnnnnnnnnnnnnnggcacgaggttaatgccaccaacctatgtgtgtgggaagcaccagagcccacaattatgaatgagcatttcagagagaaaagtcacgtgaaataatcagtttaaccaggaaattaatgttacatgattaaaaatgatttgaagaaaactggtaaaattcaagtaaggtctatagtctcattcattgtattatgccagttgttttcctgatcctaataaagcataattatgaaagatgtcaccatagggggaagctgggtgatgagtacaaagatcttctttgtattacatttgcagcttattgtgagcatataattagttttattaaaaagtttnnnnnnnnnnnnnnnnnnnnnnnnnnnnnnnnnnnnn

SEQ ID NO: 33139 - DNA, 453 bp, Homo sapiens
  misc_feature (1)...(453): n = a,t,c or g
ttggannccttgaaaacnctatgacnnnnnnnnnnnnnnnnnnnnnnnnnnnnnnnnnnnnnnnnnnnnnnnnnnnnnnnnnnggcacgaggcatattaccagcaggagaagtgcctgagacccgaggacatcctgcgcttcatggaaacaaggtcagggctcaggctgtgattgtcattgaccttgacccagagaatgcgcttgaactggggcaggaagcacctagccacaaggctcctagagattgagtgcctttgcccaaatgagcccttcaagggaagtgtttaggaagcagagggccttgcagcctgatctggaaacctgaccacagtctggcttgtgggtatgactttcttagccacacgtcactccctgagcccatttcttctcttgggttgacgtcaggattgttgtcttctggggcttgcaggcattaagacatggaaatgtgg

SEQ ID NO: 33140 - DNA, 451 bp, Homo sapiens
  misc_feature (1)...(451): n = a,t,c or g
tgganaccntnnnnnnnnnnnnnnnnnnnnnnnnnnnnnnnnnnnnnnnnnnnnnnnnnnnnnnnnnnnnnnnnnggcacgagccagaacctgggcttttgtccctgatccctgctcctttctgggcctccgtttccccatctatatagccaggagtagactcaatgatctaacgtcttgaggctatgatcctgagactacgaactcagtctatcagtaaccagagtacacattatgaccaggccattctttctcaagattatgaccccaggagcattgattgagtgcctgccgtgtgcccagctcttacagagcactggatggcaggtcagaagacttggatttgagccctgcccctaacagtgaccagtgtataatcttaaagaagttagtttccttttctaaattgagtttcctcatctggaagattgggtcaataatccttgctctg

SEQ ID NO: 33141 - DNA, 464 bp, Homo sapiens
  misc_feature (1)...(464): n = a,t,c or g
atttganaccntttgactgacnnnnnnnnnnnnnnnnnnnnnnnnnnnnnnnnnnnnnnnnnnnnnnnnnnnnnggcacgagatttttttcccaagcctgtagcgacagggttttgtgattctggtttgctgagatttggattggctttatttgccgctggtttcaattttattttgggtggttctaacttttaaatgtttggaaacgtttgttcatttgattttccctttttgtttagtttagaaattggttgagctgtttcataatttatcaagcttgatttcataatctttggcaatctaggtcaggaatcatgcagaacaggcacgatttgatgatgggatcttgaagactgattcgttctttttaaaagtcacgatagagaaagctttactcctgaaaggcggtattctttctttcatcagggcgtaaaaattatataatgccttgnttccctttttgc

SEQ ID NO: 33142 - DNA, 466 bp, Homo sapiens
  misc_feature (1)...(466): n = a,t,c or g
nnnnnnnnnnnnnnnnnnnnnnnnnnnnnnnnnnnnnnnnnnnnnnnnnnnnnnnnnnnnnnnnnnnnggcacgagccatggagtacttgcaaaggacagtaatagagatttaggtaaggctcggtttatatatcagaatttagtgtgatgaaaagaaaaattttatcaatgcttacttgcttttgctattatttctacagactggtagttgaggaagagtgctcggaggcagactgggggctctcaggaaggagaacagttgaacagattcttgcttccattctggaagtcagtcagggcaggcagtagagcaattgagtttgctctgcattctcatactgcagtcctttaatctcacactggaaaacaaagaggaaaaacatacaactattagcagttcacctcaaacaaacactccatgtgcatctcattcattcattcagcaaatacttattaggcattatt

SEQ ID NO: 33143 - DNA, 468 bp, Homo sapiens
  misc_feature (1)...(468): n = a,t,c or g
attngatnnnnnnnnnnnnnnnnnnnnnnnnnnnnnnnnnnnnnnnnnnnnnnnnnnnnnnnnnnnnnnnnnnnnnnnggcacgagcagcaacaagcagtttgttctgtcaagtaagatgagattgtaaactatctgttataatcctgagctaaaactgcaaagcccaaacagtaagttttttttggtgtcctggtttgtttcagatcattcttaagcctcccaccccagtgctcagcattgctttgcacgtattatttctccagaaccacacaaacctgacccaggataggggcaggtttcctctgtagagacaggaatggagacatttcagtaattcagaataccacctataactcataaccctgcatctggggctcacccattttggccaggtctaagattctgttgctaacataggcaggatagtcctgaaaacttcaccatgaggtagatcttaatttaccca

SEQ ID NO: 33144 - DNA, 488 bp, Homo sapiens
  misc_feature (1)...(488): n = a,t,c or g
gnngnntnnnntnnnnnnttgnanaccgctatgacnnnnnnnnnnnnnnnnnnnnnnnnnnnnnnnnnnnnnnnnnnnnnnnnnnnnnnnnnnggcacgagccctggtccagccacatagcagtctcctggctgggctcttcttcagtggcctaaataatgtttctgattctactctagcttcccgctacaatccattttccacatggcagccacagttgatcttaaaaagggcatcctctcatctccatctgaagcttcaaactctttcatggattcctattacacttagaataaaatccaaactccttaccatgttgtctgtgtaactgagcccttccctgcctctccagcttcctcttctgccactctccccaacactcactcaatacactacagccacatcacaactttaagtccctcgggacacaaaactctttctcccatactggggtcactgaacatgggcaagttcactctgtctagaat

SEQ ID NO: 33145 - DNA, 469 bp, Homo sapiens
  misc_feature (1)...(469): n = a,t,c or g
tttganancnnnnnnnnnnnnnnnnnnnnnnnnnnnnnnnnnnnnnnnnnnnnnnnnnnnnnnnnnnnnnnnnnnnggcacgagggaacattgttgacatggtaggactgtttatcgaaaatgtccaaagcctatatcctttctgtgatgaccttccccatggggaggtgctacagagcccctgggcttgtcccggcctctggacaaaagaatgttccacagggtctgaggaggtttcccgaccctcagaacaatgatggcctggttagagctgtggtttggatgcccagagggacaacatccaaactgtttgcagtaggctcccagcatgattgttctcgtatgagtgatgttcactaggaaatgacgccccctgtgttgcaggcaagcacactctggggttgaggcaacccccacgtggaagacactataaggagtacatcaggtgaaatgttagggtgaggaccat

SEQ ID NO: 33146 - DNA, 462 bp, Homo sapiens
  misc_feature (1)...(462): n = a,t,c or g
nnnnnnnnnnnnnnnnnnnnnnnnnnnnnnnnnnnnnnnnnnnnnnnnnnnnnnnnnnnnnnnnnnnnnggcacgagnnnnnnnnnnnnnnnnnnnnnnnnnnnnnnnnnnnnnnnnnnnnnnnnntgagaccatatgcctgtagagatattattatataacatccctgacccatatgtagatgttcagaaagtggaagctgccattagcaatgggtgggttgaatatttcatcaaatatttagggtataagagaataaaaagcaaattgaaagtattaaaagatcctgccttctcaagtctgtcaaataggaaggactatgttataagcttgaattaatcctaagagtttggtggatgttacgaatagttgctaaaaattccccaaattactaattactgaagttaagttgctctcctttgaaccttatttactgatgctttgcaaactttttactttctt

SEQ ID NO: 33147 - DNA, 461 bp, Homo sapiens
  misc_feature (1)...(461): n = a,t,c or g
aattgatatgncnnnnnnnnnnnnnnnnnnnnnnnnnnnnnnnnnnnnnnnnnnnnnnnnnnnnnnnnnnggcacgagactctcgtgtagttgcaacaatggccatgacttctaggcttcatctgcccctctcagcagctctagagaagaagctcctctttttacacagtccctaattaaagtctcagagatgaacaacctgggctcttgcttagggcacgtgcccatcctgaatcaatgatcggccagagagctgtgatattnnnnnnnnnnnnnnnnnnnnnnnnnnnnnnnnnnnnnnnnnnnnnnnnnnnnnnnnnnnnnnnnnnnnnnnnnnnnnnnnnnnnnnnnnnnnnnnnnnnnnnnnnnnnnnnnnnnnnnnnnnnnnnnnnnnnnnnnnnnnnnnnnnnnnnnnnnnnnnnnnnnnnnnnnnnnnnnnnnnnnnnnnnnnnnnnnnnnnn

SEQ ID NO: 33148 - DNA, 460 bp, Homo sapiens
  misc_feature (1)...(460): n = a,t,c or g
attnnnnnnnnnnnnnnnnnnnnnnnnnnnnnnnnnnnnnnnnnnnnnnnnnnnnnnnnnnnnnnnnnnnggcacgagccacatgcacagttcacagtagggttctcannnnnnnnnnnnnnnnnnnnnnnnnnnnnnnnnnnnnnnnnnnnnnnnnnnnnnnnnnnnnnnnnnnnnnnnnnnnnnnnnnnnnnnnnnnnnnnnnnnnnnnnnnnnnnnnnnnnnnnnnnnntgtggcctgtggctcgggactgctgtaagacatgatgtatttttggttatttgaaaggtggacatagtaatgaaaagaattttacatcaaacatttgttctacttaagtatattttaaaacaaaatgtttgaggattttagatttttaaactttaggaatccacttttctattttgtttctttgagaaaataattcttgaaatatgagacttgtacaatttccaaaat

SEQ ID NO: 33149 - DNA, 461 bp, Homo sapiens
  misc_feature (1)...(461): n = a,t,c or g
atttgatacngctatgacnnnnnnnnnnnnnnnnnnnnnnnnnnnnnnnnnnnnnnnnnnnnnnnnnnnnnnnnnnggcacgaggtcctctgccaggcatgagccaccgtgcctggcttaacttcctctttattacttggaactattaggaccctatgtggtgtggtatttgttggtttgtgtgtctgtctctcccccatggatatttattgactactgtgtaccaggctgtatggcatttagggtacagagatgaaaagacagagcccttgacttcaaagagctcatagtctaatgaatgacagccaaataaacaggtgataataatacagtgaagagaagattgtttaaagttcaagcaaaggatcaataactcaggtaagttgtccacgtactaggactggcanatatcagttgcccactgaatattttctgaagggtcaaaagaatggctcccaaat

SEQ ID NO: 33150 - DNA, 461 bp, Homo sapiens
  misc_feature (1)...(461): n = a,t,c or g
naccnnnnnnnnnnnnnnnnnnnnnnnnnnnnnnnnnnnnnnnnnnnnnnnnnnnnnnnnnnnnnnnnnnnggcannnnnnnnnnnnnnnnnnnnnnnnnnnnnnnnnnnnnnnnnnnnnnnnnnnnnnnnnnnnnnnnnnnnnnnnnnnnnnnnnnnnnnnnnnnnnnnnnnnnnnnnnnnnnnnnnnnnnnnnnnnnnnnnnnnnnnnnnnnnnnnnnnnnnnnnnnnnnnnnnnnnnnnnnnnnatctggacaacagagcaagactccgtcttggaaaaaaaaaaaannatntaaaanngtaaaantnttngaaanttnttacntantngcaaatntagttngntaactccaanaggaancncntttnatttttnggnatngccctgatnaanntttntcccccnanaanatgctgtnaacctnggttcccatnatanncntnttccccntangggga

SEQ ID NO: 33151 - DNA, 484 bp, Homo sapiens
  misc_feature (1)...(484): n = a,t,c or g
gtggnnttgnnntnnnnnntntgaaaaccnnnnnnnnnnnnnnnnnnnnnnnnnnnnnnnnnnnnnnnnnnnnnnnnnnnnnnnnnnnnnnnnnnggcacgaggtgtgtcgacagtggcagaggcagttggggccaaacaaaggttgattcttccattcttatctccataaagccagacctttcccttcagcactcctccacccccatctccttcttgcttttctccaactcctctaatcataggttcttccctaggacagaggggaggcgaaatgatgaggttcagagtcttccctcaaaggcgatggctgccttgagggttggagcaaaggatgatgagcaaaagacgatggtaatcagtagggaagtccagcccacttgcatctagttgcacatcttgccttgagagtaatccagtgagggtctgtcccagctaggacatcaagtangaggggtgggttcagggttcagattcctaggaaa

SEQ ID NO: 33152 - DNA, 478 bp, Homo sapiens
  misc_feature (1)...(478): n = a,t,c or g
ggngtnnnntgnntttgantttgataacnctatgacnnnnnnnnnnnnnnnnnnnnnnnnnnnnnnnnnnnnnnnnnnnnnnnnnnnnnnnnnnggcacgaggtgctgcccctaggcaatctccaggaagttcatgcctctggaccagtggctttactttgatgccctcgattgtcttccggaagatggggagctccttcccagtcctgaggactgtgccctgagaggcagccgctatgatgggcaaattgcagtgtttggggctggttttcaggagaaactgagacgccagcactacctcctggtcccaggacgttggtagacccaaggcagaggtggctgcagcagctgcccggggcctgaacccagacttacagggcgctatgtggctgctcgttgcacccactatctgaagccactgctggaggcaggcacatcgggcacctggggcagtgctacagtattcatgccacatgtg

SEQ ID NO: 33153 - DNA, 469 bp, Homo sapiens
  misc_feature (1)...(469): n = a,t,c or g
tttgaatttgatatgncatgattacgaatttaatacnnnnnnnnnnnnnnnnnnnnnnnnnnnnnnnnnnnnnnnnnggcacgaggcgctgaccagaaaacacagtgtttcaccaccaccaccatatcctgggcacacaaaaggatttagggtatttaaaaaatctatgtctctcccatctcactgactaccttgtcattttggtataagaaatttgagttatttgannnnnnnnnnnnnnnnnnnnnnnnnnnnnnnnnnnnnnnnnnnnnnnnnnnnnnnnnnnnnnnnnnnnnnnnnnnnnnnnnnnnnnnnnnnnnnnnnnnnnnnnnnnnnnnnnnnnnnnnnnnnnnnnnnnnnnnnnnnnnnnnnnnnnnnnnnnnnnnnnnnnnnnnnnnnnnnnnnnnnnnnnnnnnnnnnnnnnnnnnnnnnnnnnnnnnnnnnnnnnnnnnnnnnnnngttcgagcaa

SEQ ID NO: 33154 - DNA, 488 bp, Homo sapiens
  misc_feature (1)...(488): n = a,t,c or g
gnnngnnnnnntgnnntnttgganttngaaacccnnnnnnnnnnnnnnnnnnnnnnnnnnnnnnnnnnnnnnnnnnnnnnnnnnnnnnnnnnnnnnnnnnggcacgagagttcatgcccacaataactagactgtaagctccctgagggccgatctgctcaccactacacccagaccataggagcgcctggcacttcagagatgctcactaatgccagcactttggctactttcatatttcagtatgcactgattttcatcatcagtgaagcagcatcctatgaaataggatgaccatatgtcctgattttcctgggacagctctggcttacacctgttgtcccatcataattattaacagtctcttgatgttccagtttggatgataaattatattgttactttacctttaaatcnangtaaattcnnangctanttnattgattnnttatanntctgactttgacttnttctnanngntgcgtttt

SEQ ID NO: 33155 - DNA, 437 bp, Homo sapiens
  misc_feature (1)...(437): n = a,t,c or g
aattgnanaccgnttgactgattacgaatttaatacgactcnnnnnnnnnnnnnnnnnnnnnnnnnnnnnnnnnnggcacgaggaaaaacaaatcacctcaagtttcatgatctaacaaatcaagttgttgtcatttttgtgtcctttttggtctttattcatatataattttatatgataagacaattttttaaaattaattacagactacttgtaagaactgagcaagagcctggttcattattctgcatttggatcaaagggcaaagtataagtgtcaatttagtgtatgtacatgtttcagttagctgaattattggagaagggtctggaaattatcagttggatacatatagaataatattttaggaatatgatacagcaaaactaaaaatgtgattggctcctcaaaagaatgttccatatgaaaaatggt

SEQ ID NO: 33156 - DNA, 438 bp, Homo sapiens
  misc_feature (1)...(438): n = a,t,c or g
anntntgagaccgtttgactgattacgaatttaatacgactcnnnnnnnnnnnnnnnnnnnnnnnnnnnnnnnnnnggcacgaggtttccataataaaatagaaatttttagtttagatccatatttcaagattcaatttatatgctaccgtatcaggattgccagataaaatataggctgcnnnnnnnnnnnnnnnnnnnnnnnnnnnnnnnnnnnnnnnnnnnnnnnnnnnnnnnnnnnnnnnnnnnnnnnnnnnnnnnnnnnnnnnnnnnnnnnnnnnnnnnnnnnnnnnnnnnnnnnnnnnnnnnnnnnnnnnnnnnnnnnnnnnnnnnnnnnnnnnnnnnnnnnnnnnnnnnnnnnnnnnnnnnnnnnnnnnnnnnnnnnnnnnnnnnnnnnnnnnnnnnnnnnnnnnnnnnnnnnnnnnnnnnnnnnnnnnn

SEQ ID NO: 33157 - DNA, 438 bp, Homo sapiens
  misc_feature (1)...(438): n = a,t,c or g
ttganantganaccgttatgactgccacgaatttaatacgactcnnnnnnnnnnnnnnnnnnnnnnnnnnnnnnnnnnggcacgagcacatacttttggtaaaaattaatgcatttataatcaagaaactgatctatcaaattgtagtcttccttagaatattcaattgcactaaaataatgttgtgggcttttaaatactagcttctgggtttcacgctatgcttttcaaattggttgccttcttgtccacttaatgattatttatagcaaattctcccaaaaagacttagctctgtctttatgcaatccctagcataatattttgtatgtaccaaatgttcaaactaataccattactagaaactcttttaaaagaaaatgctttttaataacaggaatacagatcatcattttagtcttctatttagatattatc

SEQ ID NO: 33158 - DNA, 442 bp, Homo sapiens
  misc_feature (1)...(442): n = a,t,c or g
tttganacntgannnnnnnnnnnnnnnnnnnnnnnnnnnnnnnnnnnnnnnnnnnnnnnnnnnnnnnnnnnnnnnnggcacgagggcatccttagaaagcttcccagtgccgcgtgggaggagggggcccccatgaatccgtcagagccaagggctggacactgaaggggagatgtagatgaatgactcagatgtggttcttgccctctctgagctcgaggtttaattgggggaaagattggaaccctccatttgttgccccagcattctgcaatctcgggtaccctgtggaatcactgttctggctctcccaggccccctccgcctcctcctgccttagaaccccttcccactttgactggtaattttttgtgtgtttctttaagggtgagagtgggttacccggacagctgggtccccctggcaagcgaggaacagaggg

SEQ ID NO: 33159 - DNA, 438 bp, Homo sapiens
  misc_feature (1)...(438): n = a,t,c or g
anntttgantaccgtttgacnnnnnnnnnnnnnnnnnnnnnnnnnnnnnnnnnnnnnnnnnnnnnnnnnnnnnnnnnnggcacgagggttacttttacctagcgatgtgtgtgttggagagacaggagctgcatggtcaaaaaagtcatgtgcacagcatgtggactaaaacctaccagtcaagagagatggagaaggggatagtacaggcagggagaactggcagatgcattaggggtgcagatttatacaaaagactagactggtttggctagagtgaagctgcttgcctgggagaacaggatggaatggtagcatgggcccagatactgagaggctttactgctgcactgtgttggcttcaactcctgtgccctactggccctttgtgtgagtatgtgtatgccctctgggagctgccagctggggtttaaatcc

SEQ ID NO: 33160 - DNA, 445 bp, Homo sapiens
  misc_feature (1)...(445): n = a,t,c or g
tttgnanacntgnnnnnnnnnnnnnnnnnnnnnnnnnnnnnnnnnnnnnnnnnnnnnnnnnnnnnnnnnnnnnnnnnnggcacgagcacggagctagaaggcaagtgccccaaccatcttagaggagagcgccaagggtcagtcttgagaaatgcatcctaatgtatcatccaagtgaaggccctgcagtgagggtctagtttgaagttgcagagccctggagagcccaggaagatgagagggaagaccagggcataggtacaggagacaaaggccagcactcagggctggtgttcatttacatgagtggatccagttcagcttagaaggctcaggctgggatagataagaaaagattaggtgatgatattggcttggttagaataaatccattcacatattcatttatttgctcatgccttcaaccattcatggattccacaga

SEQ ID NO: 33161 - DNA, 442 bp, Homo sapiens
  misc_feature (1)...(442): n = a,t,c or g
ttgnanacttgannnnnnnnnnnnnnnnnnnnnnnnnnnnnnnnnnnnnnnnnnnnnnnnnnnnnnnnnnnnnnnnggcacgaggaaaacatatcagtttttatacatctatacatgttgtatgtatgcctgcactaatataaggaagcagtcttatagataattcagtaatcacttaagtttgatatattagtatatagacttggctactgtgacagaggcttataaaggtagaaatatatttatatttacttgaaaagtctgtgtaaactatcttgagattaaatggaggctgcaaaatcactgtgtcccagggctcctttgtcttgctctgctcttcttctatgcagtttctgtattgtgggcgaggatggttaccattgtgtctgctaataagaagaaaaagagaagggcattctctttacctttaagaggagtttgt

SEQ ID NO: 33162 - DNA, 455 bp, Homo sapiens
  misc_feature (1)...(455): n = a,t,c or g
gnntgnnntntnnnnttganacntgatgccnnnnnnnnnnnnnnnnnnnnnnnnnnnnnnnnnnnnnnnnnnnnnnnnnnnnnnnnnnggcacgagctgtgatattcaagtcttttgcacatttttcttttgggttatttgtcttttattgacttgtggtagttcttaaaaaaattttttttaaattaaaaacnnnnnnnnnnnnnnnnnnnnnnnnnnnnnnnnnnnnnnnnnnnnnnnnnnnnnnnnnnnnnnnnnnnnnnnnnnnnnnnnnnnnnnnnnnnnnnnnnnnnnnnnnnnnnnnnnnnnnnnnnnnnnnnnnnnnnnnnnnnnnnnnnnnnnnnnnnnnnnnnnnnnnnnnnnnnnnnnnnnnnnnnnnnnnnnnnnnnnnnnnnnnnnnnnnnnnnnnnnnnnnnnnnnnnnnnnnnnnnnnnnnnnnnnnnnnnnnnnnnnnn

SEQ ID NO: 33163 - DNA, 459 bp, Homo sapiens
  misc_feature (1)...(459): n = a,t,c or g
gnnngnnnnntgnnnttgnnnntctgagaccgtttgacnnnnnnnnnnnnnnnnnnnnnnnnnnnnnnnnnnnnnnnnnnnnnnnnnnnnnnnnnnggcacgagctnnnnnnnnnnnnnnnnnnnnnnnnnnnnnnnnnnnnnnnnnnnnnnnnnnnnnnnnnnnnnnnnnnnnnnnnnnnnnnnnnnnnnnnnnnnnnnnnnnnnnnnnnnnnnnnnnnnnnnnnnnnnnnnnnnnnnnnnnnnnnnnnnnnnnnnnnnnnnnnnnnnnnnnnnnnnnnnnnnnnnnnnnnnnnnnnntcccaaagtgccaatactattgatacttacnnnnnnnnnnnnnnnnnnnnnnnnnnnnnnnnnnnnnnnnnnnnnnnagttggcttctgtatccttttcccccaatctttttgttgtttggccacttccttactttctgacactacaagttactctatct

SEQ ID NO: 33164 - DNA, 420 bp, Homo sapiens
  misc_feature (1)...(420): n = a,t,c or g
ttgnanacttgaatgncnnnnnnnnnnnnnnnnnnnnnnnnnnnnnnnnnnnnnnnnnnnnnnnnnnnnnnnnnnggcacgaggtaggaagcagagagttgaatcttgtttcatgaatttatttagtgaaagtatgtttttgattgacataatttatatatataaaaaatcattactaaaagggaatgatttcctatgactttctattgaattttgtttcttttttgttttaggtcctgtagnnnnnnnnnnnnnnnnnnnnnnnnnnnnnnnnnnnnnnnnnnnnnnnnnnnnnnnnnnnnnnnnnnnnnnnnnnnnnnnnnnnnnnnnnnnnnnnnnnnnnnnnnnnnnnnnnnnnnnnnnnnnnnnnnnnnnnnnnnnnnnnnnnnnnataaaaatcctacagaaaaaaaaaaaaaa

SEQ ID NO: 33165 - DNA, 461 bp, Homo sapiens
  misc_feature (1)...(461): n = a,t,c or g
gnnngnnnnntgnnntttnnnnnatgannaccgtnnnnnnnnnnnnnnnnnnnnnnnnnnnnnnnnnnnnnnnnnnnnnnnnnnnnnnnnnnnnnnnnnggcacgagtgaaagcggtcagtaagacgacgggggaggagtgcggtttgattttcagtccctgggtagaactgaagcgctcttgggagcatctgtcacattctcccatttaggcctttgggagttttggaggcttgctgctgtaccgatcgttggaaaagcctttcctcaggaggtgccttgttgacttgatcacccgaggtagctcccaggcacttgcctgtagagctgagatggcctctgccatcctggggccctcatgggggccccctattccccaggcgtttcactctgctccactagctggatccctgccccggcatgcggtgcacctcaacgagccctgtcccctggccatctgtc

SEQ ID NO: 33166 - DNA, 464 bp, Homo sapiens
  misc_feature (1)...(464): n = a,t,c or g
gnnngnnnnnttgnnntttggttnatgataccgttnnnnnnnnnnnnnnnnnnnnnnnnnnnnnnnnnnnnnnnnnnnnnnnnnnnnnnnnnnnnnnnnnggcacgagggtatcatgagtgacgaggcagaggtcattggcatggatgagacaggtaaccccaggaaagtggaaagagaaagcagagaggccctggacagagtcccagagacctgccagtctggagctgggctgaggggaggcttcgaggaaggagacagaggttgctggagaggtgggcagagtgtctgaggcctcgagcagggggcacataggtccttgaagtgagggccaaggctttgcattggaatcattcccagagtgacttgggacattattcagaggcccccagggctgctgggaagggacagcaggcccacgctccaggggacccgggaacgaagggaagaccccaggctgtgata

SEQ ID NO: 33167 - DNA, 443 bp, Homo sapiens
  misc_feature (1)...(443): n = a,t,c or g
ttgananntgaatgcctnnnnnnnnnnnnnnnnnnnnnnnnnnnnnnnnnnnnnnnnnnnnnnnnnnnnnnnnnggcacgagcggcacgnnnnnnnnnnnnnnnnnnnnnnnnnnnnnnnnnnnnnnnnnnnnnnnnnnnnnnnnnnnnnnnnnnnnnnnnnnnnnnnnnnnnnnnnnnnnnnnnnnnnnnnnnnnnnnnnnnnnnnctatctgtttttatttagattagacatttatggcatggggcttacccttggagatacagagaaagatttcagggtagaaatgtgcttcatccggttagtccttccttagcagctttgattaggcaaactcttcatatactaacgggaaatgtggcctgaagagttaggttgtaattacattggtaatttaaaagaactaaactgtcaaagcatgataggtcctcctttcatggctc

SEQ ID NO: 33168 - DNA, 462 bp, Homo sapiens
  misc_feature (1)...(462): n = a,t,c or g
gnngnnnnntnnnntttgnnnntctganaccgtnnnnnnnnnnnnnnnnnnnnnnnnnnnnnnnnnnnnnnnnnnnnnnnnnnnnnnnnnnnnnnnnnggcacgaggccggcgctttggtcctcctcatttcattcttgactgccacctgagacacgatggttactagctccattttataggtggtgaaacggaggcttggggaaggtcagaccccaagggtgccatttagtcagtggcagagccagatccaaatgcaggtctcctgactccaagtgcagggctcattttatcatccggttgcagcacgctggcggccccttgagccccaacctggataccataggggaggagcagagaagccaggaacaccacagccctgggccaaggtgcggggctgaaagaacttcccagcgctcagcctgggactagtggaatgggctgggccctggggctggcagcg

SEQ ID NO: 33169 - DNA, 466 bp, Homo sapiens
  misc_feature (1)...(466): n = a,t,c or g
gnnngnnnnntgnnnttttggnnacnnaatactctttnnnnnnnnnnnnnnnnnnnnnnnnnnnnnnnnnnnnnnnnnnnnnnnnnnnnnnnnnnnnnnnggcacgagaaaatggccagcagactgattagagacaactggcacatagtggtcctcaaggcagctggctcagcaggcagattggattagaacaagccttcacacccccacaggggcttgccagaagcaagtgctggaggagtcacctacacagcttcagagagaatcttttttcccctcccagttccaaccctgagagtgtttctgaagctatagaaatgctagtagctctgagcatcttcttgggctggctgtctctttttgtcagttgttgcattatttgcttctcacccagagcagccacccatcctgagattttatctgcagttagagaattctccctccatttctgttttgagggcatact

SEQ ID NO: 33170 - DNA, 473 bp, Homo sapiens
  misc_feature (1)...(473): n = a,t,c or g
nntttantanccgtttgacatgattacgaatttaatacnnnnnnnnnnnnnnnnnnnnnnnnnnnnnnnnnnnnnnnnnggcacgagagcggagaggcctgcggcgaggatggagggcctggcagtgcggttgctgcgcggcagcaggctgctaagaagaaatttcctgacttgtttgtcttcttggaagattcctcctcatgtctcaaaatcttcccagtcagaagctctactcaatataacaaataatggaatacactttgctcccctgcaaacatttacagatgaggaaatgatgataaagagttcagttaaaaaatttgctcaggaacaaattgcacctttggtttcaaccatggatgaaaattcgaaaatggagaaatcagtaatacaaggattatttcaacaagggttgatgggtattgaagttgacccagaatatggaggcacaggagcttcatttttatccactg

SEQ ID NO: 33171 - DNA, 457 bp, Homo sapiens
  misc_feature (1)...(457): n = a,t,c or g
antanccgttnnnnnnnnnnnnnnnnnnnnnnnnnnnnnnnnnnnnnnnnnnnnnnnnnnnnnnnnnnnnnnnggcacgaggttgatggaggaataatgtttccactagtaaagatcattttggcttacccaaaagaaccaaaaaggagcggccttgactgatttgattttcaggccccatgttccgtggctacccactctcatgcctttagggaatgttaacttacataagtgagagtgtgcgtgtatatgtttaattccatattataatgagtgtgttttttttttttnnnnnngaaacaaaagggaaaaaaaaannttttnnanngantngnntangncccttngtttnggggtnnccnattttcnngcttttggggggtttngcccccnnggnngaagnnnaggggcnnantnggggttaatngnacccanaacntccnnggntaaaggggcc

SEQ ID NO: 33172 - DNA, 461 bp, Homo sapiens
  misc_feature (1)...(461): n = a,t,c or g
ntaccaatttaatacgactcnnnnnnnnnnnnnnnnnnnnnnnnnnnnnnnnnnggcacgagctaagggataggtaggttgccctcatgaagattaccttctgaggtgaattttctccaaacatatattaaaatgaactatgttgtactagctcaagaatagacaaacagattaaattactagaaactaagtagagtccaaaaagataccctgtgtatgtgtatgtatacatagtgcatgaaaatgtgacgtttcagattgtttctgttatgtctattcataactagttaccttatgaatttatgactactgtgtgcattttttaatccatcaataactttaacattaaaaattagattcttatatgacaccattcacaaaaataccttactttagaagatatgtaaggaaaacaaaaccaaaaaaacatgaagatttggagaatgttttttacctcttgg

SEQ ID NO: 33173 - DNA, 473 bp, Homo sapiens
  misc_feature (1)...(473): n = a,t,c or g
tnnnntttaagaccgttnnnnnnnnnnnnnnnnnnnnnnnnnnnnnnnnnnnnnnnnnnnnnnnnnnnnnnnnnnnnnnnggcacgaggcgcaacagccgcctggtgtactgacagtggctctgacgactccagacgctggtccgaccagctcagtctagatgagaaagacggcttcatatttgtgaactattcagagggccagaccagagcccatctgcagggcccccttagccacccccaccccaatcccattgaggtgcggaattacagcagattgaaacctgggtaccgatgggaacggcagctggtgttcaggagtaagctgactatgcacacagcctttgatcgaaaggacaatgcacacccagctgaggtcactgccttgggcatctccaaggatcacagtaggatcctcgttggtgacagtcgaggccgagttttcagctggtctgtgagtgaccagccangccg

SEQ ID NO: 33174 - DNA, 461 bp, Homo sapiens
  misc_feature (1)...(461): n = a,t,c or g
angatncnnnnnnnnnnnnnnnnnnnnnnnnnnnnnnnnnnnnnnnnnnnnnnnnnnnnggcacgagcggcacgagccctgatgtggtaactttctcccagttttgctataatcagaccttggctcatcttgtcaactccatttttatttctctgtgtaactttgcttgtgtgtatgttcatgcacatatgtttaaagtttaaaagaatatatcacatattgcctagcataatggtggcacttagtaggtgctcaacagactctaattgaatgaatgctctacatgcagttatgtggatactatagtattctatccacaagttcacagactaacaggagagagggatatttatctttccaagctggggtgtgagatatgatttcaaatatcaactctgctaccatggagcagagattagagcaagtcataattttggtctgagcttttcttctgttacttg

SEQ ID NO: 33175 - DNA, 459 bp, Homo sapiens
  misc_feature (1)...(459): n = a,t,c or g
accgntnnnnnnnnnnnnnnnnnnnnnnnnnnnnnnnnnnnnnnnnnnnnnnnnnnnnnnnnnnnnnnnggcacgagggctgttattaatgtaactgtcaggcccaaacacatttctgcattaaatccatttagtatgtgcattattcgggctcgaatgtcaccgggacatcaaagccccgtaggcatggagagctcagtgccctgctgtggctgccgaacaggcccttgatcaataaatgtaacatgttaatgcagagcaaatagaataaaagatttctttgacaagacatgaaaaatcaccttgtggcagctggcatgtgatgccgtttctggggagacactagcaaagttgatctgacaagtaaagaggagagatgatggttgtaaggtgcttttgtttcaaacttctttcttgacctgtcaggttttgaaggcgcctcaatggctcttttttgtc

SEQ ID NO: 33176 - DNA, 467 bp, Homo sapiens
  misc_feature (1)...(467): n = a,t,c or g
tnanganccgntnnnnnnnnnnnnnnnnnnnnnnnnnnnnnnnnnnnnnnnnnnnnnnnnnnnnnnnnnnnnnnnggcacgaggggtggttggttaccgccttttgcactagcagtagcaaggaaggggggtgggcgctctttctttttctcttagaagagggtttagcacaggttttttcgttctcacttccacaccaccttaccgcctcccgaccccccctctccccctccccacctatcgtcatgacggcctctccggattacttggtggtgctttttgggatcactgctggggccaccggggccaagctaggctcggatgagaaggagttgatcctgctgttctggaaagtcgtggatctggccaacaagaaggtgggacagttgcacgaagtgctagttagaccggatcagttggaactgacggaggactgcaaagaagaaactaaaatagacgtcgaaagc

SEQ ID NO: 33177 - DNA, 467 bp, Homo sapiens
  misc_feature (1)...(467): n = a,t,c or g
tnangaccgntnnnnnnnnnnnnnnnnnnnnnnnnnnnnnnnnnnnnnnnnnnnnnnnnnnnnnnnnnnnnnnnggcacgagatttagataatttattctttgtccaatttacttttattaggcaagtcttgcagaaatccacagcaatatgtgggtaagaaatggtctgcaaatcaaaggacaagccatgacgtatgtccagtctcatttctgtaattccatgattgatcctgacatttacctgttacaggtaagccagctagataatgcagatatactttagaagtgtctcatttgtacccaagggattttaatttatagaggtgactgtgtgatgacatggagaggccaatgccattgaaagaataattttttacttacatttcccaggagaagaggcataccacccaacacaaggctacaaggaaagcaccagattttggtcaagaggcagaaaggagtgagg

SEQ ID NO: 33178 - DNA, 462 bp, Homo sapiens
  misc_feature (1)...(462): n = a,t,c or g
nnnnnnnnnnnnnnnnnnnnnnnnnnnnnnnnnnnnnnnnnnnnnnnnnnnnnnnnnnggcacgagtcaagcagggcctctgacaagtgagttttgctgacgagaaggggttaaccctagaagaatcagtgatcagtcagttccagcaagaacagcccagtctgggcacgaaagggttcaccttctaagggggcacccggagtgctgtggccacagcccagagcggggagagggagtgggtgggggggctccaccaaagtctgtgtccttccagaacattaggagggcggggaagggttttgggcctcagctacctgagtatccctctcccattgtaaatagggagggctatgcctaccccgggtcccaaggagaaggggtgccaagatgtgctgattagttcagtcctgtgccttaaaagttagcctgtcttctctaggcaggcaatccttctctgcagca

SEQ ID NO: 33179 - DNA, 465 bp, Homo sapiens
  misc_feature (1)...(465): n = a,t,c or g
nnanaaccgntnnnnnnnnnnnnnnnnnnnnnnnnnnnnnnnnnnnnnnnnnnnnnnnnnnnnnnnnnnnnnnnggcacgagnnnnnnnnnnnnnnnnnnnnnnnnnnnnnnnnnnnnnnnnnnnnnnnnnnnnnnnnnnnnnnnnnnnnnnnnnnnnnnnnnnnnnnnnnnnnnnnnnnnnnnnnnnnnnnnnnnnncaggaaggatttattaattggattatatacagtttgtttaagcataaatatttttattgtaaactgaaacaatatgcagtatgcagtagaattacgtttgagttctagctcaatcactgactaatatattacctttaacaagttcttgggttccctgccttggttttctcatttgtaaaatgaaaataattatgctgatttcctagataggttaggagaattaaatgagatactgaatgaatgtaaaagtattcaataagtgtaatt

SEQ ID NO: 33180 - DNA, 466 bp, Homo sapiens
  misc_feature (1)...(466): n = a,t,c or g
gnnnnnnnnnnnnnnnnnnnnnnnnnnnnnnnnnnnnnnnnnnnnnnnnnnnnnnnnnnnnnnnnnnnnnnnggcacgagggcgtgagccactgtgcagggctgaggcttgcatcttcatatctgttggactctgtagtccttcatgctcttgctccttggctccctctttcttgaatctccactcttcccatcttgataaaccattacctctgagtctagtggtttcttaactcacttgtacattagaatcatcagggaagctttaaaaaaagaaactgatgctgactgggtgataatgatgtatcagtgtaggtttatcgattgtagcaaacattattgtggcatgggatgtcaatatgagtaagggaggttgtgcatatatggggacaggggcnnnnnnnnnnnnnnnnnnnnnnnnnnnnnnnnnnnnnnnnnnnnnnnnnntactctaaaaaagaaggtgg

SEQ ID NO: 33181 - DNA, 474 bp, Homo sapiens
  misc_feature (1)...(474): n = a,t,c or g
ttnntaccnttnnnanntttgaaatccnttgacnnnnnnnnnnnnnnnnnnnnnnnnnnnnnnnnnnnnnnnnnnnnnnnnnnnnnnnnnnggcacgagaagtgttcacacagtcaacaaaaagtcaaaaaagatcagtaatccaaagaaaaaatgagtaaagaacatgaactgttgtttcaaacagactaactaaataacttactaacacccgcaaagacttattgcaacatggaaacctatgaacataggaaatgaatgatgccaggtcttattcataatagaggaatacaaattaaattgcaagtacagtatgtagtcatttttcacatattagataaaaaacatttgctcatacattgcattctgagtacagagtagcaagaagtctcctatattgttgaatgggcagtattagaaataatttaaaatgtatataccctttgacttactggtttccttctaccactttat

SEQ ID NO: 33182 - DNA, 480 bp, Homo sapiens
  misc_feature (1)...(480): n = a,t,c or g
ggntnnntnnnnnnttgaanccnttgacnnnnnnnnnnnnnnnnnnnnnnnnnnnnnnnnnnnnnnnnnnnnnnnnnnnnnnnnnnggcacgagggaagatgttagaaaaagcctgagtaggttgatgtcaagatagctgttcctatttggccatcttggctccacccccttcatgaacattttttaaaaaagttattatttagtaactgtgttatatatgaacaagtaatcaccaccagtttgtaaaagacaaccacagttatttttgtactggccagtaggcacctcttgttaacaccagcacatggcagtcctgtggtctgattcatcccaaacccttcgtagcatgtcatcagtgatagctggagtgatagccatgatgaatgccatcagttcctcaagtctacatggcggtcccaactctagttttgtattgttttgtttatatagcctcactagaaatataatggcctgataga

SEQ ID NO: 33183 - DNA, 469 bp, Homo sapiens
  misc_feature (1)...(469): n = a,t,c or g
aaanccnttnnnnnntttgaaanccnnnnnnnnnnnnnnnnnnnnnnnnnnnnnnnnnnnnnnnnnnnnnnnnnnnnnnnnnnnnnnnnnnggcacgagtggatgtcctgagttctcagtggcccaggagggctgacgataggcctttctgtgaggcggggcagctggcaggagtctggtggacagcctcctccaagtctggtcatgctaagggtgttttgagtttaaaccactagcaccactttgaaactctggtcccaaggatagagtgtgatgtcagtagcagcatctgacccatctgaccttatctgctgctagctccagttattcaggtagcctgtgtgaggcctagaggccgatttctccttgtccagcctttattcttcttaagggaaagactggtgtagagaacagccaagttttatgctggatcagaggaattagctataagcaggtacatggaaactag

SEQ ID NO: 33184 - DNA, 477 bp, Homo sapiens
  misc_feature (1)...(477): n = a,t,c or g
ggntnnntnnnnnattggaancccttgacnnnnnnnnnnnnnnnnnnnnnnnnnnnnnnnnnnnnnnnnnnnnnnnnnnnnnnnnnnggcacgagtccagctccaaagattctaatttgtttcgtgatcctgcagaacctcctatagccttacaaagaaaatgaaaggagccatcacatcttatggttcaatccacccttgatttctgtggtcataaattatagaaactgccattatatgttgcaactgagactttacatttgttttactagaggtcatttgttccaaaggagcttgcatttggctgcaaataacaaataatctcattaagaaagacttgttttttcagttttattttttgttttgtttgtttgtttttgtgtcacataacaaaaagtccacaggggcatggctgcccatattggttctgcaattcagtgatctctacaattttcttggcttttccatgtgtatttt

SEQ ID NO: 33185 - DNA, 465 bp, Homo sapiens
  misc_feature (1)...(465): n = a,t,c or g
tggaaaccnttnnnnnnnnnnnnnnnnnnnnnnnnnnnnnnnnnnnnnnnnnnnnnnnnnnnnnnnnnnnnnnnggcacgagaaattatacatgtgtactactgttaatctgtatactaaagatgaggaaagcctacttagaataacaagtgaatacataaaatttaatattgtattcgtgctccattttggaagcctggactagggtacggccttaccatgggcaataacaacacctgtgattgtggggaagagccttctaggccaaaaacaagaagagcccctcccctccccttttcacatgagagcctgcctagaggccaggagcagaggaggctaggcctggctgccttgggttgaatgtgggccagcatttctggcacttcttgtactatatcagtttcttccagtttctgttcctgttatttatgttcagcaaccatgatggcatctacataaatgccc

SEQ ID NO: 33186 - DNA, 473 bp, Homo sapiens
  misc_feature (1)...(473): n = a,t,c or g
tttgaaaaccctttgaatgatttgaaanccnnnnnnnnnnnnnnnnnnnnnnnnnnnnnnnnnnnnnnnnnnnnnnnnnnnnnnnnnnnnnnnnnnggcacgagcagaccaaattatacctaaaagttccaacaaagtccctttttcaatatcacattaccaaaaagatggctgcaaatgtaatttggacctttcattaattttgttttcaaaactagaataatctcaccacagaatcagaattttctaccgttccacacccaaccccttcaaatacacacaaccttgttacttttcactccagcaccttcatacgcttttctccaggaggaggttcttgcagctggaaacagcctattttgtggtcactgtcaagtggatggatattctagcgctcccaaaaaagcactatggccttatatgcagggaaggcacataccaccaagttcaatgagaaatattagagctaaccg

SEQ ID NO: 33187 - DNA, 374 bp, Homo sapiens
  misc_feature (1)...(374): n = a,t,c or g
tttgaatnccctttgacangtncntnaanccctnnnnnnnnnnnnnnnnnnnnnnnnnnnnnnnnnnnnnnnnnnnnnnnnnnnnnnnnnnnnnnnnnggcacgagggaatttactagcgagggaaggttgctgctttttcatgcttcccctacttctgagggataggctggctataaggggaagaggggatgacctggactaagagcacgcctattgtaatgcactgtggcatcaatgctccctctattcttctggctggcagaatttcctataccctgagggagtttttttttttnnnnnnnnggtgtgtggcttcctgananttcntgtgcaaatttttgtgtacntnganggctnntttttttttttttt

SEQ ID NO: 33188 - DNA, 468 bp, Homo sapiens
  misc_feature (1)...(468): n = a,t,c or g
ttggaatccctttgacaantttngnaaacccnttgacnnnnnnnnnnnnnnnnnnnnnnnnnnnnnnnnnnnnnnnnnnnnnnnnnnnnnnnnnnggcacgagtaattatatacttatatgtttgcactgccagattgtagtggagtaaagatgtttcttcttttatgtctaatattcttttacagtactctcagtttacatgtttaaatcactaaactgactctgacttaaaaggctcaaaaaaagtaatctcaaaaatacaacatattatataaccttttatgagtatttgtgtagctacttgaatttgtatttttaagtcattctcgtttaacttgtcagggctttttcctttaagccagcagagtgaaatcttaacctgcatttaagtcaataaaacttgncagcttataaccaattttattattttagatcttctggactctctccaagtttagtaattctca

SEQ ID NO: 33189 - DNA, 463 bp, Homo sapiens
  misc_feature (1)...(463): n = a,t,c or g
tttgaaaccctttgacatgatttgnaatccnnnnnnnnnnnnnnnnnnnnnnnnnnnnnnnnnnnnnnnnnnnnnggcacgagcccagatnnnnnnnnnnnnnnnnnnnnnnnnnnnnnnnnnnnnnnnnnnnnnnnnnnnnnnnnnnnnnnnnnnnnnnnnnnnnnnnnnnnnnnnnnnnnnnnnnnnnnnnnnnnnnnnnnnnnnnnnnnnnnnnnnnnnnnnnnnnnnnnnnnnnnnnnnnnnnnnnnnnnnnatnnnnnnnnnnnnnnnnnnnnnnnnnnnnnnnnnnnnnnnnnnnnnnnnnnnnnnnnnnnnnnnnnnnnnnnnnanaagagggcttggtcctgctgctcaggtgtggtagaggcagaanaggtggangaggtgnaaagggaggtggaggcaggacaggcaggcntatgancaggcccaggcatccaagtcgcctgcatggttcaaa

SEQ ID NO: 33190 - DNA, 450 bp, Homo sapiens
  misc_feature (1)...(450): n = a,t,c or g
tgganancnnnnnnnnnnnnnnnnnnnnnnnnnnnnnnnnnnnnnnnnnnnnnnnnnnnnnnnnnnnnnnnnnnnggcacgaggctcggcgtgggagatgagcccaaagccacagaaccccaggcaccacgtaaatactactgatcattctggtttgctgcttatacattaggcaactcctgtgtcagagtttttactttaaatccttagtgagaagcctccttgggagaggaatacaccagcccaagggttttggacaggaaagaggaggagaaatgaatatccaaggactacaagtcagtctacatttgtttccatcaacacttcttgctaccaaggcttttgcactgccctgataatactctgcagtatcagcatgcacaccctgagcttttgtctccaattttggcagtgaagctgcaggcaatatctgttacaaggtaattctgg

SEQ ID NO: 33191 - DNA, 479 bp, Homo sapiens
  misc_feature (1)...(479): n = a,t,c or g
gnnnnnngtttggatncccntttnnnnaatccngnaaacccttnnnnnnnnnnnnnnnnnnnnnnnnnnnnnnnnnnnnnnnnnnnnnnnnnnnnnnnnnnnnnnnggcacgagtgttgattgtaagagagagctaatgtccaagactggaacaagacaaaacttgatgatgaataaaattgttgtttctttgatcatctaagtgaagttttatgtgctttatgtagatatgtctatacagatgtacacacaatgtctgcgtagcattagaaataatgtatatatattccttttttttcccnnnnnnnnnnnnnnnnnnnnnnnnnnnnnnnnnnnnnnnnnnnnnnnnnnnnnnnnnnnnnnnnnnnnnnnnnnnnnnnnnnnnnnnnnnnnnnnnnnnnnnnnnnnnnnnnnnnnnnnnnnnnnnnnnnnnnnnnnnnnnnnnnnnnnnnnnnnnnnnnnnnnnnnnnnnnnnnnnn

SEQ ID NO: 33192 - DNA, 451 bp, Homo sapiens
  misc_feature (1)...(451): n = a,t,c or g
ntttgannnnnnnnnnnnnnnnnnnnnnnnnnnnnnnnnnnnnnnnnnnnnnnnnnnnnnnnnnnnnnnnnnnnnnnnggcacgagttgcattacatgaatataccatctttgaaaaatatatttttctacaaatacattccctagagataaacagcctgttacaaattttcaatgttacagccagccctgcagcaaatatcctcacacatatctcctattttatacataaaagtttctttnnnnnnnnnnnnnnnnnnnnnnnnnnnnnnnnnnnnnnnnnnnnnnnnnnnnnnnnnnnnnnnnnnnnnnnnnnnnnnnnnnnnnnnnnnnnnnnnnnnnnnnnnnnnnnnnnnnnnnnnnnnnnnnnnnnnnnnnnnnnnnnnnnggngccgggcatnnnnnnnnnnnnnnnnnnnnnnnnnnnnnnnnnnnnnnnnnnnnnnnnnnnn

SEQ ID NO: 33193 - DNA, 460 bp, Homo sapiens
  misc_feature (1)...(460): n = a,t,c or g
ttgaatcctttgacnnnnnnnnnnnnnnnnnnnnnnnnnnnnnnnnnnnnnnnnnnnnnnnnnnnnnnnnnnggcacgagtcagggtgtttcacccacgcaacactggccaggggctagatggttccaggtgggagtgggtgaactttgtacattctggtcattagccagtcaatgtttatctgagccaatccaaccagcacgagcctgtgattcctcagacacaattgctcgggatgatgctaaggtgggtatttgtggttataacggaggatcccgtgaaaagaaaaatgtaaagcaaataatacagtataggcagtacaaagaaacaacagaaatgatgccctgagttgggggcagaggggtctcttccactctcagaggctgtcgccgaactgatctttctcacatagtcaaccattaaaagtccccaacccacaggtcctagtttcttctaagta

SEQ ID NO: 33194 - DNA, 449 bp, Homo sapiens
  misc_feature (1)...(449): n = a,t,c or g
ntttgaaaancnnnnnnnnnnnnnnnnnnnnnnnnnnnnnnnnnnnnnnnnnnnnnnnnnnnnnnnnnnnnnnnnnnnggcacgagacccctacagagctagggactcgaatcagagttcctcctccggggccttctcaggcctggggagcaggactcagcccttgcttctgccgtgcctggtagcctggcccagacgctgccttttccatggtctcactgtggccatgtccttcccagcacatgctgctccccatcctgcctgctgtcactgcctctcctatctgtctcttgtcctgtttctgtgccctctcttctccctctgggctgccctctgcagcttctaccctcctgccctaactcctgctacccctcacctgctgtgcctacctactgtcctgcagggaaggaagaaaagagaagaagtccctcttgtcaggcttgctccgg

SEQ ID NO: 33195 - DNA, 458 bp, Homo sapiens
  misc_feature (1)...(458): n = a,t,c or g
ttnnaacccttnnnnnnnnnnnnnnnnnnnnnnnnnnnnnnnnnnnnnnnnnnnnnnnnnnnnnnnnnnnnnnnggcacgagctaactggttggttgtatttaggaagggtgctgatttggtatatattaattttctaatcattaatgaattctgtaattattttccaggagttttttatgttgtttctcttaggttttccagaaatagaattgtgttatccaaaaaaacagtgatgctttgcctttatagattagccttgaagtttttaaaatctcatttctttcttttgttagttccagttaatttctccagtagacattcctgtgttgttccttacttttatttgaattgggtacttttgagaatcatttttcaaatgccctaaagcagttaattnatcatatattacttttaaatatctcagtttgcatgttcactttagaagttacagtgtaa

SEQ ID NO: 33196 - DNA, 452 bp, Homo sapiens
  misc_feature (1)...(452): n = a,t,c or g
atttggaaanccnnnnnnnnnnnnnnnnnnnnnnnnnnnnnnnnnnnnnnnnnnnnnnnnnnnnnnnnnnnnnnnnnnnnnnnnnnnnnnnnnnnnnnnnnnnnnnnnnnnnnnnnnnnnnnnnnnnnnnnnnnnnnnnnnnnnnnnnnnnnnnnnnnnnnnnnnnnnnnnnnnnnnnnnnnnnnnnnnnnnnnnnnnnnnnnnnnnnnnnnnnnnnnnnnnnnnnnntcactctggctgccctgtggtaaaagaacatcagagcagcatgagtggaaatggaggggcaaaatcaaaggctactgtagtagtttaaacaagaaataatggtggttcggacttcacagggagcaattgagataacaagaaatgatcacattcttgatatattttgaagataaaactggnnnnnnnnnnnnnnnnnnnnnnnnnnnnnnnnnnnnnnnnnnnnn

SEQ ID NO: 33197 - DNA, 462 bp, Homo sapiens
  misc_feature (1)...(462): n = a,t,c or g
antcccttnnnnnnntttgaaaacccttgacnnnnnnnnnnnnnnnnnnnnnnnnnnnnnnnnnnnnnnnnnnnnnnnnnnnnnnnnnnggcacgagattgaatgaatttctggctctgctcctcagtgtgtaagtctgtgaaccgggaaggctctcttttaacacccccggggcagtgcaagggtcatgtgggattgtctgtgtgctgtacctgccttggcacctgacaggtggctgaagtgtgattttctagaacttttccaggctggtcagaaggaattctgggtatgttctgaagttacgtattttggacctgtgtcccagccaggttccaggtgaagttcacgggagactcacagagtagtgaaagaccattggcctggatgtctagacatctgctttctgggtcctgcatagctgggggaccccagacaaacttggaaatgaaccatctccagttg

SEQ ID NO: 33198 - DNA, 476 bp, Homo sapiens
  misc_feature (1)...(476): n = a,t,c or g
ggntnnntnnnnnattggaaaccnnnnnnnnnnnnnnnnnnnnnnnnnnnnnnnnnnnnnnnnnnnnnnnnnnnnnnnnnnnnnnnnnnggcacgagaaaggagttacatttcaggttactgatggaatgtgaagaacaactgaactgattatctgtacgttggaacccaaagattgggtttatctaccataataggattatcattcctttgagaaactggagatatatagagctgataatactgttagtcattccttcagaatttgctttcttgacaattggaacaggttcttctgctttccaagtttcctccctggctccagtgggctggcaactggtgaggaagatgtgggtggggccagtggtacttcaaactagtttttttaggagacagttgcaggcccacagaattttagtgggccttcacctcataaacatcaagaaaaagggaaacaaagataaatgtgaaattcaa

SEQ ID NO: 33199 - DNA, 473 bp, Homo sapiens
  misc_feature (1)...(473): n = a,t,c or g
tttgaanttcngataccctnnnnnnnnnnnnnnnnnnnnnnnnnnnnnnnnnnnnnnnnnnnnnnnnnnnnnnnnnnnnnnnnnggcacgaggaggaactcaaaggcattgggatattctcagagaacaattggtataatcgcagagatgaaattatataagaagaagaatggttgaaggaattagtaatactaaccccagagaaaagcaaatcaaggatgacatgatggtgtctttaaagattcaagtcacatggaggagggattgggtttatactgtctagcttcctggggatagaatacagatcagtgacaagaagttatgaggaacctgattatggctgataagaccaactagctaacagctgtagctgtctatatggaatattctcccttggaagatagtaactgatctatccttagagatatgcagcaatctctattgcattntaatagaagttgttgtagaggaca

SEQ ID NO: 33200 - DNA, 488 bp, Homo sapiens
  misc_feature (1)...(488): n = a,t,c or g
gnngtnnnntnnnntnttggantttgaatacctttgacnnnnnnnnnnnnnnnnnnnnnnnnnnnnnnnnnnnnnnnnnnnnnnnnnnnnnnnnnnggcacgagatcagacttgtaaaaatttaaaaagacaaaacattctattaggaaaacaggctgcttcatacttatcagaaggaacacaaattggtacatgccagctgaagggaaatttggtaatatgtaacaaaccgcataggcataaacctttcaacccagcaatcccactattataaatgcaccctgacgttcccaatgataagaaaatatatatgcacaaagatattcattgcagcatcatttataattgcaaaatcctaggaacaacgtaaatgctcatgcacaagagagcagttatatcaactacagtatatcaacataaggaagtaaaagagaatgagaaagtcctctatgaactgataggagcaatttcccacaatatactgtcat

SEQ ID NO: 33201 - DNA, 469 bp, Homo sapiens
  misc_feature (1)...(469): n = a,t,c or g
tttgaaatcgattgnnnnnnnnnnnnnnnnnnnnnnnnnnnnnnnnnnnnnnnnnnnnnnnnnnnnnnnnnnnnnggcacgagagtccctgtgaggaggctctgcccgcctgcccttcccagggttccaggctccacattgggaggtgtacacagtgctcttcgctcttcattgccttgtgtatgatcccttttcccatctttgcataaatgctgtccctctcaccatctttaaaagagttctgggtaattatttaccaaaggtggtataattctgtcacagtccctgctagtgagacatctgatacaactgatggaatcagttcaacaaaatgcagtaaaattttatttaatgtactacggagaaagaaaaaatgctaccagttataagatgcatcctgatttcagatattaaaatggaaaaaatgtcttaagatctgtgaaaaatgtancttcctttcccacctctc

SEQ ID NO: 33202 - DNA, 464 bp, Homo sapiens
  misc_feature (1)...(464): n = a,t,c or g
tngaaaaccgctatgacnnnnnnnnnnnnnnnnnnnnnnnnnnnnnnnnnnnnnnnnnnnnnnnnnnnnnnnnnnggcacgagtgtcaccagaattgtttcaggatgctggctaggaggaggtaactgtgtttacgatcccacctatcccataacagaagcttggcagctgggtgcctgcctccgtgggtggggcaggttgcttgcttctagagacgggaactggtggggggaccagaatagcggccactaccctgtggtgtcctggctgactgtcggcggtggtcgcaaggatcccgtgggagaattcatttgtaccctctctgaacagtgcctactttaagtcttttccattctggccattaaagaaaatggacatttgcaatgtcagaaacttccaaggttgttcacttggggtacgggtaacacggtcatgttgagaaaaggaaaatctgaactccaaaa

SEQ ID NO: 33203 - DNA, 466 bp, Homo sapiens
  misc_feature (1)...(466): n = a,t,c or g
aattcgataaccgctatgactgattacgaatttaatacgactcnnnnnnnnnnnnnnnnnnnnnnnnnnnnnnnnnnggcacgagggtgctcagtagtagatagagacaagttgctagcaggctggtaaagaagcattgtaaatatgctggtttttaactgtgttggtaaatactgagtggaagacagttccgaagatacagataccaaatagatgtttctgagcttagtggtcttttttatctggtgtcattttgttgatatggtataacaaatattgtggaattaaaattcaatggagaagctttgggcaaattaccttatttaaacatgttttataagttaagttctatatatacagagatgtttgtcactttctcagtcaggtactgtaaaacaagtactaggctataaataacatcattacagaaaaacacactgtattctgggttgtacaaattaagtga

SEQ ID NO: 33204 - DNA, 466 bp, Homo sapiens
  misc_feature (1)...(466): n = a,t,c or g
tttgaaatcgtttgncnnnnnnnnnnnnnnnnnnnnnnnnnnnnnnnnnnnnnnnnnnnnnnnnnnnnnnnnnnggcacgaggaaggaaaggagtatacactggagccaaaggctggtgctacataggcctgtagggtgtgcatattcagaagctttgcaattggttggcctggatctgtcaaaacatgtttggatgactctggctgtgtactgatttatttatgtgcttctgagtagtgatcctgggaatgaatgcattatgactattnnnnnnnnnnnnnnnnnnnnnnnnnnnnnnnnnnnnnnnnnnnnnnnnnnnnnnnnnnnnnnnnnnnnnnnnnnnnnnnnnnnnnnnnnnnnnnnnnnnnnnnnnnnnnnnnnnnnnnnnnnnnnnnnnnnnnnnnnnnnnnnnnnnnnnnnnnnnnnnnnnnnnnnnnnnnnnnnnnnnnnnnnnnnnnnnnnnca

SEQ ID NO: 33205 - DNA, 469 bp, Homo sapiens
  misc_feature (1)...(469): n = a,t,c or g
tgaantttcgataccnnnnnnnnnnnnnnnnnnnnnnnnnnnnnnnnnnnnnnnnnnnnnnnnnnnnnnnnnnnnnnnnnnnggcacgaggctgtttatatgaaacatgtaacaattcatgtcattaagtatatctttttctggtcttagattaagtttaaaaagtttcactttgggccccccacgtnnnnnnnnnnnnnnnnnnnnnnnnnnnnnnnnnnnnaggccgagggattnnnnnnnnnnnnnnnnnnnnnnnnnnnnnnnnnnnnnnnnnnnnnnnnnnnnnnnnnnnnnnnttagctgggcgtgggcatccnnnnnnnnnnnnnnnnnnnnnnnnnnnnnnnnnnnnnnnnnnnnnnnnnnnnnnnnnnnnnnnnnnnnnnnnnnnnnnnnnnnnnnnnnnnnnnnnnnnnnnnnnnnnnnnnnnnnnnnnnnnnnnnnnnnnnnnnngtttccactttgt

SEQ ID NO: 33206 - DNA, 467 bp, Homo sapiens
  misc_feature (1)...(467): n = a,t,c or g
tttgaaatcntttgncnnnnnnnnnnnnnnnnnnnnnnnnnnnnnnnnnnnnnnnnnnnnnnnnnnnnnnnnnnggcacgaggttaattttacatatatactatattcaagaacactttctggaaagatgctggcctgagggtgccatccaggagaaagtgtaccctgcagctgtagtgcagagaggaccactatcattggctgacctgacagacagctcctctgagtaccagtgcctacaggagtgggaagactgagaagcgaggtggcagctggatgaataagtgtagaattcgctgccattcactgtggattgtccaagccaacagaaagaaactgtcctgcccatttgctgtactcagcttgggaaaggccctatattaggaattaccatggagaactagcctagttgaggctaacttgaagcctgtgagactgacaacccaaaagcacactcctcaagggaa

SEQ ID NO: 33207 - DNA, 466 bp, Homo sapiens
  misc_feature (1)...(466): n = a,t,c or g
ttggaatcgannnnnnnnnnnnnnnnnnnnnnnnnnnnnnnnnnnnnnnnnnnnnnnnnnnnnnnnnnnnnnnnnggcacgagatatttaatggaatatgaatgtttttataggcacttttgcctttaccttaggtgtcaccattgtctattttcctccacccgactgtcttcagatgtttacgttgcctgcctggcccctgctggcacttgaggttgttaaccctgcccagttgttaattagaccctgatttcttagtggacacctggccactgcctcttccctagcctggcagctgtggcttctgaccccctcccctccaacccctcaccctccagatgcaggccctgacttcctgtgagtgcaccatctgtcctgactgcttccgccagcacttcaccatcgccttgaaggagaagcacatcacagacatggtgtgccctgccttgtggccgcccgacctcag

SEQ ID NO: 33208 - DNA, 460 bp, Homo sapiens
  misc_feature (1)...(460): n = a,t,c or g
atcnnnnnnnnnnnnnnnnnnnnnnnnnnnnnnnnnnnnnnnnnnnnnnnnnnnnnnnnnnnnnnnnnnnggcacgaggtaaagtgctggatgacatggatgacgacgatgacctcagcacggatgggggaagcctctatgaggcgcctgtgagctacacattctccaaggacagcaccgtcgccagccagatctgagtgctctcccgggctgtggaagtacctgtcattcctgcaggagctgcagccacccaaagtgggaggcagggaggggagcatctgtctgccactgagaccaatcacagcctctttgcacagcatgccagctcctcagtgttacattcctcgccagggtctctcagtgggtcttcgacagagagcttttgcagtttaaaatgttgggatgcctgaggaccaggagccaccacccactggggtgttgtgagagatcactttggtag

SEQ ID NO: 33209 - DNA, 462 bp, Homo sapiens
  misc_feature (1)...(462): n = a,t,c or g
aatcgttnnnnnnnnnnnnnnnnnnnnnnnnnnnnnnnnnnnnnnnnnnnnnnnnnnnnnnnnnnnnnnnggcacgagcaataccctgaagatattatgctaagtgagaatagcccatcacannnnnnnnnnnnnnnnnnnnnnnnnnnnnnnnnnnnnnnnnnnnnnnnnnnnnnnnnnnnnnnnnnnnnnnnnnnnnnnnnnnnnnnnnnnnnnnnnncggggagcaaatgggcacctattttgtttagtgggcatagatttagttttacnnnnnnnnnnnnnnnnnnnnnnnnnnnnnnnnnnnnnnnnnnnnnnnnnnnnnnnnnnnnnnnnnnnnnnnnnnnnnnnnnnnnnnnnnnnnnnnnnnnannnnnnnnnnnnnnnnnnnnnnnnnnnnnnnnnnnnnnnnnnnnnnnnnnnnnnnnnnnnnnnnnnnnntngggagtttaaggctgcagt

SEQ ID NO: 33210 - DNA, 461 bp, Homo sapiens
  misc_feature (1)...(461): n = a,t,c or g
aatcnctnnnnnnnnnnnnnnnnnnnnnnnnnnnnnnnnnnnnnnnnnnnnnnnnnnnnnnnnnnnnnnnggcacgagaagaggagccttgctttgttgtctgagcttttatttctgccctaaatcaactgtgcacagaatagattatacctattcctgatgaatatgaagtcaccgcagtgagaggctgaacctgcaatgctcagaataagaatctgctgcatactcttcttatgaatctttctttctcaagaaaaccaaccttccttcattagctgagcacatttctaaagaagaggaaatggaagtcctgataaacatcattaagtcccgaaaaagattagcataaacaggatgccaagagggagatttaatattattcagatggaatgtgaattctaatgcaccactcatgctcagcctctcctcctaatagagcagtaagttttaaaagcctaatc

SEQ ID NO: 33211 - DNA, 457 bp, Homo sapiens
  misc_feature (1)...(457): n = a,t,c or g
anaccnnnnnnnnnnnnnnnnnnnnnnnnnnnnnnnnnnnnnnnnnnnnnnnnnnnnnnnnnnnnnnnnnnnggcacgagtgactgcgtaactaatctcattatttgttcagaattcagggcatttctgattttctaattccaacttacaagataagagataagtggcgtaattgaagatgttgttaccagtatttttggttcgtattatgggttaaattcagcaatacatattgagaaaaaataatgtgtaataacaaggaacaaaaccttttgataataatatgtcaagatatgtcattttaacctatctgataaggaaagtgctttgttataatgccatttaaaccttttttagctaaaatgtcttgactagaatttggggaaaaataacttacattaaactctgctatactggaagtgtatgaaaaagagtattgattttataacctgtggtg

SEQ ID NO: 33212 - DNA, 463 bp, Homo sapiens
  misc_feature (1)...(463): n = a,t,c or g
aatcncttgactgattacgaatttaatacgactcnnnnnnnnnnnnnnnnnnnnnnnnnnnnnnnnnnggcacgaggtcacattaaaagtgagggaagagaggttgaagaaagtgttcattaattcatcaattttctcaccttccacagaaggaaaataccatatacttttatctaaagttattaaagcagagaaaaaaagtttaagttatgatttaaagtaaaaaaaatgattatttctaggagaataataacagattataacttttccgaggcaacagaccgtataacaaaagacagaacaaaaagagaaaatgaagatgtattaacaaaatgtcagataagatgtaagaaagaagaccaaacagatgctctacgagtggcagaaggctctggtctgtctgcattttgtctggtgttggacaaatcacttaatctctctaaagtctcagtgtttcatctat

SEQ ID NO: 33213 - DNA, 459 bp, Homo sapiens
  misc_feature (1)...(459): n = a,t,c or g
atcnctnnnnnnnnnnnnnnnnnnnnnnnnnnnnnnnnnnnnnnnnnnnnnnnnnnnnnnnnnnnnnnggcacgagggcagaaaatagttttctagtttcttaatccagttgctcatcagttcagttacgctgaatcttgatttttacttctggattttgtttagatatgagttattaaattacattttgacaaaatgttgaaagtttgttgcagctgttcagaaaactcaaattctgaaattaaaaacaactaagtaaagatttttgctaaggaaaaactaagagcacttgtaatttgggatgtatatggactatatataataatatgtagttaagattgaagaccatatgtttaaaaattagatttgctgttagtatatttttacattgtaaattattaatttgcttcattatgttttgctggaaagctaaaagattaagtaatgtctgacttcaca

SEQ ID NO: 33214 - DNA, 460 bp, Homo sapiens
  misc_feature (1)...(460): n = a,t,c or g
tttganaccnnttgacnnnnnnnnnnnnnnnnnnnnnnnnnnnnnnnnnnnnnnnnnnnnnnnnnnnnnnnnnnggcacgaggaaaaaaacaatctggaagaaaaaaaccacacaaagacattgattcagcctgtttggcgtttcccagagtcatctgattggacaggcatgggtgcaaggaaaattagggtactcaacctaagttcggttccgatgaattcttatcccctgccccttcctttaaaaaacttagtgacaaaatagacaatttgcacatcttggctatgtaattcttgtaatttttatttaggaagtgttgaagggaggtggcaagagtgtggaggctgacgtgtgagggaggacaggcgggaggaggtgtgaggaggaggctcccgaggggaaggggcggtgcccacaccggggacaggccgcagctccattttcttattgcgctgctac

SEQ ID NO: 33215 - DNA, 462 bp, Homo sapiens
  misc_feature (1)...(462): n = a,t,c or g
anatccgnnnnnnnnnnnnnnnnnnnnnnnnnnnnnnnnnnnnnnnnnnnnnnnnnnnnnnnnnnnnnnnnnggcacgagtcgctccatatccttctctgttgtcatcagaagataacgctgatgatgaggtggacacacgaccagcctccttctgggagacatcatagtgctagtactatgtcaaagcaacagtccacactttgtccaatggttttttcactgcctgacctttaaaaggccatcgatattctttgctcttgccaaaattgcactattataggacttgtattgttatttaaattactggattctaaggaatttcttatctgacagagcatcagaaccagaggcttggtcccacaggccacggaccaatggcctgcagccgtgacaacactcctgtcatattggagtccaaaacttgaattctgggttgaattttttaaaaatcaggtaccac

SEQ ID NO: 33216 - DNA, 476 bp, Homo sapiens
  misc_feature (1)...(476): n = a,t,c or g
ntgggtnnnntnttganattcgaaanccttatgacatgatcacgaatttantacnnnnnnnnnnnnnnnnnnnnnnnnnnnnnnnnnnnnnnnnnggcacgagctcggcgtggggggagtgtgggaccacatgagaagggcatctgttttacagaacccttagcggtttaaactaacagcagggctacatctactgatgaatagcccagagcttacttctggctcagcatttagtatctgtgtgaccatgggcaagttattaattcctctattcttcagtttccccatatctaaaatggggaaattaataatccctctctactaagattgttgctagactacataagtnaacnanatgnacagagcttaacagnacctagcacatattangggctcaataaatggggcttaccacgctgttgncattgctannanataaaggncatnanatgtggnaggacagnggactatagctg

SEQ ID NO: 33217 - DNA, 483 bp, Homo sapiens
  misc_feature (1)...(483): n = a,t,c or g
gnnnnnnnnnnnttnnnnttgaanaccnnnnnnnnnnnnnnnnnnnnnnnnnnnnnnnnnnnnnnnnnnnnnnnnnnnnnnnnnnnnnnnnnnnggcacgagaatatttccacttttatgaattaatgtcaccatcattctttgaattgccaaggtcaaaatatttggatcatctttcctgtctcagcacagtgttctgtgcacaagctctggatggtgaacttgtatcctcattctttcactgcatggcagtgaccttgagcaagtcactgggcttctccaggcttcagtgcggccttcataacatagttatgaagtttacatgagaaaacagttgtgcagtttacatgagaagatgtacgtaagggcacaaagagtttagcatgtggcaaactatgatgaggatgacagaaaaagactctcaatgatctgttcacacttttctcattccttacataactgttgcacaactcacatggccct

SEQ ID NO: 33218 - DNA, 481 bp, Homo sapiens
  misc_feature (1)...(481): n = a,t,c or g
ggnnnnnnnnnttnnnnttganancgcttgacnnnnnnnnnnnnnnnnnnnnnnnnnnnnnnnnnnnnnnnnnnnnnnnnnnnnnnnnnnggcacgagctgggggttttagttgacagttaacttaaaaagtcaacagacaactagcagtctaaatgaataacatattctagtacaaaacagaataacatatattctgctgtcgtgctgacaggcagactgtacctggaatatgacgggaagcctcaccaccttctcaccagaggacagcctcgatcttgcagcaaagatgtctcaggagggatacaaggaaggtttcagaatcctgaaaggcaaggaagagccatcagatatgttcagtttcaacctcagaatctctaagtctgtggctggtacagtgaaaacggattcagctcagccctgcagcgggaagcacatgccaccttaacagcaactgaagacagggttgacggcaaaggggc

SEQ ID NO: 33219 - DNA, 483 bp, Homo sapiens
  misc_feature (1)...(483): n = a,t,c or g
ggnngnnnnnnntttnanatcgctnnnnnnnnnnnnnnnnnnnnnnnnnnnnnnnnnnnnnnnnnnnnnnnnnnnnnnnnnnnnnnnggcacgagaagctctgccttcttgactgtggaggcgcccagcacttgtgtttaatgacacattgttctgccttccttctgtatatgcttgttctgtggacagagtgacctggccctggccagtcaccctctatcacccattgaatggccaccagcaggcccttggatggagcaagcgctgatggccttctctcccctcagaactaccggatttgtttctctttttcgtatcagaataaacaccctgagtttccttggtgtctctccgagaataagacggggaggaaagctacccttgcacagcgcctgtcccagggcacttcctccaggtggtgatccacatccctgggagccccacctctttgtcccagacttccccttgggatcagggctgtca

SEQ ID NO: 33220 - DNA, 482 bp, Homo sapiens
  misc_feature (1)...(482): n = a,t,c or g
ggnngnnnnnnntttgaatcgtatgacnnnnnnnnnnnnnnnnnnnnnnnnnnnnnnnnnnnnnnnnnnnnnnnnnnnnnnnnnnggcacgagaaattctgcagggtgggctagcagtttggagacccaggatcacggacactgcagtttcagttggaaggcagcctgctatagagctgagaagggctgatgttggaaataaaggtcaaacacagtctgttggagagagtttcttgctcaggtgaagctgcatgtnnnnnnnnnnnnnnnnnnnnnnnnnnnnnnnnnnnnnnnnnnnnnnnnnnnnnnnnnnnnnnnnnnnnnnnnnnnnnnnnnnnnnnnnnnnnnnnnnnnnnnnnnnnnnnnnnnnnnnnnnnntgccctcacaatgagattcgtgctctaaaaagaagggaaagagagaaagatttcctctgcctgcatgcaaagaagacgtcaggtgaatttccaccaggaaccca

SEQ ID NO: 33221 - DNA, 471 bp, Homo sapiens
  misc_feature (1)...(471): n = a,t,c or g
ggggtnnnnnttgaatcgttgnctgattacgaatttaatacgactcnnnnnnnnnnnnnnnnnnnnnnnnnnnnnnnnnnggcacgagattaagaacatttttttcttaaaccaacttaaccattttgggaaagtgttactggtttaattttttgaaagtttatcccttagctaagggagctcaaaaaaaggtttgctaaacaactggaattctcttacctctttgttcaacatttgtttacctcgcaaatgtaatatatttacataaaggtgaaataatttccaaaagctttttggataaagtaaacaaaatatgaattacagaaacagctacctaaaaacatgtatttagcaaaaacaaattaacattagtgtatactgcagtaaagaattacattcatttatgtacataagacttgatttttttaaagggattttaaaattgaaaatccatatatgctggcctgaagg

SEQ ID NO: 33222 - DNA, 486 bp, Homo sapiens
  misc_feature (1)...(486): n = a,t,c or g
ggtnnnnnnnntttgantttgaaancnnnnnnnnnnnnnnnnnnnnnnnnnnnnnnnnnnnnnnnnnnnnnnnnnnnnnnnnnnnnnnnnnnnggcacgagagtgacagagcaagactctgtgaaaataccgaagcaaggagaggcagtgtaggacccagtggcttacagagcccaccccaggagctggcacacagtattaggagggggtgaaaggaaggtggaagctgctcggatcttcccatcccgggccagcctggagcccccttgccagctgaggctttgtggaggccagggagaccctccatggctctcctagaccataactgaaggggaagacttgtcccttgaccccaaaattaagtctggtcctgcccacaccctatctggaaccccccacgctactctgaaggtgacttctctgggtggccaccggagtgtcctatgtgagttgctgcttatttcaagaggggccaccccccaggcc

SEQ ID NO: 33223 - DNA, 482 bp, Homo sapiens
  misc_feature (1)...(482): n = a,t,c or g
ggtgtnnnnnnttgnaatcncttgactgattacgaatttaatacgactcnnnnnnnnnnnnnnnnnnnnnnnnnnnnnnnnnnggcacgagggatattagcataaaacatgaagcatatttgctctgctaaaataggtatatattcagagtgattaatatggtgagaaaaagtgatgggaaagcaattgaggtagtaactggaatataggtagctgggaggtgaaagattttgagtttcataagacttgttttaatcctgtcaaaaaaaaattagacctctttgtttctccagggcatagaaatttcagtttcaacccagattaaagaactttataacagtgttgtccagtggtgaaacagaatcctttgtaatttaaaaatatttccttcttaaaacctttagaattttaattttatagttctgcttattatattttttatttcccaaagtgaaaggttcaaagaataacattaaaggtct

SEQ ID NO: 33224 - DNA, 483 bp, Homo sapiens
  misc_feature (1)...(483): n = a,t,c or g
ggngnnnnnntttgaatcggttgacnnnnnnnnnnnnnnnnnnnnnnnnnnnnnnnnnnnnnnnnnnnnnnnnnnnnnnnnnnggcacgagggcagggcttagtcccagaaaagaaacactcttacacttgttactagtaagaggaacacttgtagcctcttagggaacaagaaaacatggctttctaaaccgaagtgatgtccatatgccttagcatcaggcatgtttaaaagtgctttccactcccacatttatttttcaattgacaagctaggggcagctgtagaatctgcctctggtttcgttgcctgcccgattcagaaaatgagccgggaatctgaagagaatgtccccaggaaagccagcacttcatgggacctgaagaaggggtctgcaccctgcaggaccaggatctgtggctcatggggaaacccatagctttcccacttagaagtcatttctcatggaattggttagagtcc

SEQ ID NO: 33225 - DNA, 489 bp, Homo sapiens
  misc_feature (1)...(489): n = a,t,c or g
ggnngnnnnnnnttgnntttgannnnnnnnnnnnnnnnnnnnnnnnnnnnnnnnnnnnnnnnnnnnnnnnnnnnnnnnnnnnnnnnnnnnnnnnggcacgagctccctgcccctctgctggcacagcctgggcaaggggagaaggtggtccctgcagaggggctccaggctggtgagagcccccctgctgtcaggaccagattttcccagccatccagcatgctgcggggagaaggggcagaggctcacctccctcctggggccttttgttttggatcctggggatggtgagaatggaggttctagaaggggtaaggccagaacccagggatccaggagtcggctctcagctggagcttccataccttctgggctccctttgctgaccaccagcccaagggagctaagaccaggagggggctgggcgctgtcccttctctttcccaggagccctgccaggggctgtgggcctacaaggcttccagggga

SEQ ID NO: 33226 - DNA, 488 bp, Homo sapiens
  misc_feature (1)...(488): n = a,t,c or g
ggngnnnnnnnttgnnnttnganancnnnnnnnnnnnnnnnnnnnnnnnnnnnnnnnnnnnnnnnnnnnnnnnnnnnnnnnnnnnnnnnnnnnggcacgagatttgaaagatggatgaatcttgggtagaagtgtgcagagggaagcagtgtgagcagagtgggaaagtgtgaggagagccgtgaggagtgtggtgttggtggagaggggaggaagacatcttgtggggaaggtcgggcgggttagagcatagacttcctccagaggccaggagaccatcggaggccaggagatcatcggcgagtgtggcagggaaagggcctgttgaactgactttcccacttgccttttcgttgagaaggagagtaaaggccacgcctgtcccatggctgtttttaagtctcgagtgtggagattgttggtcgtggagggaggggtgttgcctctgcctgaatccctggggtctcactgtattcacttttttctct

SEQ ID NO: 33227 - DNA, 482 bp, Homo sapiens
  misc_feature (1)...(482): n = a,t,c or g
ngtgnnnnntttgaatcgttgacnnnnnnnnnnnnnnnnnnnnnnnnnnnnnnnnnnnnnnnnnnnnnnnnnnnnnnnnnnggcacgagtaggnnnnnnnnnnnnnnnnnnnnnnnnnnnnnnnnnnnnnnnnnnnnnnnnnnnnnnnnnnnnnnnnnnnnnnnnnnnnnnnnnnnnnnnnnnnnnnnnnnnnnnnnnnnnnnnnnnnnnnnnnnnnnnnnnnnnnnnnnnnnnnnnnnnnnnnnnnnnnnnnnnnnnnnaannnnnnnnnnnnnnnnnnnnnnnnnnnnnnnnnnnnnnnnnnnnnnnnnnnnnnnnnnnnnnnnnnnatatatcctagtattcctgggctcaagtgcttaccaccatcctggccttgcatatttttatgaaaaagtaactatattgttaaaanatttaactggcatggnggctcattcctgtaaccccagcanctgaagaggccgaggcaggaggacagc

SEQ ID NO: 33228 - DNA, 479 bp, Homo sapiens
  misc_feature (1)...(479): n = a,t,c or g
cnttgancacccnnnnnnnnnnnnnnnnnnnnnnnnnnnnnnnnnnnnnnnnnnnnnnnnnnnnnnnnnnnnnnnnnnggcacgagggtggactaatcgtagatgtgtactgcagaatgggctcctccaagtttctggttctgggaactgtagttctcttagtgcaatccaagatcacattggcactgtggtcacatcacagtaaggacccagtggaaattatgactgagtgtcgtcacaagcaactctatcactcctctctccaaccctcctgtgcagtgggtttaagggatgcacagaccttatcactattcctgtcaaaggtattactatattgcattccttttatattactctcatggcaggccacattgatttagatcatttttctttccatcaatgaatttgctgntcctccccatttgatgtgaagggtaaaagaaaaaaaattcatcactctgatttcaaagttcttgcta

SEQ ID NO: 33229 - DNA, 484 bp, Homo sapiens
  misc_feature (1)...(484): n = a,t,c or g
ancccttnnnnnnnnnnnnnnnnnnnnnnnnnnnnnnnnnnnnnnnnnnnnnnnnnnnnnnnnnnnnnnnggcacgagtgcagtagcatttacctgtacatcataatcagtgaactgaagaggggaggtatgagaaaggagccatacagaactatataaaagcttatgaaaggaaccagggaagtgaaatatcaagtcctgtggcaattaagggtagctcttgttcaatttgaaagaatattggtacatgactgaaggctcttcgttctgcttgaatctaaaattctgagagagaagttttgaggtcagcttccattgcctctttgcaaccttaaccacattgttgaaaactgtgtcacatttccactttaccgataacttttccctgctcatttggaaggtcctgacnacagaacgtttttctttctcatctttgcctacaaattctactatatctcctttttgcttctctctctaatgctgg

SEQ ID NO: 33230 - DNA, 480 bp, Homo sapiens
  misc_feature (1)...(480): n = a,t,c or g
ttcgaaaacccnnnnnnnnnnnnnnnnnnnnnnnnnnnnnnnnnnnnnnnnnnnnnnnnnnnnnnnnnnnnnnnnnnggcacgagcctgggctcaagcgatnnnnnnnnnnnnnnnnnnnnnnnnnnnnnnnnnnnnnnnnnnnnnnnagcctgcatttttttgagttcctacatcatttgtccacaaagatggcttcagagaggtggtcacatgctttgctctgcttcctcttggcactgaccttgatgcagccttcacatgagatttgagggtccgcatggatggcctgtgccgccctcgctggcgaggctcctgtgtgcccctggctttctgggtctgtgcctctccagaatcttgtcttaccctccggtgtgcttgtgttcttagaaaagccccagcnnnnnnnnnnnnnnnnnnnnnnnnnnnnnnnnnnnnnnnnnnnnnnnnnnnnnnnnnnnnnnnnnnnnnnnnnnnnnnn

SEQ ID NO: 33231 - DNA, 471 bp, Homo sapiens
  misc_feature (1)...(471): n = a,t,c or g
acatgcctcgaattaatcgactcnnnnnnnnnnnnnnnnnnnnnnnnnnnnnnnnnnggcacgagnnnnnnnnnnnnnnnnnnnnnnnnnnnnnnnnnnnnnnnnnnnnnnnnnnnnnnnnnnnnnnnnnnnnnnnnnnnnnnnnnnnnnnnnnnnnnnnnnnnnnnnnnnnnnnnnnnnnnnnnnnnnnnnnnnnnnnnnnnnnnnnnnnnnnnnnnnnnnntttctaaatacataaagaacttctataaatcaggtaagaacattaagaaacccactagaaaaattcacaaagtccataaaagaaattcaatactttcattaagtggaaacaaatattcttagacacttctagtataaattggaaggcaatttggcaggatccattataatataaaagtattacacacacttgacatttcagtatctatccaagagaaatacttgtgcatgtgtgccaggagacatggt

SEQ ID NO: 33232 - DNA, 472 bp, Homo sapiens
  misc_feature (1)...(472): n = a,t,c or g
nnnnnnnnnnnnnnnnnnnnnnnnnnnnnnnnnnnnnnnnnnnnnnnnnnnnnnnnnnnnnnggcacgagctcagtttctgtggtaatcaaatcctttgccattctactttgcccttgctcatctgtaaaaggggactcacaatgcctttcttagacaaattttctgtggggtaaatgagaaatcccatacagagtagatggcacctagtagaacttcaacgaatggtcatccaggcccacctttttcctccctcccagagaagtgatgactgttatctaaaccaagcagcataattgccacagagaccacctggaaggagagcaggaagatggagcatgtgctcacacttacattatacatggacctttggggccatttctgtgttgcaggatggtttgctgaggtattggagtgagatganaagatcgtcaaaccaatcccctatcattttctgcccctcatttgatctg

SEQ ID NO: 33233 - DNA, 479 bp, Homo sapiens
  misc_feature (1)...(479): n = a,t,c or g
tcgacacccnnnnnnnnnnnnnnnnnnnnnnnnnnnnnnnnnnnnnnnnnnnnnnnnnnnnnnnnnnnnnnnnnnggcacgaggaagaactctagccaagaaccacggcctacactctccaacacagtccagaggccacaactaggtcccacagctaatttacccctggagatgggctcaggacagctgcctaccctagtctcaccaatcgtggatctaactttgctcctgagactggacagactgcaggacaattccagacacggacagcagagggtgtgggtgtctggccacagtggcagggccagcagcctcatcatcgttcaagttctagtgagcaacatgttcaacaaccgccagcacagcaacctggccagcctgaggtcttccaggagatgctgtccatgctgggagatcagagcaacagntacaacaatgaanaattccctgatctaactatgtttcccccctttncagaa

SEQ ID NO: 33234 - DNA, 479 bp, Homo sapiens
  misc_feature (1)...(479): n = a,t,c or g
ccnnnnnnnnnnnnnnnnnnnnnnnnnnnnnnnnnnnnnnnnnnnnnnnnnnnnnnnnnnnnnnnnnnnggcacgagtcatcatttgtgagaagaattgtcctccctttttatgccatcattaacagatgccttccttcctttagattattttaaagcaaatcccagatatcatttcttttcatccgtaaatatttcactgtgtatctctaaatgataaggttttctgtaaaagaaccacaattgatgtatttctatagctgccgagtacctatacattgcctttggttggtatgccttttaaatttctgttaatctnnnnnnnnnnnnnnnnnnnnnnnnnnnnnnnnnnnnnnnnnnnnnnnnnnnnnnnnnnnnnnnnnnnnnnnnnnnnnnnnnnnnnnnnnnnnnnnnnnnnnnnnnnnnnnnnnnnnnnnnnnnnnnnnnnnnnnnnnnnnnnnnnnnnnnnttctcaattgg

SEQ ID NO: 33235 - DNA, 471 bp, Homo sapiens
  misc_feature (1)...(471): n = a,t,c or g
ccnnnnnnnnnnnnnnnnnnnnnnnnnnnnnnnnnnnnnnnnnnnnnnnnnnnnnnnnnnnnnnnnnnnggcacgagcggcacgagcggtgtttagggacaggtctctatgtcctcctaccaggacactgatcaggtggcaacaaccctgtgtcaagaggcaggaaacctaggctctcgttctttcccaccaaagagctgtgtcgttttagcaaagcaactcagtggcctcatctatgaaatgggcataataacatgttccccctttaggcagaggactacaccagatgatctcttaagatacatgttaccatttcctgctaatctatgagttcagggtgccaattagcaaacctgggagaggaggaagctggaggaaatctctttacttcttttatctccaagaaagatacacactctttgagtggcttcctgcagacagtgccttacctttgccagttctgtgtgtggg

SEQ ID NO: 33236 - DNA, 472 bp, Homo sapiens
  misc_feature (1)...(472): n = a,t,c or g
nnnnnnnnnnnnnnnnnnnnnnnnnnnnnnnnnnnnnnnnnnnnnnnnnnnnnnnnnnnnnnggcacgagacaggttatgaagttaagagaactaagaaagattaaatgggttattcaggaggatcaaaactatgtttaaagtttaacaacaacaaaatatctcctattaatactaagtaaacatactggaaagaaatctagctagttaatgactgtctttgggtgtcagaactctggatttttttttctagtttttctgcttttcagaattttccaaactttttgtagagataagtttttatcatacaaaagaatatactctttaatttaaaaaatacttattttgtttttattttttttcggcacaaacaccaaccaagcctctggttgaaagctaggagaaaaggctgngtgctttanacctcctgctatagatgngntgcctctggactcctcctttctctttaagaa

SEQ ID NO: 33237 - DNA, 478 bp, Homo sapiens
  misc_feature (1)...(478): n = a,t,c or g
accccttnnnnnnnnnnnnnnnnnnnnnnnnnnnnnnnnnnnnnnnnnnnnnnnnnnnnnnnnnnnnnnnggcacgagggttaaaataatgttgatccccatcagaaactgaaagtagagataccagattgtggtcagagcgctgattacctctactctctcccaatgtgtttgtcgtgggttggctgttatcttccattcaatatggatgaccctatgtaatcttctttttctctagttctaaaaacaacccctctcctttcctttggtctccattagttgcatgttgaattacctcaacacttactaatgtaaaataaccatttactaggttcacagatcctgtgagccattgatccagacatggcagagtaggtttaggttgtctctggttcatgatgtctaaggcctctgatgaaatattttaaaactcaggaatagtagatcaccagggtctggaattatctgaaagcttttt

SEQ ID NO: 33238 - DNA, 468 bp, Homo sapiens
  misc_feature (1)...(468): n = a,t,c or g
tatgacatgattacgaatttaatacnnnnnnnnnnnnnnnnnnnnnnnnnnnnnnnnnnnnnnnnnggcacgagaaggtggcagagttcttccagggtgtcgacgtgatcgtgaacgccagcagcgtggaagacatagacgcgggtgccatcgggcagcggctctctaacgggctggcgcgactctccagccctgtgctgcaccgactgcggctgcgagaggatgagaacgcagagcccgtgggcaccacctaccagaagacggatgcagctgtggaaatgaagcggattaaccgagagcagttctgggagcaggccaagaaggaagaagagctgcggaaggaggaggagcggaagaaggccctggatgagaggctcaggttcgagcaggagcggatggagcaggagcggcaggagcaanaggagcgcgagcggcgctaccgggagcggnagcagcagatcgaggagc

SEQ ID NO: 33239 - DNA, 472 bp, Homo sapiens
  misc_feature (1)...(472): n = a,t,c or g
nnnnnnnnnnnnnnnnnnnnnnnnnnnnnnnnnnnnnnnnnnnnnnnnnnnnnnnnnnnnnnnggcacgagcggcacgagacgtgactgactgactgtcaagtagaatgcatgtgacaggcctgcaaggggacagtagataatttctagagagtagatctgcgtcagattatgggggaattttaatgccaaagcaagaatttagagtttattctgcagtagtaaagagccatcaaatgcttgttattttaaaatatggattgtgacatgagaaccagggccttaaatcaggtttcttttcatgagaaggctgaattaaagggataagatgtgggggaggcagggagaccagtaggcttttgtcaaaggaaataagagaagtcagaagagggcaaagaggccaggaaagggggtggggaagggcgtctgacatcagggctagaatttccgaaggtactgccgacagccttact

SEQ ID NO: 33240 - DNA, 462 bp, Homo sapiens
  misc_feature (1)...(462): n = a,t,c or g
nnnnnnnnnnnnnnnnnnnnnnnnnnnnnnnnnnnnnnnnnnnnnnnnnnnnnnnnnnnnnnnnnggcacgaggccatattttggtccatgttaatctacaaaaataaccacagaaacagctgtaatctactgaatgttgccagccaaaataaatctttgcagggtatttttcaagtattgtacttcctataccttttccagatttcaccgttaagaccaaaccttcctcccaagacttgactttctgcattatttttggaatgcagtctttttttttttcccccattttnaaaagggtnttcaaatcntnatccngtttcgnattttaanngtttccaattcnnacccnggntccnngccnnataanaggggggntntcnnggnttccagcccancagaanggtggcntnaangganggncttnagnccaggngcgggggcnntttggaaggccgaggggg

SEQ ID NO: 33241 - DNA, 472 bp, Homo sapiens
  misc_feature (1)...(472): n = a,t,c or g
nnnnnnnnnnnnnnnnnnnnnnnnnnnnnnnnnnnnnnnnnnnnnnnnnnnnnnnnnnnnnnnggcacgagcttaaagatacttaacagccagacttttaaaaaagatcaaattgatacattcttctctgttagtagttgaccaagtagtttcttcgtttcccacatcatcaggttttacaccctctgactttgcattccttttaagttcttgccttttaactatccaggacccacttactaagtttggctcatctctctccgagtttcctattttgggcctcgtgggtgtttatcgtttgcttgaagacagtattacttatattggtcataggttctccttctcaatttcatggatgagaaatggtttcttcatttacttttctctgcagcaggtcctaagaggcattaatggaatcattttgtttactttctggcctttactttaggaacctcttgatctgggaagtcac

SEQ ID NO: 33242 - DNA, 474 bp, Homo sapiens
  misc_feature (1)...(474): n = a,t,c or g
ncancnnnnnnnnnnnnnnnnnnnnnnnnnnnnnnnnnnnnnnnnnnnnnnnnnnnnnnnnnnnnnnnnnnnggcacgagcgattatatagatctttaaaatatatctaagtgtactaggttacagttttcattttttatatttaaaagatcctcaggtagagaaaaatggattatagatataactaaacattttaggatacctcaaaatgttacgtgatgggtttgtagcttagttgttcgattatgtcccttacaattttaagatcagaatgatacaaatttctaccttcaatttctaatttgtttttacagagagattctccctgagaaacaagcagaattttttgaaccatgggtgtactcattttcatatgaattaattttgcaatctacaaggttgcccctcatcagnggtttctacaaattgctttctattacagtaagaaatgccaagaaaataaaatatttcgag

SEQ ID NO: 33243 - DNA, 477 bp, Homo sapiens
  misc_feature (1)...(477): n = a,t,c or g
ccnnnnnnnnnnnnnnnnnnnnnnnnnnnnnnnnnnnnnnnnnnnnnnnnnnnnnnnnnnnnnnnnnnggcacgagtttatactttttattcctcaattgagatttattgccttttcatttagtatgctttcctttgcacctcataaaaatttctaaaagctgccttaaagtcattttgcaattcaattattttaaaacaagttgagaacatgcatttatgtgggggtagtcaattgttagtttttgaatttttcctagagtatataggaataatcagtaggaaagataggctgagggagcttatactgccatgctaagagatatcttatgttttcctttttaacaacttctgtgataaagtgtctaaagaagctgaatctgttcctctacattctatcaggcagagccgcannnnnnnnnnnnnnnnnnnnnnnnnnnnnnnnnnnnnnnnnnnnnnnnnnnnnnnnnnnntggag

SEQ ID NO: 33244 - DNA, 471 bp, Homo sapiens
  misc_feature (1)...(471): n = a,t,c or g
nnnnnnnnnnnnnnnnnnnnnnnnnnnnnnnnnnnnnnnnnnnnnnnnnnnnnnnnnnnnnnnggcacgagttattaagcaaatgctgattggtcatcatggactgggcactgtgctcggtgctttccttccctttctagttaccccagtaaccctgggcgattctgcacttttgtgttgattttatgggagaggattttcaggcttagcatggttgagtgacttgctcaaggtcatttggttgaatggactttttctctgttgtcctgcctgctagactggaagccccttagggacgagttcttgttgtctctagctggtgacacatagcctagttcggttcacagctcccaggaagaatgcagaggatcctantgaagttgaattgaaacatganagtgaatttaactagcctgcatgcagtttctggagatgggtgtacttgcctccttctggaangtaggttcaaaa

SEQ ID NO: 33245 - DNA, 468 bp, Homo sapiens
  misc_feature (1)...(468): n = a,t,c or g
cnnnnnnnnnnnnnnnnnnnnnnnnnnnnnnnnnnnnnnnnnnnnnnnnnnnnnnnnnnnnnnnnnnnnggcacgagactggttttataagaacaaaaaagggggaaagaatatccaactagaaacccaaaaataggcttatacaaagagtaagtaagttgctcttttctttgaacagtctcatgcaaaaccaacatttctagtttgctaagcttctgtaacacaggatatttcagggagtctgggcttcaatgtgcagcataaaactcttttaagggcaatgtaagcaagggaacaagagaacataaaagcagtagcaaggcccagattgtgttgaggcattttgagcagaggaatggtaggagatgacttactctaaagaatcannnnnnnnnnnnnnnnnnnnnnnnnnnnnnnnnnnnnnnnnnnnnnnnnnnnnnnnnnnnnnnnnnnnnnnnnnnnnnnnnn

SEQ ID NO: 33246 - DNA, 506 bp, Homo sapiens
  misc_feature (1)...(506): n = a,t,c or g
gtgtgnnnnnnncctttgaaaccnctattacnnnnnnnnnnnnnnnnnnnnnnnnnnnnnnnnnnnnnnnnnnnnnnnnnnnnnnnnnnggcacgaggtgtgcttgtagtcccagctacccaagaggctgacatgaaacaatcgcttgagctcaggcgatcggnnnnnnnnnnnnnnnnnnnnnnnnnnnnnnnnnnnnnnnnnnnnnnnnnnnnnnnnnnnnnnnnnntatgtctcatttaaggggggaaaaaaggaactgtgggattgaaactcaggccagggcggaagtcacctctgtagagggggagagttgagaccatgagcaataaactggaatcacagattgtcaggctccctcccacatctggaattcagtttcctccacatccctcccaagtcctcatctccacagaagaggaactcgctacctcccaagccttctacttgggccatcccaaacaacttgactgctagaaaagcctcacatttggcccagtgcagtg

SEQ ID NO: 33247 - DNA, 471 bp, Homo sapiens
  misc_feature (1)...(471): n = a,t,c or g
nnnnnnnnnnnnnnnnnnnnnnnnnnnnnnnnnnnnnnnnnnnnnnnnnnnnnnnnnnnnnnnnnnggcacgagctgtatatagatgcttggtcactggttaagtgcaaataaaggagtaaatgtaaactggattagaactggattttgaggtttaaaataacctggacttttgagtgaaatacagataaaaagaggtgaagcattcttctaattcaatatgaaaataaaagttaaaaacaatttctgagagaaaagaaactggcattggtgtcagttatagaagggagtttggagtggtttgcagggggaacttttatagcaccatcttgatttcattttgtaatactgcagacaaatagagaagagtaagaaaaagagatgnnnnnnnnnnnnnnnnnnnnnnnnnnnnnnnnnnnnnnnnnnnnnnnnnnnnnnnnnnnnnnnnnnnnnnnnnnnnnnnnnnnnnnnn

SEQ ID NO: 33248 - DNA, 502 bp, Homo sapiens
  misc_feature (1)...(502): n = a,t,c or g
ggntgnnnnnncctttgaaaccctttacnnnnnnnnnnnnnnnnnnnnnnnnnnnnnnnnnnnnnnnnnnnnnnnnnnnnnnnnnnggcacgaggaccggcctggccaacatggtgaaatgctgtccctannnnnnnnnnnnnnnnnnnnnnnnnnnnnnnnnnnnnnnnnnnnnnnnnnnnnnnnnnnnnnnnnnnnnnnnnnnnnnnnnnnnnnnnnnnnnnnnnnnnnnnnnnnnnnnnnnnnnnncacagtacactgctccaaatttgatgcggtataattaacacaacatcacctactgtatttatgccaaaaatgttaacttgaatgacatcaacagacactataagagtagttcagattgatgggtgttctgtgagacaaggaaaatatcagggtcatgaaggatagaaaaaggatagaagaattgtagattaaaggaaactaaagaaatatgacaactaaatacagtttctgattttgatcggattccagattt

SEQ ID NO: 33249 - DNA, 508 bp, Homo sapiens
  misc_feature (1)...(508): n = a,t,c or g
ggtgngnncncnntttganaccccnctttgnanaccnnnnnnnnnnnnnnnnnnnnnnnnnnnnnnnnnnnnnnnnnnnnnnnnnnnnnnnnnnnnnnnnnnnggcacgagctgggagtttggaaatgcaacttgggcacaggttatgggggcgaagaagacagtttagattgtattttgtaggaaatggatactcccttgaaagcctgcgtgccaaggaagtggtatgattagcactgtgcttcagagagaaatgtcttcagcaggatgcaatgtccactggggaaactggctgctgcagcgtttgatcattgcagtggtctgaatgtgcccccaccaaattcatgcattggaagcttaaaccccagtgcaacagtgttggaggtgaggccttttgggatgggtttaggtgttgagcctctgcccttgcatatgggttaacgctgctataagtaaggctttcaggagtaagctggctctctctggcccttcatgtgccttccaccaa

SEQ ID NO: 33250 - DNA, 498 bp, Homo sapiens
  misc_feature (1)...(498): n = a,t,c or g
ggggnnnnnnnccttgnnaccctannctgattncgaatttaatacgactcnnnnnnnnnnnnnnnnnnnnnnnnnnnnnnnnnnggcacgagcggcacgagtgaagtacaagattatacctactcagacaaacaattaggtattggacatactactgtctatgtagagattaaatgatagtgtaaaaaggttgatcatattataggtaaaagagctgaaatctggcattacagattgaaatttctgaaaactgaaataataaaactaatttcactaaagtatgtacattttcttatttacatagtttataatgtgttatataattcatgaatcttcaaaagaaatatactgagctattcaataaaaatttacattacagctttaggccaccaagccccatctattgattatgtacttggtgtaaattggcggggggaacaaaacaagagtgaaaactgagcctcaaaatacaaagcatgtagcaaaacagactactaa

SEQ ID NO: 33251 - DNA, 507 bp, Homo sapiens
  misc_feature (1)...(507): n = a,t,c or g
gtgnnnnnnnnctttgnnancccnncttgganancnnnnnnnnnnnnnnnnnnnnnnnnnnnnnnnnnnnnnnnnnnnnnnnnnnnnnnnnnnnnnnnnnnnggcacgaggccgtgtcccagggactgtgctcattttctgacaggagcaatattattaccgactgtgacagcagctcccactaagcctgcaccttagctgcagatccttagcagggcagagagacaaggctgtatttgtatcaggtttgtcgtctgggttgtgactctcgacttgcccaggattcttcctggtcctgaccgagttgtctttgctctccatttcaggaagatgagagactgcttaggcgccaccactagtaccatgagtccctgcactggttaaagccatcgccacaacctggacaggcagcaaggtaagcagagaggccagtccaggcgagctcctgggatgtgagtgcatttccgccccaactgctgccggaaaaatcccaagtgcacaaacaag

SEQ ID NO: 33252 - DNA, 503 bp, Homo sapiens
  misc_feature (1)...(503): n = a,t,c or g
ggtgnntcccccctttgaaaccctcttcgngaaccccnatgannnnnnnnnnnnnnnnnnnnnnnnnnnnnnnnnnnnnnnnnnnnnggcacgaggtgcttttaggtcgctgtcttcatttccttcaagccacgttaagcattccctagagttaggtgatgtgggagaaagatgaataaggggcggtttctcctgttaagcaaaatgttgctttccattttccctgatgctctgtgaatgcctctcatccccatgggctcctgagtgatgtgcatgtttaaaaggatccccagctgcgagaggttttggaacctggggggttgaacagctcttaagttgttcagtgaacgaagaacagaatcatctgttggagtagaaagaactcaaaccagtcaggaggaactcttgttatagaagaccttgggaaactgttctggggttggggaacattggttataggaagtgtatggtttctttgtgggattctctgttgtggctgaaaa

SEQ ID NO: 33253 - DNA, 456 bp, Homo sapiens
  misc_feature (1)...(456): n = a,t,c or g
nnnnnnnnnnnnnnnnnnnnnnnnnnnnnnnnnnnnnnnnnnnnnnnnnnnnnnnnnnnnnnnnnnnggcacgagcaggatgatcttttgatactaagtcctttcctacaagagactgaccatagatttattgaagaacagctcctgcttggtaatggtgttgcttgcggaagtcttgaatatgacccttattcgatttatgagaaagatgtagagggagattcagtgcctaagcccttacctccagcactatcagttattagttctgcatccaagctctttggggttgtatgcgctcatgtgggagaaactcaaaggtaaatatcttcaatggttcagtgaatggataatagagaactggtgggtaagaagaatgttgccagagatctcattagcgtaaatgatttcttataaataacaggtgaaggtgaaatataagtttttgtttaattattc

SEQ ID NO: 33254 - DNA, 480 bp, Homo sapiens
  misc_feature (1)...(480): n = a,t,c or g
aaaccntatgacatgattacgtntttaatacnnnnnnnnnnnnnnnnnnnnnnnnnnnnnnnnnnnnnnnnnggcacgaggggatgaaaggatggcatgatcggatagcagatcagagaatacttttccctgagcccagcctgttttcaggagggactgtatgctggctcaggtttaggatgggccaaagttcaggggcctggaggaaggagaaaagttcaaccagttgggttaacaagcattttgttctggttgatcagtgggggtgggcagcttagctaatcatttataagacaaagaaagggaaatctggagggtctgtgtctggccttgtcataggtaaacgggggcatccgtgagtcttatctaagtcatatggggaagggtagtggatcttcacagtaaactttatgaaacacaaaaggtaggggatttcttaaccttcactgtaatctaggatgacagggttcaaataaaatt

SEQ ID NO: 33255 - DNA, 483 bp, Homo sapiens
  misc_feature (1)...(483): n = a,t,c or g
ttgnnaccctnnnnnnnnnnnnnnnnnnnnnnnnnnnnnnnnnnnnnnnnnnnnnnnnnnnnnnnnnnnnnnnggcacgagnnnnnnnnnnnnnnnnnnnnnnnnnnnnnnnnnnnnnnnnnnnnnnnnnnnnnnnnnnnnnnnnnnnnnnnnnnnnnnnnnnnnnnnnnnnnnnnnnnnnnnnnnnnnnnnnnnnnnnnnnnnnnnnnnnnnnnnnnnnnnnnnnnnnnnnnnnnnnnnnnnnnnnnnnnnnnnnnnnnnnnnnnnnnnnnnnnnnnnnnnnnnnnnnnnnnnnnnnnnnntaggggcaggaggaagaaggnnnnnnnnnnnnnnnnnnnnnnnnnnnnnnnnnnnnnnnnnnnnnnnnnnnnnnnnnnnnnnnnnnnnnnnnnnnnnnnnnnnnnnnnnnnnnnnnnnnnnnnnnnnnnnccttactaagaggacagatcacaagttatgtttttacctcaatgaaaaatg

SEQ ID NO: 33256 - DNA, 464 bp, Homo sapiens
  misc_feature (1)...(464): n = a,t,c or g
ananccnnnnnnnnnnnnnnnnnnnnnnnnnnnnnnnnnnnnnnnnnnnnnnnnnnnnnnnnnnnnnnnnnnnggcacgagcccggaatcatgcggtgctgtgaggcctagcgaagatgaagatagaatgcaaggtagaaagtgctggatacctttagaaagctgcaggactggtgcgatgggagttgagacgtaagaacctgcccgtccgtagggctctggatgctgctgaggcccgaggcccctatggcagatttgaaaattcacccttgtagagtcattcctgcctttgagcggactcccttttaagcagatctcaagagagcgttcggtggaggccctgggtctgcacagctcacctccctgggaactgctcgcccgagcgtcggagccggcgctggccccctgcagccggaaggttgcagccgcaggagccccggaggcccaggacacagggctcttgc

SEQ ID NO: 33257 - DNA, 483 bp, Homo sapiens
  misc_feature (1)...(483): n = a,t,c or g
ttgaaacccctnnnnnnnnnnnnnnnnnnnnnnnnnnnnnnnnnnnnnnnnnnnnnnnnnnnnnnnnnnnnnnnggcacgaggtgaaagtggaattttttatattgtaaatgggtgacagtgaagaattcagtgagtgttagttcagcaccatttggggttgttgctttgattcatgctgagttcccagcatttttgcacaccattgattttgcacgtcagcacagaggtcagaacagtaaagaaaaagggcaaagtgtcttagttttattgtgaaaatggttttgatttcattgaacccctggaagaagtgttggggacttttaggggtctttgggtcacactttgagaaccactaatctagaacaatatttcacattggttcatagagccctaagctgcttcatagggcagagctggtggggttctactgtacctactccctcttcacttcagccagagcagcttctgcttatgtctgttt

SEQ ID NO: 33258 - DNA, 545 bp, Homo sapiens
  misc_feature (1)...(545): n = a,t,c or g
nnnnnnnnnnnnnnnnnnnnnnnnnnnnnnnnnnnnnnnnnnnnnnnnnnnnnnnnnnnnggcacgaggcattgtggagtaggatctggtacttattgtctttggtgtaaaatctctgagtctctgagaaagtagaagaagggctgttcaggaaacacagccctcactgggcttgggaaacacagttggaagttaatgaagtttagaggacctctggaaggggctgtaaactttccagacttaccactgtctccacatgctcctgaggaaccatatctaggctgctgggcttaatttttaaaatatttgttcacatgaagtatccataatatgtgtgtagatatgcacgtgcatataacatgtacatattaaacaccaaatcaactttcagcaatacataatgcagtggtcactaaagatagtttatagcttttctgatgatcttggaagaattcttgtgtggagtgactgtccttcagagcttaccataataggagacgcctaatagatggagctaactttgtggagacttttccatacgatgc

SEQ ID NO: 33259 - DNA, 548 bp, Homo sapiens
  misc_feature (1)...(548): n = a,t,c or g
nnnnnnnnnnnnnnnnnnnnnnnnnnnnnnnnnnnnnnnnnnnnnnnnnnnnnnnnnnnnnnggcacgaggttggagttgtagtcacagctctgcccactggccctcactgtgtgggcctcaaataggggaaaggatgtgggtcctggggtcagagaactgggtttgaaccctggatgtgtggccccaggcaaaacacctggtcttcccaaaccaacatttccacatagtacctgaatacgcccataggcaggctctgatgagagctttgagacccccaccaagtgacttgttaatcctaaaatcattcttggttcagatcagacctctttccttatttgtcataagcccctctgagaccctgagtggatgtaagtcctcttccagacacactttcactgacacacacatgccatgtggtgtcaaccttcaggacttctctaatctgaggactcccaggccaagaggagagctaggtttttagtttgttttgccttgntttattgngatacatatatatataacacaaagtttaccattttaaccatt

SEQ ID NO: 33260 - DNA, 550 bp, Homo sapiens
  misc_feature (1)...(550): n = a,t,c or g
ttgnnnnnnnnnnnnnnnnnnnnnnnnnnnnnnnnnnnnnnnnnnnnnnnnnnnnnnnnnnnnnnnnnnnnnnnnggcacgagcactaatcccatccatgagagcactgccctaatgacctaatcatttcctggaggccacacctcctaataccgtcaccttggcagttagaatttcagcatattaatgctggggcaacataaatatttaatccattgcacttgtgcatatgattgaattggcagtttatcataatgcatatttactgccttgttttactttatctttctttgtatcttgtctcttcaactggactatgagctcttgagaaacgagtctaagtctgtcacctgtttatgcccctgacagtctctagcacaatgttacacatagagacagcataatagatatttgttgattgcctgatgtttgctcactgagtagtattactatcctcaatttatcttttggatgctgaggttgaaggtgactaagagaattgtaccattcttccggtggtctaaatgcattattgattagtaacagaatt

SEQ ID NO: 33261 - DNA, 458 bp, Homo sapiens
  misc_feature (1)...(458): n = a,t,c or g
gacnnnnnnnnnnnnnnnnnnnnnnnnnnnnnnnnnnnnnnnnnnnnnnnnnnnnnggcacgagcttcacctgtaataattctccataaaacaccttctactatctgattattttgtttgctgacttattgtttctcctgcactagaatctaaactccttgagagcaagctgtctagctgtctgctgccctatacacagctacatctccagtgtctagaacagtgtctagcacattttgacatctatttaggatccatacatatttctgactttaannnnnnnnnnnnnnnnnnnnnnnnnnnnnnnnnnnnnnnnnnnnnnnnnnnnnnnnnnnnnnnnnnnnnnnnnnnnnnnnnnnnnnnnnnnnnnnnnnnnnnnnnnnnnnnnnnnnnnnnnnnnnnnnnnnnnnnnnnnnnnnnnnnnnnnnnnnnnnnnnnnnnnnnnnnnnnnnngagat

SEQ ID NO: 33262 - DNA, 465 bp, Homo sapiens
  misc_feature (1)...(465): n = a,t,c or g
accnnnnnnnnnnnnnnnnnnnnnnnnnnnnnnnnnnnnnnnnnnnnnnnnnnnnnnnnnnnnnnnnnnnggcacgagcggcacgagagctgcatcccaggtagtaggtctgtctgctactgggtgcttcagggctccctatttggagctcagtgtttctctgtcctccacctgcattgctgcatctggagtcacaggcaggaccatttggagattgtccatttggtgccatgaaaacctgcaacaacctttcaatctcaagtgagaccacttgagattgtcacccaacatacttccccagccacctatcccttagcatgtcattagcacattccaagggaagacaaatatcagcgttagctagagaggatataagattaaatttgcttttaaagtcagctaccaaattcaaaagacaagcacaaaagattttctggttctctccatctctaactgacctattct

SEQ ID NO: 33263 - DNA, 461 bp, Homo sapiens
  misc_feature (1)...(461): n = a,t,c or g
nnnnnnnnnnnnnnnnnnnnnnnnnnnnnnnnnnnnnnnnnnnnnnnnnnnnnnnnggcacgagaataaaggctgaacctacaaagaagtccctaaagttctgatttaaatacaagaacaacgttatttgcatcatagcactttggagctggaaggatcctcaaaccatttagttgtagtggctaattttgtagaggaggaaaactagggcccagctaggggcctggtctcccaacttttggcttgacagtggcagctctaccctccctcaaactggttcccagggcactctggcagaggtagggcatggtgcagggcgactaccttgtgggtcagagcccccaaatgagctctcctggatcttgaagctcctaaaagaagcagcttccaagtagacctatcatgagcaaacctgggagaaggtagatacccaggctggagctgcttgcatggggcaaggc

SEQ ID NO: 33264 - DNA, 466 bp, Homo sapiens
  misc_feature (1)...(466): n = a,t,c or g
accnnnnnnnnnnnnnnnnnnnnnnnnnnnnnnnnnnnnnnnnnnnnnnnnnnnnnnnnnnnnnnnnnnnggcacgaggggctgttatcatctttgttttaaactataaactannnnnnnnnnnnnnnnnnnnnnnnnnnnnnnnnnnnnnnnnnnnnnnnnnnnnnnnnnnnnnnnnnnnnnnnnggagtcaggttagatctctttccactgtctcagtcataattttgcaaaggcagtattttnnnnnnnnnnnnnnnnnnnnnnnnnnnnnnnnnnnnnnnnnnnnnnnnnnnnnnnnnnnnnnnnnnnnnnnnnnnnnntnnnnnnnnnnnnnnnnnnnnnnnnnnnnnnnnnnnnnnnnnnnnnnnnnnnnnnnnnnnnnnnnnnnnnnnnnnnnnnnnnnnnnnnnnnnnnnnnnnnnnnnnnnnnnnnnnnnnnnnnnncgccagtgagatgcctctgg

SEQ ID NO: 33265 - DNA, 461 bp, Homo sapiens
  misc_feature (1)...(461): n = a,t,c or g
cactnnnnnnnnnnnnnnnnnnnnnnnnnnnnnnnnnnnnnnnnnnnnnnnnnnggcacgagcacagatttcacaaccctaatatcaacagtcatccccgtttggaaaggaagattcagcataggggttaggataggttggaagaaagttgcctgaagctgtcaccatggggacatctggcaggtgtgtacaggttacaacatctgccaggcacacgcacaccctccccagggaaggtgggtgagaggtagtgactctgcagggcacagtcctgaggagaagggactcagtcctggagccccctctagctgcctgggacgtgggttggcttagggataaactaactcaggccctggatttccctgaaagctttgtagctgcagtgaaggcccggtgaggccctgcagctggctgtgcttatgtgactctctcaggaatgcggcagaacgccgggagttgct

SEQ ID NO: 33266 - DNA, 467 bp, Homo sapiens
  misc_feature (1)...(467): n = a,t,c or g
tttgaaanccnnnnnnnnnnnnnnnnnnnnnnnnnnnnnnnnnnnnnnnnnnnnnnnnnnnnnnnnnnnnnnnnnnggcacgagacttagcaactaaaaataccacagatggttaacctggactggggcaaagcaagataatagtgatgatcgtatgttgctgtctccatccgtctttaatgggtcagggctttgatttccaagggtcttcaggtgatgagtaggggtacccacaagtcagaaggtctgcgttctcctagtttgtttgctgccatttgaactcatgtagggaatgaaagaaagctgcaattatccgccaactgcatttaaaacaaaacaaaacagaaaaatcaaaataacattgactcttccaaccactgacatgttgtttaataatctaagcggcagtcctggaggctaccagacttactgagttctacctgagaaacagccaagcaaagtgtgag

SEQ ID NO: 33267 - DNA, 464 bp, Homo sapiens
  misc_feature (1)...(464): n = a,t,c or g
ttggaaancnntnnnnnnnnnnnnnnnnnnnnnnnnnnnnnnnnnnnnnnnnnnnnnnnnnnnnnnnnnnnnnnnggcacgagaatctgatgactggagataacattatttaatgtgtagacagaagggtatttaagtagaaatgctcacagtctgttggaaatgtggggcaacattacagtagcaagaatgggtctacagatagaaattgggagtctctgagagagataacaacattgtgacatgtcacttaccttttagatattagccaaatgctcactgagagccaagtgtgttctgtctaggtggtgggagtacagagatgggcagggtggcagggttcttgcccaaatgtgatgtgtattcaggctccagagttgggtgggttgatgatggtggagaggcntaaagattaaccataaacaagtgagcaaatangcgcacgagataatcgtanttagtga

SEQ ID NO: 33268 - DNA, 472 bp, Homo sapiens
  misc_feature (1)...(472): n = a,t,c or g
ttgaaancctttgacatgtttgaaanccnnnnnnnnnnnnnnnnnnnnnnnnnnnnnnnnnnnnnnnnnnnnnnnnnnnnnnnnnnnnnnnnnnggcacgagccagaagattaatcttccccaaagctctaatcaattcttaaaatcatcagtccaaatcagtaagtcagtggcataataagcattataatcttaacattttcaaagaagaaaattgaaagagtgaataaagtaatttcattctgtcctaaattttattcaaagaaagaacataacacaaaacctgaaactaccagcttctttcctcaaattttacctattcattgaaactgatacagctcatccatgatatcagcatgggaaaccacatcacatattatttggaaatacataaatgagtattgttcccattgcaaaacttagagatttgcgttcctccctttcataacttaccatagttcatccagcatgg

SEQ ID NO: 33269 - DNA, 480 bp, Homo sapiens
  misc_feature (1)...(480): n = a,t,c or g
ggntgngtnnnnnatttgaaaccnnnnnnnnnnnnnnnnnnnnnnnnnnnnnnnnnnnnnnnnnnnnnnnnnnnnnnnnnnnnnnnnnnggcacgaggtgaagaggcagagaaaatcacctctcccaagaatttccaccttctgaacaagggaaatgtatcctgaagagctgtacgcagatgggaggcaacttgtttgcttgttctgctgctagagcattgatttaattagaagacaggctgtgggtggccatgtgcagacaaagaagcaccagacagagcccatttagcctgggacagtaaaaatgcctttacaagccccctccagatgtggttcatggagaatatgaagttaagcagctgacggagttcatttacactgagtcaaacaagctttaaccctagaaagcatcctgcatgtttgatggcacaggtggctgacatgcttgcaaatatgacctgtctcacctttcagtgtgtt

SEQ ID NO: 33270 - DNA, 467 bp, Homo sapiens
  misc_feature (1)...(467): n = a,t,c or g
aaaccctntgacatgntttgaaaacnnnnnnnnnnnnnnnnnnnnnnnnnnnnnnnnnnnnnnnnnnnnnnnnnnnnnnnnnnnnnnnnnnnggcacgaggagatggatgcttctctttaggaaccgggaacctctctggttagacagaggactcttctttcactgtttttgttttgtggcacaaacggcctgggatgtggatgccttgggtctgatgcaagataccctggaggcttccctggcctgtccttctcctgcccatgtcgcgtaaacattggcatggcagggacagatggccactccgggaactccttggatgtcacatttggttgcctgggttgggggtcgggtggttgcagccagtctccactgtggggaggagaggctgactgggaaatactcccatggcagtgggtaaacacaagctcacctccggaaaggctgggcgccctggtacatgtgcagg

SEQ ID NO: 33271 - DNA, 427 bp, Homo sapiens
  misc_feature (1)...(427): n = a,t,c or g
attnaatacgactcnnnnnnnnnnnnnnnnnnnnnnnnnnnnnnnnnnggcacgagcggcacgaggtagggtcccgatgatctgagtcttgccattacaaagttgcacagggaaataaaagctgttgtcacaaaaatattaaactgattatgaatacagtagtcctcatcaagcacctccctgcctcctgctagtgtcaaccctttctgacagcaggaatatccttgtaggccggcctctttgtgactgtccaatgcaaggagaaattgcagttattacaagggacacatgtttacaaaaagtctttaaaagcagtgagggaacaggggaacactgcctgaatcctgcccacaacctttggccagtggggatctggcagagagacctgttaacttttgaagaaattaacatctgcaaggataatcag

SEQ ID NO: 33272 - DNA, 479 bp, Homo sapiens
  misc_feature (1)...(479): n = a,t,c or g
agagnnntnttgaatcgttgncnnnnnnnnnnnnnnnnnnnnnnnnnnnnnnnnnnnnnnnnnnnnnnnnnnnnnnnnnnggcacgagctnnnnnnnnnnnnnnnnnnnnnnnnnnnnnnnnnnnnnnnnnnnnnnnnnnnnnnnnnnnnnnnnnnnnnnnnnnnnnnnnnnnnnnnnnnnnnnnnnnnnnnnnnnnnnnaattntnggaanancnggtaaagantggtgaaaaaaatcattgngtttgaattgccttaggattccaggtaaagctntatgagtctgttagganagganaggagcttntgtggagacaacncanaagtccntgctggagctgnggttttggatgganaattaaaananaagcggccaaaaaaactgagaagcntnngatttaatanaaantaaattgctaaggaaatgtgggggaaagcagttatnttgganaatacagagaanccaagggaacggcaa

SEQ ID NO: 33273 - DNA, 447 bp, Homo sapiens
  misc_feature (1)...(447): n = a,t,c or g
ganaccntnnnnnnnnnnnnnnnnnnnnnnnnnnnnnnnnnnnnnnnnnnnnnnnnnnnnnnnnnnnnnnnnnggcacgagcggcacgaggaacttggaagtgttggctgtcttcatggcctcaaaggcctctgccctgtgcactacagtgtagcctactcctgccctgtggtcaggtagggcatgctcagccagtagtggttctccagatgaccaatctactgccaccaggaatgctactgtggttggggaggacagtcaggaacatgatgccacctgtgcttctcaggagtctgtccctttggcccagtagttttaatttcttcactgtgttcatgttttctttcataactgtgagcatttataatagctttttaatagttgcctgctattttcagttgaacactggacattgtgaccattacattgttgagtttcagaattttg

SEQ ID NO: 33274 - DNA, 457 bp, Homo sapiens
  misc_feature (1)...(457): n = a,t,c or g
ttgnnnnnctttggannnnnnnnnnnnnnnnnnnnnnnnnnnnnnnnnnnnnnnnnnnnnnnnnnnnnnnnnnnnnnnnnnnnnnnnggcacgagacgcagatttggagcttgggagaaagggtggtgttgaagagggctttagaaataattcatagttaaaatcacaggttgaggtgacttcacctatggaagtgtaagaaattagagggaggtcaaggatagaattctgatttagacagaaaggggtgatcatcttgaaactattaatcatttattagatatctgttagacactgttttaagcatgttacagatgttatttcagattaaacctcgtgaaggtatgtctccatcttacaaatgaatgatttgaagcttaaaggataagtctttagcctccttggtcatacatctgtcttattaagatctaggcttttctcacattgctacattgcc

SEQ ID NO: 33275 - DNA, 455 bp, Homo sapiens
  misc_feature (1)...(455): n = a,t,c or g
gnanacctttgnaaacccgnnnnnnnnnnnnnnnnnnnnnnnnnnnnnnnnnnnnnnnnnnnnnnnnnnnnnnnnnnnnnnnnnnggcacgagaagagttctaaaagcagcatcaaaaaacaaacaaaacctcacccttctattctgtttgtaattttccatcccagtccttatgatggtgtcattaatatgtctgtgtcatccattaagtccatcagcttgctcagccctgtgttctggaagatgtctttgtgggtctcctctgacaggcatcggcttccttcttttatcctcactctgcctgcctttataggctcccgtacccctctagtttcttccctggccctcctgtgttctcttcagcctgggaaggaagtactgtgtggttctttgaagtcttttgttttgttctttccctttagaactctcctgacccttccccaggaataaaaaca

SEQ ID NO: 33276 - DNA, 452 bp, Homo sapiens
  misc_feature (1)...(452): n = a,t,c or g
anaccgttatgacatgattacgaatttaatannnnnnnnnnnnnnnnnnnnnnnnnnnnnnnnnnnnnnnnnnggcacgagactggatggaatatgttttcttcctaataacagagatcagcagtttgactctcactgatgtaacaggtattttaatgggcaacaattacctagtgaaacaaggaaggtgagtactatattcccccatgtcacgctgagtgtgtatagaatgttataagcaggtccccattctgtgaagcagctatccttctgggcacgcaactgaaagatgggaagaaacacaaggcggggactggttgctctggaatagggtggcattgagatgctgagtattttgagcatgatgaaggcaggaaagtaaagaaacttcaagatttcagagagcaaattatctctaatgagcaaggaatacccatattcctaggtctcag

SEQ ID NO: 33277 - DNA, 458 bp, Homo sapiens
  misc_feature (1)...(458): n = a,t,c or g
tttgnnnnctttggaanacccgnnnnnnnnnnnnnnnnnnnnnnnnnnnnnnnnnnnnnnnnnnnnnnnnnnnnnnnnnnnnnnnnnnggcacgaggatcatttatgcggttgtgattcttggatctatcgttgagagttgtatgaggtattttatatagttttatccgtcacataagttcttgctgacagtagtggacttaacagattgatggtccagggatatgtaaattgtctgttgacctaatttttagaagaaaagcagaatagtgaaggtcagctggaagatggaaaatgataacaaattgatcttcttagggagcatgtacaatataaggtgtgatgttttgtaacacagtagtttttctcagattggcacacttttctggaaagtgctatattttagcctttgtgggccacaagctctctgttgcagctactcacccctacattgtgaac

SEQ ID NO: 33278 - DNA, 444 bp, Homo sapiens
  misc_feature (1)...(444): n = a,t,c or g
annnnnnnnnnnnnnnnnnnnnnnnnnnnnnnnnnnnnnnnnnnnnnnnnnnnnnnnnnnnnnnnnnnnnnnnggcacgagcttaaaaacaactcttcccccctgcagacttttgacttgccagacatccgcaatcatgttagccagttccttgaaataaatctctgtctctctctttctttacctgtatctatacaggggtgagctaagacttttatctgtacacagaattgagggatccattactccagctatgtgctctccagtatttctcccacactctagggatctcagaggctccttttcctgggcttctcactagaaagacagggcttctcttggagttttagcttccagatctgctgttccatgtagttccgtgtgactagtactactcttgagcaaaacagcaagagaaaagaaagaaaaacaaacaaacaaatt

SEQ ID NO: 33279 - DNA, 460 bp, Homo sapiens
  misc_feature (1)...(460): n = a,t,c or g
ttgnnnnccnnnnntttgnannnnnnnnnnnnnnnnnnnnnnnnnnnnnnnnnnnnnnnnnnnnnnnnnnnnnnnnnnnnnnnnnnnnnnnnggcacgagataacttccaacaagtaagtagccagtaagtgaacaactgagatttgaacccacgtagtctggctttgaggctggtgtgctcagtcattactgtgctaaaattttgataatatatttactatgaattggcttaaggtttcacttgaaagtagcatatttatgggcaaaattaggaagtaggatgctcctggcagacccatgtatttaaaaaagtagtttcttatatgtcaagcacggtgagcatgtcatacctttaagaccccagtcatacatataaggttttctttgtagctaggaattaaaatatcggtgggcgttaaataagtgtctggcttaaagaacatcgtcttaacttatccc

SEQ ID NO: 33280 - DNA, 452 bp, Homo sapiens
  misc_feature (1)...(452): n = a,t,c or g
naccgntatgtnnnnnnnnnnnnnnnnnnnnnnnnnnnnnnnnnnnnnnnnnnnnnnnnnnnnnnnnnnnnggcacgagnnnnnnnnnnnnnnnnnnnnnnnnnnnnnnnnnnnnnnnnnnnnnnnnnnnnnnnnnnnnnnnnnnnnnnnnnnnnnnnnnnnnnnnnnnnnnnntaacagattttggcaagattgcagagaaaagggaatgtttaatatgttattggtgagaatgcaaattagttcagcccctgtggaaannnnnnnnnnnnnnnnnnnnnnnnnnnnnnnnnnnnnnnnnnnnnnnncgctcagcagtcccattactannnnnnnnnnnnnnnnnnnnnnnnnnnnnnnnnnnnnnnnnnnnnnnnnnnnnnnnnnnnnnnnnnnnnnnnnnnnnnnnnnnnnnnnnnnnnnnnnnnnnnnnnnnnnnnnnnnnnnnnnnn

SEQ ID NO: 33281 - DNA, 476 bp, Homo sapiens
  misc_feature (1)...(476): n = a,t,c or g
gnnnnnnnnnntttgnanacccnnnntttgnagnnnnnnnnnnnnnnnnnnnnnnnnnnnnnnnnnnnnnnnnnnnnnnnnnnnnnnnnnnnnnnnnnnnnnnnggcacgagattggcataccgctaccagcagagccatgctcccttctcactcttgaccatcacttactattctttcagtgttttaacttagcctgcagtctcctttttcttcgaaaactttatgatacttcaaacaacacctctgccactccctcaccctcccccacgccccaaaaagcaaactcagaaaaccgacatatagtcagttggtttatccagagtcagagaagtggcacagggaccaggggcttcatctctccagctttggcaatattttggtgactgtctagggctaattgtcattctcaaggagggtggggtgaggagccaagctttcaggactgtgctctgggtcctccatatcacctcaccc

SEQ ID NO: 33282 - DNA, 456 bp, Homo sapiens
  misc_feature (1)...(456): n = a,t,c or g
anaaccgntattttgtgatnccgaatttaatacnnnnnnnnnnnnnnnnnnnnnnnnnnnnnnnnnnnnnnnnnggcacgaggagacatatcttcattcaaccagtatttgagctaagttctgcacttagcattgtgggttcaatagtgagcagagatctcatggagttcaaggtctcatgtgaaactcttcaacactcatcaaattgccaggatgtagtcaatccacagttattcagacattggagcatataatatcatacattggagttcccacacacgtttggtcactattattatttcatttatttcaataggttnnnnnnnnnnnnnnnnnnnnnnnnnnnnnnnnnnnnnnnnnnnnnnnnnnnnnnnnnnnnnnnnnnnnnnnnnnnnnnnnnnnnnnnnnnnnnnnnnnnnnnnnnnnnnnnnnnnnnnnnnnnnnnnnntcccccac

SEQ ID NO: 33283 - DNA, 476 bp, Homo sapiens
  misc_feature (1)...(476): n = a,t,c or g
gnnnnnnnnnnnttgnanaccgttatttgagaaccgtnnnnnnnnnnnnnnnnnnnnnnnnnnnnnnnnnnnnnnnnnnnnnnnnnnnnnnnnnnnnnnnnnggcacgagaccacctgctttgcaggcaaactcccccgctggccagcgttgaaatggaagccatggaggctctgccggtgacttgggggaccagcagcagagatgaagacttggaaaactgctctcaccacctatgaaactcggggaaaccagcccagctaagtccggagtgaaggagcctctctgctttagctaaagacgactgagaagaggtgcaaggaagcgggctccaggagcaagctcaccaggcctctcagaagtcccagcaggatctcacggactgccgggtcggcgcctcctgcgcgagggagcaggttctccgcattcccatgggcaccacctgcctgcctgtcgtgccttggacccagggcccag

SEQ ID NO: 33284 - DNA, 464 bp, Homo sapiens
  misc_feature (1)...(464): n = a,t,c or g
tttgaanaccgttagtttgagaaccctaatgacatgnttactaactanatncnactcactannnggaannnggccctngaggccnagaattcggcacgagagcatgccatgttggagaactttttgcttaccgtgtgacttttctgtacgccactggggagggtgagcacttagaacttggagccgaactcttagtaactgaatacccaggactctggttaaaaatgggtttggctctaccttaaaagtcaatctgtatatctgcagacttggggagtaagtgagagagtccaagctgaagcaagcaagcaaatgacattttcacaggctgaggtataaatttgctggaggaaagcaaagctctggttgctacatgagctttccagttgggggctgtgagatttatctgaaaagagcattttcttgggttggattcttggcagcaagtgccctgctacngagcc

SEQ ID NO: 33285 - DNA, 458 bp, Homo sapiens
  misc_feature (1)...(458): n = a,t,c or g
tttgnanaccntnnnnnnnnnnnnnnnnnnnnnnnnnnnnnnnnnnnnnnnnnnnnnnnnnnnnnnnnnnnnnnnnnggcacgagaaaggttgtggccctttatgattacatgccaatgaatgcaaatgatctacagctgcggaagggtgatgaatattttatcttggaggaaagcaacttaccatggtggagagcacgagataaaaatgggcaggaaggctacattcctagtaactatgtcactgaagcagaagactccatagaaatgtatgagtggtattccaaacacatgactcggagtcaggctgagcaactgctaaagcaagaggggaaagaaggaggtttcattgtcagagactccagcaaagctggcaaatatacagtgtctgtgtttgctaaatccacaggggaccctcaaggggtgatacgtcattatgttgtgtgttccacacctcag

SEQ ID NO: 33286 - DNA, 456 bp, Homo sapiens
  misc_feature (1)...(456): n = a,t,c or g
ttgganncctttgnanaccgnnnnnnnnnnnnnnnnnnnnnnnnnnnnnnnnnnnnnnnnnnnnnnnnnnnnnnnnnnnnnnnnnnggcacgagggacagtggatatggaaatatcatttatgattatttcagatgggagatattcttggtcctggtgaattccatagcaggaatttaaaacaggactctttgttgtgtctgcttggatcacttacagcccttggtacctgcctctttggaaggcacctccggtcacatcaggagcatggatggggccccacctgcatacacatggtaagtctattacatgctcaggcttcactggcctttcatctgccaggacagggagaactgcacttactcgctcagtgaaattgtccacagagtagtccggagtcgacgcaacgtaaatgtcctcagtgacaagacagatggtggccttctgagctgctccg

SEQ ID NO: 33287 - DNA, 451 bp, Homo sapiens
  misc_feature (1)...(451): n = a,t,c or g
ttganaaccgtnnnnnnnnnnnnnnnnnnnnnnnnnnnnnnnnnnnnnnnnnnnnnnnnnnnnnnnnnnnnnnnnnggcacgagcgctgctgatagacatgtgaaagtctagcctgcagcagatgcgagtctcagatgcctccgtgggcagccggaatctagatcaacaactacactctagaataatctcagctgccagtaagccagaggggcttggagggtgaggagtccctgtgataaccaagatcaagttctaaaccagccagcaggcctcgcgaggttggctcacctttcaggctgctggtgttggaaacatgagactgtgcctctcagcccaggcagggccctgcctggggtcccacagcttccaggagccagtagggagcccagagcctggcaaggccagcaagtagggaggggatactgcttggcaggaagtcctcaggaggga

SEQ ID NO: 33288 - DNA, 447 bp, Homo sapiens
  misc_feature (1)...(447): n = a,t,c or g
tttggannnnnnnnnnnnnnnnnnnnnnnnnnnnnnnnnnnnnnnnnnnnnnnnnnnnnnnnnnnnnnnnnnnnnnnnggcacgaggagaagcagcaccatgagcttcaataccctgtcctgaaatttgcaatcccatagaagagagagaaatataaatagatcctgtccacaatgtgaagtaaagtatgataatagggatgtgtgggaggctatacaagttgcctatgacatgcgtaacaatgtcaacgctgtttggttggcagactctagaaaaagaaaatcccaatttgagagataaaaataccttcaaatgacgtgtttttcccttccatcagtcacttctcaaaatagaaggaggcaactaatgtggttaaccctgtgtttaaaattcactatttgttccttttataatattaattctaacaagtatacctaacaaaataaa

SEQ ID NO: 33289 - DNA, 451 bp, Homo sapiens
  misc_feature (1)...(451): n = a,t,c or g
tttgaaaaccctttnnnnnnnnnnnnnnnnnnnnnnnnnnnnnnnnnnnnnnnnnnnnnnnnnnnnnnnnnnnnnnnggcacgagnnnnnnnnnnnnnnnnnnnnnnnnnnnnnnnnnnnnnnnnnnnnnnnnnnnnnnnnnnnnnnnnnnnnnnnnnnnnnnnnnnnnnnnnnnnnnnnnnnnnnnnnnnnnnnnnnnnnnnnnnnnnnnncacccctgannnnnnnnnnnnnnnnnnnnnnnnnnnnnnnnnnnnnnnnnnnnnnnnnnnnnnnnnnnnnnntgctactctagatgtactctgggtgcacccccccacccccaggttttagtatacggtagtttactttatttttaactgtcatttttattggcattttcacaagttaaaaaattcttttgtttatgtaaattaatcatttattaacaccacactctaaaaaactgagc

SEQ ID NO: 33290 - DNA, 456 bp, Homo sapiens
  misc_feature (1)...(456): n = a,t,c or g
tnnnttggnnncctttgaaacccgttatgacnnnnnnnnnnnnnnnnnnnnnnnnnnnnnnnnnnnnnnnnnnnnnnnnnnnnnnnnnnggcacgagcgtctactcagcccggtggctgtcgcgcgtggaatcgcgtaagaaaagccgagtttgtggctggggagagaaggccaccgtgctgagctggatttagcgaagactggttttggggaccggagagcccaggactccctttgttggagttttgcccacgcgttgtaattaagcctcgcacaatatggttgatgataattagaagcatgctttccactgaacttcccgacaacatttgttatgcagaatgtctctgagtgagaactcggtttttgcctatgaatcttctgtgcatagcaccaatgttttactcagccttaatgaccagcggaagaaagatgtgctgtgcgatgtcaccatct

SEQ ID NO: 33291 - DNA, 450 bp, Homo sapiens
  misc_feature (1)...(450): n = a,t,c or g
ttgganaccntnnnnnnnnnnnnnnnnnnnnnnnnnnnnnnnnnnnnnnnnnnnnnnnnnnnnnnnnnnnnnnnnnggcacgagggctattacatagaaattttgtagaatctaataagataaactagaaacatgacatgttcagctgttttctctacgaataaacaaattggcgctaaaactggtcttgctatctagatttctagttatatctcagttatcttttccccacatgggatgtgaaagtaatgttatatgctttcttatgtacgtacttttgacttaggtcagtctccacactgcattaaaattactaatgagacaaattgcagttttccagaggttcatgtttccatttctccttccttggctttcctgcatttttagctccagtcaaaattctatttattatgtatcaacttttataaaatgcttggctttgaaaagtat

SEQ ID NO: 33292 - DNA, 448 bp, Homo sapiens
  misc_feature (1)...(448): n = a,t,c or g
anncctttgaataccgttatgacnnnnnnnnnnnnnnnnnnnnnnnnnnnnnnnnnnnnnnnnnnnnnnnnnnnnnnnnnnggcacgagaaaacaatgtggaggggccggatgaaacaagattagcacatggcaaagtcagggaagtggcaggggtaaggggttgctgagaaatgtctgccacggtcaatagaggcacatgttctacaaccttccctggcctctgtctctcatcgtgttagctatttttgtccttggtggaatcttggttgggattcctccatcttcacatgcttctcttcacagggatcatcctgtgggctggggagcctgggatgagagctgggacagaagctgagttgggatgggaagtgtggctccctgctgctctccctatgagtgggcgatgccccagagctctgcccctgagcagtgcccctgagctatgg

SEQ ID NO: 33293 - DNA, 453 bp, Homo sapiens
  misc_feature (1)...(453): n = a,t,c or g
tttgaannnnnnnnnnnnnnnnnnnnnnnnnnnnnnnnnnnnnnnnnnnnnnnnnnnnnnnnnnnnnnnnnnnnnnnnggcacgaggttagggacttaagtggaaggaaggtttgtccactcactcaaggtggaaaatcatagatgccgatagaccgatgggttgcatatgtatatggtgatatcctcaaaaacataacgtggaattctaaaaaacattcaggtatctcacagtaaagcatgagagaacagatgattaaatggcaagcgtaagccctaatatatcactaatttaaatgtaaatggcctaaacacaccaattagaagacagaggttcgccacgtggatacaaaacatgacccaactgtatgatgtctactatatgctgaagctcacttcaaacataataacataggcacattgaaagtaaaaggacggcaaaagagtatcatgt

SEQ ID NO: 33294 - DNA, 454 bp, Homo sapiens
  misc_feature (1)...(454): n = a,t,c or g
ttgaannncctttganacccgnnnnnnnnnnnnnnnnnnnnnnnnnnnnnnnnnnnnnnnnnnnnnnnnnnnnnnnnnnnnnnnnnnggcacgaggactgtgtgtttctgtttttcctcttcagatttcttagaccaaatagaggaaatccactggaggcttacctaacaagacgtattgatgaatgtagaatcttaaatgaaaaagaagtcagtggatgtggcttcctgtactgtcagcttggaccaaaaataaagcgagccctcgccgcaggggtttggctcagccctgcgcctgtggcagatgttgttttccatggctttgcttgaggagtacacttctctgggcaaaagttcctgaggcctttggagacttttaaagccttttttttttctgtanctttnattgtttttaanaaaagnggngtcacccttacttgcattaaaaaaaaaag

SEQ ID NO: 33295 - DNA, 447 bp, Homo sapiens
  misc_feature (1)...(447): n = a,t,c or g
nnctttgaanaccgttatgacnnnnnnnnnnnnnnnnnnnnnnnnnnnnnnnnnnnnnnnnnnnnnnnnnnnnnnnnnnggcacgagcaacaaattaatgtttttgcagtacaaactaaagcaagctcatcctccaaaaaatttctctggctgctgagatcaagttacgaaaaaaacaaaaaagnnnnnnnnnnnnnnnnnnnnnnnnnnnnnnnnnnnnnnnnnnnnnnnnnnnnnnnnnnnnnnnnnnnnnnnnnnnnnnnnnnnnnnnnnnnnnnnnnnnnnnnnnnnnnnnnnnnnnnnnnnnnnnnnnnnnnggtgnnnnnnnnnnnnnnnnnnnnnnnnnnnnnnnnnnnnnnnnnnnnnnnnnnnnnnnnnnnnnnnnnnnnnnnnnnnnnnnnnnnnnnnnnnnnnnnnnnnnnnnnnnnnnnnnnnnnnnnnnnnnnn

SEQ ID NO: 33296 - DNA, 451 bp, Homo sapiens
  misc_feature (1)...(451): n = a,t,c or g
ttgganncctttgaaaaccgttatgacnnnnnnnnnnnnnnnnnnnnnnnnnnnnnnnnnnnnnnnnnnnnnnnnnnnnnnnnnnggcacgagggacaaaggaggcagacggcctcctttgtaattctgccgcccggtggcgaagggttttaagccaggcttggctgctgacgggagggggaaggggcgtactctccctagctttctggtctctagggcagctagataaacggaaagtctcctgggaggaataaaggacgcttagccggcccttatattccagatttggaacttcgaaaagagtacgtactgattttccaaagggttttttttttttnnnnnnnaancgttantanggacttngggnntnattttgnnaccaaaaaagngggngattnnncaaatnggantggnaaanggcnntnttnnaannaggncggttnggccccag

SEQ ID NO: 33297 - DNA, 447 bp, Homo sapiens
  misc_feature (1)...(447): n = a,t,c or g
tttgnnnnnnnnnnnnnnnnnnnnnnnnnnnnnnnnnnnnnnnnnnnnnnnnnnnnnnnnnnnnnnnnnnnnnnnnnggcacgagaaaagaagaagaagaacaagaagcataatacctagaaaccctgtagaggggaagttaccggaaatgacaattgttcacctctagcttggaaacatgctgaatggccagaacaccctcccggcaccgcccctccatattcttgttttatgtagagttgcctcatttcctccaaggagctccctttagaaaagatcaaaagcaaactagtccaaaaacaccttcagagaagaaagcaccccctacgaccaccctacagcaatggctcctctcacaagaaagccctgcagagctgtgggcagaaacggccacatcnnnnnnnnnnnnnnnnnnnnnnnnnnnnnnnnnnnnnnnnnnnnnnnnnn

SEQ ID NO: 33298 - DNA, 443 bp, Homo sapiens
  misc_feature (1)...(443): n = a,t,c or g
cgtnnnnnnnnnnnnnnnnnnnnnnnnnnnnnnnnnnnnnnnnnnnnnnnnnnnnnnnnnnnnnnnnnggcacgagctttctcttacacacatctgtatgatacactaagacctttttccaaattgcacagagagagaaaaagggattgagttgcttccatatttttgctgctcattgtcctcttttcagtactattttattttcagaattttttctagccacacttttcttctcaagcacagcaggtagcctttgcatagctatgagagtgacaggattcttgtcaaccagaccatagacgcctacccagccaggtgtaagaaggtccgctgtgggcagagaagttgatgannnnnnnnnnnnnnnnnnnnnnnnnnnnnnnnnnnnnnnnnnnnnnnnnnnnnnnnnnnnnnnnnnnnnnnnnnnnnnnnnnnnnnnnnnn

SEQ ID NO: 33299 - DNA, 447 bp, Homo sapiens
  misc_feature (1)...(447): n = a,t,c or g
tttganaccgtnnnnnnnnnnnnnnnnnnnnnnnnnnnnnnnnnnnnnnnnnnnnnnnnnnnnnnnnnnnnnnnnnggcacgagaataattacaacgaaggaaaaaaaaaggaaagtcctccaaggtcaggatggcatgggaacaggcctagcagggacacaagcctggagtaaggcaggaaaagagccaaggctgactacagcccaccaaccacaatcttcttccctaagaccccaggattgtccccggcccatccccaaaagaagaaaggggctatgtggaaaggtgaggccctctagatgcccctccctgtgacggctggctcaaaaaagactaagtcaggttttttattgaagcctcccttagaagaaagtgtagtagggattccttgtctcctctaccttctccctgacttgttgatatctgaaactccttttaataggagg

SEQ ID NO: 33300 - DNA, 482 bp, Homo sapiens
  misc_feature (1)...(482): n = a,t,c or g
ttggncntttgataccnctatgacnnnnnnnnnnnnnnnnnnnnnnnnnnnnnnnnnnnnnnnnnnnnnnnnnnnnnnnnnnggcacgaggagaaattctgaagtcacaggaagtaaaaaggcccaaggtaaggaatttgtgcatgagctgtagtgaatgtcaagagttagctcctatagcagttctacccctgaacttaatagtggtagggtgaccaacttgtctcagtttgcctgggactttgttaggtttagctgtgaaagtcccaaatccctgggccccctcagtctgggcaaactgagataatgggtcgccctacaagagagtgactcataagtcattaggtcaacttccctcattactgtactcagcccccaaagtcggatggagcagcaagctccttagagggtagggagtgacccaggctctttgaagtaggtaaagcaggacctttgaggtctccattcaattaacagcaaaa

SEQ ID NO: 33301 - DNA, 483 bp, Homo sapiens
  misc_feature (1)...(483): n = a,t,c or g
ttggaanatttggagnnnnnnnnnnnnnnnnnnnnnnnnnnnnnnnnnnnnnnnnnnnnnnnnnnnnnnnnnnnnnnnnnnnnnnnggcacgagggtgattaatgagattgagcacctcttcttacatttattggcaatttggatagtctgtttcgttacattcaattcaagtcttacctctttttcatttggactatctgtcgtctcattgattagaggaattctttattctggagattacccctttattggatatatgcttttcagataccttctcccactctggggcttgcctgttctgtcttaatggtgtctagtgagagcacaagctcttaatttcagtgaaatccagattattagtcttttcctttacagttagacattttaagtcctgttcaataaatctttgtcctacctcaaagtcatgaagatattctcctatgttgtctgctagacgctttattttttactctttacacata

SEQ ID NO: 33302 - DNA, 477 bp, Homo sapiens
  misc_feature (1)...(477): n = a,t,c or g
atttgnanaccnnnnnnnnnnnnnnnnnnnnnnnnnnnnnnnnnnnnnnnnnnnnnnnnnnnnnnnnnnnnnnnnnnnggcacgagaagaaccacctatgacctgtgctgttttttctgtggttactggctcatgtcacataaattcttttaggattcaaacatgtttgtgatattactcagtatttacatcttgcttttactgcagcatgatagaaaaattaaccacaggtatatcataacaaaaagaacatgagttaccattttcacaaagttcagatatatttaaattagcctatttaannnnnnnnnnnnnnnnnnnnnnnnnnnnnnnnnnnnnnnnnnnnnnnnnnnnnnnnnnnnnnnnnnnnnnnnnnnnnnnnnnnnnnnnnnnnnnnnnnnnnnnnnnnnnnnnnnnnnnnnnnnnnnnnnnnnnnnnnnnnnnnnnnnnnnnnnnnnnnnnnnnnnnnnnnnnnnn

SEQ ID NO: 33303 - DNA, 549 bp, Homo sapiens
  misc_feature (1)...(549): n = a,t,c or g
nnnaatntnannnggncntgnnnttctannngactgtannnanncgancctgcannatnagngnnttcctccccttgacacttnagacngatacgaattatacgactcnnnnnnnnnnnnnnnnnnnnnnnnnnnnnnnnnnggcacgagaggtccctcccgctcccggccgtgtcctggttctacttgccggcagggatctaagttggaattcctttccaacatggaatcctgagtgtccaccatgtcaaaattgtgtcaaaattcgtctgtatgcatttttcttggtagaagggtccccaaaagtcaccacattctcagagacttctgatccctaaaactttagatcaacagacaataaaaaggtcccagttgtgacttagtccccatggcagtacttttgaacatttgaaggtggagaattgctactgaggactttgttctgtggatgaaacntcgaatgaggattgatggtgagagntggattgttgntgatgaggaagtgcccttggaatctaatggggttcttcacgggaggggggaagtcag

SEQ ID NO: 33304 - DNA, 476 bp, Homo sapiens
  misc_feature (1)...(476): n = a,t,c or g
tttggannnnnnnnnnnnnnnnnnnnnnnnnnnnnnnnnnnnnnnnnnnnnnnnnnnnnnnnnnnnnnnnnnnnnnnnggcacgaggagagctagcaccatgacagtttgcaaagtgacacggctcagaaacaggaggcctcaccagactagccattctcatttttattcttttttattctcatcctcagcagttgttattgtgaaatgtccccattatataaaagagtgtgaaatttgtgccatttcaagaataataacacaggccctagagtacctaccccaggttaagagacaagactgctaacacttgccattcctccgtctttggcagcggtgcctatggtctagaaatttgtgttaataatagcctggttgnnnnnnnnnnnnnnnnnnnnnnnnnnnnnnnnnnnnnnnnnnnnnnnnnnnnnnnnnnnnnnnnnnnnnnnnnnnnnnnnnnnnnnnnnnnnnnnntga

SEQ ID NO: 33305 - DNA, 484 bp, Homo sapiens
  misc_feature (1)...(484): n = a,t,c or g
tttgnccctttgaataccnnnnnnnnnnnnnnnnnnnnnnnnnnnnnnnnnnnnnnnnnnnnnnnnnnnnnnnnnnnnnnnnnnnggcacgagtgacctcctgtgtctctgtccctatgccctgggcatagcggataccacaagcgagagagaagcttgtggtctcagcttcttccctgcgcccagccactggtgtgattcttacgaggattaagtgaagtaaacctaacgacactcttagaaatgccagcaccatttacatgccccatcaatgatacttgcaactgttgatgttgctgttgcagtgcagtgcatgccacaaggcaacatgacacagttgcagaaatttctgaatggtggtgatcccccgtggcctaattgtgagggacagagaaccatgactatatttttgataatagattaacaatgctttgttactttctgtttgctagaanaataattgnttttctatgtacgaagtact

SEQ ID NO: 33306 - DNA, 479 bp, Homo sapiens
  misc_feature (1)...(479): n = a,t,c or g
gnanacctnnnnnnnnnnnnnnnnnnnnnnnnnnnnnnnnnnnnnnnnnnnnnnnnnnnnnnnnnnnnnnnnnnggcacgagagcctaaaacttacttttgcttcttttagtcctgaagtaagacagaagggagttaatcttgtcctactatcattttttaaaaaattaagtttcataatgatgttaagtttatacctcttaagactgagaannnnnnnnnnnnnnnnnnnnnnnnnnnnnnnnnnnnnnnnnnnnnnnnnnnnnnnnnnnnnnnnnnnnnnnnnnnnnnnnnnnnnnnnnnnnnnnnnnnnnnnnnnnnnnnnnnnnnnnnnnnnnnnnnnnnnnnnnnnnnnnnnnnnnnnnnnnnnnnnnnnnnnnnnnnnnnnnnnnnnnnnnnnnnnnnnnnnnnnnnnnnnnnnnnnnnnnnnnnnnnnnnnnnnnnnnnnnnnnnnnnnttgcaccacttcactccagcctg

SEQ ID NO: 33307 - DNA, 476 bp, Homo sapiens
  misc_feature (1)...(476): n = a,t,c or g
ttgnaanctcttgacnnnnnnnnnnnnnnnnnnnnnnnnnnnnnnnnnnnnnnnnnnnnnnnnnnnnnnnnnnggcacgagattttatgcctccatagcaatggaataagagtgtgctgctatttggtgaatctgactaatgtagatcctcactttggtgagtgagccaaattttggctaatttgtaggatctgggtccagttcagcaactctccattgtgctttggcaacatgggtatagccctaaaatgattttcattttcacctgaaatagaaaaaacagtacttgtataaccagatgtttggctataatgtccttttcacaagttattttctggagtattccccctccacccccaaaacactttttctaattaaagtaatacctatttagaatagaacttacgaaaaatatagatgaggctaaagaaatcaatattaaaaaaaatcaaaatacagccaggcatgatggcttg

SEQ ID NO: 33308 - DNA, 498 bp, Homo sapiens
  misc_feature (1)...(498): n = a,t,c or g
gccgccctcccttccccctttgacacccctatgacnnnnnnnnnnnnnnnnnnnnnnnnnnnnnnnnnnnnnnnnnnnnnnnnnnnnnnnnnnggcacgagcttctagccaaaatggagtaaataaacgagttgttttcttgtctgcagcaactaaaataaaaacacaaaaacaaaacaggcacaatatgtgaaacaaccgttttcaaagcaccagacgtcaggcagtgaaggacggtgattcctgagaaatgtgaaacaaatgaggtcagcctatgattgccctaccctctgcctgagggagtttccagaccatgtaaggctgaggtaactgaggtagagccagggagacttgctgagttgaggaatagacctgggagttcacggagaacaaagtagtgagagttcgcaaagtactgggcagtatcctggagcggagagagccggacacagagagaaccctcgccatctatggaggagcttctagntgtttgggcaa

SEQ ID NO: 33309 - DNA, 482 bp, Homo sapiens
  misc_feature (1)...(482): n = a,t,c or g
tttgnanacctnnnnnnnnnnnnnnnnnnnnnnnnnnnnnnnnnnnnnnnnnnnnnnnnnnnnnnnnnnnnnnnnnnggcacgagtattaattcttaacaaatgtaccaggaaatgttaaaacattaggggaaactgcacaaaggatgtacaggaacttcataatatttttgcaacttttctataaatctaaaatttatttcaaaataaaatgtttatttaaaaaaaaagcccacctcataacaagataaattcaagaagaattaaaaagatatgtaacaatgaaattgcaaacattctagggaagtgtactaaatatgaatttactatatcagtgggaaagaacgtattaggcataaattaaatataaaatcaaagtgtaaataccaacaaatttacttaaaatataactgacagtaaactggcagaaacaaaatttaaaggtaaattatggattggaaaatatttacagtttatgtgaca

SEQ ID NO: 33310 - DNA, 478 bp, Homo sapiens
  misc_feature (1)...(478): n = a,t,c or g
catttgannnnnnnnnnnnnnnnnnnnnnnnnnnnnnnnnnnnnnnnnnnnnnnnnnnnnnnnnnnnnnnnnnnnnnnnggcacgagcttgacaatggctttaaaagtgtaccatgatgcccttccactgcaaattacagggcactcagctatttttcacaaaatcatgatacttcaataactatgttgtttttctttagtggagctactattgagcctcacagatgattgacacatatttccctgcaaattaacatcacttaggacatacttatctcagagaaaacggcccagaagcatattggggtgaagggaggctaaggccccagagctcttctgggcatgagatttctttctcagggggtgcttatgattggctgcttgtcccaagatgctaatggaggcagggaaggctcactgctccagcccatggggcggagcaaggccagtccctgttgcttcgggttccatttatggg

SEQ ID NO: 33311 - DNA, 480 bp, Homo sapiens
  misc_feature (1)...(480): n = a,t,c or g
ccctttgnataccnnnnnnnnnnnnnnnnnnnnnnnnnnnnnnnnnnnnnnnnnnnnnnnnnnnnnnnnnnnnnnnnnnnggcacgagggagctgccttcttccccatgtgacttgcaaagagtctcaggcaagaaaccagggcttcaaactgctagttcccatggagggtagttccctcgtgtggagcacttgtgttaggatcactgattatctgacaaaggctggtgcagaaaaaaaattgtaggcccaagtgtcaagaaccacaccagattggagatagaatagaatagctgaaattatgtcagtggtgaaatgtcactccattgacccaccgaaaaaagaaaagaaatctgtttctaccaaacatttccagaaacgtatttatagcatgaagaaacacacatgggtagtgtgacctgtttggatgtgattacttaaaaatggaatgctctgaataggcactctctacattaaaggg

SEQ ID NO: 33312 - DNA, 482 bp, Homo sapiens
  misc_feature (1)...(482): n = a,t,c or g
tttgganaccttgnnnnnnnnnnnnnnnnnnnnnnnnnnnnnnnnnnnnnnnnnnnnnnnnnnnnnnnnnnnnnnnnnggcacgagggacgagggcgagggcacggccgggtcctggctggccaaacgaggctcgcggaagcagcagccgccgcctgaccgcagatatggaagaaagtagcagtgttgccatgttggtgccagatattggggaacaggaagctatactgactgctgaaagtatcatcagtccttcattggaaattgatgaacaaagaaaaactaaaccagatccattaatccatgttatccagaagttaagcaagatagtggaaaatgaaaagtcacaaaaatgtcttttaattgggaagaaacgcccacgttcaagtgctgcaacacactctcttgaaacccaagaactttgtgagattccggctaaagtaatccagtcacctgctgctgatactanaagggctnagatgt

SEQ ID NO: 33313 - DNA, 469 bp, Homo sapiens
  misc_feature (1)...(469): n = a,t,c or g
tttgnananccgttatgacatgacnnnnnnnnnnnnnnnnnnnnnnnnnnnnnnnnnnnnnnnnnnnnnnnnnnnnngggacgagtgacaatgatgtcattatctcaaggaaagccaattttagctatttctcagttgaggggtcttaggaggaggtcgcatattcattcactacttatacccagggatctgaaatgaaccgcagcattggttctcaggacggcggtttggttttttcatcccggcagtctttgacactttgggacactgtagcccagtgtgtgagttggttaagtcttttaagagaagaaagctatttctggcatgtcctttcttcctcaatacaataggatataacgaaaaagaacacatagatttttttttttttnancctgaagggganccntgncnttacccaggccnttttataaatggggaanctgaggtttgaaaacagagtanggnttgt

SEQ ID NO: 33314 - DNA, 475 bp, Homo sapiens
  misc_feature (1)...(475): n = a,t,c or g
gnnngnnnntttgataccgctatttgangatccntaannnnnnnnnnnnnnnnnnnnnnnnnnnnnnnnnnnnnnnnnnnnnnnnggcacgaggcagcttaaaatggcatacacttatgttcttacagtttttgtgggtccaggagtccagacatagcttactgaggtcctggcttcaaccatctgaaacaaacagctttctcaatgtcttcctcaaggctgcaatcaaagtagtagccatggcttaggtctcatctgaaggctcaagtggggatctgcttccaagttcatgtaattgttgtcaggagtcaacttgtggcctcacttactctttggctgttggccaagtaaaggtcacccttggtaccttgccatgaggatgtctgcaacatggctgcttgcttgcaagtgtcgtttgtttgttttggtttgtttaaaaaaaagaaagaaaagaaaacatgcaagtggagaagca

SEQ ID NO: 33315 - DNA, 458 bp, Homo sapiens
  misc_feature (1)...(458): n = a,t,c or g
ntttggannnnnnnnnnnnnnnnnnnnnnnnnnnnnnnnnnnnnnnnnnnnnnnnnnnnnnnnnnnnnnnnnnnnnnnnggcacgagaaaatacaaaatcccttcacagactcaagtttccccacacccaaaaggctccgcgacagcatttccaggtataggggcaagcttctgtagcctccagcaaccacagaggtgcccagatgccaatgacaccctgactagagtgagcatgtcctctctgctctcagagtcctctgtcattggacccctcccaactgctgtggacacttgggctgtgtgctgcctactcccaggtgttaagttactggtaggacccacggctgtgtgtttattgcacaatttggtgaatcaaaggctgacttcctggtgagcaccccctagcagggtgagatatggacctttctggagtctgttttacaagaagtgtttactgg

SEQ ID NO: 33316 - DNA, 455 bp, Homo sapiens
  misc_feature (1)...(455): n = a,t,c or g
anaccgcttgtnnnnnnnnnnnnnnnnnnnnnnnnnnnnnnnnnnnnnnnnnnnnnnnnnnnnnnnnnnnnggcacgagcggcacgagatttccagaaacttcctttttgacttattatatagaagtacattgtttaacttccagatgtttggagatttttcttgttatctcttaattacttactttagtttaatttcattataatcagagagcataannnnnnnnnnnnnnnnnnnnnnnnnnnnnnnnnnnnnnnnnnnnnnnnnnnnnnnnnnnnnnnnnnnnnnnnnnnnnnnnnnnnnnnnnnnnnnnnnnnnnnnnnnnnnnnnnnnnnnnnnnnnnnnnnnnnnnnnnnnnnnnnnnnnnnnnnnnnnnnnnnnnnnnnnnnnnnnnnnnnnnnnnnnnnnnnnnnnnnnnnnnnnnnnnnnnnnnnnnnnnnnnnnnnnnnnnnnnn

SEQ ID NO: 33317 - DNA, 457 bp, Homo sapiens
  misc_feature (1)...(457): n = a,t,c or g
ttganaccnnttntnnnnnnnnnnnnnnnnnnnnnnnnnnnnnnnnnnnnnnnnnnnnnnnnnnnnnnnnnnnnggcacgagaggagtcttgaggattctggggggtgttcattgtgcagatacgttaggtatttcattatggaaagaactgaagcgtttctcagggaaggaaagaagggagataggagttcccgtgaatagaaaggatcgcgtttgaagcaagagggagtgctaaatagtagagaagatgcagggaatgcataatagaatagacagatgtagtataattaataaatattggcctaagtactgaagagttattccagatgggccgggatggcctagttccgaacctgtgtgggctgttcagtagatgacatctggatagagggaggaatcagcagcttggaaattcaagcacgtgatctggcgggatgggcgtttgcctaacgtatt
